United States Patent Application Publication US 2024/0327476 A1 - sequence listing, part 125

SEQ ID NO: 237596 - DNA, 459 bp, synthetic construct
  misc_feature 1..459: note = Description of Artificial Sequence: Synthetic coding sequence
  source 1..459: mol_type = other DNA
atgggcaccccgcaaaaggatgtgatcatcaaaagcgacgcccctgataccttgctccttgagaaacatgcagactacatcgcttcctacggcagtaaaaaagatgactacgagtattgtatgagcgaatacttacgcatgtccggcatatattgggggctgaccgtgatggacttaatgggccagcttcataggatgaatagagaagagattctcgcttttattaaatcttgtcaacatgaatgcggcggtattagcgcatccattgggcacgacccccatctgctgtatactttatccgcagttcagattctcacattgtatgactctatcaatgttatcgacgtgaacaaagtagtggaatacgttaagggcttgcagaaagaagacggctccttcgccggagacatttggggcaacgtgagattcagccctttctaccctaagtaccagtactag

SEQ ID NO: 237597 - DNA, 474 bp, synthetic construct
  misc_feature 1..474: note = Description of Artificial Sequence: Synthetic coding sequence
  source 1..474: mol_type = other DNA
atgaacttcgatggtggtttcggatgtcgaccaggatccgaaagtcatgccggtcagatctactgctgcactggctttctagccattacatctcaactgcatcaagtcaactctgatctcctgggttggtggctgtgcgaaaggcagctacccagcgggggtctgaatggtagaccagagaagctccccgacgtgtgctacagctggtgggtcctcgccagtctgaaaatcatcggtcggttacactggattgatcgcgagaagctgaggaacttcattttagcctgtcaggatgaggagaccggcggattcgctgatcgcccaggggacatggttgacccattccatacactctttggaatcgcgggtctgtcactgctcggcgaagagcagatcaagccggtaaatcccgtgttctgtatgcccgaagaagttctgcagagggtgaacgtccaacccgaacttgtgtcttag

SEQ ID NO: 237598 - DNA, 1476 bp, synthetic construct
  misc_feature 1..1476: note = Description of Artificial Sequence: Synthetic coding sequence
  source 1..1476: mol_type = other DNA
atgtcattgaaatccgaaaggcgtgggatccacgtggaccagagtgacctgctttgtaagaagggatgcgggtattatggcaaccctgcatggcagggattctgttctaaatgttggcgggaagaataccataaagcccgtcagaagcagatccaagaagactgggagttagccgagaggctgcaaagagaagaggaagaggcgttcgcttccagccagagcagtcagggcgctcagtccctgacattctctaagttcgaggagaaaaaaactaacgagaaaaccaggaaggtgaccacagtaaagaagttcttctctgccagctcccgtgtgggaagcaaaaaggagatacaagaagccaaggctcctagtccgtctatcaatcgccagacctctattgaaactgacagggtgtccaaggaatttatagagtttctcaagacctttcacaagactggtcaggagatctataagcagaccaagctcttcctggagggcatgcactacaagcgcgatctgtctatagaggagcaaagcgagtgcgcacaggacttctaccataacgtagccgagaggatgcaaacccggggtaaggtgcctcctgaacgagtggaaaagatcatggatcagattgagaagtatatcatgacgcgcctctataaatacgtcttttgtcctgagaccacagatgacgagaagaaggacctggccatccagaagaggatcagggcgttacgttgggtcacaccacagatgctttgcgtccccgttaatgaagatatcccagaggtctcggatatggtggtgaaggcaatcaccgacatcattgagatggacagtaagcgcgtgccaagggataagttagcttgcatcacgaaatgcagcaagcatatcttcaatgctattaagattacaaaaaatgagcccgcttcagccgacgacttcttgcctacgctgatttatatcgtactgaaagggaaccctccccgactgcagagcaatatccagtatattacaagattctgtaacccaagtaggttgatgactggcgaggacggctattacttcacgaatctctgttgtgcagtcgcattcatcgaaaagctggacgcacagagcctgaatctgtcccaggaggattttgataggtacatgtcgggccaaaccagtcctcggaagcaggaggcagagtcttggagcccagacgcgtgcttgggtgtgaagcagatgtacaaaaacttggacctcctttcacagctgaacgaaaggcaagagagaatcatgaatgaggccaagaagttagagaaggacttgattgattggacagatggaattgccagggaggtgcaggacattgttgaaaagtacccattagaaattaagcctccaaaccaaccgttagcggcaattgatagtgagaatgtcgaaaatgacaagcttccgccacccctgcagccccaagtctacgcagggtag

SEQ ID NO: 237599 - DNA, 1518 bp, synthetic construct
  misc_feature 1..1518: note = Description of Artificial Sequence: Synthetic coding sequence
  source 1..1518: mol_type = other DNA
atgatggcttcttcttaccatgaggtggtctcaaggaagaagatgagccttaaaagcgagcgacgcggaatccatgtagatcagtctgacctgctgtgcaaaaaaggctgcgggtactatgggaatcctgcctggcagggattttgctctaagtgctggcgggaggaatatcacaaagccaggcagaaacagatccaggaggactgggagctggccgaacggttgcagcgggaagaagaggaggccttcgccagttcccagagttcccaaggagcccaatccttgaccttctccaaatttgaggagaagaagaccaatgagaagacccggaaggtgacaacggtaaaaaagtttttcagcgcctcctcaagagtaggcagcaagaaggaaatccaggaggctaaggcgccttctccaagtatcaatcgtcagacttccattgagaccgacagggtatcaaaggagtttatagagtttctgaaaacatttcataagacagggcaggaaatctacaaacaaactaagttatttctcgaaggaatgcactataagagggatctctctatagaggagcaatcagaatgtgcgcaggatttttatcataatgtagccgaacgcatgcagacacgtggcaaagtgcctccggaacgtgtggaaaaaattatggaccagattgagaagtacattatgacacgactgtataaatatgttttctgccccgaaactaccgacgacgagaagaaggacctggccatccagaaaaggatcagagcactacgatgggtgacaccacaaatgctgtgcgtgccagtaaatgaagacatccccgaagtgagcgatatggttgttaaagccatcacagacatcatcgaaatggatagtaaacgtgttccgagagacaagcttgcctgtattacaaagtgcagcaaacatatttttaatgccatcaaaatcactaagaatgaacccgcttctgctgacgactttttgccaacactgatatacattgtgctgaaaggcaaccctcccaggttgcagagcaacattcagtatatcacccggttttgcaacccaagcaggctgatgactggcgaagatggatattactttactaatctctgctgtgctgttgctttcatagagaaacttgatgcccagtcacttaacctaagtcaggaggactttgacagatacatgagtggccagacatcacccaggaagcaggaagccgagtcttggagccctgacgcctgcctgggcgttaaacaaatgtacaaaaatcttgacctactgtctcagttgaacgagagacaggagaggatcatgaacgaagcgaagaaactagagaaggacttaattgattggacagatggcatcgctagagaggtgcaggacatcgtggagaagtaccctctggagattaaacccccaaaccagcccctcgcagctattgattccgaaaacgttgaaaatgacaagcttcccccaccgctccagccgcaagtgtatgccggatag

SEQ ID NO: 237600 - DNA, 138 bp, synthetic construct
  misc_feature 1..138: note = Description of Artificial Sequence: Synthetic coding sequence
  source 1..138: mol_type = other DNA
atgtccctgaagtcggaaagacgcggaattcacgtagaccagtcagacctgctgtgcaagaaggggtgtggatattatggtaatcccgcatggcaaggattctgttccaagtgctggcgcgaggaataccacaagtag

SEQ ID NO: 237601 - DNA, 1476 bp, synthetic construct
  misc_feature 1..1476: note = Description of Artificial Sequence: Synthetic coding sequence
  source 1..1476: mol_type = other DNA
atgtctcttaaatcggagaggcggggtatccatgtggatcagagtgacctcctctgcaagaagggctgcggatactacggcaatccggcttggcaagggttctgcagcaagtgctggcgggaggagtaccacaaggccaggcaaaaacagatccaggaggactgggagctcgctgagaggctccaaagggaggaggaagaagcctttgcaagcagccagtcctcccagggagcccagagcctgactttttctaagttcgaggagaagaaaacaaatgagaaaacaagaaaggtcaccacggtgaaaaagttcttttcggcaagttcccgagttgggtccaagaaagagatccaggaagcaaaagccccttcccccagtattaataggcaaaccagcattgaaacagatcgcgtgtccaaagaattcatcgagttccttaagacttttcacaagaccgggcaagagatttacaagcaaaccaagctttttctggaggggatgcactacaagagggatctgagcatcgaggagcaatcagagtgcgcccaagacttctaccacaacgttgccgaaaggatgcaaacaagagggaaggtgccacctgaaagagtagagaagatcatggatcaaattgagaaatatattatgacgcgactttacaagtatgtgttctgccccgagaccaccgacgacgagaaaaaggatcttgccatccagaagcggatacgcgctctacgctgggtaacgccccagatgctctgcgtccctgtcaacgaggatataccagaggtgtccgatatggtcgtcaaggctatcactgatattattgagatggatagcaagcgcgtgcccagagacaaactggcatgcattaccaagtgttcaaaacatatattcaacgctataaaaatcacaaaaaacgagccagcatcagcagacgatttcctgcccacgctgatttatattgtcttgaaggggaatcccccacgattgcagagcaatattcagtatattactcggttctgtaacccgtctcggctcatgaccggagaagacggttattattttacgaacctgtgctgtgcagtagcattcatagaaaagcttgacgcgcaatcactaaatttatctcaagaagatttcgatcgttatatgtcaggacagacctctcctcggaagcaagaagcagagagctggtcccccgacgcttgtttaggcgtgaagcagatgtataagaatctggacttgctgtctcaactaaacgaacgacaggagcgcattatgaatgaggctaagaagctcgaaaaggatcttatcgactggactgacggaatcgcccgagaagtccaggatattgtcgagaagtaccccctcgagatcaagcccccaaaccagccacttgcagccattgactcggaaaacgtggagaatgacaaactccctcctccactgcagccacaggtgtacgcaggctag

SEQ ID NO: 237602 - DNA, 372 bp, synthetic construct
  misc_feature 1..372: note = Description of Artificial Sequence: Synthetic coding sequence
  source 1..372: mol_type = other DNA
atggaaccagcggagcaaccctccgagttggtttcagccgaaggccgtaaccggaaggccgttctttgtcagaggtgcggatctagagtgctgcagccgggtaccgccctcttcagccggaggcagctgtttcttcctagtatgcgtaagaagccagctctgagcgacggctcaaacccagacggggacctacttcaggaacattggctggtcgaggatatgttcatcttcgaaaatgtaggcttcactaaggacgtgggaaatattaaattcctcgtgtgcgctgactgcgagattggcccaattggatggcattgcctggacgataagaactccttctatgtagctctggaacgagtgtctcacgagtag

SEQ ID NO: 237603 - DNA, 1206 bp, synthetic construct
  misc_feature 1..1206: note = Description of Artificial Sequence: Synthetic coding sequence
  source 1..1206: mol_type = other DNA
atggaaccgcgacgtgccgctccgggagtccccggttggggatcccgtgaggctgcgggtagtgccagcgccgctgagttagtgtaccatctcgctggagcactggggacggagctccaggacctggcccgaagattcggtcctgaagctgccgctggtctggtcccgctggtggtgagggcgctggagctgttggaacaagctgctgtgggtccagctcctgactccctgcaggtgagtgcccagcctgcagagcaggagctgcgtcggctgagagaagagaacgaacggctccgacgagaactgcgcgcagggccacaagaggagcgcgctttgttgaggcagctgaaagaagtaaccgaccggcagagagatgagctgagggcacacaacagggacctgaggcaacgcggtcaagaaacagaggcgcttcaggaacaactgcagcgtctgctgctggttaatgccgaacttcgccataaactggccgctatgcagactcagcttagggccgctcaggaccgagaacgcgagcgccaacagcccggagaagctgcaacccctcaggccaaggaacgggcacgaggacaagcgggaaggccgggacaccagcacgggcaggagccggagtgggccaccgccggtgccggagcgccaggaaatcccgaggatcccgctgaggccgcacagcagctgggaagaccttccgaagcaggccaatgccgattctcacgggaggagttcgagcagatactacaggaaaggaacgagctaaaggcaaaagtatttctattgaaggaggagctcgcctattttcagagagagctcctgacagatcatcgggtacccggactcttgctcgaggcgatgaaagtggcagtgaggaagcagcgaaagaagatcaaagctaaaatgctgggaacacctgaagaggccgaatcttccgaagatgaggctggaccatggattctcctgagtgacgacaagggcgaccacccgccacctcctgagagcaagattcagtctttctttggtctgtggtataggggcaaggcagaaagctctgaggatgagactagttcccccgctccctctaagttaggcggagaggaagaggcccaacctcagtccccagctcccgatccaccctgttccgccctgcatgagcacctgtgtctgggagcgtctgcagcacccgaggcttag

SEQ ID NO: 237604 - DNA, 1212 bp, synthetic construct
  misc_feature 1..1212: note = Description of Artificial Sequence: Synthetic coding sequence
  source 1..1212: mol_type = other DNA
atggaagaggagaggggaagcgccctcgccgctgaaagcgccctggagaaaaacgtggccgagttgaccgtaatggacgtctacgacatagcttctctcgtggggcacgagttcgagagggtgatcgaccagcatgggtgtgaggccattgctaggctgatgcccaaagtggtcagggtgcttgaaattctggaagtgcttgtcagtcgacatcacgtagcaccagagctagacgagttaaggctggaacttgatcggctgaggttggagcgcatggatcggatagaaaaagaacgcaagcatcagaaggagctggagctcgtcgaagacgtgtggcggggagaggcacaagacctgctgagccagatcgcacagctccaggaagagaacaagcagctcatgaccaacttgagtcacaaagatgtgaatttctccgaagaagagttccagaaacatgaagggatgagtgaaagggagcgacaagtaatgaaaaaactaaaagaggtagtcgacaagcaaagggacgaaatcagggctaaggacagggagttgggcctcaaaaacgaggacgtggaggcattgcaacagcaacagacacggctgatgaagattaatcatgatctgaggcaccgtgtgacggtagtggaggctcaggggaaagcactgatcgagcaaaaggtggaactggaggctgacctccagactaaagaacaggagatgggcagccttcgcgctgagctgggcaagttgcgggaacgcctccagggtgaacattcacagaatggtgaggaagaacctgagactgagccggtaggggaagagtccatttctgatgccgagaaagtggccatggatttgaaagaccctaaccgaccaaggttcacgctgcaggagctgcgggatgtgctccacgagaggaacgagctgaagagtaaggtgtttctgctgcaggaagagctcgcctactacaagtcagaagagatggaagaggagaatcgcatcccacagcctcctccaatagctcacccaagaactagcccccaaccagagtcaggtataaagagactgttcagcttcttttcccgggataaaaagagactagccaacacccagcggaatgtacatattcaggagtccttcggacagtgggcaaatacacaccgagacgatggctataccgaacagggacaggaggctctacagcatctatag

SEQ ID NO: 237605 - DNA, 636 bp, synthetic construct
  misc_feature 1..636: note = Description of Artificial Sequence: Synthetic coding sequence
  source 1..636: mol_type = other DNA
atggaggaacctccagtgagagaagaggaggaggaagagggcgaagaggacgaagaacgggatgaggtcggacccgagggggctctcggcaagtctcccttccagcttaccgctgaggatgtctacgatatatcttacctcctcggtcgggagctgatggctctaggttctgatcccagagtgactcagctgcaatttaaggttgtgcgcgttctcgaaatgttggaagcattggtgaacgagggctcactggccctggaggaacttaaaatggaacgagatcacctgcgaaaggaagttgagggactgaggaggcagagtccaccggcatctggggaagtgaacttaggccctaacaagatggttgtagatcttaccgatcccaaccggccaagatttaccctgcaggagctgagagatgtcctgcaagaacggaacaaactcaaaagtcagcttctggtggtccaggaggaactccagtgttacaagtcgggcctcatacctcctcgcgagggcccaggcggtcgtcgcgaaaaggatgccgtggtgacctcagccaaaaatgccggtagaaacaaggaggagaaaaccatcatcaaaaagctgttttttttccgctcaggcaaacagacatag

SEQ ID NO: 237606 - DNA, 717 bp, synthetic construct
  misc_feature 1..717: note = Description of Artificial Sequence: Synthetic coding sequence
  source 1..717: mol_type = other DNA
atggcagaagacaagaccaaaccttcagagctggatcaaggaaaatacgatgctgatgataacgtaaaaatcatttgtctcggcgattcagcagtgggcaaatcgaaactgatggagcgcttcttaatggacggcttccagccgcagcagcttagtacctacgccctgacactgtataagcatactgccacggtggatgggaggaccatcctggtggatttctgggacacagctgggcaggaacgattccagtctatgcatgcttcttattaccacaaagcgcacgcctgcatcatggtgttcgatgtgcaacgcaaggtgacgtaccgcaacttgagcacatggtacactgagcttcgcgagtttagaccagagattccctgtatcgtggttgccaacaagatagatgatattaacgtcacacagaaaagtttcaacttcgccaaaaaatttagtttgcctttatacttcgtcagcgccgctgatggcacaaacgtggtgaaagtttggctgactgctgaggtcgccagcaaactgtttaatgatgctatcagactcgctgtttcttataagcagaattctcaggacttcatggacgagatatttcaggagttggagaacttttctttagaacaggaagaggaagacgtgccagaccaggaacagtccagctccatagaaacaccttcagaagaggcagccagtccccattcctag

SEQ ID NO: 237607 - DNA, 498 bp, synthetic construct
  misc_feature 1..498: note = Description of Artificial Sequence: Synthetic coding sequence
  source 1..498: mol_type = other DNA
atggccgaagacaaaaccaaaccctcagagctggaccaggggaaatacgacgctgacgataatgtgaagatcatttgtctgggagacagcgccgtggggaagagcaaactgatggaacgatttcttatggatgggtttcagccccagcagttatctacctatgcacttactctgtacaagcatacggccaccgtggatgggaaaacgatactggtggcagatatcaatgtcacacagaaatcctttaattttgccaagaaattttcactccccctttacttcgtgtccgcggcagacgggaccaacgtagtgaagttattcaatgatgccatacggctggccgtgagctataagcagaactcacaagatttcatggatgagatcttccaggaacttgaaaatttcagtttagaacaggaggaagaagatgtgcctgatcaggagcagtcaagcagcatagagacaccaagcgaggaagtggcctcaccccattcgtag

SEQ ID NO: 237608 - DNA, 690 bp, synthetic construct
  misc_feature 1..690: note = Description of Artificial Sequence: Synthetic coding sequence
  source 1..690: mol_type = other DNA
atggccgaggacaaaaccaagcctagcgagctggaccagggcaagtatgacgctgacgacaatgtaaagatcatatgtctgggggattccgccgtcggcaagagtaaactgatggagcgtttcctaatggacgggttccagccacagcagctgtcaacctatgccctgacactgtataaacacaccgccaccgtcgacggaaaaacaattctggtcgacttctgggatacagctgggcaagagcgattccagtctatgcacgcaagttattatcacaaagcccacgcgtgtataatggtgttcgacatccaacgcaaagtgacgtaccgcaacctcagtacctggtacaccgaattacgagagttcaggcctgagattccctgcatcgtggtggccaataagatcgatgctgacatcaatgtgacgcagaagagttttaactttgctaagaagttcagtctgccactgtacttcgtgtctgccgctgatggaaccaatgtcgtgaaattatttaacgatgccatacgtctggcagtgtcctataaacaaaacagtcaggatttcatggacgaaatctttcaggagcttgaaaacttcagcctggagcaagaagaagaggatgtgcccgaccaggaacaaagttcatctattgagaccccttcggaggaggttgcctcaccacattcctag

SEQ ID NO: 237609 - DNA, 687 bp, synthetic construct
  misc_feature 1..687: note = Description of Artificial Sequence: Synthetic coding sequence
  source 1..687: mol_type = other DNA
atggcagaggataaaactaaaccgtccgagctggaccaggggaagtacgacgcggacgataacgtgaaaattatttgtctgggggacagtgccgttggaaagtccaaactgatggagaggttcctgatggacggattccagccccagcaactgagcacctacgccctgaccctctacaagcacacagccactgtggatggcaaaaccattttggtggacttttgggacactgcgggtcaagaacgctttcagtcaatgcatgcctcctattatcacaaagcacatgcttgcattatggtgtttgacatccaacgcaaggtaacatacagaaacctgtctacttggtacacagagctccgagagttccgaccagagatcccgtgcattgtggtggccaataaaatagacgatataaatgttacacagaagtccttcaacttcgccaaaaagttctcactgcccttgtactttgtcagcgctgccgacggcaccaacgttgtgaagctgtttaacgacgccataaggctggccgtgtcctataaacagaacagtcaggactttatggacgaaatctttcaggagttagagaacttctccctggaacaagaagaggaagatgtgcccgatcaggaacagtctagttccatcgaaacaccctccgaggaagtagcaagtccacattcctag

SEQ ID NO: 237610 - DNA, 687 bp, synthetic construct
  misc_feature 1..687: note = Description of Artificial Sequence: Synthetic coding sequence
  source 1..687: mol_type = other DNA
atggctgaggacaagacgaagccctcagaacttgaccagggcaaatatgatgctgacgacaacgtgaagatcatctgtcttggcgacagtgcggtgggcaaatctaagctgatggagcggttcctgatggatggtttccagccccagcagctgtcaacctacgccctcacgctctataaacacaccgcaactgttgacggaaaaacgattctcgtcgatttttgggacaccgctggacaggagcgtttccagtccatgcacgctagctattatcataaggcgcatgcgtgtatcatggtttttgatatacagagaaaagtgacttatagaaatctgtcaacctggtacaccgaattacgcgaattcaggccggagatcccctgcatcgtcgtggcgaacaaaattgacgatattaacgtgacacagaagtcattcaatttcgccaagaagttctcccttcccttgtattttgtgtctgccgctgatggcacaaacgtcgtcaagctgttcaacgacgcaattcgcctggccgtgagttacaaacagaatagccaagacttcatggacgaaattttccaagaactcgagaatttctcactggaacaggaggaagaagatgtccctgatcaggaacagtcttcgtctattgagaccccgtcagaagaggtggcatccccacacagttag

SEQ ID NO: 237611 - DNA, 717 bp, synthetic construct
  misc_feature 1..717: note = Description of Artificial Sequence: Synthetic coding sequence
  source 1..717: mol_type = other DNA
atggcagaagataagaccaaaccgagcgaactggatcagggaaagtatgatgccgatgataacgtgaagatcatctgcttgggggattctgctgtaggcaagtctaagctgatggagcggttcttgatggatggattccagccacaacagctatccacatatgctctaacattgtacaagcacaccgcgaccgtcgatggtaagaccattcttgtggacttctgggacacagcgggacaggagagattccaaagcatgcacgcctcgtattatcataaggcacacgcatgcatcatggtgttcgatatacaaaggaaggtgacctatagaaacctaagtacttggtataccgagctccgggagttccggccagagataccttgcatagtcgtggctaataaaatcgatgacataaacgttacccagaagtctttcaattttgccaagaaattctcccttcccctgtatttcgtatctgccgcagacggaacaaacgtagtaaaggtgtggctaactgctgaggtggcatctaagctcttcaatgacgccattcggctggccgtcagctacaaacagaactctcaggatttcatggatgagattttccaggagctcgaaaacttcagtttggagcaggaagaggaagacgtgcccgaccaggagcagtcttctagcattgaaaccccctcggaggaggtggcctcgcctcattcatag

SEQ ID NO: 237612 - DNA, 345 bp, synthetic construct
  misc_feature 1..345: note = Description of Artificial Sequence: Synthetic coding sequence
  source 1..345: mol_type = other DNA
atggctgaagacaagactaaaccctctgagctggaccagggtaagtatgacgcggacgataacgtgaagatcatctgcctgggagactcagccgtcgggaagagcaagttaatggagcgattccttatggacggatttcagccccagcagctgagcacctatgccctgacattgtacaaacataccgccaccgtcgacggcaaaacaattctcgttgacttttgggataccgccggacaggagcgatttcagtcaatgcatgcttcctattatcacaaagcccacgcatgcatcatggttttcgacattcagcggaaggtcacctacaggaatctgagcacgtag

SEQ ID NO: 237613 - DNA, 306 bp, synthetic construct
  misc_feature 1..306: note = Description of Artificial Sequence: Synthetic coding sequence
  source 1..306: mol_type = other DNA
atggctgaagataagactaaacctagtgaactcgaccagggaaaatacgacgcggacgacaacgtgaagatcatctgtttgggggattctgcagtgggtaaaagtaagctgatggagcggttcctgatggacggttttcagccccagcagctatcaacatacgccttaacactctataaacacacggcaactgtggacgggaagactatcctggttgacttctgggataccgctgggcaggagcggttccaatcgatgcatgcttcctactaccacaaagcccacgcatgcatcatgcagacctag

SEQ ID NO: 237614 - DNA, 690 bp, synthetic construct
  misc_feature 1..690: note = Description of Artificial Sequence: Synthetic coding sequence
  source 1..690: mol_type = other DNA
atggcagaagataagacgaaaccttctgagctggaccagggaaagtatgatgccgacgataatgttaaaattatttgcctgggagacagtgccgtgggaaagtctaagctgatggagagatttctcatggatggttttcagccccaacagctttcaacctatgctctgactctgtataagcatacagccaccgtggatggcagaacaatcctggtcgatttctgggatacagccggacaagaaaggtttcagtctatgcacgctagctactatcacaaagctcacgcctgcatcatggtttttgacgtccaaagaaaagtgacttacaggaacctctccacctggtacacggagctccgtgaatttaggccggaaattccttgtatcgtggtggccaacaaaattgacgcggacattaatgttacacagaaatcttttaactttgcaaagaaattcagtcttccactgtacttcgtctccgccgctgatgggacaaacgtggtaaagttgtttaatgacgctattcgtctggctgtgtcctataaacaaaactctcaagatttcatggacgagatttttcaggaattagagaatttcagtttggagcaagaggaggaagatgtccctgatcaggagcagtctagcagcatcgagacaccctccgaagaggccgcttcaccccattcctag

SEQ ID NO: 237615 - DNA, 690 bp, synthetic construct
  misc_feature 1..690: note = Description of Artificial Sequence: Synthetic coding sequence
  source 1..690: mol_type = other DNA
atggcagaggacaagactaagccctcagagctggatcagggaaaatatgacgcagatgataacgtaaagattatctgtctgggcgacagcgcagtggggaaaagcaaactcatggagagatttctcatggacgggtttcagcctcaacagttgagcacttacgccctcaccctgtacaagcacaccgctactgttgacgggagaaccattctggtagacttttgggacacagccggtcaagagcggtttcagtcgatgcatgcctcctattatcataaggcgcacgcctgcattatggtgtttgacgttcagaggaaggtgacctacagaaatctctcaacttggtatacggaactaagggagttccgtcccgagatcccctgcattgtggtggcaaataagatcgacgcggacattaatgtgactcaaaaaagttttaacttcgcaaaaaagttctcgttgcctttgtatttcgtgagcgctgccgacggcaccaacgtggtgaaactatttaacgacgctattcggttagccgtcagctacaagcagaactcccaggatttcatggatgaaatcttccaggagttggagaacttctcgctcgaacaggaggaagaggacgttccggaccaggaacagtcctccagtatcgagacaccttcagaagaagccgcaagcccccattcttag

SEQ ID NO: 237616 - DNA, 687 bp, synthetic construct
  misc_feature 1..687: note = Description of Artificial Sequence: Synthetic coding sequence
  source 1..687: mol_type = other DNA
atggcagaagataaaactaagcccagcgagcttgatcaagggaagtatgacgctgacgataacgtgaagataatatgtcttggggactctgccgtgggaaagtctaaactcatggaaagattcctgatggacggatttcagccacagcaactctccacgtatgccctcaccctctacaaacacaccgccacagtggatgggagaactatcctggttgacttttgggatacagccggacaggaaagatttcagtcgatgcatgctagctactatcacaaagcgcacgcctgcatcatggtgttcgatgtgcagcgaaaggtgacatataggaatctgtccacctggtacacagaattgagggagtttcggcctgaaattccgtgtattgttgtggcaaacaagatagatgacatcaatgtaacccaaaaatcattcaatttcgcgaagaagttcagtctccccctgtacttcgtgtctgccgctgatgggactaatgtggtgaaactctttaatgacgcaataaggcttgcagtctcctataaacagaattcccaggatttcatggacgaaatttttcaagagctggaaaacttctccttggagcaggaggaggaggacgtccccgatcaggaacagtcaagtagcatcgaaactccatccgaagaggccgcaagtccccactcctag

SEQ ID NO: 237617 - DNA, 63 bp, synthetic construct
  misc_feature 1..63: note = Description of Artificial Sequence: Synthetic coding sequence
  source 1..63: mol_type = other DNA
atggcggaagacaaaacaaagccctccgagctggatcaaggaaaatatgatgcagacgactag

SEQ ID NO: 237618 - DNA, 687 bp, synthetic construct
  misc_feature 1..687: note = Description of Artificial Sequence: Synthetic coding sequence
  source 1..687: mol_type = other DNA
atggctgaggataagacaaagccctcggagctggaccaaggaaagtacgatgcagatgataacgtgaaaattatctgcctgggagactcggctgttggcaagagcaagctgatggagagattcctgatggatggcttccaaccgcaacaactgtctacctacgctctgacactgtacaaacatacagcgaccgtggacggacgcaccatccttgtggacttttgggacacagcaggtcaggagcgtttccagtccatgcacgcctcttactaccacaaggcacacgcctgcattatggtatttgatgtgcagaggaaagtgacatatcgcaacttgtctacctggtacactgagctgcgcgagtttcggccagaaattccctgcattgtagtggcgaacaaaatcgatgacattaacgtgacccagaagagcttcaactttgcaaagaaattcagtctccctctgtactttgtttctgcggcagacggtactaacgtggtcaagctgttcaatgacgctatcagactggccgtatcgtacaaacagaatagtcaagacttcatggacgaaatttttcaggagctggagaatttctctctggagcaggaagaagaggacgtcccggaccaggaacaatcctcgagcattgaaactcccagcgaagaggcggcatccccacatagctag

SEQ ID NO: 237619 - DNA, 603 bp, synthetic construct
  misc_feature 1..603: note = Description of Artificial Sequence: Synthetic coding sequence
  source 1..603: mol_type = other DNA
atggccaaaaaaacatacgacttactgtttaaattgctgctgatcggcgactcgggggtcggcaaaacatgtgtcctgtttagattctccgatgacgctttcaacacgacctttatcagcacaattggcatcgacttcaagatcaaaaccgtcgagctccaggggaagaagatcaaactgcaaatttgggacacagctggacaggaacgatttcatactatcaccacgagttattacagaggggctatggggattatgctggtgtatgacatcaccaacggaaaaagctttgagaatattagcaaatggttaaggaacatagacgagcacgcgaacgaggatgtcgaaaggatgctgctgggcaataaatgcgatatggatgacaaacgcgtcgtgcccaaaggtaagggcgaacagatcgctagggaacacggaattaggttcttcgagaccagcgctaaggcaaatattaacatcgagaaggcatttctgactctcgccgaagacattctccgaaaaactcccgtaaaagaacccaatagtgaaaacgtggacatctcatctggcggaggagttactggctggaagtccaagtgttgctag

SEQ ID NO: 237620 - DNA, 1950 bp, synthetic construct
  misc_feature 1..1950: note = Description of Artificial Sequence: Synthetic coding sequence
  source 1..1950: mol_type = other DNA
atgtctctgatggttagtgccggtcggggtctgggcgctgtgtggagtccaacccacgttcaggtcaccgtgctccaggcgcgtggattgcgagcaaaaggtcctggaggcacgagcgacgcatacgcggtgatacaggtgggcaaagagaagtacgccacaagtgtgagtgagaggtccctcggggctcccgtttggagggaggaggccacgttcgaactcccaagcctgctgtcatctggcccagccgcagcagccactctccagctcaccgtcctccatcgcgcattgctcggcctcgacaaatttctgggtagagccgaagtagacctcagggatctgcatcgggaccagggtagacgaaagacacagtggtacaagctcaagtcgaaaccaggcaagaaagacaaagaacgtggcgagatagaggtggatattcaattcatgagaaataatatgactgcatcaatgtttgacctcagtatgaaggacaagtcgaggaatccatttgggaaacttaaggataagatcaagggaaaaaataaagactcgggctccgataccgcatccgccatcattcctagtacaaccccgagcgtcgactccgacgacgagagtgtggtgaaagataagaaaaagaagagcaagataaagacactcctctccaagtccaatctccagaagacccctctcagccagagcatgtcggtgctcccaacatcaaagccggaaaaagtgctgcttcgtccaggcgacttccaatcccagtgggatgaggacgacaacgaggacgagtcgtcatctgcaagcgacgtgatgtcacacaaaagaaccgcttcaacagacctcaaacagctcaaccaggtaaacttcaccctgcccaaaaaagaaggtctgtcctttctgggcggactccgctccaagaacgatgttctcagcagatcgaatgtctgtatcaatgggaatcacgtgtatctggaacagccagaagccaaaggtgaaattaaagactcctctccgtcctcctctccttcaccgaaaggatttcgtaaaaagcatctcttcagctcaaccgagaaccttgccgcagggagctggaaggaacccgcagagggcggtggattgagttcagacaggcaactgagcgagtcctccaccaaggactccctcaagtctatgacactgccatcttacagacctgccccactggtaagtggggaccttcgagagaatatggcgcctgcaaattccgaggccactaaggaggcaaaggaatccaaaaagcctgagtcaagacggtcctctttattatcacttatgaccgggaagaaggacgttgccaagggctccgaaggggagaaccccctaaccgtgcccggtcgggagaaggaaggtatgctgatgggtgtcaagcctggggaagatgccagtgggccagccgaggacttggtgaggaggagtgagaaagacacagcagccgtagtgagccggcagggcagcagcctcaacttattcgaggatgtgcagatcaccgagcctgaggctgagcctgaaagtaagagcgagcctcgccctccaatatcttctccacgggctcctcaaacaagagccgtcaaaccacgattacatcctgtgaaaccgatgaatgcaatggctacgaaggtggcaaactgctctctgggcacggcaacaataatctccgaaaacctcaacaacgaagtgatgatgaaaaagtacagtccatctgaccctgccttcgcttatgctcagctgacacacgacgagctgatccagctcgtattaaaacagaaggaaacgattagcaagaaagagttccaggtgcgcgagctggaagattacattgataacctgctagtgagagtcatggaggagacaccaaatatcctgcgcatacccacccaggtgggaaaaaaggccggtaaaatgtag

SEQ ID NO: 237621 - DNA, 3852 bp, synthetic construct
  misc_feature 1..3852: note = Description of Artificial Sequence: Synthetic coding sequence
  source 1..3852: mol_type = other DNA
atgtccctgatggtgtccgcaggtcggggtctcggagccgtatggtctccaacacatgtccaagtgaccgtcctccaggctcgcggtctgcgagctaaaggacccggtggaacaagcgacgcctacgcggtgatccaagtaggcaaagagaagtacgctacaagtgtcagcgaaaggtctctgggagctccagtgtggagggaagaggcgaccttcgagcttccgtccttgttatccagcgggcctgccgctgccgcaacactgcagttgaccgtgctacatcgtgctctgctgggacttgataagttcctggggagagccgaggtggatctcagagacctgcatagagaccaaggcaggaggaagactcagtggtacaaacttaaaagtaaacccggaaaaaaagataaggagaggggggagatcgaagtggatatccagtttatgagaaacaatatgaccgcatccatgttcgaccttagtatgaaggacaagtccaggaatccctttggaaaactgaaagataagatcaaaggcaagaataaagatagcggaagcgacacggccagtgcaatcatcccatcaacaacccctagtgtagatagcgatgatgaaagcgtggtaaaggacaaaaagaaaaaaagcaaaatcaaaaccctgctttcaaagtcgaaccttcagaaaaccccgcttagccagagcatgtccgttctcccgacaagtaagcctgagaaggtgttgctgagaccgggtgactttcagtctcagtgggatgaggatgataacgaggatgagagctctagcgccagcgacgtgatgtcccataaacggaccgcttcgactgacttaaaacaactaaaccaggtgaattttactctgcctaagaaggaggggctatccttcctgggaggccttagaagcaagaatgatgtgctctctagatctaacgtatgcatcaatggcaatcatgtttatcttgaacagcccgaggctaaaggtgaaatcaaggattcatccccttcctcctccccttcacccaagggattccgcaagaagcacctgttctcaagcactgagaacctggccgcaggtagctggaaggaacccgctgaaggagggggtctcagtagcgatcgccagctgagtgagtcaagcacaaaggacagcctgaagtctatgaccttgccaagctatcgcccagccccactggtgtccggcgatctgcgagaaaacatggcacccgctaatagtgaagcaacgaaagaagcgaaagagagcaagaagcctgagtcaagaagatcttctttgttatcactgatgaccggaaagaaggacgtggctaaaggcagcgaaggcgaaaatcccctcaccgtaccagggagggagaaggaggggatgctgatgggagttaagccgggagaagatgcatctggacccgcagaagatttagtgagacgcagcgaaaaagacaccgccgcagtggtgtcccggcaaggatcatctttaaatctttttgaggacgtgcaaatcacagaacccgaagcagagcccgagtctaaatccgaaccccgtccacctatctccagtcccagagccccacagacacgggcagtcaagcccagactcgaggttagcccagaggctcagccaaccgctagattaccatcacctaccgacagcccaagctcattgccccctcttccaagtagcagcgggcaggcaagcgtccctagcgaattgggccatggcgctgacacacaaagctctgaaagtccttccgtgttctcctcgctgtcctcccccattgctgcccctatctccacctccactcctatcgagagctggcctctggtcgatcgtggccaggccaaatcagaaggcccaccattacttcctaaggccgaactgcagactgagtctctgacaccagtccccaacagcgggtcttcggcactggggagcctttttaagcagccaagtttccccgctaataagggcaccgaagatagcctcatggggagaacccgggagaccggcactgagaagaatacgtccagcttggagcttgaggagagtctgcctgagcaaccggagaccggcaggcaggaggaagagcttcctagattcccttgcaaaaagcaggattatagtcctagtagcggtgaagcacaggaggttcccttcgccctgtccctaagctcagacggggcagtgtcccccgttggcgagctcgcagccggtggggaccgggatctggaatctcaggccggatcactggtggagtctaaagcaagagacgcagctgaggaagttgccccaccactgcctatgggggcatcagtgccatccatagatagcatgatgaggaagctggaagaaatgggcctgaatctgcgaaaagatcagaaaaagacaaagaagagagtctcattttcagagcagctgttcaccgaagaggccgtggcaggggcagccctgttagtcgaaggccatagcagctgcccgcaggagctgaacccagcatggtcagtagccggaaacgcgagcgatggtgagccacccgaaagtcctcacgccgaggattccgaacgggagtccgttacaaccccgggaccagccacgtgcggcgcaccggcaagcccagcggaccatctgctcttgcctagtcaggaagagtcgttcagtgaggttcctatgagcgaggcctcatctgccaaagatacacccctatttaggatggagggtgaggacgctctggtgacccaataccagagtaaggcttctgaccacgagggcctcttaagcgatcccttgtcagaccttcagctggtctccgatttcaaaagcccgatcatggcagacctaaacctgagtttaccatctatcccagaggtcgcctccgatgatgaacggatcgatcaagtcgaagatgatggcgatcaagtggaggacgacggcgaaactgcaaagagcagcacccttgatatcggtgctctgtcgctcggattggtggtcccttgtcccgagaggggcaaggggcctagcggtgaggccgacagattggtgttgggcgagggactgtgcgactttaggctccaggcccctcaggcctctgttaccgcaccaagcgaacagacaacagaattcgggattcacaagccccacctcgggaaaagcagtagcttggacaaacagctgcccggtccgtcgggaggggaggaggaaaagccaatgggaaatgggagccctagcccccctcctggaaccagcctcgataatcctgtgccatcaccatctccaagtgagatattccctgtgactcattctttccctagttctgcccattcagacacacaccacaccagcaccgccgagtcccagaaaaaggccacagctgaaggaagtgctggccgtgtcgagaattttggaaagagaaaacctctgctccaagcctgggtgtccccctctgaaacacatcctgtgtctgctcagcctggcgcaggcacaggcagtgctaaacaccgactacaccctgtgaagcctatgaacgctatggccacaaaggtggctaactgttctcttgggactgccacaataattagcgagaacttgaataatgaagtaatgatgaaaaagtacagccccagcgacccagccttcgcttatgcacagctgacgcatgacgagctgatccagttggtactgaagcaaaaagagacaatctccaagaaagagttccaggtgcgcgagctagaggattatatagataatctgctcgttcgagtaatggaagagaccccaaatatattaaggattccaacccaagttggaaagaaagcaggaaagatgtag

SEQ ID NO: 237622 - DNA, 429 bp, synthetic construct
  misc_feature 1..429: note = Description of Artificial Sequence: Synthetic coding sequence
  source 1..429: mol_type = other DNA
atgagccttatggtgtcagccggacggggactgggagcagtctggtctcctactcatgtccaagtcactgttctccaggctcgtgggcttagggctaaagggccaggcggtacctcagatgcctacgctgtgattcaggttggcaaagagaaatacgcaacgtcggtttctgagcgtagccttggcgctccagtgtggcgtgaagaggcgacgtttgagcttccttccctcctgtcttccggaccagcagcggctgccacattacagctaaccgtactgcatcgcgctttgctaggactagacaaattcctcgggcgtgcagaggttgacctacgggacctccatcgtgatctgggtaagtcctttttcaaaactttaaagaagagagcctgggctatttttctacgcctgtgtctaaaaaagaattag

SEQ ID NO: 237623 - DNA, 1320 bp, synthetic construct
  misc_feature 1..1320: note = Description of Artificial Sequence: Synthetic coding sequence
  source 1..1320: mol_type = other DNA
atgagaaacaatatgactgcctcgatgtttgatctgagcatgaaagacaagagccggaatccctttggaaaactgaaggacaagataaaaggcaagaataaagatagcggctcagatactgcctccgccatcatcccttccactactccttcagtggactctgatgacgaatctgttgtgaaggataagaaaaagaagagcaagattaagaccctgcttagtaagtccaatctgcagaagacaccactcagtcagtccatgtctgtgctgcccacctcaaagccggaaaaggttctgctgcggccaggagatttccagtcacagtgggacgaggatgataatgaggatgaaagttcctccgccagcgatgtaatgtcccacaagcgcacagcatccaccgatctcaaacagttgaatcaagtgaacttcacacttccaaaaaaggagggccttagcttcttaggcggacttaggtctaaaaatgatgtgctgagccgctcgaatgtctgcatcaacgggaaccacgtttacctagagcagcctgaggccaagggtgagatcaaggatagcagcccatcatccagccccagccccaagggtttccgcaagaagcatctcttctcgtccactgaaaatcttgccgctggcagttggaaagaaccagctgaaggaggcggattgtcaagcgatcgacagcttagcgagtcgagtaccaaagacagtctgaaatctatgacgcttcccagttaccgtcccgcaccactcgtttccggtgatctgcgagaaaacatggcccctgctaactcagaggctactaaggaggcgaaagaaagcaagaaaccagagtctcgacgatcatcacttctgtccctcatgacgggcaaaaaggatgtggccaagggctctgagggagaaaatccactgaccgtgcctggccgtgagaaggaaggcatgctcatgggagtcaagccgggtgaggatgcctcagggcctgctgaggatctggtccggagaagcgagaaggacaccgcagcagtcgtcagtaggcaagggagctctctaaatctttttgaagacgtgcaaattaccgaaccggaagcggaaccagagtctaagtctgagccgcgtcctccaattagttcacctagagccccacaaactcgtgccgtgaaaccgagattgcacccagtaaaacctatgaatgccatggcaacgaaagtcgccaactgcagcttgggcacagcgacaataatctccgaaaaccttaataatgaggtgatgatgaaggtatgccctctgagatcttggtgtgtaagatag

SEQ ID NO: 237624 - DNA, 1539 bp, synthetic construct
  misc_feature 1..1539: note = Description of Artificial Sequence: Synthetic coding sequence
  source 1..1539: mol_type = other DNA
atgatgctttcagaacaagcccagaagtggtttcccactcacgtccaggttacagtgttgcaggccaaggatctcaaaccgaagggaaaaagcggaacgaacgatacatatactattatccagctgggaaaggaaaagtacagtactagcgtggccgaaaagactctggagcccgtatggaaagaggaggcctccttcgagttacccggactgctcattcaaggctctcctgagaagtacatccttttcctgatcgtgatgcaccgctccttagtgggacttgacaagttcctgggccaggtagctatcaacctaaatgacattttcgaggataagcagcgacgtaagacagagtggttccgccttgagagcaaacaaggaaagcgcatcaaaaataggggagaaatcaaagtgaatatccagtttatgcggaacaacatgactgcaagcatgtttgatctgtctatgaaggataagacccgatcaccctttgccaagcttaaggataagatgaaggggaggaaaaatgacggcacatttagtgacacttcctccgctataataccatctacgcacatgcctgatgctaacagcgagttttcctcgggagaaatccagatgaaatctaagccgaaaaaacccttcctgttgggcccacagaggctgagctccgcccattccatgagcgacctgagtggatcccacatgtcttccgagaagttgaaagccggaacgattgggcagacacatctcctcggacaccagctggacagtttcgggacggtacctgaatctggatctctcaaaagccctcatcgaaggacgctcagcttcgatacgtcaaagatgaatcagcccgacagcattgttgacgaaggtgagctatgttttggaaggcaaaacgacccatttaccaacgttaccgcctctctgccgcagaaattcgccaccttgccaaggaagaagaacccctttgaggaaagcagcgagacatgggatagctctatgaacctgttctcaaaacccatcgaaatcagaaaagagaacaagcgtgagaaacgggagaaggtgtcactatttgaacgggttacaggcaaaaaggactccaggcgtagcgataagttgaacaatgggggatcggactccccttgcgacctgaaaagccccaatgccttcagcgagaataggcaagactatttcgattatgagtctacaaatccatttacagccaaattccgcgctagtaatataatgccaagttcctcgttccatatgagccccacctcaaatgaggatctgcgtaagattccagattccaacccgttcgatgccacggctggttacaggagcctaacatacgaagaggttctccaagaacttgtcaaacataaagagctgctgcgccgtaaagatacacacattagggagttagaggactacatagacaatttgttagtccgggttatggaggaaactcccagtattctaagagtcccttacgagccaagccgtaaagctggcaagttctcaaactcttag

SEQ ID NO: 237625 - DNA, 1599 bp, synthetic construct
  misc_feature 1..1599: note = Description of Artificial Sequence: Synthetic coding sequence
  source 1..1599: mol_type = other DNA
atgatgctgtccgaacaggcccagaagtggttccccacccacgtacaagtgactgtgctgcaggccaaggacctgaagcccaagggaaagagcggtaccaacgacacatacactattattcaattgggcaaagagaaatatagcacgtcagtcgctgagaaaaccctggaacctgtgtggaaagaagaggcgtcgtttgaactgccaggtctgcttatccaaggatcaccagaaaagtacatcctgttccttattgtcatgcaccgctctctggtcggcctagacaagtttcttgggcaggtcgccattaacctcaatgacatatttgaagacaagcagcgccgaaagactgagtggtttcggcttgaatcgaagcagggcaagcggatcaaaaacagaggcgagatcaaagtcaacatccaattcatgcgcaacaacatgactgcctcgatgtttgacctgtcaatgaaggacaaaacccgatcgcctttcgctaagcttaaagacaaaatgaaggggcgaaagaacgatggaacgttttcagacaccagctccgcaatcattccctcgacacatatgccagatgcaaacagcgagttcagctcaggtgagatacagatgaagagtaaacccaagaagccattccttctcgggccacagaggctgagctccgcccactctatgagcgatctttcgggaagccacatgtccagtgagaagctgaaagccggaaccattggccagactcatctccttggtcaccagctagattcgttcggaactgtacctgaatcgggttctctgaagagccctcaccggcgtaccctgagcttcgatacatcgaagatgaaccaacctgattcaatcgtggatgaaggtgaattatgttttggacgccaaaacgacccattcactaatgtcacagcatcgctgccccagaagtttgctacgctacctagaaagaaaaaccccttcgaggaaagcagcgagacttgggactcctccatgaatctttttagcaagcctatagagatacgtaaggaaaacaagagggaaaagagggagaaagtctcactcttcgagagagttacaggcaagaaagacagccgaagatccgataagctgaacaatggcggttccgatagcccctgtgatctcaaaagtccaaacgctttttccgaaaacagacaagactatttcgactacgaatcgacgaacccatttacggccaagttccgggcttccaacattatgccgtcttcacgcaatactttactgacccctgcagtcgcagaatggcggggttctctgagatgggctgagctgtttcatatgtcaccgacaagcaacgaagatctcaggaagatcccagactctaaccctttcgacgctacggcaggatatcgcagcttaacctacgaagaagtgctccaggagttggtgaaacataaggagttgctccgacggaaggatacacacatccgagaactggaggactatattgacaaccttctggtccgggtgatggaggaaacaccttcaatcctgcgagtaccctacgaacccagtcgcaaggcaggtaaattttcgaacagctag

SEQ ID NO: 237626 - DNA, 2271 bp, synthetic construct
  misc_feature 1..2271: note = Description of Artificial Sequence: Synthetic coding sequence
  source 1..2271: mol_type = other DNA
atggcaagtgcccctccagcctcaccaccgggatccgagccgcctggccctgatcccgagcccggagggcctgacggcccaggcgcagcacagctagcccctggacctgctgagctaaggctgggagccccagttgggggtcccgaccctcaatcaccaggtttggacgaaccggcacctggcgctgcagcagacggtggggcacgctggtcagcgggaccagcacccggtctggaaggaggaccacgtgaccccggtccaagcgctcccccacccaggtccggtccacggggacagctcgcttctcccgacgcacccggacctggtcccaggagcgaggctcccctgcccgagctggaccccctcttctcctggaccgaggaaccggaagagtgcggccctgcctcatgtccagagtcagcccctttccgtttgcagggatcttcctctagtcacagggccagaggtgaggtggacgttttctcaccgttccctgcacccacagcgggtgaactcgcgctcgagcagggacccggatcacctcctcagccttctgatctctcacaaactcaccccctccccagcgaacctgtggggtctcaggaggatgggcctcgtctgagggccgtctttgacgctctggacggggacggggacggttttgtgcggatcgaggattttattcagttcgctactgtgtacggagcagagcaggtcaaagacttgacgaagtatttggacccttccggactgggggttatctccttcgaagatttctaccaagggatcaccgctattagaaatggagatcccgatggccagtgttacgggggagtggccagtgcgcaggatgaagagccactagcgtgcccagacgaattcgatgacttcgtgacctacgaagccaacgaggttaccgactcagcctacatggggagcgaaagcacgtatagtgagtgcgaaacatttactgacgaggataccagcacgttggttcatcccgaactgcaaccggaaggcgatgccgatagcgcaggtggatctgcagttcccagtgaatgcctcgacgctatggaggagccggaccacggcgcactgttgcttttgcccggacggcctcatccacacggccaatcagttatcactgttattggcggagaggagcatttcgaagattacggggaaggctcagaagccgaactgtctcccgagacgctttgtaatggacagctgggatgtagtgaccctgcatttcttacaccctcaccaacgaagcgtctgagctccaaaaaagtggctagatatctgcaccagtctggcgctttaaccatggaagcgttagaggacccctcccctgagctgatggagggccctgaagaggatatcgcagataaagttgtcttcctggagcgtcgcgtgcttgagctggagaaggataccgcggctaccggggaacagcactctagactgcggcaggaaaacctccagctggtgcacagggctaatgcactggaggagcagctcaaggaacaggagttgcgggcttgtgaaatggtccttgaagagaccagacgacaaaaggagctcttgtgtaaaatggaacgtgagaaaagtattgaaatcgaaaatcttcagaccagattacagcagctggacgaagagaattcagaactgaggagttgtactccttgtttaaaggctaatattgagcgtcttgaagaggagaagcaaaagctgttggatgagatcgagtccctcaccttaaggttatctgaagagcaggaaaacaagagaagaatgggcgacaggctcagccacgagcgccatcagtttcagagggataaagaggccacacaagaactcatcgaggatctgaggaaacagttggagcaccttcaactcctgaagctcgaagccgagcagaggcggggtaggtcaagctccatgggactccaggagtaccacagtcgggctagggagtcggagctggagcaggaagtgcgacgactcaaacaggataacagaaatcttaaagagcagaacgaggaacttaacggccaaattattacactgtcaattcagggggcaaagagtctgttctctactgcgttctcggagagcctggcagcagaaatttcttcagtctcccgggatgagctgatggaggccatccagaaacaagaagagataaattttaggctccaggactacatcgacagaattatcgtcgccatcatggaaaccaatccatctatcttggaggtgaagtag

SEQ ID NO: 237627 - DNA, 1383 bp, synthetic construct
  misc_feature 1..1383: note = Description of Artificial Sequence: Synthetic coding sequence
  source 1..1383: mol_type = other DNA
atgagcctcctgagggccaatgaggtcaccgatagcgcgtacatgggcagcgaatccacatactccgagtgtgaaacatttactgatgaagacaccagtacactggtgcaccctgaattgcagccagaaggcgacgccgactctgcagggggatcggctgtgccatctgagtgtctcgatgctatggaagagccagatcacggtgcactgttgctccttcctggtcggcctcaccctcatggccagagcgtaataacagttataggtggagaggaacacttcgaagattacggggagggatccgaggctgaactgtctcctgaaacgctgtgtaacggtcagctaggctgttccgatcctgcgttcttgactccgtcccctacaaaaaggttatcgtccaaaaaagtggcccgatatctccatcagagtggggctttgaccatggaagccctggaggacccatctccagaactaatggaaggtccagaggaggatatcgctgataaggtcgtgtttctcgagcgaagagtgttggagctggaaaaagatacggcagctaccggagaacagcattccagactgagacaagagaatctgcaattggtacaccgcgctaacgcccttgaggagcaactgaaagagcaagaactgagggcgtgcgagatggtgctggaagagaccaggcggcagaaggagctgctctgcaaaatggaacgagagaagagcatcgagattgaaaacttgcaaacccggttacaacagctggatgaggagaatagtgagctgagatcctgcacaccctgcttgaaagccaacattgaacgtctggaagaggaaaagcaaaagctgctggatgagatagagtcactgactctaagactctccgaggaacaggaaaataaacgacgcatgggggatagactgtcgcatgaacgtcatcagtttcagagggacaaggaggctacccaagagctcattgaggatttgaggaagcagctggagcatctgcagttattgaaactggaggccgaacagcgcagagggcgttcctccagtatgggtctgcaggagtatcattctagggcacgtgagagtgagttggagcaagaggtgcgcaggctgaagcaggataatcgaaacctgaaggaacaaaacgaggagctgaatggtcagatcattaccctgtcaatacagggggcaaagtctctcttttctactgcctttagcgagtctcttgccgctgagatttcatccgtgagtagggacgagctcatggaggccatacagaagcaggaagagataaactttaggctacaagactacatcgatagaatcattgtcgccatcatggagactaatccctccattttggaggttaagtag

SEQ ID NO: 237628 - DNA, 1383 bp, synthetic construct
  misc_feature 1..1383: note = Description of Artificial Sequence: Synthetic coding sequence
  source 1..1383: mol_type = other DNA
atgccctttctgaaagccaatgaggtgaccgatagcgcctacatgggttctgaaagtacatactccgaatgtgagacatttaccgacgaagatactagcaccttggtgcaccctgaactccagcccgaaggtgatgccgactctgccggtgggagtgccgttccatcggaatgccttgatgcaatggaagaacccgaccacggggctttactcctgctcccagggaggccccatccccacggccagtctgtcatcacggttatcggtggcgaagagcatttcgaggattatggcgagggctcggaagccgaacttagcccagagacactgtgtaacggtcagctggggtgtagcgacccagcctttctgacaccgagtccaactaagcgcctgtcttccaaaaaggtggccaggtatctgcatcaatccggcgctctgactatggaggcccttgaggatccttccccagaacttatggaagggccagaagaggatattgcagacaaagtggtgttcttagaacgtagggtactggaacttgaaaaagacaccgccgcaacaggtgaacagcacagtcgattgcggcaggaaaacctgcagctggtccaccgcgctaatgccctggaagagcagctcaaagagcaggagctccgtgcatgtgaaatggttctggaagagacccgacggcagaaggagctgctctgtaaaatggaacgggaaaagagcatcgagattgagaatctgcagaccaggctgcagcaactcgacgaggaaaattcggagctgagatcttgtacaccgtgtctgaaagcaaatatcgagcggttagaagaggagaaacagaagttactggacgagatcgaatcacttacactgcgcctgagcgaggaacaggaaaataagcgccgaatgggtgataggctttcccacgagaggcaccagtttcaacgcgataaagaggccacacaagagctgatagaggatcttcggaagcaactggaacatctgcagcttctcaagttagaggctgagcaacgacgaggccgatctagttctatgggtcttcaggaatatcactctcgggctagggagtctgaattagagcaggaggtgcgtagactgaaacaagacaataggaatctgaaggagcagaatgaggaactgaacggccaaattatcaccctgtctatccagggggctaaatccttgttcagtaccgctttctcagaaagcctggctgcggaaataagctctgttagcagagacgagttaatggaagctattcagaagcaggaggagatcaactttcgcctgcaagactacatcgatagaattatcgttgctatcatggagacaaacccctctattctggaagtcaagtag

SEQ ID NO: 237629 - DNA, 549 bp, synthetic construct
  misc_feature 1..549: note = Description of Artificial Sequence: Synthetic coding sequence
  source 1..549: mol_type = other DNA
atggggtccgagtctacctattcagagtgcgagaccttcacagatgaggacacaagtacactcgtccaccctgagttgcagcccgagggggatgctgatagcgcagggggtagtgccgtgccctctgagtgtttggatgcgatggaagagcctgaccatggggctctgctcctcctcccaggtagaccacacccccacgggcaaagtgtaataactgtgatcggcggagaagaacactttgaagattacggcgagggcagtgaggcggagctctctccagaaacattgtgcaacggacagttgggatgttctgaccccgcatttctaaccccttctcccacaaagcgcctgtctagcaaaaaggtggcacggtacctgcaccaatcaggagctctgaccatggaggcactcgaggacccatcccctgagttaatggaagggccagaagaggacatcgcggacaaagtcgtgtttctggagcgtcgagttcttgaactggagaaggacactgcggcaacaggagaacagcactctcgcttgcgacagtag

SEQ ID NO: 237630 - DNA, 2406 bp, synthetic construct
  misc_feature 1..2406: note = Description of Artificial Sequence: Synthetic coding sequence
  source 1..2406: mol_type = other DNA
atggccagcgccccaccagctagccccccaggaagtgagcctcctggtccagatcccgagcccggaggaccggatggtccaggcgcagcgcaattggctccaggacctgccgagttgagactaggcgcacccgttgggggtccggacccccagagccctgggttagacgagccagcccctggggctgcagcagatgggggtgctcggtggtcagccggaccggcacccggactggagggaggcccacgggatcctggcccaagcgctccacccccacgtagcggcccaaggggccagctggcttctcccgacgcaccaggtcctgggccacgatccgaagcgcctctgccagagttggatccactgttttcttggacagaggaacctgaagagtgtggtcccgcaagctgtcccgagagcgctcccttccggctgcagggatctagctcctcgcaccgagctcgcggagaagtcgacgtgtttagtccctttcccgcaccaaccgccggtgagctggcactcgagcagggacccggatcaccaccccagccttccgatctatcccagactcacccattgcccagtgaacctgtgggcagccaggaggacggacctagactgcgagcggtgtttgacgcccttgacggggacggtgatggtttcgtccgaatcgaggactttattcaatttgctaccgtttatggcgcagagcaggtcaaggaccttacgaagtacttagatccctccgggttgggagtcatcagcttcgaggatttctatcagggcattacagccatcaggaatggggacccagacgggcaatgttacggtggcgtggcatctgcccaggacgaggaacccctcgcctgccccgacgagttcgatgattttgttacctacgaagcgaatgaagtgactgactcagcgtatatgggaagcgaatctacttactccgaatgcgaaacttttacagatgaagacacctccactctggtacaccccgaattgcaaccggagggcgacgcggactccgctggcggaagcgctgttccttccgagtgccttgacgctatggaagaacctgatcatggggctctgctgttgttacctggccgaccacacccccatggccagagtgtcatcactgtgatagggggtgaggaacatttcgaggattatggagagggatccgaagcagaattatctcccgagactctctgcaatgggcagcttggttgctccgatcccgcatttctcacaccttctacagatccactggctgccaagctgcactctattctgactgacgaagccttcgagttttactgcagtcagtgtcacaagcagatcaaccgtcttgaggatctgagcgcccgactgtccgacctcgagatgaattcccctaccaagcgcctttcatccaaaaaggtggcccgttacctgcaccagtctggcgctttgacaatggaagccctggaggatccgagccctgagctgatggaggggccagaagaggacatcgctgataaggttgtgtttcttgaaaggcgggtgcttgagcttgagaaagacactgcagccaccggagagcaacattctcgcctgagacaagagaacctgcaacttgtgcacagagccaatgctttagaagaacagctcaaggaacaagagctgcgagcttgtgaaatggtcctcgaggaaactagacgtcagaaggaattgctgtgtaagatggaaagagagaaatccatcgagatcgaaaatctgcaaacgcgccttcagcagcttgacgaggaaaactcagagcttaggtcttgcactccttgcctcaaagctaacatagaacgcctcgaagaagagaaacagaaactgctcgacgagatcgagagcctgacactccgactctcagaggagcaagaaaacaaaaggcgcatgggggaccggctgtctcatgagagacaccagtttcagagagacaaggaagctacacaggaacttatcgaggacctccgcaagcagttggaacacctgcagctccttaagctggaagccgaacagcggagagggaggtccagtagcatgggtctgcaggaataccactcccgggctcgagaatccgagctggagcaggaagtgcgaaggctgaagcaggataatcgtaaccttaaggaacaaaacgaggagctgaacggccagatcatcactctgagcatccagggagccaagtccctgttctctactgccttttcagagtctcttgccgctgagatcagtagcgtgagcagggacgaactgatggaggctatccagaaacaggaagagattaactttagacttcaggactacatagacagaattatcgtagccattatggagacgaacccctccatcttggaggtaaagtag

SEQ ID NO: 237631 - DNA, 1914 bp, synthetic construct
  misc_feature 1..1914: note = Description of Artificial Sequence: Synthetic coding sequence
  source 1..1914: mol_type = other DNA
atggcaggcggagccggatggagcggggcacctgccgctctcctgaggagcgttcgccgactgcgtgaagtttttgaggtgtgcgggagggaccctgacggtttcctgcgggtagaacgcgtggctgctcttggtttgaggttcggccagggggaagaagtggaaaagctggtgaagtacctggaccccaacgatttgggacgcatcaatttcaaggatttctgtaggggggtgtttgcaatgaagggatgtgaagagcttttgaaggacgtgctatcagtggaatccgccggtacgctgccctgcgcccctgaaatcccagattgcgtcgaacagggttccgaagtaacaggtccaacttttgcagacggagagctgatcccacgggagcccggttttttcccggaagacgaggaggaagcaatgacgctggcacctcccgaagggccacaggagctgtataccgattctcctatggaatcgacccaaagccttgaggggtcagtgggcagtccagccgagaaagacgggggactgggcggtctgttcctccctgaggataagtcactcgtgcacaccccctctatgactacgtccgaccttagcactcactcaacgacatccctgattagcaatgaagagcagttcgaggactacggggaaggagacgatgttgattgtgccccttccagcccgtgcccagatgatgaaacaagaaccaatgtttactccgatcttggttcttcagtctcatcatccgctggacaaacacctagaaagatgagacatgtgtacaatagtgagctgctcgatgtgtactgctcccagtgctgtaagaagatcaacctgttgaatgatctagaggcgaggctgaaaaatctaaaggccaattctccgaacaggaaaatctcatcaacagccttcggcagacagctcatgcatagttctaatttcagttccagcaacggtagcacggaagacctgttccgcgattccatagactcctgcgataacgatataaccgagaaggtgtcttttcttgagaaaaaagttaccgagttggaaaatgattccctgactaatggcgacctgaagagtaaactcaagcaagaaaatactcagctggtgcaccgcgtgcatgaattggaagagatggtcaaggaccaagagaccaccgcagaacaagctcttgaggaagaggctagaaggcatagggaggcgtatggcaagctggagcgggagaaggccacagaggtcgagctgctgaacgcaagggttcaacaactcgaggaggaaaataccgaactccggacaacagtgactaggcttaagtcccaaaccgagaagctggatgaagaaagacagaggatgagcgataggctagaggacaccagcctacggttgaaagatgaaatggacttatataagaggatgatggataagctgcgccagaatcgccttgagtttcaaaaggagagggaggctactcaagagctcatcgaggacctgaggaaggagctggagcacctgcagatgtataaacttgattgcgaaagacccggtagaggacggtccgcaagtagcggactcggtgagttcaacgcccgagctagggaggtcgagctggaacacgaggtcaagcgtctgaaacaggaaaactataagttgagagaccagaacgatgacctgaacgggcagatcctgagcttgtccctgtatgaggctaagaacttgttcgccgcacagaccaaagctcaatcccttgcagcggaaatagataccgccagcagggatgaactgatggaggcactcaaagaacaggaggaaattaattttcggctccgtcagtatatggacaagattattttagctattttggaccacaatccaagcatcctcgaaattaagcactag

SEQ ID NO: 237632 - DNA, 1914 bp, synthetic construct
  misc_feature 1..1914: note = Description of Artificial Sequence: Synthetic coding sequence
  source 1..1914: mol_type = other DNA
atggctgggggagcaggctggtctggggctcccgcagcgctcctgcgatctgtccgcagattgagagaagtctttgaggtgtgcggcagggatcccgacggcttcctaagggttgagcgagtggcggcattgggattaaggtttggacagggtgaggaggtagaaaagctcgtcaagtacctggatccaaacgacctaggccgaataaattttaaagatttttgccgtggggtctttgcaatgaagggctgtgaggagttgttaaaggatgtgctgtcagtagagagtgctgggacactgccctgcgcacccgagattcccgactgtgtggagcaggggagtgaagtaacaggcccaacttttgcagacggggaactgatacccagagagccagggtttttccccgaagatgaggaagaggcaatgacattggcgcctcccgagggaccacaggaactgtacacagattcccccatggagtccacacaaagtctcgagggaagcgttggttccccagctgagaaggatggaggcctcggagggctgtttctcccagaagataaaagtctcgtccacaccccatccatgactacttcggacctttctacccatagcaccacatccctgattagcaacgaggaacaattcgaagattacggcgaaggagacgacgttgattgtgctcccagcagtccatgccctgatgatgaaacacgtacaaacgtatattccgaccttggaagtagcgtcagtagctctgccggtcagacaccgcgtaaaatgcgacatgtttacaactcggaactgcttgatgtgtactgctctcagtgctgcaagaaaattaatctgctcaatgatctggaggcgagactgaagaacctcaaggccaatagtcctaacagaaagatatcaagcacagccttcggcagacagctgatgcactcaagcaatttctcgtctagcaacgggtctacagaggatctttttagagactccatcgatagctgcgataacgatatcacggagaaagtatcctttctggagaagaaggttaccgagttggaaaacgacagccttaccaatggcgacctcaagtcaaagttgaaacaggaaaatacgcagttggtacatcgcgtacacgaactggaagagatggtgaaggaccaggaaacaaccgctgaacaagctctggaggaagaagctcggaggcatcgagaggcgtacggaaaactagagagagagaaggccactgaggtcgagttattgaatgcgagggtgcagcagctggaagaggaaaacaccgagctgcgtaccaccgtcacccggttgaaatcacaaactgagaaactcgacgaggagagacaacggatgagcgatagactcgaagatacttccttgcggctcaaggacgaaatggatctgtacaagcggatgatggataagctgcgacagaataggctggagtttcagaaggagagggaagctactcaggaattgatcgaagatctacggaaagaactggagcatttacagatgtacaaattggactgtgagaggcctggcagaggacggtcagccagctctgggttgggagagtttaatgcccgtgcacgtgaggttgaactggagcatgaggtcaaacgattgaaacaggaaaactacaaactgagagatcagaatgatgatctgaatggccagattttgtcactgtccctgtacgaggcaaagaatctttttgcggcacagacaaaggcacaatcccttgccgcagagatagacacggcctctagagatgagttgatggaggctttgaaggagcaagaggagattaacttccgcctcagacaatacatggataagataattttagccattctcgaccacaatccctccatcctggagattaagcattag

SEQ ID NO: 237633 - DNA, 651 bp, synthetic construct
  misc_feature 1..651: note = Description of Artificial Sequence: Synthetic coding sequence
  source 1..651: mol_type = other DNA
atggggacgcgcgatgatgagtacgattacctgttcaaagtggtactgatcggggattccggggttggaaagtcaaacctgttgtcccgattcacaaggaatgaattcaatctggagtctaagagcactattggagttgaatttgccaccagaagcattcaggtagacggtaagactatcaaagcacagatctgggatacagccggtcaggaaaggtacagggccattacatccgcctattaccgtggagccgtaggcgcactactggtctatgatattgctaagcatcttacatatgaaaacgtggagcgctggctcaaggagttgcgagaccatgcagattccaatattgtgatcatgctggtgggcaataagagcgacctcagacacttgagagcggtaccgactgacgaggccagggccttcgcagagaaaaatggtctgagctttatcgaaacttccgccctggatagtactaacgtggaggcagccttccagaccatcctgacagagatctacaggatcgtgagccagaagcagatgtctgacaggagggaaaacgatatgagtccatctaacaatgtggtgcctatccatgtgcctcccaccaccgaaaacaaaccaaaagtgcagtgctgtcagaacatctag

SEQ ID NO: 237634 - DNA, 468 bp, synthetic construct
  misc_feature 1..468: note = Description of Artificial Sequence: Synthetic coding sequence
  source 1..468: mol_type = other DNA
atgggaacgagggacgacgagtacgattatctgttcaaggtcgtgttgattggcgacagcggcgtgggaaaatccaacctcctatcccgatttactcgaaatgaattcaatctcgaaagcaaatcaactattggagtcgaatttgcgacccgcagtatccaggtagacgggaagacgattaaagcacaaatttgggataccgcaggccaggagcgatatcgggcaatcacaagtgcgtactacagaggcgcagtgggggcattgttggtttacgacattgcaaagcacctcacatacgagaatgttgaacggtggttgaaggaactcagggaccacgcagattcaaacattgtgatcatgctcgtaggtaacaagagtgaccttagacacctccgagctgtaccaaccgacgaagccagggccttcgcaggttataataaagcaaatgtgagacagacccgcaaatag

SEQ ID NO: 237635 - DNA, 612 bp, synthetic construct
  misc_feature 1..612: note = Description of Artificial Sequence: Synthetic coding sequence
  source 1..612: mol_type = other DNA
atggcaaaggcctatgaccatctttttaagttgttgctgattggggattctggggtgggcaagacctgcctcataatccgctttgctgaggacaattttaataatacatacatctctaccatcggcattgattttaagattcgcaccgtagacatagagggaaaaaagatcaagctccaggtctgggacacagccggacaagagcggttcaagaccatcacaacagcatattaccggggagcaatgggtatcattctcgtctacgacattaccgacgagaagtcgttcgaaaacatacagaactggatgaaaagcattaaggagaatgcgtctgctggcgtggaacgcttactgctcggcaataagtgcgacatggaggccaagcgtaaggtgcaaaaagagcaggcagacaagctggcgagagaacatggtattagattttttgaaacaagcgctaagtcttcaatgaatgtggatgaagcatttagctccctggcgagggacatcctgttgaagtcagggggtcggagaagcggcaacgggaacaaacccccatcgaccgatctgaaaacttgtgataagaaaaacactaacaaatgctccctcggctag

SEQ ID NO: 237636 - DNA, 648 bp, synthetic construct
  misc_feature 1..648: note = Description of Artificial Sequence: Synthetic coding sequence
  source 1..648: mol_type = other DNA
atggccactgcaccatacaactactcctacatttttaaatacattattatcggggatatgggagttggaaaatcatgcctgctgcatcagttcaccgaaaagaagtttatggccgactgtccccacaccatcggcgttgaatttggtacgcgaataatcgaggtaagtggccagaagatcaaactgcaaatctgggatacggctggccaagagcggtttagggctgtcacacgctcctactaccgcggtgcagccggtgcactgatggtttacgatatcacacggagaagtacctacaatcacttgtcctcttggctgaccgacgctagaaacctgacaaatccaaacactgttatcatcctgataggtaacaaggccgacctggaagctcagagggacgtcacctacgaggaggccaaacagttcgccgaggaaaatgggctgttattcctggaagcctcagcaaaaactggggagaacgtagaggacgccttccttgaggccgctaaaaagatttaccagaacatccaggatgggtctttggacctaaacgccgctgaatctggagtccagcacaagcctagcgcccctcaggggggaagactaacaagcgagcctcaaccccaacgagaaggatgcggttgctag

SEQ ID NO: 237637 - DNA, 546 bp, synthetic construct
  misc_feature 1..546: note = Description of Artificial Sequence: Synthetic coding sequence
  source 1..546: mol_type = other DNA
atggcaaccgcaccatacaactattcctacattttcaaatacattatcataggcgatatgggcgttggtaaaagctgtctgctccaccagttcacagaaaaaaagttcatggctgactgtccacatactataggagtcgaatttgggacccggatcattgaagtgagtggacagaaaattaagttacagatttgggacactgctggacaagagcggttccgagctgtaacccgatcttactaccgcggagcggcaggggctctgatggtgtatgacatcacaaggcggagtacctacaatcatcttagttcatggctgacagatgcccgaaacctcactaatcctaacactgtcataatactgattggaaataaagccgatctggaggcacagcgggatgtgacctacgaagaagcaaaacagtttgctgaagaaaacggccttctctttttagaggcctcagctaagaccggggagaatgtagaagatgcattcctcgaagcagccaaaaaaatctaccaaaatattcaggatgggtccctgtag

SEQ ID NO: 237638 - DNA, 711 bp, synthetic construct
  misc_feature 1..711: note = Description of Artificial Sequence: Synthetic coding sequence
  source 1..711: mol_type = other DNA
atgggacagaaagcttctcaacaactcgcactcaaagattcaaaagaagtccccgtggtctgcgaggttgtctcagaagcaattgtccacgcggcacagaaattaaaagaatacttgggattcgaataccctccatcaaagctgtgccctgccgctaacacacttaatgagatattcctgatacactttatcactttttgccaggagaagggcgtcgatgagtggctgaccacaacaaagatgactaagcatcaagcctttctgtttggtgctgattggatatggacgttttggggcagtaacaagcagatcaaactgcagctcgccgtacagacactgcagatgtcgtctccccctccagtggagagcaagccctgcgacctttccaatcccgaatcgagggtcgaagagtcttcttggaagaagtcacggtttgataaactggaggaattctgtaacctcatcggcgaggactgcctcgggcttttcatcattttcggcatgccgggaaaacctaaggacattcggggagtggtgctggattccgtcaagagtcagatggtaagatcgcatttgcctgggggaaaggccgtggcccagtttgttctggagacagaagactgtgtgttcataaaggaattgctgagaaactgtctttccaagaaagatggattgagggaggtgggaaaagtctacatcagcattttatag

SEQ ID NO: 237639 - DNA, 639 bp, synthetic construct
  misc_feature 1..639: note = Description of Artificial Sequence: Synthetic coding sequence
  source 1..639: mol_type = other DNA
atggcacaggcgcaccgcactccccagcccagggccgcaccatcacaacctagagtctttaagttggtactgcttggttccggcagtgtggggaaaagctctctagctctgagatacgtgaagaatgattttaagtcaatactgcccactgtcgggtgcgctttctttacaaaggtggtggatgttggtgccaccagcctcaaattggagatctgggatacagctggccaggaaaagtatcactccgtgtgtcacctttactttagaggcgcaaatgctgctcttctggtgtatgacatcacgcgcaaagacagtttcctgaaggctcagcaatggttaaaagatttggaggaagagctgcatcctggagaagttctcgtcatgcttgtcggcaataagaccgatcttagccaggagcgtgaggtgacctttcaagagggcaaggagtttgcagactcccagaaactactgtttatggagaccagtgctaaattgaatcatcaggtgagcgaagttttcaacaccgtggcccaagaactcctgcagcggtcagatgaggaagggcaggctcttcgaggcgacgcagctgtggcacttaacaaggggcctgccaggcaggctaagtgctgtgcacattag

SEQ ID NO: 237640 - DNA, 258 bp, synthetic construct
  misc_feature 1..258: note = Description of Artificial Sequence: Synthetic coding sequence
  source 1..258: mol_type = other DNA
atgctggtcgggaataagacggatttaagccaggagcgcgaagtgactttccaggagggcaaagagtttgccgacagccagaagttgctgtttatggaaacttctgctaaattgaaccaccaggtctcagaggtgttcaacacagtggcccaggaattactgcagaggagtgacgaagaggggcaggcactccgcggagacgcagcggtggctcttaataaaggacctgcaaggcaggctaaatgttgcgcccattag

SEQ ID NO: 237641 - DNA, 621 bp, synthetic construct
  misc_feature 1..621: note = Description of Artificial Sequence: Synthetic coding sequence
  source 1..621: mol_type = other DNA
atggacgaggatgtgctgacgacactgaagatccttatcattggagagagcggggtgggtaaatcgtcactgcttctacgctttaccgacgacacctttgaccccgagctcgcagctaccatcggcgtggactttaaggttaagacgattagcgtggacgggaataaggctaaattggcaatttgggataccgcgggtcaggagcgcttcagaacactcaccccttcctattatcgtggcgcacagggagtgatcctggtctatgacgtaacccggcgagacacctttgtgaaattagacaattggctgaacgaactggagacatattgcacgcgcaatgatatcgtgaacatgctcgtaggcaataaaattgacaaggagaacagagaggtagatcgcaacgagggattgaagttcgccagaaagcacagcatgttgtttatcgaagcttctgccaaaacctgtgatggtgtgcagtgtgccttcgaggaactggttgagaaaatcatacagactccagggttatgggagtccgagaaccagaataagggcgtgaagctttcgcatagggaagaaggccagggtggcggagcctgtggaggctactgttctgtgctatag

SEQ ID NO: 237642 - DNA, 486 bp, synthetic construct
  misc_feature 1..486: note = Description of Artificial Sequence: Synthetic coding sequence
  source 1..486: mol_type = other DNA
atggacgaggatgtgttaaccaccttaaaaatactcatcattggcgagtcaggagtcggcaagtcctccctgttgctgcgttttactgatgacaccttcgaccccgagctggcagcaaccatcgtgtacgatgtcacaagacgagacactttcgtcaagttagacaattggctgaacgaactggagacatactgcaccaggaacgatattgttaacatgcttgtggggaacaagatcgacaaggagaatagggaggtggacaggaacgagggcctgaaatttgctaggaaacacagcatgctttttatcgaggcatcagcaaagacatgcgatggagttcagtgtgcatttgaagaactcgtggagaagattatccaaacacccggattatgggagagcgaaaaccagaataagggtgttaaattgagccatagagaagagggccagggcggaggagcgtgcgggggttattgctctgtcctgtag

SEQ ID NO: 237643 - DNA, 876 bp, synthetic construct
  misc_feature 1..876: note = Description of Artificial Sequence: Synthetic coding sequence
  source 1..876: mol_type = other DNA
tgacgcttaccgggttcacggccacttcctggcccatcctccttaggcaggagcccctcttgtagtgcagaaaaaacgccgttccggggaccccctctcgggcgacagtccgctgtcaaggagctggacctggtgacggctgggaagtttagattcagcgtgagaagtgaatgcttctcaagaggcccaccactgaagattaaatgcaactgttatttttccttctgtcatatcttgtggcgccagaagatcagcgtagtgctgtcattcttcactttcagcctaggaaagattatactgactgtggagctgagcatcagtctgctgctacggttcacggatgataccttcgacccagagctggctgctacaataggcgtcgattttaaggtgaagaccatctctgtggacggcaacaaggcaaagctcgcaatatgggtaacccttcaccagcagaccgcaaatttctttctgaagtcccaaattggcaatagtccaatcctcaagtgggccatgtggcagtacgatactgccggacaggaacgcttcaggacactgactcccagttattataggggtgcccagggggtgatcttagtgtatgatgtcacgcggagagatactttcgttaaactagacaattggctgaacgagcttgagacctactgtacccggaatgacatcgttaacatgttggtggggaataaaatcgacaaagaaaaccgcgaggttgatagaaacgagggtctaaaattcgcaagaaaacattcaatgctcttcattgaggcgtccgccaagacatgtgacggggtgcagtgtgcatttgaagaactcgttgaaaaaattattcagacgcctggtctctgggaatcatag

SEQ ID NO: 237644 - DNA, 429 bp, synthetic construct
  misc_feature 1..429: note = Description of Artificial Sequence: Synthetic coding sequence
  source 1..429: mol_type = other DNA
atggacgaagatgttctgactaccttaaaaatcctcataatcggcgagagcggggttggcaagagtagtctgttactccgatttacagacgatactttcgatcctgagttagccgcaactattggtgtcgacttcaaggtaaagacgatttctgtggacgggaacaaagccaagctagctatatgggaaaatcgggaagtggatcggaatgaaggcctgaagtttgccaggaaacactctatgctattcatcgaagcctctgccaagacttgcgatggcgtgcagtgtgctttcgaggagttggtagagaaaatcatccaaacccctggtctctgggaatccgagaatcagaataagggtgtgaaattgagtcatcgggaagaaggacaagggggaggagcgtgtgggggatattgttcagtgttatag

SEQ ID NO: 237645 - DNA, 555 bp, synthetic construct
  misc_feature 1..555: note = Description of Artificial Sequence: Synthetic coding sequence
  source 1..555: mol_type = other DNA
atggacgaggatgttttgactaccctgaagatcctaatcattggagagtcaggggtgggcaagagctcccttctgctgaggttcacagacgacacattcgacccagaattggccgcaaccgacactgccggtcaagaacggttccggactctgacacccagctattacaggggagctcagggcgttatcttggtgtacgatgtgacaaggcgcgacacattcgtgaagctcgacaactggctgaatgaactggaaacctactgcaccagaaatgatatcgtgaatatgctggtaggtaataagattgacaaggagaatagggaggtagatcgaaacgaaggattgaagtttgcgagaaaacattccatgcttttcatcgaggcttctgccaaaacttgtgacggcgtgcagtgcgcgttcgaggaactggtggaaaaaatcatccaaaccccagggctttgggaatcagaaaatcaaaacaagggcgttaagttatcccaccgtgaggagggtcagggcggtggtgcttgtggaggctactgcagtgttttgtag

SEQ ID NO: 237646 - DNA, 390 bp, synthetic construct
  misc_feature 1..390: note = Description of Artificial Sequence: Synthetic coding sequence
  source 1..390: mol_type = other DNA
atgtcctcaatgaaccctgaatacgattacctgtttaaactacttctgattggggactccggcgtgggcaagtcctgcctgctgttaaggttcgcggacgacacgtacaccgaatcatatatctctactatcggcgtggacttcaaaattcgcaccatcgagcttgatgggaagaccataaagctgcagatcgaatttgcagatagtttggggattcccttcctcgaaacgagtgcaaaaaacgccaccaatgttgaacaatcatttatgaccatggctgcagaaatcaaaaaaagaatggggccaggagccactgctggcggtgcagaaaaatcgaacgtgaaaatccagagcacaccggtaaagcaatccggagggggatgttgctag

SEQ ID NO: 237647 - DNA, 390 bp, synthetic construct
  misc_feature 1..390: note = Description of Artificial Sequence: Synthetic coding sequence
  source 1..390: mol_type = other DNA
atgtcttgcctgcaccctacctcagactatctcttcaagctcctgcttatcggcgacagtggtgttggcaagtcttgcctgctgctgagatttgccgacgacacctacaccgagtcctatatttccacaattggcgtagactttaaaatccggacaatcgaactggacggtaaaaccataaagctacaaatcgaatttgccgactccctggggattccattcttggaaaccagcgcaaagaatgcaaccaatgtggagcagtcctttatgacaatggctgcggagataaaaaagcgtatggggccaggggctaccgccggtggcgcagagaagtctaacgtaaaaatccagagtaccccagtgaaacagagcggtggaggatgctgttag

SEQ ID NO: 237648 - DNA, 522 bp, synthetic construct
  misc_feature 1..522: note = Description of Artificial Sequence: Synthetic coding sequence
  source 1..522: mol_type = other DNA
atgtcgtctatgaaccccgagtatgattacttgttcaagctgctgctgattggagacagcggagtagggaagagctgcctcctactgcgctttgctgatgatacctacacggaatcttacatcagtacgatcggcgtcgacttcaaaattcggaccattgaactcgatggcaagaccatcaagctgcagattgagagttttaataacgtaaaacagtggctccaggagatcgacaggtatgcgtctgaaaacgtgaataaactgcttgtgggaaacaaatgtgacctcaccaccaaaaaagtggtggactacaccactgcgaaggagttcgctgattcactgggcatccccttccttgagacatcggccaaaaacgccacgaacgtggaacagtcctttatgactatggctgcagaaataaaaaagagaatgggcccaggggcaaccgcaggcggtgctgagaaaagcaacgtcaagattcaatctacaccggtgaaacaatcaggagggggatgttgctag

SEQ ID NO: 237649 - DNA, 522 bp, synthetic construct
  misc_feature 1..522: note = Description of Artificial Sequence: Synthetic coding sequence
  source 1..522: mol_type = other DNA
atgagcagcatgaatcccgaatatgactatctattcaaactcctcctcatcggggacagcggagtaggaaaatcctgccttctgctcagatttgcatgggataccgccggacaggagcgctttagaaccatcacatcgagctactatcggggagcacacgggatcatcgtggtttacgacgttacggaccaggaaagcttcaataacgtgaagcagtggctgcaggagattgatcggtatgcatctgagaacgtaaataaattgcttgtgggaaataagtgtgatctgactacaaaaaaggtggttgattatactacagcgaaggagttcgccgatagcctcggaatccctttcctagagactagtgccaagaacgcgaccaacgtcgagcaatcttttatgacaatggcagccgagattaaaaaacgcatgggacctggggctaccgctggcggagccgagaagtcaaatgtgaagatccagtctacacctgtcaagcagagtgggggaggctgttgctag

SEQ ID NO: 237650 - DNA, 618 bp, synthetic construct
  misc_feature 1..618: note = Description of Artificial Sequence: Synthetic coding sequence
  source 1..618: mol_type = other DNA
atgtccagtatgaatcctgaatacgattatctgtttaagctgttactcatcggtgacagcggggtgggcaagtcctgtttgttgctgcgttttgcagacgatacttacacggaaagctacatcagtacaattggcgtcgacttcaaaatccgaaccatagaacttgacgggaagacaatcaagctccagatttgggacaccgcgggacaggagcgcttccggaccattactagctcttattaccgaggcgctcacggcattatcgtcgtttacgacgtgaccgaccaggagtccttcaacaatgtgaaacagtggctgcaggagatcgatcggtacgcatctgagaacgtcaataagctcttggtcggcaataaatgtgacttgactaccaagaaagtggttgattatacaaccgctaaggagtttgctgacagcttaggaatcccttttttagagacctccgccaagaatgccaccaacgtcgaacagtcctttatgaccatggccgcagagattaagaagaggatgggtccaggcgctacagccggaggcgcagagaaatcaaatgtcaaaattcagtcaacacccgtgaaacagtctggaggaggatgctgctag

SEQ ID NO: 237651 - DNA, 426 bp, synthetic construct
  misc_feature 1..426: note = Description of Artificial Sequence: Synthetic coding sequence
  source 1..426: mol_type = other DNA
atgtcgagtatgaatcctgagtacgactatctcttcaaattgctgctgattggggacagtggagtgggcaaaagttgtttactattacgctttgccgagtccttcaataatgttaagcagtggctccaagaaatagacaggtatgcctccgaaaacgtcaacaagctgctggtgggaaacaagtgcgatcttacaaccaagaaggtcgttgactacaccactgccaaggaattcgccgactcactggggatcccttttctcgagacttccgccaagaatgcaaccaatgtggaacagtcattcatgactatggccgcagaaattaagaagcggatggggcctggcgctactgcgggaggggcagagaagagcaacgtcaagatccagtcaacccccgtcaaacagtctggagggggttgttgctag

SEQ ID NO: 237652 - DNA, 606 bp, synthetic construct
  misc_feature 1..606: note = Description of Artificial Sequence: Synthetic coding sequence
  source 1..606: mol_type = other DNA
atgaaccccgagtatgattacctctttaaactattactcattggggattccggagtgggcaagagttgcctcttgctgagattcgcagacgatacttataccgaaagctatatctcaacaatcggcgtggatttcaagattagaacaatcgaactggatgggaagactatcaaattgcagatctgggataccgcagggcaagaacgcttccggaccatcacttcctcttactaccgcggagcccacggcattatcgtagtgtacgatgtgaccgatcaggagtcgtacgcaaatgtgaagcagtggctacaggagatcgatcgatacgcgagcgagaatgttaataagctacttgtgggcaacaagtcagacctgactaccaaaaaggtggttgacaacaccactgcgaaagagtttgccgactcgctcggaatcccatttctggagacttccgcaaagaatgcaactaacgtggagcaagcatttatgactatggcagctgaaatcaagaaacggatggggcctggagcggcttcaggtggggagcgccctaaccttaaaatcgactctacaccagttaagccagccggaggtgggtgttgttag

SEQ ID NO: 237653 - DNA, 489 bp, synthetic construct
  misc_feature 1..489: note = Description of Artificial Sequence: Synthetic coding sequence
  source 1..489: mol_type = other DNA
atgaatcccgagtacgattaccttttcaagctcctgctcataggagatagcggtgtagggaagagctgcctattgctgcgatttgccgatgacacttatacggagtcctacattagcaccataggggtggactttaagatccgcaccattgaactcgacggtaagacaattaagctacagatctgggacaccgccggtcaggagaggtttcggactatcacttcctcatactatcggggtgctcacggcataattgtcgtgtacgacgtcaccgaccaggaaagctatgcaaacgtcaagcagggctgcagaaggcttacagcaatgcctgcccgaacatcgatttcctcctggtgggctacacgcgctacttcacccccacgtcgttggtggaccacacctcagcccaggtcgcttcagactctgtgggccagcccaagctggcgcagagcaccaaggatgccacctatgtctagtcgaagatcttag

SEQ ID NO: 237654 - DNA, 360 bp, synthetic construct
  misc_feature 1..360: note = Description of Artificial Sequence: Synthetic coding sequence
  source 1..360: mol_type = other DNA
atgaacccagagtacgactacctgttcaagctgttactcatcggtgactccggtgtcggtaagagctgcttgttgcttcggttcgccgacgatacctatactgagagttacatcagcaccatcggtgtagacttcaaaataaggacgattgaattggatggcaagacaattaaactgcagatttgggatacagccggtcaggagagattccggaccatcacaagctcttattacagaggtgctcatggcatcattgtggtctatgacgtgacagatcaggaatcatacgccaatgtgaagcaatggctccaagaaattgatcgttacgcgtctgagaatgtcaacaaacttttggtctag

SEQ ID NO: 237655 - DNA, 678 bp, synthetic construct
  misc_feature 1..678: note = Description of Artificial Sequence: Synthetic coding sequence
  source 1..678: mol_type = other DNA
atggccgcagcgggaggcggaggcggaggcgctgctgccgctggccgagcctactcatttaaggtagtcctactgggggaaggctgtgtgggcaagaccagtctcgttttgcgatattgtgaaaataagttcaacgacaagcatattacaacactccaggcttcctttctcacaaagaaactgaacatcggtggtaagcgcgtgaacctggctatatgggatacagccggtcaggagagattccacgccctgggaccaatctactaccgcgactctaacggggctattttggtgtacgatatcaccgatgaagacagcttccagaaggtcaaaaactgggtaaaagagctcagaaagatgctaggcaacgagatctgcctctgtattgtcggtaacaaaattgatctggagaaagagcgccacgtaagtatccaggaagccgagtcttatgcagaaagcgtaggcgctaaacactaccatacatccgccaaacaaaataaaggtatagaagagctcttcctcgacctctgtaagcggatgatagaaaccgctcaggtggacgaacgcgctaagggtaacggttcttctcagcctggcaccgctcggcgtggcgtacaaataatcgatgatgagccccaggcccagacatctggagggggatgttgttcttccggctag

SEQ ID NO: 237656 - DNA, 585 bp, synthetic construct
  misc_feature 1..585: note = Description of Artificial Sequence: Synthetic coding sequence
  source 1..585: mol_type = other DNA
atggcgcttcgagagctcaaagtctgcctgctgggtgacactggcgtcgggaagtcgagcatcgtttggcggtttgtagaggactcgttcgatcccaacatcaatccaacaatcggcgcaagttttatgacaaaaaccgtgcagtaccaaaatgagcttcacaaattcctcatatgggatacagcaggtcaggaacgctttagagccctagcccctatgtattatcggggaagtgcggcagcaattattgtgtacgatatcactaaagaggagacattttctacgcttaaaaactgggtgaaagaactgagacaacacggaccgccaaacattgtagtggcgattgcagggaataaatgtgatctaatcgatgtaagggaagtgatggaacgggacgcaaaagactatgctgattcaatccacgcaatcttcgtggaaacatctgccaaaaacgctatcaatataaatgagctgtttatagaaatttctcggcgaattccctccacggatgctaacctgccatcaggcggaaagggttttaagctaaggaggcagccgtctgagcccaaacggagttgctgttag

SEQ ID NO: 237657 - DNA, 714 bp, synthetic construct
  misc_feature 1..714: note = Description of Artificial Sequence: Synthetic coding sequence
  source 1..714: mol_type = other DNA
atgctggaggaggacatggaggtggccatcaagatggtggtagtgggtaatggcgcagttggaaaatcatctatgattcagaggtactgtaaaggcatcttcactaaagactacaagaaaaccattggtgtggattttcttgagagacagatccaggtgaatgacgaggatgtgagactcatgctctgggataccgccggacaagaggaatttgacgctatcaccaaggcgtattatagaggagcacaggcatgcgtgcttgtgttttctacgactgatcgcgaatcgtttgaagccgtaagctcttggagagagaaagttgtcgctgaagttggcgacatcccaacagttctggtgcagaacaagatcgatctcctcgacgactcttgcattaaaaacgaggaggccgaggccctggccaagagactgaagttacgcttctataggacctccgtgaaggaggacctgaacgtaaacgaagtgttcaaatacctggcagaaaaatacctgcagaagcttaaacaacagatcgcagaagatccagaactcacacattcctcctccaataagatcggggtttttaataccagcggcggttcgcactcaggacaaaacagtggcactctgaacgggggtgacgttatcaatcttagaccaaataagcagcggaccaaaaagaaccggaacccattctctagctgcagcatcccctag

SEQ ID NO: 237658 - DNA, 714 bp, synthetic construct
  misc_feature 1..714: note = Description of Artificial Sequence: Synthetic coding sequence
  source 1..714: mol_type = other DNA
atgctggaagaggatatggaagtggccatcaagatggttgtggtggggaacggagcggttggaaaatcatcaatgatccagcggtattgcaaagggattttcacaaaagattataagaagaccataggtgttgactttctagagcgtcaaatacaggtgaacgatgaggacgttcgtctcatgctatgggatactgctggtcaagaagagttcgacgctattacaaaggcttattataggggagcacaggcgtgcgtcctcgtgttctccacaactgacagagagtctttcgaggcggtatccagttggcgagagaaggtggtcgctgaagtgggcgatatccccacagtcttggtgcaaaacaaaattgatctcctggacgatagttgcattaagaacgaagaagctgaagctctggctaaacgtctcaaattaaggttttatcggacatcggtgaaggaggacctgaatgtgaacgaagtattcaaatatctggcagagaagtacctgcaaaaactgaagcagcaaatcgccgaggacccggaattaacccattccagctcaaataaaattggggtattcaacaccagcggtggaagccactctggtcagaatagcggcaccctgaacgggggagatgtgataaaccttcgcccaaacaaacaacgaactaaaaaaaaccgcaaccctttctcctcttgctcaattccttag

SEQ ID NO: 237659 - DNA, 612 bp, synthetic construct
  misc_feature 1..612: note = Description of Artificial Sequence: Synthetic coding sequence
  source 1..612: mol_type = other DNA
atgtctgggcagcgcgtcgacgtcaaggtagtgatgctgggcaaggagtacgttggcaaaacttctttggtagaacggtatgtgcacgaccgattcctcgtggggccttatcagaatactatcggggctgcttttgtggcaaaagtaatgtcagtgggagacagaaccgtgacactaggcatctgggacacagcgggaagcgaacgctacgaagcgatgtccaggatctactatagaggggctaaagccgcaatcgtttgctatgacctgaccgacagttcctcatttgaaagggcaaaattctgggtcaaagagcttcggtccctcgaggaaggttgccagatctatctctgtggcaccaagtccgacctgttagaagaagatcgtagacgacgtagagtggacttccatgatgtgcaggattatgcggataatatcaaagctcagctttttgagacttctagcaagaccggacagagcgttgatgagctgttccagaaggtggcagaagactatgtcagcgtagccgctttccaggttatgaccgaagacaagggagtggacttagggcaaaagccgaacccgtacttctactcttgctgccatcactag

SEQ ID NO: 237660 - DNA, 612 bp, synthetic construct
  misc_feature 1..612: note = Description of Artificial Sequence: Synthetic coding sequence
  source 1..612: mol_type = other DNA
atgtcaggacagcgtgtcgacgttaaagtggtgatgttggggaaagaatacgtggggaagaccagcctcgtggaacgttacgtgcatgatcggttcttggtgggtccttatcaaaacaccatcggcgcagcattcgtggcgaaagtgatgagtgttggagatcggactgtcaccctcggcatctgggacactgcaggctcagaaagatacgaggccatgtcccggatttactatagaggggctaaggcagcaattgtctgctatgacctcaccgatagctcctctttcgagagagcaaagttctgggtgaaagaactgcgctcgctcgaggaaggatgtcaaatctacctctgtggaacaaagtctgatctgctggaggaagaccgccgacggaggcgcgtcgatttccacgatgtccaggactacgccgacaatatcaaggcgcaactgtttgagaccagtagcaaaacgggccagtccgtggacgaactgttccaaaaagttgcagaggactatgtaagcgtggctgccttccaggtgatgaccgaagataaaggggtagacttaggccagaagccaaacccttatttttattcttgctgccaccactag

SEQ ID NO: 237661 - DNA, 201 bp, synthetic construct
  misc_feature 1..201: note = Description of Artificial Sequence: Synthetic coding sequence
  source 1..201: mol_type = other DNA
atgtcagggcagcgtgtggacgttaaagtagtcatgttggggaaggagtacgtgggtaaaacaagtctggttgaacggtatgtgcatgaccgttttctggtgggcccataccagaatactatcggagccgcttttgtggcgaaggtgatgtctgtcggcgacaggacggttaccctagggatctgggatacagcaggatag

SEQ ID NO: 237662 - DNA, 642 bp, synthetic construct
  misc_feature 1..642: note = Description of Artificial Sequence: Synthetic coding sequence
  source 1..642: mol_type = other DNA
atgggtaatggtacagaagaagattacaacttcgtatttaaagtggtcctgattggcgaaagcggcgtgggcaaaactaatctgctgtcacgattcaccagaaatgaattcagccatgattcacggacgacaatcggtgtggagttctctaccaggacagttatgctgggtacagcggcagtaaaggctcagatttgggatactgctggtctggagaggtaccgagcaatcacgtcagcgtattatcggggagctgtgggggctctgttggttttcgacttgactaagcaccagacttatgcagtcgtggagcggtggcttaaagagctgtacgaccatgcagaggcgaccattgtggttatgctggtggggaacaaaagcgacctctcacaggcgcgtgaggtcccgacagaggaggcaagaatgtttgcagagaacaacggccttcttttcctggagaccagtgctttggattcaactaatgtggagctggccttcgagacagtgttgaaggaaatcttcgctaaggtgagcaaacagcggcagaacagcattcgcactaacgcaatcacactcggaagcgcccaagctggccaggagcccggacccggtgagaagcgtgcgtgctgcatcagtctatag

SEQ ID NO: 237663 - DNA, 1110 bp, synthetic construct
  misc_feature 1..1110: note = Description of Artificial Sequence: Synthetic coding sequence
  source 1..1110: mol_type = other DNA
atggaaggctcattggagagagaagcccctgccggagctttagcggcagtactcaaacattcttccactttaccaccagagtcgacacaggtgaggggttatgactttaacagaggcgtcaattacagggcgttgctcgaggccttcggcacaaccggtttccaagctacaaattttgggcgtgcagtgcagcaggtgaatgcaatgatcgagaagaagctcgagcctctgtctcaggacgaggaccaacacgcggacctcacacaaagtcgaagaccactcacatcttgtacaatcttcctgggttacacctcaaacttgatcagttctgggataagagaaacaatccgctaccttgtgcagcacaacatggtggatgttctcgtaacaacagccggaggcgtagaggaagatctgattaaatgtcttgcccctacttacctgggcgagttctctttacggggtaaggaactgcgcgaaaacggcattaacaggattgggaacctgttggtccccaatgagaactattgcaaatttgaggattggctcatgcctatcttggatcagatggtgatggaacagaatacagaaggcgtgaagtggacccctagcaagatgattgcaaggcttggcaaggaaatcaacaaccccgagtcagtatactactgggcacagaagaatcacatcccagtcttttctccggctctgactgacggttcgctgggcgatatgattttcttccattcctacaagaacccgggtctcgtactggacatcgtcgaagacctcaggctgatcaacacccaggccatcttcgctaaatgcactggcatgatcatactgggcggaggagtggtcaaacaccacattgcaaacgcgaatttaatgaggaacggtgctgattatgctgtgtacataaacacagcccaagagttcgacgggtcagacagtggcgctcgcccagacgaggctgttagctgggggaagatacgcgtggatgcacagccggtcaaagtttacgcagacgcaagcttggtcttccctcttctcgtcgccgagaccttcgcccagaagatggatgctttcatgcatgaaaagaatgaggactag

SEQ ID NO: 237664 - DNA, 573 bp, synthetic construct
  misc_feature 1..573: note = Description of Artificial Sequence: Synthetic coding sequence
  source 1..573: mol_type = other DNA
atgctggtcggagattccggggtcggaaaaacttgcttgctggtgcggttcaaggatggagcctttctggccggaacctttatatccaccgtggggatcgatttccgtaacaaagtcctcgacgtagacggagtgaaggtgaagctccaaatgtgggatactgctggccaggagcgttttcggtccgttacgcacgcttattaccgtgatgcacatgcactactgcttttatatgacgtgacgaataaggcctccttcgataacattcaggcctggctaaccgaaatccatgaatatgctcagcacgacgttgcattgatgcttctgggtaataaagtggacagcgcccacgagcgggttgtgaaaagagaagacggagagaagctggccaaagaatacggtctcccatttatggaaacgagcgccaagactggtctcaatgtggatctcgcgtttactgctattgcaaaggagttgaagcaaagaagcatgaaggctccgtcggagccgagatttaggctgcacgactatgtgaaacgtgaagggaggggcgcatcctgctgtaggccatag

SEQ ID NO: 237665 - DNA, 666 bp, synthetic construct
  misc_feature 1..666: note = Description of Artificial Sequence: Synthetic coding sequence
  source 1..666: mol_type = other DNA
atgtctgacggtgactatgattacctgattaaatttttagcgttgggtgactcaggtgtgggtaagacatccgttctgtaccagtatacagatggtaaattcaatagcaaattcatcacgacggtgggcattgatttccgagaaaaaagagtggtttaccgagctagcggccctgatggcgctaccggaaggggacagcggatccatctacagctctgggacacagcagggcaggaaaggttcagatcgctgaccacagctttcttccgcgacgccatgggttttctcctgctgttcgacctaaccaacgaacagtcgttcttgaacgtgcggaattggatctcacaactgcaaatgcatgcatactgcgaaaatcctgatatcgtgctctgcggtaacaagtccgacttagaggatcagcgcgtggtaaaggaggaggaggccatcgcactggcagaaaagtatgggatcccttattttgaaacctccgctgctaacggcaccaatatttcacaggccatagaaatgcttttggacctcatcatgaagagaatggaaaggtgcgtggataagtcatggatccctgagggtgtggtgcgctccaatgggcacgcctccactgatcagctttccgaagagaaggagaagggagcttgcggctgttag

SEQ ID NO: 237666 - DNA, 642 bp, synthetic construct
  misc_feature 1..642: note = Description of Artificial Sequence: Synthetic coding sequence
  source 1..642: mol_type = other DNA
atgtctgatggagattatgattaccttattaagtttcttgcccttggcgatagcggcgtcgggaagaccagtgtcctgtaccagtacacagacggaaaatttaattctaaatttatcacgacagtgggtattgactttagagagaaaagagttgtgtacagggcgtcagggccagacggagcaaccggcagaggccaaaggatccacctgcagttatgggacactgcgggtcaggagcgtttcagaagccttaccaccgcttttttccgagacgcaatgggttttctactactgtttgatttaacgaacgagcagagttttctgaacgtgagaaattggattagccagttgcaaatgcacgcttactgcgagaatccagatattgttttgtgcggtaacaagagtgacttagaggaccaacgggtagtaaaggaaaagtatggtattccctactttgaaacctcagcggcaaacgggacaaatatcagccaggccattgagatgctattggatcttattatgaagcgtatggagcgttgcgttgacaagtcctggatacctgaaggtgtggtaaggtctaacggccatgcctccactgatcagctgtccgaggagaaggaaaaaggggcttgcgggtgttag

SEQ ID NO: 237667 - DNA, 666 bp, synthetic construct
  misc_feature 1..666: note = Description of Artificial Sequence: Synthetic coding sequence
  source 1..666: mol_type = other DNA
atgtccgatggcgactacgactacctgatcaaattcctggccctcggggattccggcgtgggaaagactagcgtactctatcaatataccgatggaaagtttaactctaaattcattaccactgttggcatcgatttccgcgagaaaagggtggtatatcgcgcaagcggtcccgacggggctacgggcagaggccaacgcattcacctccagctctgggacactgccggacaggaaaggtttcgatcactcactactgcctttttcagggatgcaatgggtttcctgctgcttttcgacctcactaacgagcagtctttcctgaacgtacggaattggataagccagcttcagatgcacgcctactgtgaaaatccagacattgtcctctgtggcaataagtcggacttggaagatcagagagtggtcaaggaagaagaagccatagccctggccgaaaaatatggcatcccttacttcgagaccagcgcggcaaatggaacaaacatcagtcaggccatcgagatgttgctggaccttattatgaaacggatggagagatgcgtggacaaaagctggatccccgagggggtcgtgcgcagtaacggtcatgccagcaccgaccagttgtccgaagagaaagaaaagggcgcatgtggctgctag

SEQ ID NO: 237668 - DNA, 663 bp, synthetic construct
  misc_feature 1..663: note = Description of Artificial Sequence: Synthetic coding sequence
  source 1..663: mol_type = other DNA
atgagcgacagcgaggaggagtctcaggatcgccaactgaagatcgtggtattgggggacggagcctcagggaagacctctctcactacatgtttcgcacaggaaacatttggaaagcagtacaaacagacaatcggactagattttttccttaggcgcataacacttcctggcaatctgaacgttaccctccaaatctgggacatcggcggacagacaatcggcggaaaaatgctggacaaatacatctacggggctcagggggttctgctggtatacgatattactaattaccagtcctttgaaaacctggaggactggtacacagtggttaagaaggtgagcgaggagtccgagacccagcctctggtggcgctggtgggcaacaaaattgacttagagcacatgagaacaatcaaacccgagaagcacctccgcttctgtcaagaaaacgggttctcctctcatttcgttagcgctaagactggggatagcgtcttcctgtgttttcaaaaagtggcagctgagattctgggaattaaactgaacaaggcagaaattgagcagtcacagagaattgtgcgcgctgaaatcgtgaaataccctgaagaggagaatcaacacaccactagcactcagagcagaatatgtagcgtgcaatag

SEQ ID NO: 237669 - DNA, 666 bp, synthetic construct
  misc_feature 1..666: note = Description of Artificial Sequence: Synthetic coding sequence
  source 1..666: mol_type = other DNA
atgagcgatagcgaagaggagtctcaagacagacaacttaaaatcgtcgtgttgggtgatggcgctagtggaaagacatccctcaccacatgttttgctcaggagacttttgggaagcagtacaagcagacaataggactggacttttttttgagacgaataaccctgcccggaaatctcaacgtaactttacaaatatgggacattggagggcaaaccatcgggggtaagatgcttgacaagtacatctatggcgctcagggcgtgttactcgtatatgacatcacgaactatcagagctttgaaaatcttgaagattggtataccgtcgtgaagaaggtgtccgaggagagcgaaacccagccactggtggccctggtgggaaacaagattgacctggagcacatgagaaccattaagccggaaaaacacctccgcttctgccaggaaaatgggttctcctcacactttgtgtccgccaagaccggtgactccgttttcctttgtttccaaaaggtcgccgcagaaatcctgggcattaaactaaataaggccgagatcgagcagagccagagagttgtgaaggctgacatcgtcaactacaatcaggaacccatgtcccgcacagtcaatccaccacgaagctctatgtgtgccgttcagtag

SEQ ID NO: 237670 - DNA, 615 bp, synthetic construct
  misc_feature 1..615: note = Description of Artificial Sequence: Synthetic coding sequence
  source 1..615: mol_type = other DNA
atgtcagattctgaggaagagagccaggatcgacagcttaagatcgtggtactaggcgacggcgctagcggtaagacgtccctcactacatgcttcgcgcaggagaccttcggtaaacaatacaagcaaaccattggcttagacttctttctgagacgtatcacactgcctgggaaccttaacgtaacactacaaatttgggatatcggagggcagacgattggcggaaagatgttagataaatatatttacggcgcacagggggtgctgttggtgtatgacatcacaaactaccaatccttcgaaaacttggaagactggtacactgtcgtcaagaaggtgtctgaagagtctgaaacccagcctctcgtggcgctcgttggcaataaaattgatttagaacatatgaggacgattaagccagaaaaacacctccggttctgtcaagagaatggcttttcttcacacttcgtctcagcaaaaaccggcgatagcgtgtttctgtgctttcaaaaggtggccgctgagatcctgggcatcaagctaaacaaggcggagatcgaacagtctcaagggcatttcattatcttcatttcctctaccaacagagaatag

SEQ ID NO: 237671 - DNA, 288 bp, synthetic construct
  misc_feature 1..288: note = Description of Artificial Sequence: Synthetic coding sequence
  source 1..288: mol_type = other DNA
atgtctgactccgaagaagaatcccaagacaggcagttgaagatcgtggtgctgggagatggtgccagtggtaagacttctttaacgacctgtttcgctcaggaaacttttgggaaacagtataagcaaactatcggactggattttttcctccgtaggataacacttcctggtaatctcaatgtgacacttcaaatctgggacatcggaggtcagacaatcggaggcaagatgctggataagtacatctatggcgcacagttgatttggagcatttgtgaacaatag

SEQ ID NO: 237672 - DNA, 639 bp, synthetic construct
  misc_feature 1..639: note = Description of Artificial Sequence: Synthetic coding sequence
  source 1..639: mol_type = other DNA
atggcctatgcgtacctgtttaaatacattatcattggagatactggtgttggaaaatcctgtctgttgttacagttcactgacaaaaggtttcagcctgtgcacgacctcaccattggcgtggagtttggcgctcggatgatcaccatcgacgggaaacagattaagttgcagatttgggatacagctggtcaagagtcattcaggtctatcaccagaagctattaccgcggtgccgctggggcactgctcgtgtacgatattactcggcgagacacatttaaccacctcactacttggctggaagatgcaaggcagcactccaatagcaacatggttattatgctgatcggcaacaaaagcgacctggagtcacggagggaagtcaaaaaggaggagggggaggcgtttgccagggagcacggactgatatttatggagacctcagctaagactgcctcaaacgtggaagaagccttcataaacactgcgaaagagatctacgaaaagatccaggagggcgttttcgatataaacaacgaggccaacggaataaagataggacctcagcacgccgctactaacgccacccatgccggtaaccaggggggacaacaggccggaggtggttgttgctag

SEQ ID NO: 237673 - DNA, 567 bp, synthetic construct
  misc_feature 1..567: note = Description of Artificial Sequence: Synthetic coding sequence
  source 1..567: mol_type = other DNA
atggcctacgcttacctgttcaagtacatcatcatcggagacacaggggtggagttcggtgcacgcatgataactattgacggcaagcagattaaacttcagatttgggatactgcagggcaggaaagttttcgttcgataaccaggtcctattacagaggcgcagctggcgctttgctggtgtacgatataacccggagagacaccttcaatcatcttaccacttggttggaggacgcgagacagcattcaaactccaacatggtaataatgctcattggcaataagtccgacctggagtctcggagggaagttaaaaaagaagaaggcgaggcgttcgccagagaacacggtctgatttttatggagacaagcgcaaaaactgcttcgaacgtggaagaggcctttattaacactgcgaaagagatatacgagaagatccaggaaggcgtcttcgacataaacaacgaggccaacggaatcaaaatcgggcctcagcatgcagccacaaatgctactcacgcgggaaatcaaggcggtcagcaggcgggaggagggtgctgttag

SEQ ID NO: 237674 - DNA, 501 bp, synthetic construct
  misc_feature 1..501: note = Description of Artificial Sequence: Synthetic coding sequence
  source 1..501: mol_type = other DNA
atgatcacaatcgacggtaaacaaattaagctccagatctgggacactgctggccaggagtcttttaggtccattacacgctcttattatcggggtgccgctggcgctctactggtatacgatattactcgcagagacacctttaaccatctcacaacttggctggaagacgcccgtcaacacagtaactctaacatggtaatcatgctaattggcaataaaagtgacctggagtcacggagagaagtgaaaaaagaggaaggcgaagcgtttgccagggagcatggcctcatatttatggagacatccgccaagacagcctccaacgttgaagaggccttcatcaataccgccaaggagatttacgagaaaattcaggaaggcgtcttcgacatcaataatgaggcaaacgggatcaagattgggccacaacatgcagcaacaaacgccacccacgccggaaatcagggaggacagcaggcgggtggcggatgttgctag

SEQ ID NO: 237675 - DNA, 630 bp, synthetic construct
  misc_feature 1..630: note = Description of Artificial Sequence: Synthetic coding sequence
  source 1..630: mol_type = other DNA
atgacttatgcatacttgttcaagtacataataattggggatacaggcgtgggcaagtcctgtttactcctccagtttacagacaagcgatttcagcctgtccatgatctcaccatcggggtggaatttggggctagaatggtgaacatagatggaaagcaaataaagctgcagatttgggacactgccggacaggagagttttaggtctatcacccggtcttactacagaggggctgccggtgcactgctcgtctacgatattacccgcagggagacgtttaaccatctaacatcttggcttgaagacgcacggcaacatagctcgtctaatatggtcatcatgctaatcggaaataagtctgacctggagtcgcgtagagacgtcaaaagagaagagggagaagctttcgcaagggaacacgggctaatttttatggagacatctgctaaaacggcttgtaacgtcgaggaagcatttatcaatactgccaaagagatctaccggaagatacagcaaggtctgttcgacgtccataacgaggctaatggcataaagatcggccctcagcaatccatcagtacctctgtgggcccatctgcttcccagtccgcagggttgcaggtgtag

SEQ ID NO: 237676 - DNA, 651 bp, synthetic construct
  misc_feature 1..651: note = Description of Artificial Sequence: Synthetic coding sequence
  source 1..651: mol_type = other DNA
atgacatatgcctatttatttaaatacataattatcggcgatactggcgtaggcaagtcgtgccttctcttacaattcaccgacaaaaggtttcagccggtccacgatttgaccatcggcgtagagtttggagcacgtatggtcaacatcgatggtaaacaaatcaaactacaaatctgggacactgctgggcaggaatcattcaggagcataactcggtcttactatcgcggagctgcgggtgctctcctcgtctacgacataacacggagggagacatttaatcaccttacaagctggctcgaagatgcaagacagcatagctcatccaatatggtgattatgctgatcggtaacaaaagcgatcttgagagcagacgtgacgtgaagagggaagaaggcgaagcctttgcacgggagcacgggctaatctttatggagacaagcgctaaaactgcgtgtaatgtggaggaggccttcatcaacaccgcaaaagagatctacaggaagatccagcagggcctgtttgatgttcacaacgaggccaacggaataaagattggaccacaacagtccattagcacttccgtgggcccttctgcctctcagagaaatagccgtgacattggcagtaactccgggtgttgttag

SEQ ID NO: 237677 - DNA, 189 bp, synthetic construct
  misc_feature 1..189: note = Description of Artificial Sequence: Synthetic coding sequence
  source 1..189: mol_type = other DNA
atgacctatgcctacctgtttaagtacataattattggtgatacgggcgtggggaagtcatgtctcctgcttcaatttaccgacaagcggttccaaccagttcacgacctcactattggggtggagttcggagctcgtatggtaaatatcgatggaaaacaaatcaagctgcagatttgggacacatag

SEQ ID NO: 237678 - DNA, 2946 bp, synthetic construct
  misc_feature 1..2946: note = Description of Artificial Sequence: Synthetic coding sequence
  source 1..2946: mol_type = other DNA
atggccgctgacagtgagcccgaaagtgaggtgttcgagatcaccgatttcacaacggccagcgagtgggaaaggtttattagcaaagtcgaggaggttctgaatgactggaaacttatcgggaacagtttgggaaagcccctggagaaaggaattttcacaagcggaacctgggaggagaagtctgatgagatctcctttgcggattttaagttttccgttactcatcactaccttgtgcaggaatccactgataaagaagggaaagacgagctgctggaagacgtggtgccacagtctatgcaggatctcctcggtatgaataacgacttcccccctcgagctcattgtcttgttcgctggtacggtctgcgggagtttgtggtgatcgcgccagccgctcactcagacgctgtgctcagcgaaagtaaatgtaatctcctcctgtcctccgtttcaatcgccctggggaacacaggctgccaggtccccctctttgttcaaattcatcacaaatggagacggatgtacgtcggagagtgtcagggccctggcgtccgcaccgacttcgagatggtgcatcttcgtaaagtgccaaaccagtacacccacctcagcgggctgctggacattttcaagtcaaagattggttgtcccctgacacctctacctcccgtctctatcgcaattaggtttacttacgtgctgcaggattggcaacagtacttttggccacagcagccaccagatattgacgccctggtgggcggtgaggtgggcggactggagtttgggaaactaccattcggcgcatgcgaagatccaattagtgagcttcatctggccacaacctggcctcaccttaccgagggcatcattgtcgataatgatgtgtatagtgatttggatcctatacaggccccacattggtctgtaagggtccgcaaggcagagaaccctcagtgcctgctgggggattttgttactgagttctttaaaatctgccggagaaaagaatccaccgacgaaatcctcgggcgatctgccttcgaagaggagggcaaggaaacagcagacataactcacgcgctgtcgaagctcaccgagccggcttccgtccctatccacaagctctcagtgagcaatatggtccataccgcaaagaagaaaattcgcaagcacaggggtgtcgaagagtcccctctaaataacgacgtgctgaacactatcctcctgtttctattcccagacgccgtgagtgaaaagccactggacggaaccacctctaccgacaataacaacccgccatctgagtcagaggactacaatctctataatcagtttaaaagcgctccgagcgattctctgacttacaagttggcgctctgcctatgtatgattaacttctaccatggaggactcaagggtgtagcacacttatggcaggagtttgtcctggagatgcgtttcaggtgggagaacaactttctcataccgggactggccagtggtccacccgaccttcgttgctgtttactgcaccagaagcttcagatgcttaattgttgtatcgagagaaagaaagctagagatgaagggaagaaaactagcgccagtgacgtgactaacatctatccaggggacgcgggaaaagctggagatcagctcgtgcctgataacctgaaggaaaccgacaaagagaagggtgaagtaggaaaatcttgggactcatggagcgattctgaggaagaatttttcgagtgcctgtctgacactgaggaattaaaaggaaacggacaagaatctggaaagaagggagggcctaaggaaatggctaacctcaggcctgaaggtcgcctctaccagcatggcaagctcaccctgctccacaacggtgaacctctctatatccccgtgactcaggaaccagccccaatgacagaggatctgctcgaagagcagtcagaagtgctggccaaattgggcacttccgccgagggggctcacttgcgggctagaatgcagtcagcatgcctgctctccgacatggaatctttcaaggcggcaaacccaggatgttcattggaggatttcgttcggtggtactcccccagagattatattgaggaggaagtcatcgatgagaaaggaaatgtagtcttgaaaggtgaactgtcagctagaatgaagatccctagcaatatgtgggttgaggcctgggaaaccgctaagcccatccccgcaagaagacagagacggctatttgatgatacacgggaggcagaaaaagttcttcattacctggcaattcagaagccagctgatctagcaaggcacctcctgccttgtgtcatccacgccgctgttctaaaagtaaaggaggaggagtcactggaaaatattagctcagtcaaaaaaattattaaacagatcatctcccattcgtcaaaggtcctgcactttccaaatcccgaggacaagaagctggaagagatcattcatcagattacaaacgtggaggccttgatagctagagctcgctctttaaaggcaaagtttgggacagagaagtgcgaacaggaggaggaaaaggaagacctcgaaagatttgtgagttgcttacttgagcagccagaggtcctcgtgacaggggctgggcgtggccacgctggtagaatcatccacaagctttttgtaaatgcgcagcgtgctgccgctatgactcccccagaagaagagctgaagcggatggggtcgccagaggagcgacggcagaacagcgtgagcgatttccccccacctgctggcagggagttcattctgcggacgacagtgcctcggccagctccatactccaaggccctgccacaaagaatgtactcagtgctgaccaaggaagactttagactcgcgggtgctttctcatctgatactagcttcttttag

SEQ ID NO: 237679 - DNA, 2808 bp, synthetic construct
  misc_feature 1..2808: note = Description of Artificial Sequence: Synthetic coding sequence
  source 1..2808: mol_type = other DNA
atgtttagcctcatatcaggcatctttacctccggtacttgggaggaaaaaagcgacgaaatctcctttgctgactttaagttctctgtgactcaccactaccttgttcaagaatccactgataaggagggcaaggatgagttacttgaggacgttgtgcctcaatccatgcaggatctgctaggaatgaacaacgattttccaccacgcgcacactgcttggtgaggtggtacggcctgcgtgagtttgtggtcatcgctcccgcagcacacagtgacgccgtgctttctgagtccaagtgtaacttgttgttgtcaagcgtctctatagccctgggtaacacagggtgtcaagtgccactcttcgtccagatccatcataagtggcgcagaatgtacgtaggcgagtgtcagggtccaggtgtgcgcacagatttcgaaatggttcatctcaggaaggtccccaatcagtacactcacttaagcggcctgctggatatattcaagtctaagatcggctgtccgctgacacctctgccacccgtctccattgccataagattcacctacgtcctccaagactggcagcagtatttttggcctcagcagccccctgatattgacgcgctcgtcggaggcgaagtgggcggacttgagtttggcaaacttcccttcggtgcatgtgaagatccaatctctgaattacacctggccactacatggccccacctcaccgaggggattattgtcgataacgatgtctactctgacctcgatcccatccaggctccccattggtcagtccgggttcggaaggctgagaaccctcagtgccttcttggcgactttgtgactgaattttttaaaatttgtaggaggaaggagtccacggatgagatactcgggcgttcagcatttgaggaggaggggaaggagaccgcggacattacacatgcccttagcaaactgaccgagcccgcatctgtgccaatccataaactgtctgtgtccaacatggttcacaccgcgaaaaagaaaataaggaaacaccgaggggtggaagagtctcccctgaataatgacgttctcaatactattctgttgtttctgttcccagatgccgtgtccgaaaagcctctcgatggcaccactagcacggacaacaataacccaccatctgagtctgaagattataacctgtataaccagtttaaaagtgcgccttccgactctctgacctataagctcgcactgtgtctctgcatgatcaacttctaccacggcggtctgaaaggcgtcgcccatctatggcaagaattcgtgttggagatgaggttccgttgggaaaacaacttcctgattccaggcctggcgagcgggcctccagatctccgttgttgtctcctccaccagaagttgcagatgctgaattgctgtatcgagcggaaaaaagctcgggacgaggggaagaaaacctctgcatccgacgtcaccaacatttatccaggcgacgccggtaaggccggtgaccagcttgttcccgataacttaaaggaaacggataaagaaaaaggtgaagttggaaaatcctgggactcctggtccgactcagaggaggaatttttcgagtgcctgtccgacactgaggagctaaaggggaacggtcaggagtcggggaagaagggaggccctaaagaaatggccaatctgcggccagagggcagactgtaccagcacgggaagctcaccctcctccataatggcgaacccctgtatatccccgtcacacaagaacctgctcccatgacagaagatctgttggaggaacaaagtgaagtcctggccaagttagggaccagcgcagagggcgctcacttgcgagccagaatgcagtcggcatgcctcctgagcgacatggaaagtttcaaagcagcaaatccaggctgtagccttgaggactttgtgagatggtactccccgagggactatatagaagaagaggtgatagatgaaaagggaaacgtagttctgaagggggagctatcagcaaggatgaaaattccctcaaacatgtgggttgaggcatgggagacagccaaacctattcctgctagacggcaaaggcgtctattcgatgatacaagggaagccgaaaaggtattgcactacctggccatccagaagccagctgaccttgccaggcatctcttgccatgtgtgattcacgccgctgtgctcaaagtcaaagaagaagaaagtctagagaatatcagtagcgtcaagaaaattatcaaacagattatctcccactcttcaaaggtgctgcacttcccaaatccagaagataagaagctcgaagaaattattcatcaaattacaaacgttgaggccctcatcgcacgggcacggtctctgaaggcgaaatttgggaccgaaaagtgcgaacaggaggaggagaaggaagacctggagcggttcgtgtcatgtctcttagagcaacccgaggtgctggtcactggagccggtcggggacacgcaggcagaattatacataaactttttgtcaatgcccagcgggcagcggctatgacaccaccagaggaggagctaaagcgtatgggcagtcctgaggagagaaggcagaactctgtttcggatttccctcccccagctggtcgggagtttatactgcgcaccaccgttccccgtccggcaccctattccaaggctcttccccaacgcatgtattcggtgctgacaaaggaggactttcggctggctgtgaagattatagacggggacgtgtag

SEQ ID NO: 237680 - DNA, 2967 bp, synthetic construct
  misc_feature 1..2967: note = Description of Artificial Sequence: Synthetic coding sequence
  source 1..2967: mol_type = other DNA
atggctgccgactcggagccagagagtgaggtctttgagataacagattttacgacagcatcagagtgggaaagattcatctctaaagtggaggaggtgttaaacgactggaaactcattggtaactcacttggcaagcctctcgaaaagggaatcttcactagtgggacctgggaggaaaaatcggacgagatctcgtttgctgacttcaagttttcagtgacccatcattacctagtccaggagtcgaccgacaaagagggaaaggatgagttactggaagacgttgtgccacagtctatgcaggatctcctggggatgaacaacgatttccctcccagagcccattgtttggtgaggtggtatggtttaagagaattcgtggtgatagcacctgcggctcattctgatgcagtactgagtgaaagtaagtgcaatctgttgctgagctctgtctccattgcgttaggaaacactggatgtcaggtccccctctttgttcaaatacatcataagtggagacgtatgtatgtgggcgagtgtcagggtcctggggtgagaaccgactttgagatggtgcaccttcgtaaagtgccgaaccagtatacacatctcagcgggctgttagatattttcaaatctaaaatcgggtgtccactgacaccgctgcctccagtctccattgctatccgcttcacctatgttctacaggactggcagcagtacttctggccacaacagcctccagacattgacgcactcgtggggggtgaggtaggaggcctggagttcggaaaacttccatttggtgcctgcgaggacccaataagcgagctgcatctcgcaacaacctggccccacctcacagaggggattatcgttgataatgatgtctactctgacctcgatccgatccaggccccacactggagcgtccgcgttcgcaaggctgaaaatccccagtgccttctcggcgattttgttaccgagttttttaaaatttgccgacggaaagaaagcactgatgaaatcctaggcagatctgctttcgaggaggaggggaaagaaaccgctgatataacacacgccctgtcaaagcttactgaaccagcttctgttccgatacataaactctccgttagtaacatggtgcacacggcaaagaaaaagattcgcaagcatcgtggggtcgaggagtcacctctgaataatgacgtgctgaacacaatcctgctgtttctctttcctgatgccgtatctgaaaaaccactcgatgggaccacgtcaacagacaacaataatcctcctagcgaatccgaagactataacttgtataatcagttcaagtcagccccttccgacagcctgacctacaagctggctctgtgtctgtgcatgataaatttttatcacggcggactcaagggcgttgcccatctatggcaggaatttgtactggaaatgcggtttcgttgggagaacaacttcctgattccaggtctcgccagtggccctccagacctcaggtgctgcctcttacatcagaagcttcagatgttgaattgttgcattgagcgcaaaaaagctagggatgaggggaaaaagacatcggcctctgacgtaaccaacatctacccaggagatgccggtaaggcaggcgatcagcttgtccctgataatctcaaagaaaccgacaaagaaaagggcgaagtagggaagtcatgggacagttggtctgatagcgaagaggagttcttcgagtgcttgtccgatactgaggaactgaagggcaatgggcaggaatcagggaagaagggcggtcctaaggagatggctaacttaaggccagaaggtcgcctttatcagcacggaaaactgaccctcttgcataacggcgagcctctatacatccctgtaacgcaggagccagcaccaatgaccgaggacctcttagaagaacagagcgaagtcctggcaaaattaggaacgagtgcggagggagcgcacttgagagcgagaatgcagtcagcttgcctgttgagtgacatggaaagcttcaaggccgcaaacccagggtgctccctggaggatttcgttagatggtactctccacgggattatatcgaggaagaggttatcgatgaaaagggaaatgtggtgcttaaaggcgagctgagtgcacgcatgaaaattccaagcaatatgtgggtggaagcctgggaaaccgctaaacctatccctgctagacgtcaaaggagactctttgacgatacgagggaggctgaaaaagttttgcattacctcgcgattcaaaaacctgccgatctggccagacatctcttgccttgcgtgatccacgctgccgtgttgaaagtaaaggaagaggaaagtctggagaatatcagcagtgtcaagaaaatcatcaaacagattatttcacactccagcaaagtcctccatttccctaacccagaagacaagaaactggaagagataatccaccagatcaccaacgtggaggcacttattgcacgcgctagaagcctgaaggcaaagttcggtacagaaaaatgcgagcaggaagaagaaaaggaggatttggagaggtttgtctcatgcctcctagaacagcctgaggtcctggtgaccggggctggacgtggacacgctggtcggattatccataagctgttcgtgaacgcccagcgcttaacggaatccagcgacgaggctgccgctatgactcctccagaggaggaactaaagaggatgggttcgcctgaagaaagacgccaaaactcggtgtctgactttccgccacccgctgggcgagagttcattctgcgaactaccgttccacgccctgccccatacagcaaagcgcttcctcaacggatgtacagcgtgttgacgaaggaagattttaggctggcaggcgcatttagctctgacacaagtttcttttag

SEQ ID NO: 237681 - DNA, 4182 bp, synthetic construct
  misc_feature 1..4182: note = Description of Artificial Sequence: Synthetic coding sequence
  source 1..4182: mol_type = other DNA
atggcttgctctattgtgcagttctgttattttcaggatttgcaggccgctcgggactttttgtttcctcacctgagagaggaaattctgtctggggcattgaggagagaccccagcaaaagcactgattgggaggacgacgggtggggcgcatgggaggaaaacgaaccccaagaacctgaagaagaaggaaatacttgcaaaacacagaaaacaagctggcttcaagactgtgtgctgagcctgagccccactaatgacctcatggtgatcgcacgcgagcaaaaggcagtgttcctggtgcctaaatggaaatattcggataaaggcaaagaggaaatgcaatttgcagtcggttggagtggcagcttaaacgtagaagagggagagtgtgtcaccagcgccctttgtattcccttagcatcacaaaaaagatcatcaacaggccgacccgactggacctgcatcgtcgtgggatttaccagtgggtatgttcgcttttatactgaaaatggagttctgctgttggctcaactactgaacgaggatcctgttttgcaactaaaatgccggacctacgaaattccccgtcacccaggcgttacagaacagaacgaggaattgtccatattataccctgctgcaattgtgaccattgatggcttctctctttttcagtcactcagagcctgcaggaaccaggtggctaaggccgctgcatccgggaacgaaaacattcaacctccacccttagcgtacaagaagtggggactgcaggatatcgataccattattgatcacgcatcggttggcataatgactctgtctccctttgaccagatgaagaccgcatccaatattggcggttttaatgccgcaataaaaaacagccccccagctatgtcccaatatattactgtgggatctaacccctttacaggcttcttttatgccctagagggctcaacccaaccactcctgtcccatgtggcgttagccgtggcaagtaaactcaccagcgcgctgtttaatgctgcatctggatggctgggctggaaaagcaaacacgaggaggaagcagtgcagaaacagaagccaaaagtggaacctgcaaccccccttgccgttcgttttggcctgccagactctagaaggcacggcgagagcatctgtctctctccgtgtaataccctggctgccgtgacagatgattttggcagagtgatcctgttggatgttgctagaggaatagccatccgcatgtggaaaggctatagagacgcccagattggatggattcaaacagttgaggacctgcatgagagagtaccagaaaaggctgatttctctcctttcggtaattctcagggaccttcgagggtcgcccagtttctggtgatttacgcccctcgcaggggaatactggaggtgtggtccacccagcagggtcccagggtcggggcatttaatgtgggaaagcactgtcgcctgttgtacccaggctacaaaatcatgggtttaaataatgttacttcacaatcctggcagccccagacttaccaaatctgtctggtggaccctgtcagtgggtccgtcaaaacagtaaatgtccctttccatcttgctctgtccgataagaaatctgagcgagcaaaggatatgcacttggttaaaaaactcgccgctctcctgaagacaaagagtcctaatctggatctggtggagaccgaaataaaggaattgatcctggacatcaaatacccggcaaccaaaaagcaagctctagaaagcatcctggcttccgaacgcctccccttttcatgtttacggaatattacacagaccctgatggacacactgaaatcccaggagttagagtctgttgatgaggggctgctgcagttttgcgcgaataagctgaagctacttcagctttatgaatcagtgtcacagctcaacagcctcgactttcacttagacacccccttttctgataacgatctggcgctgctcctcaggctagatgagaaggaattgctcaaactccaggctctgttggaaaaatataagcaggaaaacactcggactaacgtcaggttttcagacgataaggacggcgtgctgcccgttaaaactttcctcgagtacctggaatacgagaaagacgtgctgaatatcaaaaagattagtgaagaagaatacgtcgcccttggctcttttttcttctggaaatgtctacacggcgaatcctccacagaagacatgtgtcacaccctcgagtccgctggcctgtctcctcagctcctccttagcttactgctgtctgtgtggctgtctaaagagaaggatattctggacaagcctcagtctatttgctgcctgcacactatgttgtcgctcttgagcaaaatgaaagtggccatcgatgagacatgggacagtcagagcgtgtctccttggtggcagcagatgaggacagcctgtatccagagcgaaaataatggagctgctctcctgtcagctcacgttggacactctgtggccgcacaaatttctaataatatgacagagaagaaattctcacaaaccgtgctaggagctgactccgaagctctgacagactcctgggaggctctgagcctggataccgaatattggaaattattactgaagcagctggaggactgcctcatcctacagactctgttgcactcaaaaggaaatacacaaacctccaaggtgtcctccctgcaggccgagcccctacctcggctgagtgtaaagaagttgctggaaggcggaaagggcggtattgctgactccgtggccaaatggatcttcaagcaggacttttctccagaggtgctaaaactggccaacgaggagagagacgccgagaacccagatgagcccaaggaaggagttaaccgttcgttcctggaggtaagcgaaatggagatggacttaggagctatcccagaccttttacacctcgcctacgagcaattcccatgttccttggagttggacgtgctccacgcccattgctgctgggaatacgtagtccagtggaataaagaccctgaagaagccaggttctttgtgaggtcgatcgaacacctgaaacaaattttcaatgcccacgtccagaacggaatagctctcatgatgtggaatacatttttggtgaagagatttagtgcagccacatacctcatggacaaagtaggcaaatcccccaaagatagactgtgcaggcgtgacgttggaatgagcgacacagcaatgaccagtttcctgggtagctgtctagacctccttcaaattctaatggaggctgatgtctctcgcgacgaaattcaggtgcccgtcctggataccgaggatgcctggctctcggtggagggcccaattagcattgtggagctggctctggaacagaaacacattcactaccctcttgtggagcatcacagcatcctctgctccattctgtacgccgtgatgagattcagccttaagaccgttaagcccctcagcttgttcgattccaaagggaagaatgccttcttcaaggatctgacctctatccaactgctgcccagcggagaaatggatcctaatttcataagcgttcgccagcagttccttctcaaagtggtgagtgccgctgtgcaggcccagcacagcgccacaaaagtgaaagatcccaccgaagaggctactcccacaccatttggcaaggaccaagactggcctgcgctggctgtggatctcgcccaccacctccaggtgtccgaggatgtcgtcaggcgccactatgtgggcgagctgtacaattacggcgtcgatcacctgggggaggaagcgatcctgcaagttcacgataaggaggtgctcgcatcacagcttttggtcctgacagggcagcgccttgcccatgctctgttgcacactcagaccaaagagggaatggagttactggcccgactgccgccaactctctgcacatggcttaaagccatggatcctcaggatctacagaacactgaggtgccaatcgctactactgcaaagctggttaataaggttatcgagttgttgcctgaaaaacacggccagtacggccttgctctgcatctaatcgaggcagtcgaggctatatcactgcccagtctctag

SEQ ID NO: 237682 - DNA, 612 bp, synthetic construct
  misc_feature 1..612: note = Description of Artificial Sequence: Synthetic coding sequence
  source 1..612: mol_type = other DNA
atgtcgatggaggattacgatttcctgttcaaaattgtcctcatcgggaatgcaggcgtcggcaaaacctgcctggtgaggcgctttacccaaggattatttcccccaggccagggggcaactattggtgtggatttcatgataaagacagtcgagatcaacggcgagaaggtcaaactccagatctgggacactgcaggccaggagagatttaggtctataactcagtcttactatcgctctgccaatgccctgatactgacttacgatataacctgcgaagagagttttaggtgtctgccagaatggctgcgcgagatcgagcaatatgcgtccaataaggttattactgtgttggtggggaacaagatagaccttgcagagcggcgtgaggtaagtcagcagagggcggaggaattctctgaagcgcaggatatgtattatctggagacttctgctaaggaatcagataacgtagagaagctcttcctggatcttgcctgccgcctgatctccgaggctagacaaaacacgttggttaataatgtgagctcgccactacccggtgaaggtaaaagcatatcctacctgacatgctgcaactttaactag

SEQ ID NO: 237683 - DNA, 345 bp, synthetic construct
  misc_feature 1..345: note = Description of Artificial Sequence: Synthetic coding sequence
  source 1..345: mol_type = other DNA
atgtctatggaagattacgacttcttgttcaaaattgtgctcattggaaacgctggggtgggtaaaacatgtctcgtcagacggtttactcagggactcttcccccctggccagggagccactatcggcgtggacttcatgatcaagaccgtcgagatcaacggagaaaaggtgaaactgcagatttgggacactgccggacaggagagatttcgttcgattacacaatcatattaccgaagtgcaaacgcattgatcctcacttatgacataacctgtgaggaaagctttaggtgcttacccgaatggcttcgggagatcgaacagtatgcctcaaacaagtag

SEQ ID NO: 237684 - DNA, 612 bp, synthetic construct
  misc_feature 1..612: note = Description of Artificial Sequence: Synthetic coding sequence
  source 1..612: mol_type = other DNA
atgtctatggaggattatgattttctctttaagatcgtgctcattgggaatgccggagttggtaagacgtgtttggtgaggcgcttcacccaagggctctttccccctggccagggagctacaattggggtggacttcatgattaagacagttgagattaatggcgagaaagtcaaattgcagatttgggatactgccggacaagagaggtttaggagcataacacagagttattacaggtccgcgaacgccttaatcctcacctacgatatcacatgcgaagaaagttttcggtgccttccagaatggctgcgggaaatcgagcaatacgccagtaacaaagtcatcactgtgctggtaggcaacaagatcgatctggcagaaaggcgggaagtgagtcagcagcgggctgaagaattcagcgaagcacaggacatgtactacctagagacaagcgctaaggagagcgataatgtagaaaaactcttcctcgacctcgcctgccgactgatttctgaagccaggcaaaatacactcgtgaacaatgtttctagccccctccctggagagggcaaaagtatttcttacctcacctgttgcaactttaattag

SEQ ID NO: 237685 - DNA, 168 bp, synthetic construct
  misc_feature 1..168: note = Description of Artificial Sequence: Synthetic coding sequence
  source 1..168: mol_type = other DNA
atgtccatggaggactatgacttcctcttcaaaatcgtgctcatagggaatgctggagtagggaaaacctgtctcgtccgacggtttactcagggcctcttccccccagggcagggcgctacaatcggggtggactttatgatcaaaaccgtcgaaattaatggctag

SEQ ID NO: 237686 - DNA, 507 bp, synthetic construct
  misc_feature 1..507: note = Description of Artificial Sequence: Synthetic coding sequence
  source 1..507: mol_type = other DNA
atgtccatggaagattatgattttctgttcaagattgtgctaatcggcaacgccggagtcggcaaaacttgcctggtcaggcgtttcacacaggggctgtttcctccaggccaaggcgctacaattggtgtggatttcatgataaaaacagttgagatcaatggtgagaaggtaaaactacagatttgggatacagccggacaggagagatttcgctcaattacacagagctactataggtccgctaacgccttaattctcacatacgatatcacctgcgaggagagcttccggtgtctgcccgagtggttgcgagagatagaacagtatgcgtccaataaggtcataaccgtattagttgggaacaaaatagatctggcagagagacgggaggtctctcagcaaagagcagaggaattttccgaggctcaggacatgtactaccttgagacaagcgctaaggaaagcgacaacgtggaaaaactttttctggatctcgcctgttag

SEQ ID NO: 237687 - DNA, 183 bp, synthetic construct
  misc_feature 1..183: note = Description of Artificial Sequence: Synthetic coding sequence
  source 1..183: mol_type = other DNA
atgtccatggaggactacgattttctgttcaaaattgtactcattggaaatgctggagtgggcaaaacttgtctggttagacgcttcactcaggggctcttccccccaggacaaggcgctactattggcgtggattttatgatcaaaacagttgagatcaatggggagaaggtcaaactatag

SEQ ID NO: 237688 - DNA, 612 bp, synthetic construct
  misc_feature 1..612: note = Description of Artificial Sequence: Synthetic coding sequence
  source 1..612: mol_type = other DNA
atgagcatggaagattatgacttccttttcaagattgtgttaatcggaaatgccggtgtagggaagacttgcctggttaggcgctttacccaggggctgtttccacctggccagggggctacgatcggtgtcgacttcatgataaagaccgtggagatcaatggcgaaaaagtcaagctgcagatctgggacaccgccggtcaagaaagattccgttcaataacgcagtcatactaccgaagcgcaaatgcactaatcctgacctacgacatcacttgcgaagagtctttccgctgcctgcccgagtggttaagggaaatagagcagtacgctagtaacaaagtaataactgtgctggtcgggaataagattgatttggctgagcgaagagaggtctcccagcagcgtgccgaagaattctccgaagcccaggatatgtattacctggagacctccgccaaggagagcgacaatgtggagaagctgtttttagacctcgcatgtcggctcatctccgaggcacggcaaaatacattggtgaataacgtgagctcaccgctcccaggagagggcaagtctataagttatctgacatgctgcaattttaactag

SEQ ID NO: 237689 - DNA, 303 bp, synthetic construct
  misc_feature 1..303: note = Description of Artificial Sequence: Synthetic coding sequence
  source 1..303: mol_type = other DNA
atgtcgatggaggactacgatttccttttcaaaattgtgctgattggaaacgctggggttgggaagacgtgcctcgtgcgcaggtttacccagggcttgttcccgcctgggcagggcgctacaattggcgtggatttcatgattaaaactgtcgagataaatggcgagaaggtgaaactacagatctgggacacagcaggtcaggagcggtttcggtccatcacgcagagctactacaggtcagcgaacgcattaatccttacttatgatatcacgtgcgaggagagctttcgctgtttgtag

SEQ ID NO: 237690 - DNA, 495 bp, synthetic construct
  misc_feature 1..495: note = Description of Artificial Sequence: Synthetic coding sequence
  source 1..495: mol_type = other DNA
atgtcgatggaggattatgatttcctgtttaagattgtcttgatcgggaacgccggtgtggggaagacgtgtttggtgcggcgattcactcagggactctttccccctggccagggggctacaattggagtggatttcatgattaagaccgtggagatcaacggcgagaaagtgaagcttcagatttgggacaccgcgggacaagagagattccgtagcatcacacagtcatactatagaagcgcaaacgctctgatcctcacctacgatattacttgcgaggaatcgttcagatgcctccctgaatggcttcgcgagatcgaacaatatgcatctaataaggtcattaccgtgctggccacccgactgacatggttgaaaggggaaaggtttccttcaagtgaactgaaaaactctcagaaactgaggacctgtattatatggcggccacagccaagaaatttaattatgtggaggaatagctctctcacttag

SEQ ID NO: 237691 - DNA, 420 bp, synthetic construct
  misc_feature 1..420: note = Description of Artificial Sequence: Synthetic coding sequence
  source 1..420: mol_type = other DNA
atgagtatggaggactatgatttcctttttaaaatagtactgatcggaaatgccggagtaggtaaaacctgtcttgtgagacgcttcacacagggcctgttccctcctggtcaaggagccaccatcggcgtagactttatgattaagacggttgaaataaatggggagaaagtcaaactccagatttgggacacagcgggtcaggaacggttccgctccattacacagagttattacaggtccgccaatgcgctaatactgacgtatgacatcacctgcgaagaatcatttcgttgtctgcctgaatggctgagagagattgagcagtatgcgtcaaacaaggttataactgtattggtaggtaacaaaatagatttggcagagcgacgggaagtctcccagcagagagcagaagagtag

SEQ ID NO: 237692 - DNA, 588 bp, synthetic construct
  misc_feature 1..588: note = Description of Artificial Sequence: Synthetic coding sequence
  source 1..588: mol_type = other DNA
atgatggcgattagggagcttaaggtctgtctccttggagatacaggcgtgggcaagagttcgatagtgtgcaggtttgttcaggaccatttcgatcacaacatatctcctacaataggtgccagctttatgaccaagaccgttccatgtggaaatgagcttcacaaatttttgatctgggacactgctggccaggaacggttccattcactcgctccaatgtattatcggggtagtgcagcggcagtaatcgtgtacgacattacaaaacaggacagtttttacacacttaaaaagtgggttaaagaactcaaagagcacggccctgagaacatcgtgatggctattgccggtaacaaatgcgacctgtctgacatcagagaagtgcctctcaaggacgcaaaggagtatgctgagagtatcggagctattgtggtcgagacctccgccaagaacgccatcaatattgaggagctttttcagggcatttcccgacagattccacctctggatccccatgagaacggcaacaatggcacaataaaagtcgagaaacctacaatgcaggcttcgcgcaggtgttgttag

SEQ ID NO: 237693 - DNA, 561 bp, synthetic construct
  misc_feature 1..561: note = Description of Artificial Sequence: Synthetic coding sequence
  source 1..561: mol_type = other DNA
tgcctccttaatgataccggagtaggtaaatcctctatagtgtgcagattcgttcaggatcatttcgatcacaacatttcccctactataggcgcaagcttcatgacaaaaaccgtcccatgtggaaacgaactgcataaattcctcatctgggacacagccggacaggaacgcttccactcactggcccctatgtattaccgtggctctgcggctgcagtgatcgtgtacgatataacaaaacaggattcgttttacactttaaagaagtgggtcaaggaactcaaggaacacggccctgaaaacatcgtcatggcaatcgctggtaacaagtgtgatctctccgacatccgggaagtgccacttaaagatgctaaggaatacgcggagagtattggagctatcgtagtggagacctcagccaagaatgcaattaacattgaagagctgttccagggaatctcaagacaaattccacccctggacccgcacgagaatggcaacaacggaacgatcaaggtggaaaagcccacaatgcaagcctctaggcgctgctgctag

SEQ ID NO: 237694 - DNA, 678 bp, synthetic construct
  misc_feature 1..678: note = Description of Artificial Sequence: Synthetic coding sequence
  source 1..678: mol_type = other DNA
atggctggcggaggtgccggagatcctggtctgggcgctgcggctgctccagcaccagaaacgagggaacatctgtttaaggtgctggtaattggagagctgggggtgggaaagacctctatcatcaaaaggtacgtgcatcagctctttagccagcattaccgggcaacaattggcgtggacttcgcgttgaaagtacttaactgggatagtcgcaccctcgtcaggctccaactgtgggatatcgccggacaggagcggttcgggaatatgactcgagtgtactataaagaagccgtgggtgccttcgtggtgttcgatatcagtcggtcttcgacctttgaggctgtgttgaagtggaaatccgacctcgattcaaaagtgcatttaccgaacggttctcctatccccgctgtcttactggcaaataaatgtgaccaaaacaaagatagcagccagagcccatcccaggtggaccaattctgcaaagaacacggatttgccggttggttcgaaacttctgccaaggacaacataaatatcgaagaggcagctaggttcctcgtggaaaaaatcctggtcaaccaccagtccttccccaatgaagaaaatgatgtggacaagattaagctagatcaggaaacgctaagagctgagaacaagtctcagtgttgttag

SEQ ID NO: 237695 - DNA, 714 bp, synthetic construct
  misc_feature 1..714: note = Description of Artificial Sequence: Synthetic coding sequence
  source 1..714: mol_type = other DNA
atggcacaacctatcctggggcacggctcccttcagccggctagtgccgctggcttggcatcgctcgaactagacagctcccttgatcagtatgtccagatccggatttttaagatcattgtaattggtgattctaatgtgggcaaaacatgcctaactttccgcttctgcggtggcactttcccggacaagaccgaggccaccattggcgtcgatttccgggagaaaacagtggaaatcgagggtgaaaagatcaaagtgcaggtgtgggacaccgccggtcaggagcgcttccgaaagtccatggtggagcattactacaggaatgtccatgcggtggtgtttgtttatgatgtgacaaagatgacaagttttaccaacctgaagatgtggatccaggagtgtaatgggcatgctgtgccacccctggtgccaaaggtgctggttggaaataagtgtgacctgcgcgaacagattcaggtgccgtccaacctggcgctgaaattcgctgacgctcacaatatgctgctcttcgagacttcagccaaagatcctaaggaaagccaaaacgtggagagcatcttcatgtgtctggcctgcaggttaaaagcacaaaagtccttgctttatcgtgatgctgaaaggcaacaggggaaggtgcagaagctcgagtttccgcaggaggctaacagtaaaacgtcctgcccctgctag

SEQ ID NO: 237696 - DNA, 714 bp, synthetic construct
  misc_feature 1..714: note = Description of Artificial Sequence: Synthetic coding sequence
  source 1..714: mol_type = other DNA
atgaacatcctggctcccgtcagaagagaccgggttctggccgaattgcctcagtgtttgaggaaagaggccgcattgcacggccacaaggactttcatccgcgtgttacctgtgcgtgccaggagcacagaacaggtaccgtcggattctgcaaagatacgttcgataagaattataaggcaactattggagtggatttcgaaatggagcggttcgaagtcctcggaatcccattttccctgcaactctgggacacagccggacaggagaggttcaagtgcatcgcctcaacatactatcggggagctcaggccattatcattgtgtttaatttaaatgatgttgcctccctagagcacactaagcagtggcttgccgatgccctgaaggaaaacgatcccagtagcgtcttgctttttctcgtcggctcgaaaaaagacctgtcaactcccgcacaatatgccctgatggagaaggacgcattgcaagtggcacaagagatgaaagccgagtattgggctgtaagctcgcttacaggagaaaacgtgagagagtttttcttcagggtggccgcactgacattcgaggccaacgtgcttgcagagctggagaagtccggcgctcggaggatcggtgacgtggtcagaatcaactccgatgacagtaacctgtacctcaccgcatctaaaaagaaaccgacgtgttgcccctag

SEQ ID NO: 237697 - DNA, 780 bp, synthetic construct
  misc_feature 1..780: note = Description of Artificial Sequence: Synthetic coding sequence
  source 1..780: mol_type = other DNA
atgaatatactcgcacccgtacgaagggacagggtgttagctgaactgcctcagtgcctgaggaaggaagccgcactgcacggtcacaaagacttccacccacgagtgacctgcgcctgtcaagagcacagaaccggaacagtcggctttaagatatcaaaagtcattgtagtgggagatttgtccgtgggaaagacctgtctgataaatcggttctgtaaggacacatttgacaagaattacaaagccacaatcggggttgactttgaaatggaaagattcgaagtgctgggtatccctttttccttgcaattgtgggacactgcaggacaggagcgattcaaatgtatcgcctccacctactatcggggtgctcaagctattatcatagtgttcaatttaaacgatgttgcgtctctggaacatacaaagcagtggttggccgacgcattgaaggaaaatgacccatcaagcgttctgctgtttttagtcggcagtaagaaggatctgtcgacacccgcacagtacgccttgatggaaaaagatgccttacaagtggcccaggaaatgaaggccgagtactgggctgtgagctccctcactggcgagaatgtgagggagtttttttttcgggttgctgccttgacttttgaagccaatgttctcgctgaactggagaagagcggcgctcgcaggattggcgacgtggtcaggatcaactcagacgatagtaatctgtatcttacagcctcaaagaagaagcccacctgctgcccgtag

SEQ ID NO: 237698 - DNA, 636 bp, synthetic construct
  misc_feature 1..636: note = Description of Artificial Sequence: Synthetic coding sequence
  source 1..636: mol_type = other DNA
atgaacatactggccccagtcagaagagaccgtgtgttagcagaactgcctcagtgcctgcgcaaggaggctgcactccacggccacaaagattttcacccccgagtgacatgcgcctgccaggagcatagaactggaacagtgggctttaaaatttctaaagtgatcgtggtgggcgatctttcagttggtaagacatgtttgattaaccgcttttgtaaagatacatttgacaagaactataaggccactattggagttgacttcgaaatggaaagattcgaggttttaggcattccattcagcctccagctctgggatactgctgggcaggagagattcaaatgtatagcatccacttattacaggggagcacaagctatcatcatagttttcaatctcaacgacgtagcctccctggagcatacgaagcagtggttggccgacgctcttaaggagaacgatcctagcagtgtgctcctcttcttggtgggctccaagaaggacctgagtactcctgctcagtatgccctcatggagaaagatgccctccaggtggcacaagagatgaaagccgagtattgggctgtgtctagcttaactggagagaatgtgcgggagttcttctttagatag

SEQ ID NO: 237699 - DNA, 756 bp, synthetic construct
  misc_feature 1..756: note = Description of Artificial Sequence: Synthetic coding sequence
  source 1..756: mol_type = other DNA
atgaacatcttagcaccagtccgcagagaccgcgtgctggccgagctaccacagtgcctgcggaaggaagccgcattacacgggcacaaggatttccatccacgggttacatgtgcatgtcaggagcacagaacgggaaccgtgggcttcaagatcagcaaggttatcgtcgtgggtgacctgtccgtcggcaaaacctgccttatcaaccggttttgtaaagataccttcgataaaaactacaaggccaccatcggtgtagacttcgagatggagcgattcgaagttctgggaattccattctctctgcagctctgggataccgcgggacaagagcgattcaagtgcatagcaagtacttactatcggggtgcgcaggcaattattattgtctttaaccttaatgacgtcgcctcactcgaacataccaagcaatggctggccgacgcacttaaggagaacgacccaagtagtgtgttgctgtttctgacgcctgcacaatacgcattaatggagaaggatgcccttcaagtggctcaggaaatgaaggctgagtactgggcagtttcctcgttgaccggagaaaacgtccgcgaattttttttcagagtggctgcactgactttcgaagccaatgtgctcgcagagctggagaaaagtggagctaggcgaattggagacgtcgtcaggatcaatagcgacgacagcaatctatatctgacggcctctaaaaaaaagcctacatgctgtccctag

SEQ ID NO: 237700 - DNA, 780 bp, synthetic construct
  misc_feature 1..780: note = Description of Artificial Sequence: Synthetic coding sequence
  source 1..780: mol_type = other DNA
atgaacatactcgcacctgtgcgcagagatagagttctcgctgaactccctcagtgtttaaggaaggaggccgctcttcatggtcacaaggactttcaccctcgagttacttgcgcctgtcaggagcatcgcactgggaccgtggggttcaaaatcagcaaggtcatagtggttggcgacctgagcgtcgggaaaacttgcctgattaatcgcttttgtaaagatacattcgacaaaaattataaggctacaatcggcgttgactttgagatggaacggttcgaagtgctgggcatacctttcagcctgcagctgtgggatacagcaggacaagaacgattcaagtgtattgcaagtacctattacagaggcgctcaagcaattataattgtgtttaaccttaatgacgtagcatctctggagcacacaaaacagtggctggcagatgctttaaaagagaatgacccaagtagcgtcctgctctttcttgtaggtagcaaaaaggacttaagtacacctgctcagtatgcgttgatggagaaggatgctttacaagtggctcaggaaatgaaggctgagtactgggccgtgagttcgcttacaggcgaaaatgtgcgcgagttcttcttccgcgtagctgcactgaccttcgaggctaatgttctggcagaactggagaaaagcggtgccaggcgtattggggacgtggtccggattaactctgatgactcgaatctgtacctgacggcaagcaaaaaaaaacctacctgctgcccatag

SEQ ID NO: 237701 - DNA, 636 bp, synthetic construct
  misc_feature 1..636: note = Description of Artificial Sequence: Synthetic coding sequence
  source 1..636: mol_type = other DNA
atgaatatactggcccctgtgcgcagagaccgcgttctggccgaactgcctcagtgcctgaggaaggaagccgctctgcacggccacaaagatttccaccctcgggtcacctgtgcctgtcaggaacatcggaccggcaccgtggggtttaagatttccaaggttatcgtggtgggcgacctgtctgtgggcaagacgtgcctgattaatcggttctgcaaggatacattcgacaaaaattataaggcgacaatcggagtagacttcgaaatggaaaggttcgaagttcttgggatcccatttagcttacagctgtgggacacggccggacaggagagatttaagtgtatcgctagcacatactatagaggtgcacaagcgatcattatcgtcttcaacctgaatgacgtggcttctctcgagcataccaagcaatggctggccgatgccctgaaagagaacgacccttcttctgtgctcctctttctggttggctcaaaaaaggacctatctactcctgctcagtacgcattgatggagaaggacgctcttcaagtggctcaggagatgaaggcggagtattgggctgtgtccagtcttactggggaaaatgttagagaatttttcttccggtag

SEQ ID NO: 237702 - DNA, 696 bp, synthetic construct
  misc_feature 1..696: note = Description of Artificial Sequence: Synthetic coding sequence
  source 1..696: mol_type = other DNA
taatcattacggttcccgatcacaaacagcgcgggagcaccatgcaaggccgctggacgcatgaacatcctggcaccagtacggagggatcgggttctcgccgaactgccacaatgcttgcgcaaggaagcagctttacatggccacaaggatttccaccccagagtcacatgtgcatgtcaggagcatcgcactggcacagtcgggagattcaagatcagcaaagttatagtggtcggagacctgtctgtaggaaaaacctgcctgatcaatagattttgcaaagatacctttgacaagaactataaggcgacaatcggcgttgactttgaaatggaaaggttcgaggtgttgggtattcccttctcactgcagttgtgggatactgccggacaggaacggttcaagtgtatcgccagtacctactacagaggtgcacaggcaataatcattgtttttaatttgaatgacgtagccagcttggagcataccaaacagtggctagcggacgccctgaaagagaatgaccccagttccgttctgctctttttagtgggttccaagaaagacctgagcaccccggctcagtatgccctcatggagaaggacgcactacaggtggcacaggagatgaagactgtccagcgactgccctctcccagagccctctgtcacccacactcatccagagcctag

SEQ ID NO: 237703 - DNA, 951 bp, synthetic construct
  misc_feature 1..951: note = Description of Artificial Sequence: Synthetic coding sequence
  source 1..951: mol_type = other DNA
atgtctcacctgcccggactagagcttagacgggaggcaccacctctcctggggcctctcctgtcccctttcccactgcccgctggaagttggcatagacaaatgctgaggtcctcacttaggtttccaatcactaatagcgccggagccccttgtaaggcagccggaagaatgaatatcctggctcccgtgagacgggatcgcgtgctggccgagctacctcagtgccttcggaaggaagcggctctgcacggccacaaggactttcatccacgcgtcacttgcgcgtgtcaggagcaccgcacagggactgtgggcttcaagattagcaaagtgattgtggttggagacttgagcgtgggcaagacgtgtcttatcaaccgattttgtaaggacaccttcgacaaaaattataaggccacgatcggtgtggacttcgaaatggagagatttgaagttctggggattcctttttccctccagctgtgggacaccgctgggcaggaaaggttcaaatgtattgcttctacctactatcgcggtgcccaggcaataatcattgtcttcaacttaaacgatgttgcttcccttgaacacactaaacagtggcttgctgatgcactgaaggagaacgacccttcctccgtgctcctattcttggtcgggagcaagaaggacctgtcaacgccggctcaatacgccctgatggaaaaggacgccctgcaggtcgcccaagagatgaaagctgagtattgggcggtctcctctttgaccggtgagaatgtgagagaatttttctttagggtcgcagccctgactttcgaggctaatgtgctggcagagttggagaagtccggtgccaggcgaatcggagatgtggtgaggattaacagcgatgactcaaacttatacctcactgcaagcaaaaaaaagcccacttgctgcccatag

SEQ ID NO: 237704 - DNA, 825 bp, synthetic construct
  misc_feature 1..825: note = Description of Artificial Sequence: Synthetic coding sequence
  source 1..825: mol_type = other DNA
atgctcaggagttcactgcgatttcccataaccaattcagccggagcaccttgtaaggctgctggcagaatgaatatcctggcgccagtccgtagagatcgcgtcttagctgaactgccccagtgtctccgaaaggaagcagctctgcatggtcataaggatttccatcccagagttacttgtgcttgccaggagcaccgaaccggaaccgtgggttttaaaatttctaaggttattgtggttggcgacctatccgtggggaagacctgtctaatcaaccgcttttgtaaggacacatttgataaaaattataaggccacgatcggagtagacttcgaaatggagcgctttgaagtgctgggcattccattctcgctccaactttgggatacagccggtcaggagcgatttaaatgcattgcctccacctactatcgtggggcacaagccatcatcattgtgttcaacctgaacgatgtcgccagcctcgagcataccaagcagtggttggctgacgcattgaaagagaatgatccttcttccgtgttactgttcttgacaccggctcagtatgccttgatggaaaaagacgctttgcaggttgcccaggaaatgaaggctgaatactgggccgtcagctcccttaccggcgaaaacgtgcgagagtttttctttagggtggctgctctgacctttgaagcaaacgttctggcagagctggagaagtctggcgctcgtaggatcggagatgtcgtccgcatcaactccgatgattccaacctgtaccttaccgcctcgaaaaagaagccaacttgttgcccatag

SEQ ID NO: 237705 - DNA, 807 bp, synthetic construct
  misc_feature 1..807: note = Description of Artificial Sequence: Synthetic coding sequence
  source 1..807: mol_type = other DNA
atgagtcatcttcctggcctggaacttcgaagagaggcgccaccattgctggggcctctactgtcgccctttccactccctgcagggtcatggcaccgacagatgcttcgatcgtctttgcgctttccaatcaccaactccgctggggctccttgtaaggcagctgggagaatgaatatccttgcaccagttaggcgcgacagggtgctggccgagctgccccagtgcctacggaaggaggccgctctgcacggtcataaggatttccatcccagagtcacatgcgcatgccaggaacatagaaccggcaccgtcgggagatttaaaatttcaaaagtcatcgtggtgggggacctgagtgtcggcaaaacatgccttattaacagattctgtaaggacacctttgataagaactacaaagccaccattggcgtcgactttgagatggaacggttcgaggtactcggtatacctttttcattgcaactgtgggacaccgctggccaggaacggttcaagtgcatagcttctacatattatcgcggagcccaggccatcattattgtgttcaacctgaacgatgttgcttccctggagcacacaaagcaatggctggccgatgctcttaaggagaatgacccatccagcgtgctgctgttcctcgttggctcaaagaaggacttgagtacccccgcacagtatgcactcatggagaaagacgctctgcaggtggcacaggaaatgaaaactgtccagcggctgccatcaccacgtgccctctgccaccctcactcatcacgcgcatag

SEQ ID NO: 237706 - DNA, 1002 bp, synthetic construct
  misc_feature 1..1002: note = Description of Artificial Sequence: Synthetic coding sequence
  source 1..1002: mol_type = other DNA
atggtcatcgccggagcttcatggatgctgggcagggccgcagctagccccacccagacccctcctaccaccagcacaatcagggtcgccagaagatctagagtggcgctggtggcaatggttatcgcagcggctgggtccgggggtcccggtcgcgctgagcctcagctgtcgcagccttcgttggactgcgggcgtatgcgatcctcattgacccccttgggccctccagtgtcccgtgacagggtgatcgcatcattcccaaagtggtacacacctgaggcatgcttgcagttgcgggaacattttcatggccaggttagcgcagcatgtcagagacgcaatacgggaactgttgggctgaagttaagcaaggtagtggttgtgggagacctgtatgtgggaaagaccagcctcattcaccgtttttgtaaaaatgtcttcgacagggattataaagccaccattggagtcgattttgaaatcgaacgattcgagattgcaggcattccatactctctgcaaatctgggacaccgccggacaggagaaattcaagtgtattgcatctgcctattacagaggggctcaggtcatcatcacagcctttgacctgacagatgtgcaaaccctggagcatacacgccagtggttagaagacgcactccgggaaaatgaggcgggaagctgcttcatcttcctggtgggaaccaaaaaggacttactgtctggcgcagcctgcgagcaggccgaggctgacgcagtccacctggccagggaaatgcaggccgagtactggtcggtatccgctaaaacaggggaaaacgttaaggccttcttctcaagagtcgctgcgctcgccttcgagcagagtgtactacaggatttggagcgccagtcaagtgctaggctgcaggtaggtaatggtgatctcattcaaatggagggcagtcctcctgaaacccaggaaagtaaacgcccaagcagcctcggatgttgttag

SEQ ID NO: 237707 - DNA, 936 bp, synthetic construct
  misc_feature 1..936: note = Description of Artificial Sequence: Synthetic coding sequence
  source 1..936: mol_type = other DNA
atggtcatcgctggcgctagttggatgttgggacgcgctgccgcttctcccacgcaaactcccccaaccacatccacgattcgggtcgctcgccgtagccgcgtggccctcgttgctatggtgatagcagccgctgggagcgggggtcctggcagagctgaaccccaactgagccagccgtccctggattgcggtagaatgagatcttctttaaccccgctgggtccacccgtgtcaagagatcgcgtcattgcgtctttccccaagtggtacacaccggaagcatgtctccagcttcgagagcacttccatggccaagtcagcgccgcttgccagcgaaggaacaccggcaccgtgggtttctgtaagaacgtgtttgaccgcgattataaagccacaatcggagtggattttgaaatcgaaagatttgaaattgcgggaatcccctactcactgcagatctgggacactgctggccaagaaaaattcaaatgtattgcctcagcatattaccgcggagcacaagttataattactgccttcgaccttaccgacgttcagacattagaacatacaagacaatggcttgaagacgccctccgggagaatgaagccggaagctgttttatcttcctcgtcggaaccaaaaaagatctactttctggggctgcctgtgagcaggctgaggcagacgctgtccatctggctcgggagatgcaagccgaatactggtccgtgagtgctaaaaccggtgagaacgttaaggccttcttcagccgggttgctgcactcgctttcgaacagagtgtcctccaggatttggaaaggcagagcagtgcacgattacaggttggaaatggcgacctgatccaaatggagggatccccccctgagacgcaagagagtaagcgcccatcttcactcggctgctgctag

SEQ ID NO: 237708 - DNA, 498 bp, synthetic construct
  misc_feature 1..498: note = Description of Artificial Sequence: Synthetic coding sequence
  source 1..498: mol_type = other DNA
atggttatcgcagctgccggttctggtggacctggaagggcagagccacagctcagccagccaagcctcgactgtgggcgtatgcggtccagtctgacccctctcggacccccagtgtctcgcgacagagtgatcgcgtcctttcccaagtggtatacaccagaggcctgtttgcagctccgcgaacacttccatggccaggtgtcagctgcctgtcagcggagaaataccggcacagtgggcctgaagctttctaaagtagtcgtggttggagatctgtatgtcggcaagacgtctctatcagcgcagtatgcacatcctcagggatttctcaccgccatgaaccaaccacatagccctaggccgttgtcacccggatatgcccatagcagtcacccatcacgcgctgtcgcttctaggaggtggagggccccatgcaggcagccgtccgaccagtattgcagtccaagggcctggcacacagccgctgcgctctag

SEQ ID NO: 237709 - DNA, 549 bp, synthetic construct
  misc_feature 1..549: note = Description of Artificial Sequence: Synthetic coding sequence
  source 1..549: mol_type = other DNA
atggacctgcagcgacctgactcttaccagggaggagctggtcccgatttcaacgaccacgtactccataagactatcctggtcggggactctggggtggggaaaactagcctcctagtccagtttgaccagggtaagtttattcccggtagcttcagtgcgacagtaggtatcggcttcacaaacaaggtggtgactgttgacggcgtccgcgtgaagctgcagatctgggacaccgctggccaagagcgcttcagatccgtaacacacgcctattatcgggatgcccaggcgctactgcttctgtatgacattacaaataagtcaagttttgataacatcagggcttggttaaccgaaattcatgagtatgctcagcgtgatgtcgttatcatgttgcttggcaataaggcagacatgtcctctgaaagggtgatcaggtcagaggatggggagactctggcacgagaatatggggtgccatttctggagacaagtgcaaagacggggatgaacgttgagctcgcctttctcgctatcgccaaatag

SEQ ID NO: 237710 - DNA, 570 bp, synthetic construct
  misc_feature 1..570: note = Description of Artificial Sequence: Synthetic coding sequence
  source 1..570: mol_type = other DNA
atgacgggcacacccggagctgttgctacgagggatggggaagcacccgaaagatctcccccttgctcaccgtcatatgacctgactgggaaggtcatgttactcggagataccggtgtaggtaaaacctgcttcctcatccagtttaaagacggcgcattcctatctggaaccttcattgccacagtgggaatcgacttcaggaataaagttgtgactgtagacggcgtgcgtgttaaactgcagatttgggacactgctggccaggagaggtttcggagcgtcactcacgcatactatcgcgacgcccaagcccttctgttgctctatgatattaccaataaatcttctttcgacaatattcgtgcctggcttaccgagatccatgaatacgctcagagagacgttgtcattatgctactggggaataaggccgacatgagcagcgagagagtgatcagatctgaggacggagaaacgctcgcacgtgaatatggggtacctttcctggagacaagtgcaaagacaggcatgaacgtagagctcgcttttctggcgattgccaagtag

SEQ ID NO: 237711 - DNA, 561 bp, synthetic construct
  misc_feature 1..561: note = Description of Artificial Sequence: Synthetic coding sequence
  source 1..561: mol_type = other DNA
atgactggtacccctggggctgtcgctactagggatggggaagcgcctgaacgttctcccccatgctcccccagttatgacctaacgggaaaaaataaggttgtcacagtggacggcgttcgggtgaagctgcagatttgggatacagccggtcaggaaagattccgctccgtcacacacgcatattatagagatgcacaggccctgctgcttttgtatgacattacaaacaagtcctcctttgataatatccgcgcatggttgaccgagattcatgagtacgctcagcgagatgtagtcatcatgctactcggcaataaggcagatatgtctagcgaaagagtaattcgtagtgaggacggagagaccctcgccagggagtatggcgtgccatttctggaaaccagtgccaaaacagggatgaatgtggaactggctttcttggccatcgccaaggagttgaaataccgcgctggtcaccaggctgatgaaccgagcttccagatcagagactacgtggagtcccagaagaaacggtcgtcctgctgtagctttatgtag

SEQ ID NO: 237712 - DNA, 672 bp, synthetic construct
  misc_feature 1..672: note = Description of Artificial Sequence: Synthetic coding sequence
  source 1..672: mol_type = other DNA
atgactggcactccgggtgcagtggctactcgagacggcgaggctcccgaacgatctcccccttgcagccctagctatgatctgaccggcaaggtgatgcttctgggcgatactggtgtgggcaaaacttgttttctcattcagttcaaagacggtgcctttctgtctggaacctttattgctactgtcggaatcgattttcgaaacaaggtcgtgaccgtcgatggagttagagtgaagctgcagatatgggacaccgctggtcaggagcggttccggtcggtaacccacgcgtattatagggacgctcaggctctgctgctcctctacgacattacaaacaaatctagctttgacaacatccgcgcttggctcacagagattcacgaatatgctcagagagacgtcgtcatcatgttgctgggaaataaggccgacatgtcttcagagcgggtgatcaggtccgaagacggtgaaacattagcccgagagtacggcgtaccctttctggagactagtgcaaagacgggcatgaacgtcgaactcgcattcctcgctatcgcgaaggagctaaagtatcgagccggtcaccaggctgatgagccaagcttccagattcgcgactatgtcgagtctcagaagaaacgttccagttgttgttcatttatgtag

SEQ ID NO: 237713 - DNA, 687 bp, synthetic construct
  misc_feature 1..687: note = Description of Artificial Sequence: Synthetic coding sequence
  source 1..687: mol_type = other DNA
atgtggctgatgtccgaagcgcatggtgcagagcccgtgttacttcgagaagctgccaggccttttactcagacactgcgtctgtgtgtcccgtcaggtaattccaaggtgatgctgcttggtgacaccggggtcggaaagacctgcttcctcatccagttcaaagacggcgcattcctctcaggaaccttcatcgctaccgtgggcatagatttccgcaacaaagtcgtgactgtagatggggtgcgcgtgaagttacagatctgggacactgccggtcaggagaggtttagatctgtgacacacgcgtattatcgggacgcccaggccttgctgcttctttacgatattacaaataaaagtagctttgataacatacgggcatggctgactgagattcatgagtatgcccaacgggatgtcgttatcatgctgcttgggaataaagcagatatgagctccgaacgggtgatcaggtccgaagacggagaaaccttggcacgcgaatatggcgtgccattcctcgaaacttcagccaaaactggcatgaacgtggagctcgcctttttagctattgccaaggaactaaagtatagggctggacatcaagccgacgaaccaagctttcagatacgcgattatgtggaatctcagaagaagagatcaagttgctgcagcttcatgtag

SEQ ID NO: 237714 - DNA, 576 bp, synthetic construct
  misc_feature 1..576: note = Description of Artificial Sequence: Synthetic coding sequence
  source 1..576: mol_type = other DNA
atgtggctcatgtcggaggcccatggagctgaaccggttctgttacgcgaagccgcaaggccttttacccagacactgcgcctgtgtgtgccctccggaaacagcaagaacaaagtcgtgacagtggatggtgtccgggtgaagttacagatttgggatactgccggacaggagcgatttcggtccgtcactcatgcctactacagggacgctcaggcgttgctgctgttatacgatatcacaaataagagcagcttcgataatatcagagcctggctcactgagatccacgagtacgcacagcgtgatgtggtgattatgctcctgggaaataaagccgacatgagctcggagcgggtaatccggtccgaggacggtgagacactagccagagagtacggcgtgcctttcttggagacaagcgccaaaaccggtatgaatgtggagctcgccttcctcgccattgcgaaggaattgaagtatcgggcaggtcaccaagctgacgaaccaagcttccaaatccgtgattacgtcgaatctcaaaagaagcgctcttcctgctgttctttcatgtag

SEQ ID NO: 237715 - DNA, 510 bp, synthetic construct
  misc_feature 1..510: note = Description of Artificial Sequence: Synthetic coding sequence
  source 1..510: mol_type = other DNA
atggatctgcagcggccagacagttatcagggcggagccggtcccgactttaacgaccacgtgctgcacaaaaccattttagtcggagatagtggggtggggaagactagcctgctcgtccagttcgatcagggcaaatttattcctgggagtttctccgccaccgttggcataggttttacgaataaagttgttactgtggatggagttcgggtgaagcttcagatctgggacactgcaggtcaggagagattccggagcgtcacccatgcatattaccgggacgcccaggcgcttttgttgttgtatgatataactaacaaatcatcgtttgacaatattcgcgcttggcttacagaaatacacgagtacgcgcagagagatgtggtaattatgcttctcgggaacaaggtctccgggagtggcgcagggtccgcccagccctgcacttcctcagccctcgctggaccgataacaactcaagagcaactgtctaggcacccttcttag

SEQ ID NO: 237716 - DNA, 651 bp, synthetic construct
  misc_feature 1..651: note = Description of Artificial Sequence: Synthetic coding sequence
  source 1..651: mol_type = other DNA
atggacttgcaaaggccggactcttaccagggaggcgctgggccagactttaacgaccatgttctgcataaaactatcctggttggggactctggagtgggaaagacgtccctcttggttcagtttgaccagggcaaatttatcccgggatctttcagcgcaactgtagggatcgggtttactaacaaggtagtgacagtagacggtgttcgggtcaaactgcaaatttgggataccgccggtcaggagcgtttcaggagcgtgacccacgcctactatcgcgatgcccaagccctgctcctgctgtacgacattacaaataagagttcctttgacaacattagagcgtggttgacggagatccacgagtatgctcagcgcgatgtggtgatcatgttgcttgggaataaagccgacatgtcctcggaacgggtgatcaggagcgaggatggggagactctggctcgggaatacggggtgccattccttgaaacaagtgcaaagacagggatgaatgtggagttggcgttcttagctattgctaaagagctaaagtatcgggctggccatcaggcggatgagccatccttccagatacgtgattatgtggagtcacagaagaaacgctcttcgtgttgttcattcatgtag

SEQ ID NO: 237717 - DNA, 651 bp, synthetic construct
  misc_feature 1..651: note = Description of Artificial Sequence: Synthetic coding sequence
  source 1..651: mol_type = other DNA
atggatctccagcggcctgactcatatcaaggaggagctggacccgattttaacgatcatgtgcttcacaaaactattttagtgggcgatagtggggttgggaagacttcactgcttgtgcagtttgatcagggcaagttcattcctggatcatttagtgcgacagtggggatcgggtttacaaataaagtcgtcactgtggacggagtgcgagtgaagcttcagatctgggatacggccggacaggaacggtttagaagtgtcacacatgcatactacagagatgcacaggccctcttactcctttacgacatcaccaacaagtccagcttcgataacatcagagcttggttgaccgagatacatgagtacgcccaaagagatgttgtgattatgctcctggggaataaggccgatatgagtagcgaaagagtgatccgaagcgaggatggcgaaaccctggcacgagagtatggcgtacctttcctggaaaccagtgccaagaccggaatgaacgtggaactggcttttctggctatcgcgaaggaactcaagtatagagctggtcaccaagcagacgagccttccttccagattagagactatgtcgaaagccagaagaaaagatcctcatgctgttcatttatgtag

SEQ ID NO: 237718 - DNA, 672 bp, synthetic construct
  misc_feature 1..672: note = Description of Artificial Sequence: Synthetic coding sequence
  source 1..672: mol_type = other DNA
atgacaggaactcccggtgctgttgcaacgagggatggcgaggcacctgaacggtccccaccatgctcgcccagctatgatcttaccggcaaggtcatgttgctgggggacaccggggtaggcaagacatgttttctcattcagtttaaagatggggcattcctatcaggaacgtttatcgcaaccgttggaatcgacttcaggaataaagtggtaaccgtggatggagtccgcgtaaagctgcagatttgggatactgcaggacaggaacgttttcgttcggtaacacatgcctactacagggacgcccaggcactgttgttgttgtatgatattaccaataagtccagtttcgacaacattagagcttggctaaccgagattcacgagtacgcccagagagatgtagtgatcatgctgctcggcaacaaggccgatatgtcttcggagagagtgattcggtccgaagatggcgagactctggcacgggaatatggagttccctttcttgaaacatctgctaagactggcatgaatgtggaacttgcctttcttgccatagccaaagaactgaaataccgcgctggccaccaggcagacgagccttctttccaaattagagactacgtggaaagtcagaagaaaagaagttcctgttgttcttttatgtag

SEQ ID NO: 237719 - DNA, 591 bp, synthetic construct
  misc_feature 1..591: note = Description of Artificial Sequence: Synthetic coding sequence
  source 1..591: mol_type = other DNA
atgtgctgcaaggtcatgctgctgggagataccggagtgggcaaaacatgcttcctcattcagttcaaggacggtgcatttctgagtgggacctttatcgcaaccgtcggaatagacttccggaacaaggtcgttaccgtggacggagtccgtgtgaagctgcagatttgggatactgcaggccaggaacgctttcgtagtgtgacacacgcctactatagggacgctcaagctctacttttgctgtatgacatcaccaataagtcttcttttgataacattcgcgcatggctgaccgagatccacgagtatgcccagagagatgtagtgattatgctgctgggcaataaggccgacatgtccagcgagcgggttatacgttcagaggatggggagacactggcgcgtgaatatggcgtcccatttctggaaacgagcgcaaagacagggatgaacgtagaattggcatttctggcaatcgctaaggaactgaagtaccgggcaggccatcaagcagacgagccttcctttcaaattagggactatgtcgagtctcagaagaaaaggtcttcctgttgtagctttatgtag

SEQ ID NO: 237720 - DNA, 636 bp, synthetic construct
  misc_feature 1..636: note = Description of Artificial Sequence: Synthetic coding sequence
  source 1..636: mol_type = other DNA
atgcaggcaccacacaaagagcacttgtacaagttactggtcatcggggatctgggcgtgggaaagacaagcattattaagaggtatgttcaccagaatttctcgagccactaccgggcaactatcggcgttgatttcgcactgaaggtcctccattgggatcccgagacggtggtccgattgcagctgtgggacatcgctgggcaagaacgatttggaaacatgactcgagtgtattacagagaggccatgggtgcctttattgtcttcgatgtcaccagacctgcaaccttcgaagcagtggcgaagtggaagaatgatctggatagcaaacttagcctccccaacggcaagcctgtgagcgtagtgcttctcgcgaacaaatgcgaccagggtaaagacgtcctcatgaacaatgggctaaaaatggaccagttttgcaaagagcatggttttgtggggtggtttgaaacctccgccaaggagaacatcaatatcgatgaagctagtcgatgcttagttaagcatattttagcaaacgagtgtgatctaatggagtcgatcgaacccgatgtcgtcaaaccgcatctgacatccacaaaagtagcgtcttgtagtggatgcgccaaaagttag

SEQ ID NO: 237721 - DNA, 642 bp, synthetic construct
  misc_feature 1..642: note = Description of Artificial Sequence: Synthetic coding sequence
  source 1..642: mol_type = other DNA
atggaagccatctggctgtaccagttcaggctcatcgtgataggagacagcactgtgggcaagtcatgtctgatcagacggttcaccgaaggcagatttgctcaggtgtcagatcccacagtgggtgtcgatttcttcagcaggcttgttgaaatagaacctggcaagcgtataaagctgcagatctgggatacagccggacaggagcggttccgctctattacacgggcttattacagaaactccgtcggaggactccttttgtttgatattaccaatagaagatccttccagaacgtgcatgagtggctcgaggagaccaaggtgcatgtgcagccataccagattgtctttgttctcgtgggccataaatgcgacctcgatacacagcggcaggtgactagacatgaagccgaaaaactagcagccgcttacggcatgaaatacattgaaacctccgctagggatgcgatcaacgtcgaaaaagcattcactgaccttactcgagatatttacgagttggtgaagaggggcgaaatcaccatccaggagggatgggagggagtaaagtctgggttcgtaccaaatgttgttcattcatcagaagaagttgtcaagtccgagcgtcgctgcctgtgctag

SEQ ID NO: 237722 - DNA, 2187 bp, synthetic construct
  misc_feature 1..2187: note = Description of Artificial Sequence: Synthetic coding sequence
  source 1..2187: mol_type = other DNA
atggcgggtcccgagggcttccaatatagagcactgtatccattcaggcgcgaacggcctgaggatctggagctgcttcccggtgatgttctggtcgtttcacgagccgctttacaggccctgggcgtggccgagggcggagagcggtgtccgcagagcgtgggatggatgccaggtctcaacgaacgcactcggcagaggggtgacttccccggaacatacgttgagttcttaggtcccgtggcgctcgccaggcctggtccgaggcctcgcggtcccaggcccttgcctgcacgacctagagacggcgcaccagagccaggcttgactcttcctgacctaccggagcagttttcacctcctgatgtggcacctcccctcctagtcaagctcgtcgaggcaatcgaacggaccggcttggatagcgagtctcattacagaccagagctaccggcaccgagaacagactggagcctgagcgacgtcgatcagtgggacacagctgctctggcagatggcataaaatcctttttgctggcccttccagcacccctggtcacacccgaagcctcggcagaagctcgtcgtgccctgagagaagcggcaggccctgtgggaccggctcttgaaccccctacactgcctttacatcgggcactgaccctccggttcttgctccagcacctcggtcgagttgccagtcgcgcacccgctctgggccctgccgtgagggccttaggtgccacattcggccctctgcttctccgggcacctccgccaccctcgagcccacccccaggcggagccccagatggatccgagcccagtccggattttcctgctctcttagtcgagaaactcctgcaagagcacctggaagaacaggaagtagccccaccagctctgccgcctaagcctccgaaggccaagcccgcatcgaccgtgctagctaacgggggttcgcctcccagcctgcaggatgctgagtggtactggggcgatatcagtcgagaggaggtgaatgaaaaactacgagatacacctgatggaacattccttgttagagacgcaagctctaaaatacagggagagtatacgctcaccctccgaaaggggggaaataacaaacttatcaaggtgtttcatcgggatggacattacggctttagcgagcctctcactttttgctctgttgtggatctgatcaatcattaccggcacgagtccctggcccagtataatgcaaagcttgatactcgcctgctgtaccccgtcagcaaataccagcaagaccagattgtcaaggaggacagcgttgaagccgtcggagcacagctcaaagtctatcatcaacagtatcaggacaaatcaagagaatacgatcagttgtacgaggagtacactagaacttcccaggaactccaaatgaagcggaccgccattgaagcttttaacgaaaccatcaagattttcgaggaacagggacaaactcaggaaaaatgtagcaaagagtacttggaaaggtttagacgggagggcaacgagaaagaaatgcagcggatcctgctgaactctgagagattgaaatcccgtatcgccgaaatacacgagtctcgaaccaagctggaacagcaactaagggctcaggcctcagacaaccgtgagatcgataagcggatgaacagcctgaagcccgaccttatgcaactccggaagataagagaccagtatctggtgtggcttacacaaaagggagctagacagaagaaaataaatgagtggctcggtatcaagaacgaaacagaagaccaatacgctcttatggaggacgaagatgacttgcctcatcacgaggagagaacctggtatgttggcaagatcaatagaacacaggccgaggagatgctctcaggcaagcgggatgggacgtttctgatccgggagagcagtcagcgcggatgctacgcatgctccgtcgtcgtggatggggacaccaagcactgtgtcatttacagaaccgcgactggtttcggattcgccgagccctacaacttatacggctccctgaaggagctggtgcttcactaccaacatgcctcgttggtgcagcacaacgacgctctgaccgtaactttagcacaccccgtacgggctccaggtccaggtcctcctccggctgcgagatag

SEQ ID NO: 237723 - DNA, 660 bp, synthetic construct
  misc_feature 1..660: note = Description of Artificial Sequence: Synthetic coding sequence
  source 1..660: mol_type = other DNA
atggccagcgttactgatgggaaaacaggagttaaagacgcgtccgaccaaaattttgattacatgtttaaacttctgattatagggaacagcagcgtcggcaaaacttcctttcttttcaggtatgcagatgatacgtttactccggcttttgtaagtaccgtgggaattgattttaaagtgaaaactgtatacaggcacgaaaagcgagtgaagttacagatttgggataccgctggtcaggaacgatacaggacaataactacagcttactaccgcggtgcaatgggcttcatcctcatgtacgacatcacaaatgaagagtcattcaatgctgtacaggactgggccacccagattaagacctattcttgggacaatgctcaagtgatacttgtcggcaataagtgtgacatggaagaagaacgcgtggtccccactgagaagggccagctcctcgctgaacagctgggttttgacttctttgaggcctccgccaaagaaaacatctccgtgaggcaggcattcgaacgactggtggatgccatctgcgacaaaatgtccgactctcttgataccgacccaagcatgcttggcagcagcaagaatactagactttcagatacccccccactcctccagcaaaactgttcatgttag

SEQ ID NO: 237724 - DNA, 660 bp, synthetic construct
  misc_feature 1..660: note = Description of Artificial Sequence: Synthetic coding sequence
  source 1..660: mol_type = other DNA
atggcctcagtgactgatggcaagacaggcgtgaaggacgcgtcagatcaaaattttgattacatgtttaaactgctgatcattgggaattcgagcgtgggcaagacatccttcttgttcaggtacgcagatgatacattcacacctgcattcgttagcaccgtgggcatcgattttaaagtgaaaacagtttaccggcacgaaaaaagggtcaaattgcagatctgggatactgctgggcaagaaaggtatcggacgatcacaactgcctattataggggtgccatggggttcatactgatgtatgatattacgaatgaagaaagtttcaatgctgtacaagactgggcgactcaaatcaaaacgtatagttgggataatgctcaagtcatattggtagggaacaagtgtgacatggaggaggagcgagttgtgccaactgaaaagggacaattgctggccgagcagttgggcttcgattttttcgaagcgtcagccaaggagaacatttccgtgcggcaggcttttgagaggctggtcgacgctatatgcgataaaatgtccgatagcttggacaccgacccctcaatgctgggaagtagcaagaacacaagactaagcgacacacccccactactgcagcagaactgttcatgttag

SEQ ID NO: 237725 - DNA, 684 bp, synthetic construct
  misc_feature 1..684: note = Description of Artificial Sequence: Synthetic coding sequence
  source 1..684: mol_type = other DNA
atgaggcatgaggctccaatgcagatggcctctgctcaggacgcaagatatgggcagaaggatagctctgaccaaaacttcgactatatgtttaagctgttaataatcggaaactcttccgtcggcaagaccagcttcctgtttcgttacgctgatgactctttcacctccgctttcgtgagtacggtcggtatagacttcaaggtaaagacagttttcaagaatgaaaaaagaataaaactgcagatttgggacactgcaggacaggaacgttacagaactattacaaccgcctattatcgaggagctatggggtttatactgatgtacgacattaccaacgaggaatcctttaacgctgtgcaggactggtccacccaaatcaagacctactcatgggataacgcacaggttattctggtgggaaacaagtgcgatatggaagacgagcgcgtcatttctacggaaaggggacagcatttgggcgagcagttgggcttcgagttttttgagacctcggctaaggacaatatcaatgtgaagcagactttcgagagactggttgatataatttgtgacaagatgtcagagtcacttgagaccgaccccgcaataacagctgccaaacagaatacacggttaaaagaaacgcctcccccaccacagcccaactgtgcatgctag

SEQ ID NO: 237726 - DNA, 783 bp, synthetic construct
  misc_feature 1..783: note = Description of Artificial Sequence: Synthetic coding sequence
  source 1..783: mol_type = other DNA
atggctggcagccctctgctctggggacctagggcaggcggtgtcggcctgcttgtcctcctgctgttaggattgtttcggcctccccctgccctttgtgcccgtccagtgaaggaacccagagggctgtccgcagccagccctcccttggctgagacaggagccccacggaggtttcgcaggagtgtgcccaggggagaggccgcaggggctgtgcaagagttggcacgagcccttgctcacctcctcgaggctgagaggcaggagagagcgagagcggaagcccaggaagccgaggaccagcaggctcgagttctagcacaactgctccgggtgtggggagcgccacgtaatagtgacccggctctggggctcgacgacgacccggatgcaccagcagctcaactggcaagagcgcttttgcgcgctcgcctggatccagctgctctggccgcacagctagtgccggctcctgtccctgccgcagctctgaggccaagacccccagtgtacgacgatggacctgccggaccggacgccgaggaggccggtgatgaaacacctgatgtcgatccagaactgttgcgttatctcctgggtcggatcttggccggttcagcagatagcgaaggggtggcagcccctagacgattaaggagagccgctgatcacgatgtgggatctgagcttcctcccgaaggggtactgggtgccctcctccgggttaagcgcctcgagactccagctcctcaggtgcccgctcggagactgctgcctccctag

SEQ ID NO: 237727 - DNA, 657 bp, synthetic construct
  misc_feature 1..657: note = Description of Artificial Sequence: Synthetic coding sequence
  source 1..657: mol_type = other DNA
atgagccagactgcaatgagtgaaacctatgactttctgtttaagttcttggtcattggaaacgccggaactggtaaatcttgcctcctgcaccagttcattgagaagaagttcaaagatgacagcaatcacacaattggcgtggaatttgggtcaaagataatcaacgtggggggaaagtacgtgaagctgcagatctgggacacagcagggcaggaacgatttcggagtgtgacaagatcatactaccgaggcgcagctggagccctgctggtttatgacattacttccagagagacatataacgccctgactaattggttgactgacgctcggatgctggccagtcagaacattgtgataatcctgtgtggcaataaaaaggaccttgacgctgaccgtgaagtaacatttctggaggcatcaagattcgcccaggagaatgagctgatgtttctggagacttccgctctcactggcgaaaatgtggaggaggcgtttgtccaatgtgccagaaagattctgaataagatagaaagtggcgaacttgacccagagagaatgggcagcggaatccagtacggagatgccgctctaagacagctgagaagccccagaagagcccaagctcccaacgcccaggaatgcggttgctag

SEQ ID NO: 237728 - DNA, 648 bp, synthetic construct
  misc_feature 1..648: note = Description of Artificial Sequence: Synthetic coding sequence
  source 1..648: mol_type = other DNA
atggcttcacgcggtgcaactcgacctaacggacccaacactggaaacaagatttgtcagttcaagctggttcttttgggcgaaagtgccgtggggaagtccagcctagtgctccgattcgtaaaggggcagtttcatgaatttcaggagtcaacaatcggggctgcctttctgacacaaaccgtgtgtctcgatgacaccacggtcaagtttgagatttgggacacagccggacaggagcggtaccacagtctcgcaccaatgtactaccgaggagcccaagccgctatcgtggtctacgacattaccaacgaagaatcatttgcgcgtgccaagaattgggtgaaagagttacagaggcaagcatcccctaacattgtgatagcgctctccggcaacaaggcagacctggccaataagcgggcagtagattttcaggaggcgcaatcctacgccgacgataatagtcttttgtttatggagacatccgctaagacaagcatgaatgtcaatgagatctttatggcaatcgcaaaaaaactgccgaagaacgagccccagaaccctggggcaaactcagcccgaggacgaggtgtcgatctcaccgagcccacacagccgacgaggaatcagtgttgcagcaactag

SEQ ID NO: 237729 - DNA, 606 bp, synthetic construct
  misc_feature 1..606: note = Description of Artificial Sequence: Synthetic coding sequence
  source 1..606: mol_type = other DNA
atggctagccgaggagcaacaagaccaaacggtccgaataccggcaataagatctgccagttcaaattggtgctcttaggcgagtctgccgtgggcaaatcttctctggtattaagatttgtgaagggccagtttcatgaatttcaggaatccactatcggcgtgaagttcgagatctgggatacagccggacaggagaggtaccatagtttagcacccatgtattatcgcggagcccaggctgcgatcgtcgtgtacgacatcaccaatgaagaatcatttgcccgtgctaagaactgggtcaaagagttgcagagacaggccagtccaaacatcgtaatcgcactatcaggaaacaaagccgacctcgccaacaagcgagctgtcgatttccaggaagcacaatcctatgcagacgataattcattgttgtttatggagacctcggcgaagacctccatgaacgttaacgagatctttatggccattgccaaaaagctcccgaaaaacgaaccccagaatccaggggcaaattccgccaggggccgtggggtcgacctcacagaaccgactcagccgacccggaatcagtgctgttctaattag

SEQ ID NO: 237730 - DNA, 48 bp, synthetic construct
  misc_feature 1..48: note = Description of Artificial Sequence: Synthetic coding sequence
  source 1..48: mol_type = other DNA
atggcatctagaggagctacaaggcccaatggaccaaacacaggctag

SEQ ID NO: 237731 - DNA, 648 bp, synthetic construct
  misc_feature 1..648: note = Description of Artificial Sequence: Synthetic coding sequence
  source 1..648: mol_type = other DNA
atgaccagcaggtcaactgccaggcctaatgggcagcctcaagcctcaaagatttgccagttcaagctggtgctgctgggagaatccgccgtcggaaagtcgtctctggtcctgcggtttgtgaaaggccagttccatgagtatcaggaaagcaccatcggcgcagccttcctgacgcagtccgtatgtttggatgacactactgtaaagtttgagatatgggacactgctggccaagagcgctatcactcattagctccgatgtattatcgcggagcgcaggccgcaatcgtggtatatgatattaccaaccaggagacattcgctagagccaagacgtgggtcaaagagcttcagcgacaagcctccccttcaatcgtcattgcacttgccggtaacaaagccgacttggctaacaagaggatggtggagtacgaggaggcacaggcttacgcagatgacaattcactgctgttcatggagaccagcgcaaaaactgctatgaacgtgaatgacctcttcctagcaatcgcaaagaaactgcctaagagtgagccccaaaatctggggggtgccgcaggtcgcagtaggggggtcgatctccatgagcagagccagcagaacaagagccaatgctgctccaattag

SEQ ID NO: 237732 - DNA, 525 bp, synthetic construct
  misc_feature 1..525: note = Description of Artificial Sequence: Synthetic coding sequence
  source 1..525: mol_type = other DNA
atgacttcacgatccactgccaggcccaatggacaaccccaggcttccaagatctgtcaatttaaattggtgctgctgggcgaatcagccgtaggcaaatcgtccttagttctcagatttgtaaagggccagttccacgagtaccaagaatcaacaatcggcgctgcattcctcactcagagcgtctgcttggatgataccacagttaagtttgaaatatgggacacagccggtcaggaaagatatcactcactggccccaatgtactaccggggagcccaggctgccatcgtcgtctacgatattaccaaccaagaagcgcaggcttacgccgatgataacagcctgttatttatggaaacttcagcgaaaacagccatgaacgttaacgacctgtttctggcaatcgctaagaaattgcctaagagcgagccgcaaaacctgggcggagctgctgggagatcccggggagtcgatctgcacgagcagagtcagcagaacaaatcccagtgctgcagtaattag

SEQ ID NO: 237733 - DNA, 348 bp, synthetic construct
  misc_feature 1..348: note = Description of Artificial Sequence: Synthetic coding sequence
  source 1..348: mol_type = other DNA
atgacctctagaagcaccgctagaccaaacggccagccccaggcgtcgaaaatctgccagttcaaactggttcttctaggcgaatccgctgttggcaaatcctctctggtgctgagattcgtcaaggggcaattccacgaataccaggagagtacaatcggagccgctttcttgacccagagcgtctgtctggatgataccaccgttaaatttgagatatgggatacagccggtcaggagcgctaccactctctagcccctatgtattatcgcggagcacaggctgcaatagtcgtgtatgacatcactaatcaggaaacctttgccagagccaagacctgggtttag

SEQ ID NO: 237734 - DNA, 303 bp, synthetic construct
  misc_feature 1..303: note = Description of Artificial Sequence: Synthetic coding sequence
  source 1..303: mol_type = other DNA
atgacttcccgaagcactgccaggcccaatggccagcctcaggcaagcaaaatatgccagttcaagctcgtgctgcttggcgagagtgctgtcggtaagagctccctggtgttgcgctttgttaagggtcagtttcacgagtatcaggaatcaaccattggcgctgccttcctgacccaatccgtgtgcttggacgacaccacagtgaaattcgaaatctgggacacggcagggcaggaacgctaccattctctagcccctatgtactatcgtggtgcccaagccgctatcgtggtttactag

SEQ ID NO: 237735 - DNA, 648 bp, synthetic construct
  misc_feature 1..648: note = Description of Artificial Sequence: Synthetic coding sequence
  source 1..648: mol_type = other DNA
atgactagccgcagcacagcgagacccaacggacaaccccaggcttcaaagatctgccaattcaaactcgtcctcctgggtgaaagcgctgttggcaagtcttcactagtcttacggttcgtgaagggccagtttcacgaataccaggagtccacaatcggtgcggcattcctcacacagtcagtatgtctggacgatacaaccgtaaagttcgaaatttgggatactgctggccaagaacggtatcactccctggcacccatgtactaccggggagctcaggctgctatcgtcgtttatgacatcaccaatcaggaaacattcgctagagctaaaacttgggtgaaggagctgcagcgccaggcttcaccctctatcgtgatagcactcgccggtaacaaggcggatctcgcaaacaaaagaatggtggagtacgaggaggctcaggcatatgccgacgacaatagtctattattcatggaaaccagcgcgaagaccgcaatgaatgtcaacgatctgttccttgctattgccaaaaaacttcctaagagcgagcctcagaacctggggggagccgctggacgatccagaggcgtggacttacacgagcagagtcagcagaacaagagtcagtgctgctccaattag

SEQ ID NO: 237736 - DNA, 651 bp, synthetic construct
  misc_feature 1..651: note = Description of Artificial Sequence: Synthetic coding sequence
  source 1..651: mol_type = other DNA
atggcgggacggggtggagccgcaaggccgaacggacctgccgctggaaacaagatctgtcaattcaagttggtgctcctgggagaaagcgccgtcggaaagtcgtccctggtccttcggttcgtgaagggccaattccatgaataccaggagtctactatcggagccgcattcttaacccagactgtgtgcctggatgataccacagtgaagtttgaaatctgggatacagccggacaggaaagataccattcacttgctcccatgtactaccggggtgcgcaggccgcaatcgttgtctatgacatcaccaatactgacacattcgccagggcaaagaactgggtcaaggaactgcagcggcaggcatcccctaacatagtgatcgcgctcgccggaaataaagctgacttagcctctaagcgcgcagtagagtttcaggaggcgcaagcctacgcagacgacaattccctccttttcatggaaacaagtgccaagaccgccatgaatgtgaacgagatcttcatggcaattgctaaaaagcttcctaaaaacgaaccacaaaatgctacgggagccccaggcagaaacaggggggtggatttgcaggaaaataatccggcttcccggtcccaatgttgttccaactag

SEQ ID NO: 237737 - DNA, 651 bp, synthetic construct
  misc_feature 1..651: note = Description of Artificial Sequence: Synthetic coding sequence
  source 1..651: mol_type = other DNA
atggccggtagagggggagctgctcgccctaacggtcccgcagctggcaacaagatctgccaatttaagcttgtgttgctgggcgagtcagccgtcggcaaatcatctctcgttctgcggttcgtcaagggacagttccatgagtatcaagagtcaactattggcgctgccttcttaacacagacagtttgtcttgacgatacaactgttaagtttgagatttgggatacggcaggccaggagcggtatcattccctagcacccatgtactatcgcggagcccaggccgcaatcgtggtctacgatattaccaacaccgatacctttgctcgtgcaaaaaactgggtgaaagagctgcagagacaagcatctccgaacatcgtgatcgccttagctgggaacaaagcagacctcgctagcaaaagagcggtggaattccaggaggcccaggcctacgccgacgataactctttgctattcatggaaacatcagcaaaaaccgcaatgaatgtaaacgagatctttatggcaattgctaagaagctccccaaaaacgaaccacagaacgcaacaggcgctccagggcgaaacagaggggtcgatttacaggaaaacaatccggctagcagaagccagtgctgtagtaactag

SEQ ID NO: 237738 - DNA, 750 bp, synthetic construct
  misc_feature 1..750: note = Description of Artificial Sequence: Synthetic coding sequence
  source 1..750: mol_type = other DNA
atggagctcagttggcgcagcccgtctcccttatccgcttccttgcactctacctcaccacacccgcatgcactttggaccaccaccgctggacgggctatggcgggacggggaggtgcagcccgaccaaacggcccagcagctggcaacaagatctgtcaatttaagttggtgttgctgggcgagagcgccgtggggaaaagttccctcgtgcttagatttgtgaagggacaattccatgagtaccaggagtcaacaatcggagcagcgttcctgacgcagacagtctgcctagatgacacaacagttaaattcgagatctgggacaccgcagggcaggagagataccactccctggccccaatgtattacaggggcgcacaggccgctatcgtagtatacgatatcacgaatactgacacttttgcaagagcgaaaaattgggtcaaggaattacagcgtcaggcatctcccaatatcgtgattgccctggccggaaacaaagccgacttggcctctaagcgcgctgtggagttccaggaggctcaagcttacgcggacgacaactctcttctgtttatggaaaccagcgcaaaaacagccatgaacgttaatgagattttcatggctatcgctaaaaagctgcccaaaaatgagccacagaatgctactggggcacccggacgtaatagaggcgttgacctgcaggagaacaatcccgcttccaggtcccagtgctgttcaaattag

SEQ ID NO: 237739 - DNA, 225 bp, synthetic construct
  misc_feature 1..225: note = Description of Artificial Sequence: Synthetic coding sequence
  source 1..225: mol_type = other DNA
atggcagggcgaggcggagcagccagacctaacggacctgctgctggcaacaagatctgccagttcaaacttgtgctactgggtgaatcagccgtgggcaaatcctcactggtgctgaggttcgtaaagggccagtttcacgaatatcaagagagcactatcggagcggcattcctcactcagacagtatgcctggatgacaccaccgtcaaatttgaaatttag

SEQ ID NO: 237740 - DNA, 279 bp, synthetic construct
  misc_feature 1..279: note = Description of Artificial Sequence: Synthetic coding sequence
  source 1..279: mol_type = other DNA
atggcgggacgagggggagctgcccgtccaaacggccctgctgccggaaacaaaatttgccaattcaagctcgtcctgctcggcgagtccgctgtggggaaatctagtcttgtcttgaggttcgttaagggtcagtttcatgagtatcaggaatccacgatcggggcagcttttctcacgcagacggtatgtcttgatgatacaaccgtcaaatttgaaatctgggatactgcaggccaggagcgctaccactcactggccccaatgtattatcggtag

SEQ ID NO: 237741 - DNA, 375 bp, synthetic construct
  misc_feature 1..375: note = Description of Artificial Sequence: Synthetic coding sequence
  source 1..375: mol_type = other DNA
atggccggacggggaggagccgctagacctaatgggccagcagccggaaacaagatctgccaatttaaactcgtgctacttggcgagagcgctgtcggaaagagttcactggtactccgatttgttaaaggccagttccatgagtatcaggagtccaccattggcgcagccttcctgacccagactgtgtgcctagatgataccacagttaaattcgaaatctgggatactgctggacaggaacgataccacagtctggcccctatgtactatcgcggtgcccaggctgctatagtggtctatgatatcaccaataccgacacgttcgctcgggcaaaaaattgggtcaaggagcttcagcggcaggcaagctag

SEQ ID NO: 237742 - DNA, 627 bp, synthetic construct
  misc_feature 1..627: note = Description of Artificial Sequence: Synthetic coding sequence
  source 1..627: mol_type = other DNA
atgtcaacgggcggtgattttgggaaccctctgcggaaatttaaactggtgtttctgggggaacagtctgtggggaaaacgtcccttattacgagatttatgtatgattccttcgataacacataccaagccaccatcggaattgattttttgagtaaaacaatgtatcttgaagacaggaccattaggctgcagttgtgggatacagcgggtcaggaacggttcagaagcctgatcccaagctacatcagagatagtgctgctgcggtcgtagtatatgatattacgaacgtcaatagcttccagcagacaaccaagtggatagacgatgtgcgtactgagagaggcagcgacgtcattatcatgctggtggggaacaaaaccgacttggccgacaagaggcaggtcagcatcgaggagggggaacgaaaggccaaagagctgaacgtgatgtttatcgaaactagcgccaaagccggttacaacgtcaagcagttgttccggcgagtggctgccgctctgcccggaatggagagtacacaggataggtcgcgagaggatatgatagacatcaagttggaaaagcctcaggagcagcctgtgtctgaggggggatgtagctgttag

SEQ ID NO: 237743 - DNA, 627 bp, synthetic construct
  misc_feature 1..627: note = Description of Artificial Sequence: Synthetic coding sequence
  source 1..627: mol_type = other DNA
atgtccaccggtggcgattttgggaatcccctgcgcaaatttaaactggtgtttctcggagagcagtcggtggggaaaacgtctttgattacccgattcatgtatgactccttcgacaacacttatcaggctacaattggcatcgactttttgagtaaaaccatgtacctggaggacagaacagtgagactgcaactgtgggatacagcgggacaggagagatttaggtccttaataccaagttatatcagggatagtactgtcgctgttgtcgtttacgacattaccaacgtgaattcgttccagcagactacaaagtggatcgacgacgtgcgcaccgaaaggggatctgatgttataataatgcttgttgggaataaaactgacctggctgataagagacaggtctcaatcgaggagggcgaacgcaaggctaaagagctgaacgtcatgttcatagaaacttccgccaaagcaggatataacgtgaaacaactcttcaggagggtggccgcagcactgcccggtatggaatcaacacaggacaggagccgggaggacatgatcgatattaaactggaaaagccccaggagcagccagtgtctgaaggcggatgctcctgttag

SEQ ID NO: 237744 - DNA, 627 bp, synthetic construct
  misc_feature 1..627: note = Description of Artificial Sequence: Synthetic coding sequence
  source 1..627: mol_type = other DNA
atgagcactggcggagactttgggaatccactgaggaagttcaagctggtgttcctcggcgagcaatcagttgggaagacctcattaatcacccggttcatgtatgatagtttcgacaacacgtatcaggccacaataggcatcgactttctctctaaaacgatgtacctggaagatcgcaccatccgtttgcagctctgggacacagcgggacaagagcggttccgaagccttatcccttcctatatcagagattccgcagcagctgtggtggtgtatgatatcactaatgttaatagttttcagcaaacaaccaaatggatcgatgatgtgaggaccgagagaggcagtgacgtcatcataatgcttgtggggaataagacagacctggcggataagaggcaggtctccattgaggagggggagaggaaagccaaggagcttaatgtcatgtttattgaaacaagcgctaaggccggatataatgtgaagcaactcttccgacgggtcgcggctgctctgccgggtatggaaagcacacaggatagaagcagggaggacatgatagacattaagctcgaaaagccccaagagcagcccgtatccgagggaggctgcagctgttag

SEQ ID NO: 237745 - DNA, 525 bp, synthetic construct
  misc_feature 1..525: note = Description of Artificial Sequence: Synthetic coding sequence
  source 1..525: mol_type = other DNA
tgacccctcagaaagttcaaactggtgttcctcggggaacagagcgtaggaaaaactagtcttataacccgctttatgtacgacagcttcgacaacacatatcaggccactatcgggattgacttcctgagtaaaaccatgtatctcgaggaccggaccgtaagactgcagctgtgggacactgccggacaggagaggttccgctcattaatacccagctatatacgggattcaacggtcgctgtggtggtgtacgatatcaccaatgttaatagctttcagcagaccaccaagtggatcgatgacgttcgcactgaaagaggaagtgacgtgataataatgctggtcggcaataagacggatcttgcggataagcgtcaggtgtccatcgaggaaggggagcgtaaggccaaggaacttaatgtgatgtttattgaaacttcagcaaaggccggttataacgtcaagcagaggataggatcttgccacgtcgcccaggcgtctctcgagctactagatagttag

SEQ ID NO: 237746 - DNA, 225 bp, synthetic construct
  misc_feature 1..225: note = Description of Artificial Sequence: Synthetic coding sequence
  source 1..225: mol_type = other DNA
atgtctaccggaggggattttggtaacccgctcagaaaatttaagttagtctttcttggcgaacagtccgtggggaagacttctctcatcacacgctttatgtatgactccttcgacaacacataccaggctactatcgggatcgactttctgagcaagaccatgtatctcgaagacaggaccgtgcggctgcagctgtgggacacagccggacaggagagatag

SEQ ID NO: 237747 - DNA, 528 bp, synthetic construct
  misc_feature 1..528: note = Description of Artificial Sequence: Synthetic coding sequence
  source 1..528: mol_type = other DNA
atgtatgacagcttcgataatacctatcaggcaactataggaattgattttctatctaagaccatgtacttggaggaccgcacaataagactgcaactatgggacaccgcaggccaggaaagattccgctctctcattccatcctatatacgcgacagcgccgcagctgtggtggtctacgatattactaacgtgaacagttttcagcaaacaaccaaatggatcgacgatgttaggacagagcgaggatctgacgtgataataatgctagtcggcaacaagacagatctcgcggacaaaagacaggtgagcatcgaagagggcgaacgcaaagctaaagagcttaatgtgatgttcattgagacatcagcaaaggctgggtataacgtgaagcaactgtttcggagggtcgctgccgctctgcccggaatggagagtactcaggaccgctcgagagaagatatgatcgatatcaaactggagaaaccacaggagcagccagtgagcgagggagggtgcagctgctag

SEQ ID NO: 237748 - DNA, 429 bp, synthetic construct
  misc_feature 1..429: note = Description of Artificial Sequence: Synthetic coding sequence
  source 1..429: mol_type = other DNA
atgtctaccggtggtgatttcggcaatccattgcggaagtttaagcttgtcttcctcggcgagcagagtgtcggcaaaacttccctgatcaccaggtttatgtacgacagttttgataacacttatcaggccaccatcggtattgacttcttgtcaaagaccatgtacctggaagacagaacaattcgcctgcaactctgggacaccgcaggtcaggaacgctttcgatccttaatcccctcctacataagggatagcgctgcggctgttgtggtttacgatattaccaatgttaattcctttcagcagaccacgaaatggatcgatgatgtcaggacggaacgaggctcagatgtgatcataatgcttgtgggaaataagactgacctggctgacaaacgacaggtcagcattgaggaaggagaatag

SEQ ID NO: 237749 - DNA, 315 bp, synthetic construct
  misc_feature 1..315: note = Description of Artificial Sequence: Synthetic coding sequence
  source 1..315: mol_type = other DNA
atgtccactggaggcgactttggcaatcctctacgtaagttcaaactcgtcttcctcggtgaacagtcagtcggaaagactagcctgatcacccgatttatgtacgactctttcgacaacacataccaagccacaattggcatagactttctctccaagacaatgtacctggaggatcgcactctattccgtcgcgtcgcagccgctctgcctgggatggagagtacgcaggaccgctctcgcgaggatatgatcgacattaaactcgaaaagccccaagaacagcccgttagtgaggggggttgcagctgctag

SEQ ID NO: 237750 - DNA, 606 bp, synthetic construct
  misc_feature 1..606: note = Description of Artificial Sequence: Synthetic coding sequence
  source 1..606: mol_type = other DNA
taagtttttcctcgcggactggccctcaggtcagcagacgttgtcgaggtggggaaaaccagtctgataactcgattcatgtacgattcttttgataatacatatcaggccactataggaattgacttcctcagtaagaccatgtatctcgaggacaggaccattaggctacaactgtgggatactgccggtcaggaaagatttcgaagccttattccatcttatattagagactccgctgcagctgtggtcgtatatgacattactaacgtgaactcattccagcagacaaccaagtggattgacgatgttcggacagagcggggtagcgacgtgatcataatgctcgtgggaaacaaaacagatctggccgacaagcgccaggtgtcgatagaagagggagagcgtaaagcaaaggagctgaatgtgatgttcatcgaaacatccgctaaagctggatataatgtgaagcagctgtttcgcagggtggccgcagctttgccaggtatggaaagtacccaagaccggagccgcgaagatatgattgatatcaagctggaaaagcctcaagaacaacctgtgtccgaggggggttgcagctgctag

SEQ ID NO: 237751 - DNA, 144 bp, synthetic construct
  misc_feature 1..144: note = Description of Artificial Sequence: Synthetic coding sequence
  source 1..144: mol_type = other DNA
atgtccaccggtggggatttcggaaatccactcaggaagtttaagctagtctttctaggcgagcagtccgtagggaagacaagcctgattactagatttatgtacgatagctttgataacacctatcaggccaccattggctag

SEQ ID NO: 237752 - DNA, 765 bp, synthetic construct
  misc_feature 1..765: note = Description of Artificial Sequence: Synthetic coding sequence
  source 1..765: mol_type = other DNA
atgtccgcaggcggagattttggaaatccgcttcggaagttcaaattggtattcctgggggaacagtcggtggctaagacctccctgataactagatttaggtacgattccttcgacaacacatatcaggcaatcatcggaatagattttctgtcgaaaacgatgtatctagaagacggtaccattggccttcgactttgggacacagcagggcaggagcgcctcagatcgttaatcccccgatatattcgagattctgccgctgccgtggtcgtgtacgacattaccaacgtgaattccttccagcagacaaccaaatggatagacgatgttcggacagagcgaggtagtgacgtcatcattactctggtgggaaaccgaaccgacctcgctgataaaagacaagtaagcgtggaggagggcgaacgtaaggccaaaggcctcaacgtgactttcatcgaaacgagggccaaggctgggtacaacgtcaaacagttgttccggagagtggctgccgcactaccagggatggaatccacgcaagacggttctcgagaggatatgagtgatattaagttagagaagcctcaagaacagactgtgagcgagggcggttgtagttgttacagcccaatgagttctagtaccttgccacagaagccaccatacagcttcattgattgttccgtgaatattggcctgaacctttttccatcactcatcaccttttgcaacagtagcctcctgccggtttcctggcgttag

SEQ ID NO: 237753 - DNA, 612 bp, synthetic construct
  misc_feature 1..612: note = Description of Artificial Sequence: Synthetic coding sequence
  source 1..612: mol_type = other DNA
atgggaagcagggatcatctctttaaggtcctggttgtgggtgacgctgccgtcggtaagacatccctcgtgcagcgatactcccaagactcgttctccaaacattacaaatcaacagttggtgtggacttcgccttaaaggttctccagtggtccgattacgagatcgtcagacttcagttgtgggatattgcgggacaagagcgctttactagcatgacaagactctattatagagacgccagcgcatgtgtgattatgtttgatgttacaaacgcaacgactttcagcaatagccagaggtggaaacaggatttggatagcaaattaactctgcctaatggcgaacccgttccctgcctactgctcgccaacaaatgtgacctgtctccttgggccgtgagccgagatcagattgatcggttttcgaaggagaacggcttcaccggatggactgagacttccgtgaaggagaacaaaaatatcaatgaagccatgcgggtcctgatagagaagatgatgcgtaactccactgaggacatcatgtctttgtccacccagggagattatattaacctccaaactaagtctagctcttggagctgttgttag

SEQ ID NO: 237754 - DNA, 612 bp, synthetic construct
  misc_feature 1..612: note = Description of Artificial Sequence: Synthetic coding sequence
  source 1..612: mol_type = other DNA
atgggcagccgggaccaccttttcaaggtccttgtagtgggtgacgccgcagtaggtaaaacgagtcttgtacagcgttattctcaggatagcttctccaaacattataagagtaccgtgggggttgatttcgccttaaaagttctgcaatggtccgactatgagattgtgagactacaactgtgggatatagctggacaggagagattcactagcatgaccagattatattacagggacgcctcagcatgcgttattatgtttgatgtgactaacgccaccaccttttcgaatagtcagaggtggaagcaagatttggatagcaaactgaccctgcccaatggagaaccagtgccctgtctgcttctcgccaacaagtgcgacctgtccccatgggcagtcagccgcgaccagattgaccgcttctccaaggagaatggtttcaccggctggacagagacatcagtaaaggaaaataagaatatcaatgaggcaatgcgagtgctgatagagaagatgatgcggaattcaactgaggacataatgtccctgtcaacacaaggcgattacatcaatctacagaccaaatcctcatcgtggtcctgttgctag

SEQ ID NO: 237755 - DNA, 612 bp, synthetic construct
  misc_feature 1..612: note = Description of Artificial Sequence: Synthetic coding sequence
  source 1..612: mol_type = other DNA
atgggcagccgggaccatctgttcaaggtcctcgtggtgggtgatgcagccgtgggcaagacttcattggtacagagatacagccaggattccttctccaaacactataaaagcaccgtcggggttgattttgccttaaaagtcttacagtggagtgattacgaaatcgtccgcctacaactatgggacattgcagggcaggaacgcttcacttccatgactaggctttactatcgagacgcctccgcttgcgtgatcatgtttgacgtcactaatgccactacctttagtaactcccagcgctggaaacaggaccttgattccaagctgactctaccgaacggagaacccgttccatgtctgctactagcgaacaaatgtgacttgtccccctgggccgtctctcgtgaccagatcgatcggtttagcaaggagaatggcttcacgggttggacggaaacatcagtaaaggagaacaaaaacatcaatgaggcaatgcgcgttctgatcgagaaaatgatgcgcaacagtacagaagacattatgtccctatccacacagggagattatatcaacctccagactaagagcagttcgtggtcctgctgctag

SEQ ID NO: 237756 - DNA, 396 bp, synthetic construct
  misc_feature 1..396: note = Description of Artificial Sequence: Synthetic coding sequence
  source 1..396: mol_type = other DNA
atgactcgtttgtactacagggatgccagcgcctgcgtaataatgttcgatgtaaccaatgcaactaccttctccaacagtcagcgctggaaacaggatcttgactcaaaacttaccctaccgaacggggagccagtcccttgtcttctgctagccaataaatgtgacctcagcccatgggccgtctctcgggaccaaatcgaccggttcagcaaggaaaacggattcacagggtggaccgaaacctccgttaaggaaaataaaaatatcaatgaggccatgagggtcttgatcgagaaaatgatgcgtaactcgacagaggatatcatgtccctctctacccagggagactacataaatttgcagacaaagtcaagctcgtggtcctgctgctag

SEQ ID NO: 237757 - DNA, 540 bp, synthetic construct
  misc_feature 1..540: note = Description of Artificial Sequence: Synthetic coding sequence
  source 1..540: mol_type = other DNA
atgggttctagggaccatctgtttaaggtacttgtggtgggagacgcagcggttggcaaaacctctcttgtgcaaaggtactcccaggattctttcagcaagcactataagagcacagtcggagggcaggagagatttaccagcatgacacgcttgtattaccgcgatgcgagtgcctgtgtgattatgtttgatgtcactaacgccacaacattttcaaattcccagagatggaagcaggatctcgactctaagctaaccctgcccaatggagagcccgttccctgtcttttactggccaacaaatgcgatcttagcccgtgggcagtcagtagagatcagatcgacaggttcagcaaagagaacggcttcacgggatggaccgagacctctgtcaaggagaacaagaacataaacgaggcaatgagggtgctgattgagaagatgatgcgaaacagtacagaggacattatgagcctctcaacccagggcgattacataaaccttcagaccaagtcatcatcttggagctgttgctag

SEQ ID NO: 237758 - DNA, 624 bp, synthetic construct
  misc_feature 1..624: note = Description of Artificial Sequence: Synthetic coding sequence
  source 1..624: mol_type = other DNA
atggcgaaaacatacgattatctgttcaagcttctgcttattggagactccggcgtgggtaagacctgtgtcttgtttaggttctcggaggacgcatttaacagcacatttatttcaacaatcgggattgactttaaaatacgcaccatcgaactggacggcaaaagaatcaaactccagatctgggacaccgcgggtcaggagaggtttcgcacgattacaacggcttattatcgcggagcgatgggcatcatgctggtatacgatattacaaacgaaaaatcttttgacaatatccggaattggattcgtaacattgaagagcacgcctcagctgacgtggagaaaatgattctgggtaacaagtgcgacgtgaatgataaacgtcaggtgtcaaaagagagaggggagaaactggccctcgattatggcatcaagtttatggagacctctgcaaaggccaacatcaatgtggagaacgctttcttcacactggcccgtgatattaaagccaagatggataagaaactagaaggcaattccccacaaggcagcaaccagggcgtgaagatcactcctgaccaacagaaaaggtcctccttcttccgctgcgtcttgctgtag

SEQ ID NO: 237759 - DNA, 606 bp, synthetic construct
  misc_feature 1..606: note = Description of Artificial Sequence: Synthetic coding sequence
  source 1..606: mol_type = other DNA
atgagcggcaaatctttattattgaaagttatcctcctgggagacggtggagtgggaaaaagtagtcttatgaatcgctatgtcacaaacaaattcgactctcaagcctttcacacaattggtgtagagtttctgaaccgcgatcttgaagtagacggacggttcgtaactcttcagatctgggataccgccggacaggagaggtttaagagcctgaggactccgttctaccgaggcgcagactgttgtctgctcaccttttctgttgacgataggcagagcttcgaaaatctgggcaattggcagaaagaattcatatactatgctgacgtgaaggaccctgagcatttcccctttgtcgtcctgggaaataaggttgacaaggaagaccgacaggtcacaacggaagaggcacagacctggtgtatggaaaacggggattacccataccttgaaacatctgccaaagatgatactaatgttacagttgcctttgaggaagccgtgcgtcaggtgctggcagtggaggagcaacttgaacattgcatgttgggtcacacgatcgacctgaattcaggcagcaaggccggttcctcatgctgctag

SEQ ID NO: 237760 - DNA, 2589 bp, synthetic construct
  misc_feature 1..2589: note = Description of Artificial Sequence: Synthetic coding sequence
  source 1..2589: mol_type = other DNA
atggcgcagccgggtccagcatctcagcctgacgtttcactgcaacagagagtggcagagctggaaaagataaacgcagaatttcttcgcgctcaacagcagcttgaacaagaatttaatcagaagcgagcaaagtttaaagagttatatttggcgaaggaagaggatctgaagcggcagaatgctgtcctgcaagcagctcaggatgatctgggccatctgcgaacccagctctgggaagcacaggctgaaatggaaaacatcaaagccatcgctaccgtgtctgagaacactaagcaggaggccatcgatgaggtaaagcgacagtggcgcgaggaagtcgcctccttgcaggctgtcatgaaggaaacagtccgagactacgagcaccagtttcacctccgcttggagcaagagcggacacagtgggctcagtaccgcgaatcagcagaacgagagatcgcagacctcaggaggcgtctgagcgaaggccaggaagaggagaatctggaaaacgagatgaagaaagcacaagaggacgctgagaaacttcgctctgtagtaatgcccatggagaaggaaatcgccgcactgaaggataagttgaccgaggccgaagataaaattaaggaattggaggcctcaaaggtaaaggagcttaatcattatctggaagccgaaaaaagctgtcgcaccgacttggagatgtacgtggccgtcttgaacacacagaaatcagtgctgcaggaagatgccgaaaagctgcggaaggaactgcatgaggtgtgccaccttctggagcaagaaagacagcagcacaaccagttgaagcacacatggcaaaaggccaacgatcagtttctggagagccaacgactgcttatgcgcgatatgcagagaatggaaatagtgctgacgagtgaacaactcagacaggttgaggagctgaagaagaaagaccaggaagatgacgagcagcagcggcttaataaaagaaaggatcacaaaaaagctgatgtggaggaggaaatcaagatccccgtggtttgtgcattgacccaggaggagtcgagtgctcaactgagcaatgaggaagaacatctggattctaccagagggagtgtgcattcacttgatgcagggctactgctgccgagtggcgatccctttagcaaaagcgataatgatatgttcaaagacggcctgcggagggctcagtccacagacagcctggggacctccggttctctgcagtccaaggcgcttggttacaattataaggcgaagtccgctggtaatctggacgagtcagacttcggtcctcttgtcggagcagacagcgtctccgagaatttcgacacagctagcctcggttccctgcagatgccatccggcttcatgctgaccaaggatcaggagcgggctattaaggccatgacacccgaacaggaagagactgcctctttgctgagctctgttacacaggggatggaaagcgcctatgtctcccctagcggttatcggttagtcagcgaaacagaatggaacctgctgcagaaggaggtgcacaacgccggaaacaagcttggcagacgctgcgacatgtgctctaattacgagaagcagcttcaaggcattcagatacaagaagcagagactagagatcaggtgaagaaattgcagttaatgctgcggcaagcaaacgatcagcttgaaaaaaccatgaaagacaagcaggaactggaagacttcattaaacaatcatcagaggattcctctcatcaaatctccgcccttgtcctgagggcccaggcatcagaaatcctgctcgaagaattacagcaaggtctttctcaggccaagagggacgttcaggaacagatggccgttctaatgcaatcgcgggagcaggtgtccgaggagctggtcaggttgcagaaggataatgattccctgcagggtaagcatagtctgcacgtctctctgcaacaagccgaagattttattctccctgacacaaccgaggccctgagagagttagtcctgaagtacagagaggatattatcaacgtcaggaccgccgctgatcacgtcgaagagaagttaaaggcggagatcctgttcctgaaagagcagattcaggctgaacaatgcttgaaagaaaatctcgaggaaactctgcagctggagatagagaattgtaaagaggagatagctagtatcagctcactgaaagcagaattggaacgcattaaggtggaaaaaggacagctagaatcaacattgcgggagaaaagccaacaacttgagtccctgcaggagatcaagatcagcctcgaagagcaactcaagaaggaaactgctgcaaaggcaacggttgaacaactcatgttcgaagagaaaaacaaagcccagcggcttcaaaccgaactggacgtgtctgagcaggtgcagagagacttcgttaaactctcgcagacccttcaagtccagctggagaggattcggcaggctgactcactcgaaagaatcagagccatcctgaacgacaccaaattgacggacatcaatcagctaccagagacctag

SEQ ID NO: 237761 - DNA, 2490 bp, synthetic construct
  misc_feature 1..2490: note = Description of Artificial Sequence: Synthetic coding sequence
  source 1..2490: mol_type = other DNA
atggctcaaccgggaccggcttctcaaccagacgtttctctgcagcaaagggtcgcagagctcgagaagataaacgcggaattccttcgtgcgcagcagcagctcgaacaggagtttaatcagaaacgagcgaaattcaaagaactgtacctggccaaagaggaggatctcaaaagacagaatgctgtgctccaggccgctcaggacgacctcggccacctgcgtacgcagctatgggaagcccaagcagagatggagaacatcaaagccatcgccacggtgtcggagaacactaagcaagaggcgatcgatgaggtcaagcgccagtggagagaggaggtagcctccttgcaagcggtcatgaaggagacagtacgtgactacgaacaccagttccaccttcggctggaacaggaacggacccagtgggcccagtaccgggaatctgccgagcgggaaattgctgatcttaggcgcagactgtcggagggacaagaggaggagaacctggaaaatgagatgaagaaggctcaggaggatgctgagaagcttcgctcagttgtgatgccgatggagaaggagattgccgcacttaaggacaagctcaccgaagccgaggacaaaataaaggagcttgaggcttcaaaggtaaaagagctgaatcactatttggaagccgagaagagctgtagaactgacctggaaatgtacgtcgctgtgctgaatacccagaagtctgtgctgcaagaggacgccgagaagctgcgcaaagaacttcacgaagtttgccatctgctggagcaggagagacagcagcacaaccagctaaaacacacctggcaaaaggcaaatgaccagttcctagagagccagaggctgcttatgcgcgacatgcagagaatggaaattgtgctgactagcgagcagctgcggcaagtcgaggagttgaagaagaaagatcaggaggatgatgagcaacagagactgaataagcgaaaggaccataagaaagcagatgttgaagaggagatcaaaatacccgtggtgtgtgcactgacacaggaggagtccagtgcccaactttccaacgaagaggagcacctggactctacacgagggtctgtacactctctggatgccggtctcctgcttccatctggagatcccttttcaaagtccgacaacgacatgtttaaagatggtctgcgccgagcacaatcgaccgattccttagggactagcggatctctgcagtcgaaagctctggggtacaattataaggctaaaagcgccggaaacctcgacgagtccgattttggtcccctcgtgggagccgactctgtgtctgaaaacttcgatacagcctctctcggatcgcttcaaatgccttccggcttcatgttgacgaaggaccaggaacgggctattaaagcaatgacacccgagcaggaggagacagcgtctctcttgagctcagtcacgcaaggtatggaatctgcttatgtgtcaccttctggctataggttagtgagtgaaacggaatggaatctcctccagaaagaagttcataacgcgggtaataaactcgggcgaagatgtgatatgtgctccaactatgaaaagcagctccaaggaatacaaatacaggaagccgaaactcgagaccaggtgaagaaactccagctgatgttgaggcaggccaatgaccaactcgaaaagaccatgaaggacaaacaggagctggaggacttcatcaagcagtccagcgaggatagctctcatcaaatctccgccttggtattacgagcacaagcatctgagatcctactggaggagctgcaacagggactgtcccaagctaagcgcgatgtccaagaacagatggccgtccttatgcagtcaagggaacaggtcagtgaggagttggtcagactccagaaggacaacgatagcctgcagggtaagcactctctgcatgtctcgctgcaacaggcagaggatttcattcttcccgataccaccgaagccttgcgcgagctggtcttgaagtacagagaggacattatcaacgtgaggaccgcggcagatcatgtcgaggagaagctcaaggccgaaattttgttcctgaaggagcagatccaggctgaacagtgcctcaaggaaaacctagaggagaccctgcagcttgaaattgagaattgtaaggaggagatcgcctcgatatcctctctgaaagccgagttggaaagaatcaaggtcgagaagggccaggctaccgtggagcagctcatgttcgaagagaagaataaggcccagcggctgcagacagagctggatgtgtcggagcaggtgcagagagattttgttaaactttcccagaccttacaggtgcaactggagcgtattcgacaagcagactcattggaaagaatcagagctatcctgaacgacacaaagctgaccgacataaaccagctgccagagacttag

SEQ ID NO: 237762 - DNA, 2490 bp, synthetic construct
  misc_feature 1..2490: note = Description of Artificial Sequence: Synthetic coding sequence
  source 1..2490: mol_type = other DNA
atggcccaacccggacccgcaagtcagccggacgtgtccctgcaacaaagagtagcagagctggaaaagattaacgcagaattcttacgcgcacagcagcagttagagcaggagtttaatcagaagcgcgcaaaatttaaagagctttacctggctaaggaggaagatctgaaaaggcagaacgccgttctgcaggctgcccaggatgacttgggccacctgcgcacccaactatgggaggcccaagccgaaatggagaatatcaaggcaattgcgactgtgtctgaaaacactaaacaggaggctatagacgaggttaaaagacagtggcgtgaggaggtggcctccttacaggcggttatgaaggaaaccgtcagggactatgaacatcagtttcatctacgtctggaacaggaaaggacccagtgggcacagtatcgggagtctgccgagcgcgagatcgccgacttgcgacgcagattaagtgaagggcaggaggaggagaacctggaaaacgaaatgaaaaaagcacaggaagacgctgaaaagctcaggtcagttgtcatgccaatggagaaggagatcgctgccctcaaggataagctgaccgaagctgaggataaaatcaaggagctagaagccagcaaagtgaaggaactaaaccactatctcgaggccgaaaaatcatgccggaccgacctggaaatgtatgtggcagtactcaatactcagaaaagcgtgttgcaggaagacgcagagaaactgcgaaaggagctgcatgaggtgtgccacctgctcgaacaggagaggcagcagcacaatcagcttaagcacacatggcaaaaggcgaatgaccagttcctggaaagccagcgccttctcatgagggatatgcagcgcatggagatcgtcctgacgtctgagcagttgaggcaagtggaggagctaaaaaagaaagaccaggaggatgacgagcaacaaaggcttaacaagagaaaggatcacaaaaaagccgatgttgaagaggagatcaaaattcccgtcgtgtgcgccctgactcaggaagaaagctccgcccagctctccaacgaagaagaacatctagattcaaccagggggtcagtgcacagtctggatgcaggattgttgctgccttcaggagaccctttctccaagtcagacaacgacatgtttaaggacggtttgagaagagcccaaagtaccgattcactggggacctccggtagcctgcaaagtaaggcacttggctacaactataaggcaaaaagcgccggtaacctggacgagtcggattttgggcctctggtcggagctgatagtgtttccgaaaattttgacactgcatcacttgggtctttgcagatgccttcaggcttcatgcttaccaaagaccaggaacgggcaatcaaagcaatgacacccgagcaggaggagactgcctctctactaagtagtgtcacacagggcatggagtccgcttacgtgtctccatccggctaccggctagtgagtgagacggaatggaacttgctacagaaagaggtgcacaatgccggaaataagttggggagacggtgcgatatgtgcagtaactatgagaagcagctgcagggcattcagatacaagaggccgaaaccagagaccaggtgaagaagttgcagctgatgctccgtcaagccaacgatcagttggagaaaaccatgaaagacaaacaggagttagaggatttcatcaaacagtcgtctgaagattcttcccaccagatatcagccctcgtgctccgagcacaggcgtctgaaattctgctggaggaactccaacagggattgtctcaggcgaagcgggacgtacaagaacagatggccgtgctgatgcaatctagagaacaggtctcagaggagctcgtgagattgcagaaagacaacgactctttgcagggtaagcattccctgcacgtgtctctacagcaagccgaagatttcattctgcctgatacaactgaagcattgcgagagctggtgctgaagtacagagaggacatcatcaacgtccgtactgcagctgatcatgtggaagagaaactgaaggctgaaatactctttctgaaggaacagatccaagcggagcagtgtttgaaagagaacctggaagagaccctccagctggagatcgagaattgtaaggaagagatagcttcaatctctagtctcaaggccgagttggaacggatcaaagtggagaaaggtcaagccaccgtggaacaacttatgttcgaggagaagaataaggctcagcggctgcagacagaactggacgtgtcagagcaggtgcagcgggatttcgttaagctttcacaaactctccaagtgcaactggaacgaatccgacaagcagactcactggagaggattagagctatcctgaatgataccaagttaactgatatcaaccagcttcctgagacgtag

SEQ ID NO: 237763 - DNA, 2460 bp, synthetic construct
  misc_feature 1..2460: note = Description of Artificial Sequence: Synthetic coding sequence
  source 1..2460: mol_type = other DNA
atggcccagccgggtcccgcttcccagcccgatgaggacctgaagagacaaaatgccgtactgcaagcagcccaggacgacctcgggcatctgcgcacccagctgtgggaagcacaggcagagatggagaacatcaaggccattgcaaccgtctccgaaaatacaaagcaggaagctatcgatgaggtgaagcggcagtggagagaggaggtggcgagccttcaggccgttatgaaggagaccgtgcgcgattatgaacatcagttccacctgcggctggaacaagagcgaacgcagtgggcccagtaccgcgagtccgccgagcgtgagatcgccgatctacgaagaagactttcagaaggtcaagaggaagagaatctagagaacgaaatgaagaaagcccaggaagacgccgagaaattgcgaagtgtcgtgatgccaatggagaaggagatagccgctctgaaagacaaactcacagaggccgaagacaaaatcaaggaactcgaggcatcgaaggtgaaagagctgaaccattacctggaggccgagaagtcctgtcggacggacctggaaatgtacgttgccgtgcttaacacccagaagtcagtcctgcaggaggatgcagagaagctaaggaaagaactgcacgaggtctgtcacctgctagagcaggaacggcaacagcataatcagttgaaacacacctggcaaaaggcaaatgatcagtttctcgaatcccaaagactccttatgcgggacatgcagagaatggagatagtcttgacatcagaacagttgcggcaagtagaagagctgaagaagaaagatcaagaggacgacgaacagcaaaggttgaataaacgcaaagaccacaagaaagctgacgtagaggaagagatcaagatcccggtggtgtgtgctctgacgcaggaagagagttccgcacagctctccaatgaggaggaacatttggacagcactagagggtccgtccacagtttagatgctggcttgctgctgcccagtggcgacccattcagcaaatccgacaacgatatgttcaaagatgggctgagacgggcacaaagtaccgacagtctggggaccagcggcagcctccaatctaaagctcttgggtacaactataaagctaaaagcgccggtaaccttgatgaatctgactttggtcctctggtgggtgccgactctgtcagcgagaacttcgacactgcatctcttggcagtttgcaaatgcctagcgggtttatgctgacaaaggaccaagaacgggctatcaaagccatgacgcctgaacaggaggagacagctagcctgctcagtagcgtcacccagggaatggaatctgcctatgtgtctccatctggataccggctggtgagcgagacagagtggaatctactgcagaaagaagtccacaacgcaggcaataaactcgggagacggtgtgacatgtgttccaattacgagaagcagctgcagggcattcagatccaggaagccgaaaccagggatcaggtcaaaaaattacagttgatgctcaggcaggccaatgatcaactggagaaaacgatgaaagataaacaggagctggaggacttcataaaacagagtagtgaagacagttcccaccagatcagtgccctggtgctcagggcgcaggcttctgaaatactcctggaagaattgcagcagggtcttagccaggccaaacgggatgtccaagaacagatggcagtgttgatgcagagtcgagaacaggtttccgaggagttggtgcgactacagaaagataacgactcccttcaaggtaaacatagtttgcacgtctccctccaacaggccgaggacttcattctgcctgacacaaccgaggctctgagagaactcgtgctgaaataccgcgaggatattatcaacgtgcgaaccgctgctgaccatgtggaagaaaaattgaaagccgaaattttgtttctcaaggagcaaattcaagctgagcagtgcctgaaagagaacctggaagagactctgcagctcgagatcgaaaattgcaaggaagagatcgccagtatatcttccctcaaggcagaacttgagcggattaaggtggaaaagggtcagcttgagagcacactcagggagaaatcacaacaacttgagagtctgcaggagatcaagatctctttggaggagcaattaaagaaggagacagcagccaaggcgacggtggagcagttgatgtttgaagagaaaaacaaggctcagcgtctgcagactgaactcgatgttagtgagcaggtacagcgtgattttgtgaaactgagccagactctccaggtccagctcgagcgcatccgccaggccgactccctggagcggatcagggctattctgaatgacaccaaacttactgatattaaccaactgcctgagacatag

SEQ ID NO: 237764 - DNA, 2151 bp, synthetic construct
  misc_feature 1..2151: note = Description of Artificial Sequence: Synthetic coding sequence
  source 1..2151: mol_type = other DNA
atggcccaaccaggcccagccagccagcccgatgtgtctttacagcagagggtggcagaattggaaaaaataaacgccgagttccttagggctcagcagcaactcgagcaggagttcaaccagaagagggctaagtttaaggaactgtacctcgcaaaggaggaagatctgaagcgacagaatgcagtactgcaggcagcccaggacgacctgggccatctgcggacacaactttgggaggctcaggctgaaatggaaaatatcaaagctatagcaactgtaagtgagaatacaaaacaagaggctatcgatgaagtcaagaggcagtggagagaagaggtggcctccctccaggctgtcatgaaagaaactgtgagagattacgagcatcagttccacttacgactcgagcaagaaagaactcagtgggcacagtatagggagtcagccgagagagagattgcagatctgcggaggaggttgtccgagggccaagaagaggaaaatctggaaaacgagatgaagaaggcccaggaggatgctgaaaaacttcgcagtgtggtgatgcccatggagaaggaaattgcggctttgaaggacaagttgactgaagccgaggacaagatcaaagagctggaggcctccaaggtaaaggagctgaaccactacctcgaggcagaaaaatcatgccggaccgatctcgaaatgtacgtggccgttctgaacacccaaaaaagtgttctgcaggaggacgcagagaagttacggaaggagttgcaccaggaaaggcagcaacataatcagcttaagcatacttggcagaaggccaacgaccagtttctggagagccagagattactgatgcgggacatgcaacgtatggaaatcgttctgacaagcgagcagctgagacaggtagaggaacttaagaagaaagaccaagaggacgacgaacaacagaggctgaataaaaggaaggatcataaaaaggctgacgtcgaagaggagatcaaaattccagtcgtatgcgcattgacgcaggaagagagttcggcgcagctcagtaacgaggaagaacacttggattccacgcggggaagcgtgcactcactggatgccggtctgctcctgccgtctggcgatccattttcgaaatctgataacgatatgttcaaagatggcctcaggcgtgctcagtctaccgactcccttggaaccagcggctcgctacagtcaaaggccttgggctataactataaagcaaagtccgccggaaatttggatgagagtgactttggcccacttgtcggcgctgatagtgtcagcgagaatttcgatacagcgtccctcggctctctgcagatgcccagcgggttcatgctgaccaaggatcaggaacgagcaattaaagccatgacacctgaacaggaagaaaccgcctcactgcttagtagcgtcacgcagggaatggaatctgcctacgtctcacccagcgggtatcgcctggtatcagagaccgaatggaacctgctccagaaggaggttcacaacgctggcaacaagctgggcaggagatgcgatatgtgttccaattatgaaaagcaactccagggaattcagatccaagaggccgagacacgcgatcaggtgaagaagttacagctaatgcttcggcaggctaatgaccaacttgaaaagacgatgaaggataaacaagaactggaggatttcattaaacagtcttctgaagactcatcccatcagatttccgctctcgtgcttagggcccaggcgtcagaaatacttcttgaagagcttcagcagggactatcgcaggcaaaacgggatgtccaagagcagatggccgttctgatgcaaagccgcgaacaagtgtccgaggagctggtccgcttgcagaaagataatgacagtcttcagggaaagcacagtttgcacgtttctctgcaacaggcagaggactttatcctgcctgacacaactgaggctttacgggaactggtactgaaataccgggaagacattatcaatgtacgcaccgccgcagaccatgtcgaggaaaagttgaaagctgaaatcttatttctgaaggaacagatccaggctgaacaatgtttgaaaaagaagaagtag

SEQ ID NO: 237765 - DNA, 2589 bp, synthetic construct
  misc_feature 1..2589: note = Description of Artificial Sequence: Synthetic coding sequence
  source 1..2589: mol_type = other DNA
atggcccagccaggtcccgcaagccaaccagacgtatctttacagcagagggtggccgagctcgagaaaatcaacgctgagtttttgcgagctcagcagcaactagaacaggagtttaaccagaaaagggcaaaatttaaagaattgtatctcgcaaaagaggaagatctcaaaagacagaatgcagtcctacaggctgcccaggatgacctcggccacctgcgtactcagttatgggaggcacaagccgagatggagaacattaaggctattgccacagtctccgagaatacaaagcaagaggccatcgatgaagttaagaggcaatggagggaggaggtcgcatcactccaagcagtgatgaaggagaccgtgagagattacgaacaccagtttcacctgagattggaacaggaacgcacccagtgggcccagtaccgcgagagtgccgagagagagatcgctgatctgagaaggaggctgtccgaaggtcaggaggaagaaaacctggagaatgagatgaaaaaagcacaggaggacgctgagaagctgagatcagtcgtgatgcctatggagaaagagattgctgctctgaaggacaagcttactgaagctgaagacaagattaaggaactagaggcgtctaaggtgaaggagctcaaccattatctggaggccgagaaatcttgccgcacagacctcgaaatgtacgtggcagtgctcaatacacagaaaagcgtcctgcaggaagatgccgagaaactgagaaaagagttgcacgaagtctgccatctcctcgaacaggagagacaacagcacaaccagcttaaacacacctggcagaaggctaacgatcagttcctggagtcccagaggctcctcatgcgggacatgcaaaggatggaaatcgtcctgacctctgagcaactccgacaggtggaagagcttaagaaaaaagatcaggaagatgatgaacagcagcgactgaacaagcgaaaagatcacaaaaaggcggatgtggaggaggagattaagatcccagttgtgtgcgctctgacccaggaggagtccagtgcacagcttagtaatgaagaagaacacttggatagtactcgaggttctgtgcactctctggatgcaggactcctcctgccttcaggggatccattttcgaagagcgataacgatatgtttaaggacggactgcggagagcccagagcacggactctctcggcaccagtggttcccttcagagcaaggcattagggtacaattacaaggccaaatccgcgggaaatctagatgaatccgactttggccctctcgtcggcgctgacagtgttagtgaaaatttcgatacagccagcctcggctcattacaaatgccctcaggtttcatgttgactaaggatcaggagagggccattaaagccatgacgcccgagcaagaggagaccgcctcactgctgtccagcgtgacccagggcatggagtcagcttatgtttcccccagtggctaccgtctggtcagtgaaacggaatggaatctgctgcagaaagaggtgcacaacgctgggaataagctgggacgcaggtgcgatatgtgctctaattatgaaaaacagctgcagggaatccagattcaggaggctgaaactcgggatcaggtaaaaaagctgcaattgatgctgagacaggctaatgaccaacttgagaaaacaatgaaagacaagcaggagctggaagactttatcaagcagtctagcgaggactccagccaccagatttctgcactcgtattgcgggctcaggcctccgagatactgctggaagagctccagcaaggtctgtcacaggcaaaaagagatgtccaggaacagatggcggttttaatgcagagccgcgaacaggtgtctgaggagcttgtgaggttgcaaaaggacaacgactcactgcagggtaagcatagtctgcacgtctcactgcagcaggcggaagacttcattctgcctgacacgaccgaagccctccgtgaactcgtactcaagtaccgcgaggacattattaacgtgaggacagctgctgaccatgtagaggagaagctcaaggcagaaattctcttcctgaaggagcaaatccaggccgagcagtgcctcaaagaaaacctggaggagactctccagctggaaattgaaaattgtaaagaagaaattgcttctatttcctcacttaaagccgagcttgagcggattaaggttgaaaaaggacaacttgagagtacattgagggagaagtcacagcagctcgagagcctgcaggaaataaagattagcttggaagaacagctgaaaaaggaaacagccgcaaaggcaaccgtcgaacagctaatgttcgaggaaaaaaacaaggctcagcggcttcaaactgaactcgacgtttctgagcaggtgcagagagattttgtgaagctgtctcagacattacaagttcagctggaaagaattcggcaggccgattctctagagcgcatacgggctatcctcaacgataccaaactcactgatatcaaccaactgcctgaaacttag

SEQ ID NO: 237766 - DNA, 1602 bp, synthetic construct
  misc_feature 1..1602: note = Description of Artificial Sequence: Synthetic coding sequence
  source 1..1602: mol_type = other DNA
atggccgcagctgctccagtggctgctgacgatgatgagcgcaggcgcaggccgggagcagctctggaagattcgcgtagtcaggagggcgcaaatggcgaggccgagtccggggaactgtctaggctccgcgcagagttagcaggagccctggcggagatggaaacgatgaaagctgtggctgaggtctcagagtccactaaggccgaagcggtggccgctgtgcaacggcagtgtcaggaagaagtcgcttcgctacaggccatccttaaagactcaatttcctcttacgaggcgcaaatcaccgcactcaagcaggagaggcagcagcagcagcaagattgtgaggaaaaggagagagagttggggagactgaaacaactgctctccagagcctaccctctcgattccttggaaaaacaaatggagaaggcccatgaggacagcgagaagctacgcgagatcgtcctgccgatggagaaggagattgaggagcttaaggcaaaactgctgagggcagaggaactgattcaagagattcaacggcgtccgcgacacgctccaagtctgcacggaagcactgaactcttgcctttatctcgggacccttctccaccccttgaaccgctcgaagagctctcaggggacggaggtccagccgctgaagctttcgcacacaactgcgacgactccgcatctatatcctctttctcgctcggtgggggtgtcggcagcagtagttccctcccccaatcccgacagggactctctcccgagcaggaagagaccgcaagcctcgtgtcaacggggactctggtgcctgagggaatctacctgccccctcccggttatcagctggtcccagacacccagtgggagcagttacaaactgagatgcaggtattactggcccaagttcagaactccgagcagttacttagaacactgcaaggcactgtatcccaggcccaggagcgtgtgcagcttcagatggctgagctggtgactacgcacaagtgccttcaccatgaggtgaagagacttaatgaagagaatcaggggctgagagcagaacaactgccctcgtcggcacctcagggctctcagcaggagcaaggagaggaagaatcactgccttcatcagtacccgaacttcaacagctgctgtgctgtacgcgacaggaagccagggccaggctccaggcccaagagcacggagctgaacggcttcggatcgagatcgtgactctgcgagaagctctggaagaggaaacggtggccagggcgtccctggaaggacaactgcgagtgcaaagagaagagaccgctagtctctgtagcctgcgcaccgagatggaacgggtgcaacaggaacagtccaaagcccagttgcctgacctgctgagtgaacaaagagcgaaagtgctccggctgcaggcggaactggaaacaagtgagcaggtccagcgcgacttcgtgaggctgagtcaggcacttcaagttcggctggagagaattcgccaggcagaaacgctggaacaggtgagaagcatcatggacgaggctccacttacagacgtgagggacattaaagatacatag

SEQ ID NO: 237767 - DNA, 1710 bp, synthetic construct
  misc_feature 1..1710: note = Description of Artificial Sequence: Synthetic coding sequence
  source 1..1710: mol_type = other DNA
atggcagccgcagctcccgtcgccgctgacgatgatgagcggagaagacggccaggtgctgctctcgaggatagccggagccaagagggcgcaaatggcgaggcagaatccggcgagctcagccgcctgcgggcagaattggcaggcgcattggctgagatggagacaatgaaagccgtcgcagaagtgtccgagagtacaaaagccgaggccgttgccgcagtgcagagacagtgtcaggaggaggtagcttcactccaggccatcctgaaggacagcatttcttcatatgaggcccagataaccgccttaaagcaggaacggcagcagcagcaacaagattgcgaggagaaggaaagagagctggggcgtctgaagcaacttttgagccgtgcttaccctttagattctctggaaaagcagatggagaaggcgcacgaagactcagaaaagctgagagagatcgtgctccctatggagaaggagatagaagaactgaaagcgaaactgctgagggcggaagagctgatccaggagatccagagaagacctaggcacgcccctagcctgcacggcagtacagagctacttcccctcagccgtgatccaagtccacccctggaacccctggaggagctttccggcgacggaggaccggctgccgaggccttcgcccacaactgcgacgattctgcgagtatatcttccttttcactgggcggaggagtgggcagttcctcaagcctcccccagtccaggcagggcctgagcccggagcaagaggagactgcctcgctcgtgtccacagggacacttgtcccagagggcatatatctgcctccacctggctatcagctggttcctgatacgcagtgggagcaactccagaccgaaggccgtcagctgcagaaagatctggagagcgtgtcccgtgaacgggacgaactccaagaggggcttcgcagatccaacgaagactgcgccaaacaaatgcaggttttgcttgcccaagttcagaactccgagcaactgctccgtacactgcaaggaacagtgtcacaagcccaagagcgcgtacaattgcaaatggcagagctggtgaccactcacaaatgtctgcatcacgaggttaagaggttgaacgaagagaatcagggccttcgagcggagcagctccccagttccgcacctcagggctcccagcaggagcagggtgaggaggagtccctccctagttctgtaccagagttgcaacagcttctgtgctgtacgagacaggaggctcgtgcgcgactgcaggctcaggaacacggagcagagcggcttcggatagaaattgtcacacttagagaggcattggaggaagagacagttgcacgggcatccttggagggccagctccgagtgcagagggaggaaacagaagtgctggaagcatccctgtgctctctgagaactgagatggagagggttcagcaagaacaatcaaaggctcagctccctgacctgctcagcgagcagcgcgctaaagtgctccgcttacaggcagaactggagacatcagagcaggtgcagcgcgattttgtacggttgagtcaggctctgcaggtgaggctggaacgcatccggcaggctgagacactggagcaggtgaggagcatcatggacgaagcccctctcacagacgtgcgggacataaaggacacatag

SEQ ID NO: 237768 - DNA, 1497 bp, synthetic construct
  misc_feature 1..1497: note = Description of Artificial Sequence: Synthetic coding sequence
  source 1..1497: mol_type = other DNA
atggcagcagccgcacctgtagctgcggacgacgacgaacgccgaagaaggcccggagccgatagtatcagttcttacgaagcacagatcacagcactgaagcaggagcggcagcagcagcagcaggactgcgaggagaaagagcgggagttgggccgattgaaacagttgctgtcacgggcataccctctcgattctctcgagaaacagatggagaaagcacatgaagactctgagaaacttagagagatcgtgctgcccatggaaaaggagattgaagaactgaaggctaaacttttgagggccgaagagctaattcaagaaattcaacgtcgaccaagacacgctccaagtctgcatggatcaaccgagctgttaccactgtccagagatccatcaccacctctggagccgcttgaggagctgtcaggggacggtgggccagctgccgaggctttcgcacataactgcgatgattcagcatcaatcagttcattcagcttaggcggtggcgtgggctccagtagctcactgccccagtcaaggcagggtctgagccctgaacaagaggaaaccgcctcccttgtgtccaccggcacgctcgtaccagagggtatctatctgcccccacctggctaccagttggtgcctgacacacagtgggaacagttgcaaactgaggggaggcagcttcagaaggatcttgagtccgtttccagagagcgtgatgagctccaggaaggcctcagacgatctaatgaggattgcgcaaagcagatgcaggttctactggctcaggtccaaaactcagaacagctgctgcgcactctccagggtaccgtgtcacaggcacaggaacgcgtgcagcttcagatggccgaacttgtgacgactcataaatgcctccaccatgaagtgaagaggctgaacgaggagaaccagggacttagggccgagcaactccctagtagcgcaccccaaggatcacagcaagaacagggtgaggaagagtcgctgccttcgagtgtgcctgaactccagcagctgttatgctgtactcgccaggaagctcgagccaggctccaggctcaggagcacggcgcagagaggctgaggatagagattgtaaccttacgtgaggctctggaggaggagaccgtggctagggcttccctggaaggccagctcagagtgcagcgagaggagacagaggtcctcgaggcatccctttgctccctgcgaactgaaatggaaagggttcagcaggagcagtccaaggcccaactgcccgatttgctgtcggagcaacgcgctaaggtgctgcgtttgcaggcagaattggagacatcagaacaagtccagagagactttgtgaggctgagtcaggctctgcaggttcgtctggagagaattcggcaagcagaaacccttgaacaggttcggagcatcatggatgaagccccactgaccgacgtgagggacatcaaagacacttag

SEQ ID NO: 237769 - DNA, 2085 bp, synthetic construct
  misc_feature 1..2085: note = Description of Artificial Sequence: Synthetic coding sequence
  source 1..2085: mol_type = other DNA
atgactgacactgtattttccaatagctctaatagatggatgtatccttctgacagaccactgcagtctaatgacaaagaacaacttcaggcgggatggtccgtccatcccggaggccagccagatcgccagaggaagcaggaagaactgacagatgaagaaaaagaaataataaaccgggtgattgccagggcagagaagatggaagaaatggagcaggaacggataggtcggctcgtcgacagattggagaacatgcgcaagaacgtggccggtgatggagtcaatcgttgcatcctgtgcggagagcagctagggatgctgggctcagcgtgtgtcgtctgcgaagattgcaaaaaaaacgtatgcactaagtgtggcgtggaaactaacaatcgtctgcacagtgtgtggctctgcaaaatctgcatcgaacaaagagaagtgtggaaaagatccggcgcttggttttttaaaggcttcccaaaacaggtcctccctcaaccgatgcccatcaagaagaccaaacctcagcagcccgtctccgagcccgctgcccctgagcaaccagcaccagagcctaaacaccctgcacgcgcaccagcgcgtggcgattctgaagatagaagaggaccagggcagaagacaggtcctgatccagctagcgcgcctggacgtgggaattatggccctccagttagacgcgcaagcgaagcccgaatgtcctcatcttcacgcgactctgagtcctgggaccatagcggcggagccggagactcctcacggtctcctgcgggactccggagagccaacagtgtgcaggcaagcagacctgctccgggtagtgtacagtcgccagctcctccacagcctggacagcccggaacccctggaggttctcggcctggcccaggtccagcaggacgcttcccagatcagaaacccgaggtggccccatccgatcctgggacaactgctccaccccgagaagaaagaaccgggggagtaggaggctatcctgctgttggggcacgagaagaccggatgagtcatcccagcggcccatattcacaggcgtctgccgcagctccccagcctgccgctgctcggcaacctccacctcctgaggaagaggaggaggaggctaacagctatgactctgacgaggcaactacattgggcgctttggagtttagtttattatacgatcaggacaattcctctcttcaatgcacgataattaaggccaagggcctgaaacccatggattcaaatggcctggccgacccttatgtgaagttgcatctgctgcctggggcttcaaagagcaacaagctgcggacaaagacacttagaaatacaagaaatcccatctggaatgagaccctcgtctaccacggcatcactgacgaagacatgcaaaggaaaaccctcaggatatccgtttgtgacgaggataagttcggtcacaacgagttcattggcgagacaagattctcactgaagaaactgaaacctaatcagcggaagaatttcaatatttgtctcgaaagggttatcccaatgaaaagagcgggtacaacaggtagtgccagagggatggccttgtatgaggaagaacaggtggagagggtgggagatattgaagaaagggggaaaatcttagtcagcttgatgtacagtacacagcaaggaggtttgatcgtcggcatcattcggtgcgtgcacctggctgcgatggacgccaacggatactctgatccattcgtaaagttgtggctgaaacctgacatgggcaagaaggccaagcacaaaacacagattaagaaaaaaacccttaatccagaatttaatgaagagttcttctacgatattaagcacagcgacttagccaaaaaatcactcgacattagcgtgtgggactacgacataggcaaatcgaatgactacatagggggatgtcagctgggtatctcagccaaaggcgagagactcaagcactggtatgagtgccttaaaaacaaagacaagaagatcgagagatggcatcagctgcagaatgaaaaccacgtcagctccgactag

SEQ ID NO: 237770 - DNA, 2085 bp, synthetic construct
  misc_feature 1..2085: note = Description of Artificial Sequence: Synthetic coding sequence
  source 1..2085: mol_type = other DNA
atgacagacaccgtgttttcaaattcatccaatcgatggatgtacccgagcgacagaccactccagtcaaacgacaaggaacagctccaggctggatggagcgtccatccaggcggacaacctgaccggcagaggaaacaggaagagctcacagatgaggaaaaagaaattataaatcgcgtgatcgcacgggcagaaaagatggaggagatggaacaagagagaattggtaggctagtggataggctggaaaacatgcggaaaaacgtggcaggtgatggcgtcaatcgatgcatcctctgtggcgagcagttaggtatgctgggatcagcatgcgtagtgtgcgaagactgtaagaagaacgtctgtacgaagtgtggggtggaaacgaacaatcgactgcattcagtgtggctctgcaaaatctgcatcgaacaaagggaggtgtggaagaggtcaggagcttggttcttcaaagggttccccaagcaagtcctgccccagccgatgcctatcaagaagacgaagccccagcagccagttagcgagccagccgcacctgagcaacctgccccagaacccaagcaccctgcacgcgctcccgcacgcggagacagcgaggatagacggggtcctggccagaagaccggaccagatccagcatctgcgcctggcagaggcaactacggtcccccagtgcggagggcctccgaggccaggatgtcctcgtcttctcgcgactcagagagttgggaccacagcgggggagccggtgactctagtcggtcccccgctgggctccgccgtgcgaatagcgtgcaagcctctaggcccgcaccaggctctgtccagtctccagctccgcctcagccagggcaacccggtacccccggaggcagtcgacccggacctggcccagctggcaggtttccagatcagaagcctgaggtcgcaccttccgacccaggaacaactgctcctcccagggaagagcgcactggcggtgttggcggataccctgccgtgggggctagggaggatagaatgagccatccaagcggtccgtattctcaggcctctgccgctgcccctcagcccgcagctgcaagacagccacctccacccgaagaggaggaggaagaggcgaatagctacgacagtgacgaggctaccacactgggcgctctggagttttcactcctctacgaccaggataacagttccctgcagtgtaccattatcaaggccaaagggctgaagcctatggattcaaatggcttggccgacccatacgttaagctccatttactgcctggcgcatcaaagagtaacaaacttcgcaccaagactctacggaacacccggaaccccatctggaatgagacgctggtctaccacgggatcaccgatgaagatatgcagaggaagaccctgcgcattagtgtgtgcgacgaggacaagttcggacacaatgagttcatcggggagacccggtttagtctgaaaaaactcaaacccaatcagcgaaaaaatttcaacatttgcctagagagagtcattcctatgaagcgggcaggtaccaccgggtccgcccgaggcatggccctctacgaggaggagcaggtagaacgcgtcggagacatagaagagcgcggaaaaattctggtgtcgctcatgtattctacacaacagggcggattaattgtgggaattattcgatgtgtacacctggccgctatggacgccaacgggtatagcgatccgtttgtgaaactgtggctgaaacctgacatgggaaagaaagccaaacacaagacacaaatcaagaagaagaccctaaaccccgaattcaatgaagagtttttctacgatataaagcatagtgacctggccaaaaaaagtctagatatctctgtctgggattatgacatcgggaaatcaaatgattacataggtggctgtcagctcggcatttctgccaagggggaaaggctcaaacactggtacgaatgcctgaagaacaaggacaagaaaatagagcggtggcaccagctacaaaatgagaaccacgtttccagcgactag

SEQ ID NO: 237771 - DNA, 2085 bp, synthetic construct
  misc_feature 1..2085: note = Description of Artificial Sequence: Synthetic coding sequence
  source 1..2085: mol_type = other DNA
atgaccgacacggtgttcagtaacagctctaatagatggatgtaccccagtgacaggccactccagtcaaatgacaaagaacagctgcaagcagggtggagcgtccaccccggtggccagcccgatagacagcggaagcaggaggaactgacggatgaagagaaagagattatcaatcgggtgattgcaagagctgagaagatggaagagatggaacaggaaaggatcgggcgactcgtggataggctcgaaaatatgcgcaagaacgttgccggagatggtgtgaacagatgcattctatgcggcgaacagcttggaatgcttgggtcagcttgcgtagtatgtgaggattgtaagaagaacgtctgtaccaagtgtggggtggaaacaaacaacagactccattcagtatggctctgcaagatctgcatagaacagcgggaagtctggaaacgctcaggagcttggttctttaaggggtttcctaaacaggtgctgcctcaaccaatgcctataaagaaaacaaagccacagcagcccgtgagtgagcctgcagcaccagagcagcccgcacccgagccaaagcatccagctcgcgcaccagctaggggtgactctgaggatcggcgagggccaggtcaaaagaccggtccagatccagctagtgcacctggtagagggaactatggaccaccggtgcgacgggcttccgaggccagaatgagctcaagttctcgtgactctgagtcgtgggaccattcagggggagcaggcgattccagccggtcccccgcaggtctgcgcagagctaactctgttcaagcttcgagacccgctccaggatccgtgcaatccccagcccctccccagcctggccagcctgggacccccggaggatctcgccctggacccggaccagctggccgatttcccgatcaaaaaccagaggtggcccctagtgacccaggcacaactgccccaccccgagaggaacgaacaggcggagttggaggctaccccgcagtgggcgcacgcgaggatagaatgtcgcatcctagtggcccatacagccaagcctcagctgccgctccacagcctgccgctgcaaggcagccaccccctcctgaggaggaggaggaggaggctaacagttacgacagcgacgaggcgacaactctcggcgcattggaattcagtctcctgtatgatcaagacaatagcagcctccaatgtacaattatcaaagcaaagggactgaagcctatggacagtaacggactggcggatccctatgtgaagctacacttactacctggtgctagcaagagtaacaaactgcgcacaaagacgctgcgcaacacccggaatccaatctggaacgaaacgcttgtctaccatggcatcacagatgaagatatgcagcgtaagaccttgcgcatctccgtctgtgatgaggataaattcggacataatgaattcataggtgaaactagattctccttaaagaagctgaagccaaaccagaggaaaaacttcaatatttgcctggagagggtgatacccatgaaacgtgcgggaaccaccgggtctgcacgtgggatggcgctgtatgaagaagagcaggtcgagagggttggagatatagaggagagaggtaaaattctagtgagtctcatgtactccactcaacaaggtggtctgattgtgggtattattaggtgcgtgcatttggcagcaatggacgccaatgggtactcagatccctttgttaagctctggctcaagcctgacatgggaaagaaggccaagcacaaaactcagattaaaaagaagacccttaatccagaatttaatgaagagttcttctatgatataaagcattctgatttagccaaaaagagcctggacatctccgtgtgggactacgatatcggcaagtccaatgactatatcggcggttgccaactgggtatctccgccaaaggagagcgcttgaaacattggtatgaatgcttgaaaaataaggataaaaaaatagaacgctggcaccaactgcagaatgagaatcacgtctcctccgactag

SEQ ID NO: 237772 - DNA, 1938 bp, synthetic construct
  misc_feature 1..1938: note = Description of Artificial Sequence: Synthetic coding sequence
  source 1..1938: mol_type = other DNA
atgactgatactgtcttttccaattccagtaacagatggatgtatccgagcgaccgaccactgcagtccaaactgaaggaccgccgtctggtggatcggctcgagaacatgcggaagaacgtcgccggagacggcgtgaaccggtgcatactgtgcggcgagcagttgggcatgttaggctcagcatgtgtagtctgtgaagactgtaagaaaaacgtctgtactaagtgcggcgtagaaacaaataacagactccatagcgtttggctgtgcaaaatctgcatagagcagcgcgaagtgtggaaacggtccggcgcatggttttttaagggctttcctaaacaggtgctccctcagccgatgcccataaaaaaaaccaagccacagcaaccagtgtctgaaccagccgcaccggagcaaccagccccagagcccaagcacccggctagggcgccagctagaggagatagcgaggaccggagagggcctggtcagaagactggccctgaccccgctagtgccccaggcagagggaactatgggccaccggtgcgtcgggcatcggaagcccgtatgtcctccagttcgcgggatagcgaaagctgggatcattctgggggtgctggtgacagtagccggtctcccgctgggctgcgacgggctaatagcgtacaggccagtcgacccgcacccggatctgttcagtctcctgccccaccgcaacccggacagccgggaacacccggagggtctcgcccaggaccaggccctgctggtagatttccagatcagaaacccgaggttgcgccttccgaccctggcacgactgctcctcccagggaagagaggaccgggggtgtcggaggctacccagctgttggagccagagaagaccgcatgtctcacccgagtggcccttatagtcaggcgagtgcagcagcgccacagccagctgccgcaaggcagccccctcctccggaagaggaagaggaagaggccaacagctatgactcagacgaagctactacgctgggcgcactcgagtttagcctgctgtatgaccaggacaatagttcccttcagtgtactatcattaaagccaagggcctgaaaccaatggatagcaacggcctggcggatccctacgtgaagcttcatctgctgcccggagctagcaagagcaataaactaagaacgaaaacactgagaaatacccgaaatcctatctggaacgaaacattggtctatcacgggattactgacgaggacatgcaaagaaaaacacttcgtatctcggtatgcgacgaagacaagtttggacataacgagtttatcggggaaaccaggttctccttgaaaaagctcaagcccaaccagcgaaagaattttaacatttgccttgaaagggtaatcccaatgaaaagagcgggtacaaccggtagcgccaggggcatggcactttacgaagaggagcaagtcgagagagtgggcgacatagaagagaggggcaagattctggttagcctaatgtacagcacccagcaaggtggtctgatcgtgggtattataaggtgcgtgcacctggcagccatggacgccaatgggtacagtgaccctttcgtgaagctgtggttaaagcccgacatggggaagaaggctaaacacaaaacccagattaagaagaagactctaaaccctgaattcaacgaagagttcttttacgacattaaacactccgacctagccaagaaatccctagacatcagtgtgtgggattatgacatcggtaagagtaacgactatatcggcggatgtcaattaggaatcagtgccaaaggcgagagattgaagcactggtatgaatgtctcaaaaataaggacaaaaagatcgagcggtggcatcagctgcagaacgagaatcatgtgtcctctgactag

SEQ ID NO: 237773 - DNA, 2085 bp, synthetic construct
  misc_feature 1..2085: note = Description of Artificial Sequence: Synthetic coding sequence
  source 1..2085: mol_type = other DNA
atgaccgatactgtgttctccaatagcagcaatcgctggatgtaccctagcgatcgaccactgcagagcaacgataaggaacagttgcaagcaggttggtctgtgcatcccggaggccagcctgaccgccaaaggaaacaggaagaactgacggacgaggagaaggaaatcataaaccgagtgatcgctagggctgaaaagatggaagagatggaacaggagcgcataggcaggttagtggaccggctggagaacatgcgcaaaaacgttgcaggcgatggagtgaaccggtgtatcttatgtggagaacaacttggtatgctggggtccgcctgcgtagtctgtgaggactgtaaaaaaaatgtgtgtacgaagtgcggggtagagactaataacaggcttcattctgtgtggctgtgtaagatctgtatagaacagagggaggtttggaagcgcagcggcgcttggttttttaagggttttcctaagcaggtgttgccccagccaatgcctattaaaaagaccaaacctcagcaaccagtgtcagagccagccgcacctgaacagcctgcgccagagccaaagcatcccgctagggccccagctaggggagactccgaagatcgacgtggacctggccagaaaacagggcctgacccggcatcagcccctggtcgcggaaactatggaccacccgttagacgggcatcagaggcacgaatgagtagtagcagccgggacagtgagtcatgggatcactctgggggagccggtgacagctccagatccccggcaggcctccggcgtgctaactctgtccaggcttctcgcccagcgcctgggagtgttcagagtcctgccccaccccagccaggccagccaggaactcccggaggctcccgccctggtccagggcctgctggccgtttccctgatcagaaaccagaagtcgctcctagtgaccccggaacgaccgccccacctcgggaagaaaggacgggcggtgtcggcggttatccagctgtaggagcacgggaggatcgcatgtctcatcctagcggcccatattctcaagccagtgctgcagccccacaacctgccgctgctagacaacctcctccgcctgaggaggaagaagaagaagctaatagctacgattcagacgaggctacaactttaggagcgttagagttttctctgctgtacgaccaggacaactcaagcctgcagtgtaccattataaaggccaaaggcctgaagccaatggattccaatggattagccgatccatatgtcaagctgcatttacttccaggggcttccaagagtaacaagctgcggacaaagactcttcgcaacactcggaaccctatctggaatgagactctcgtgtatcacggcattacagacgaagacatgcagaggaagactttacgcatttcagtatgtgacgaggacaaatttggccacaacgaattcattggagaaaccaggttttctctgaagaagctcaagcctaaccaacgcaaaaattttaacatctgccttgagagggtgatccccatgaagagggcaggcacaaccgggtcagccagaggaatggcactgtatgaagaagaacaggttgaaagagtgggcgacattgaggagagggggaagattcttgtgagcctcatgtactccacgcagcagggcggattaatcgtggggatcatcagatgtgtacacctggctgctatggatgctaatggatactctgaccctttcgttaagttgtggctgaagcccgatatgggcaaaaaagcgaagcacaaaacccagatcaaaaagaaaactcttaacccagagttcaacgaggagtttttttacgatatcaagcacagtgatttggccaagaaaagcttggatatctccgtatgggattatgatattggcaagtcgaacgattatatagggggttgtcagctgggcatctccgcaaagggcgagagactcaaacattggtacgagtgcctgaagaacaaagataagaagatcgagagatggcatcaactgcagaatgagaatcatgtatcttctgactag

SEQ ID NO: 237774 - DNA, 39 bp, synthetic construct
  misc_feature 1..39: note = Description of Artificial Sequence: Synthetic coding sequence
  source 1..39: mol_type = other DNA
atgacggacacagtatttagcaacagcagtaacagatag

SEQ ID NO: 237775 - DNA, 252 bp, synthetic construct
  misc_feature 1..252: note = Description of Artificial Sequence: Synthetic coding sequence
  source 1..252: mol_type = other DNA
atgactgatactgtattcagcaacagctccaaccgatggatgtacccaagcgataggcctctccagagcaatgacaaggaacaactgcaagcagggtggtccgtccatcctggaggtcaacctgacaggcagcgcaagcaggaggagttaaccgatgaggagaaagaaattatcaatcgcgtgatcgccagagccgaaaagatggaagagatggagcaagagcggatcggcaggctggtggaccggctgtag

SEQ ID NO: 237776 - DNA, 285 bp, synthetic construct
  misc_feature 1..285: note = Description of Artificial Sequence: Synthetic coding sequence
  source 1..285: mol_type = other DNA
atgaccgataccgttttcagcaacagctcgaatcggtggatgtacccatccgataggccactgcagagtaacgacaaggaacagctccaagctggctggtctgttcaccctggcggacagccagaccggcagaggaaacaagaagaactgacagacgaggaaaaagaaataatcaaccgcgttatagctcgcgctgagaagatggaagagatggagcaggagagaataggcaggctggttgatcgattagagaatatgaggaaaaatgtcgctggagatgggtag

SEQ ID NO: 237777 - DNA, 492 bp, synthetic construct
  misc_feature 1..492: note = Description of Artificial Sequence: Synthetic coding sequence
  source 1..492: mol_type = other DNA
atgacagatactgtgtttagcaacagcagcaataggtggatgtacccctctgacaggccacttcaaagcaatgacaaagagcagctacaggcagggtggagcgtccatcccggaggacagccagacaggcaaagaaaacaagaggagctgaccgacgaagagaaggaaattatcaatcgggttatcgctagggcagaaaagatggaggaaatggagcaggaaaggattggtcgcctggtcgacaggctagaaaatatgcgcaaaaacgttgccggtgatggcgttaatcgttgcatcctgtgcggcgaacagctcggcatgctgggatcagcctgtgtggtttgcgaggattgcaaaaaaaatgtgtgcacaaagtgtggagtcgagacaaataacaggctccacagcgtttggctctgtaaaatatgcatcgagcaaagagaggtctggaaaagatctggggcatggttctttaagggctttccaaaatag

SEQ ID NO: 237778 - DNA, 384 bp, synthetic construct
  misc_feature 1..384: note = Description of Artificial Sequence: Synthetic coding sequence
  source 1..384: mol_type = other DNA
atgaccgacacagtcttttcaaactcttccaatagatggatgtatccatccgacaggcccctccagtcaaacgataaggaacagcttcaagccggatggagtgtgcacccaggtgggcagcctgataggcagcgcaagcaggaggagctgaccgatgaagaaaaagagattattaacagagtgatcgccagagcggagaagatggaggagatggagcaggaaagaatcggcagactggtggatcgactggaaaatatgagaaaaaacgtcgccggagatggggttaatagatgtattctgtgcggtgaacagctcggcatgttgggatctgcttgtgtcgtctgtgaggactgtaaaaaaaacgtgtgtaccaagtgcggctag

SEQ ID NO: 237779 - DNA, 315 bp, synthetic construct
  misc_feature 1..315: note = Description of Artificial Sequence: Synthetic coding sequence
  source 1..315: mol_type = other DNA
atgactgacactgtcttttcgaacagttctaaccggtggatgtatccctctgacaggcccctccaatccaacgataaggagcaactccaggccggatggtcagtgcatcccggaggccaacccgatcgacagaggaagcaggaggaactcacagacgaggaaaaagagattatcaaccgtgttatcgctcgagccgagaagatggaggagatggaacaagaaagaatcggacggctggtcgacaggcttgagaatatgcgcaaaaatgtagctggcgatggtgtaaataggtgcatactgtgtggggagcaatag

SEQ ID NO: 237780 - DNA, 120 bp, synthetic construct
  misc_feature 1..120: note = Description of Artificial Sequence: Synthetic coding sequence
  source 1..120: mol_type = other DNA
atgacagacaccgttttttccaatagctcaaacaggtggatgtatccttccgacaggcctctgcagagcaacgacaaggagcaactgcaggcaggctggtccgttcaccctgggggttag

SEQ ID NO: 237781 - DNA, 348 bp, synthetic construct
  misc_feature 1..348: note = Description of Artificial Sequence: Synthetic coding sequence
  source 1..348: mol_type = other DNA
atgacagataccgtgtttagtaatagttctaatcggtggatgtacccctccgacaggccattacagtccaacgataaagagcagttgcaggcgggatggtccgtgcatcctgggggtcagcctgacagacagagaaaacaggaagagctcacagatgaagaaaaagaaatcataaaccgcgtgatagcgagggcagaaaaaatggaggagatggagcaagaacgtatcggacgactggttgaccgcctggagaacatgagaaagaacgtggccggtgatggcgtgaatcgttgtatattgtgtggagagcagctcggtatgcttggctctgcttgtgttgtttgctag

SEQ ID NO: 237782 - DNA, 2073 bp, synthetic construct
  misc_feature 1..2073: note = Description of Artificial Sequence: Synthetic coding sequence
  source 1..2073: mol_type = other DNA
atgaccgatactgtcttttcgaatagcagtaacaggtggatgtatcccagcgatcggcctctgcaatctaagcttcaagcaggatggagtgtgcatccgggtggccagccagaccggcaacggaagcaggaagagcttactgatgaagagaaggaaatcataaacagggtgatagcccgtgccgaaaagatggaagagatggagcaggagaggataggcagactcgttgatcggcttgagaacatgcggaagaacgtagcaggagatggagtcaacaggtgcatactgtgcggcgagcaactagggatgctggggagcgcgtgtgtggtgtgcgaggactgtaaaaagaacgtgtgcacaaagtgcggcgtggagacaaacaaccgcttgcatagcgtgtggctgtgtaagatctgtattgaacaacgcgaggtgtggaagcgttctggagcttggttcttcaaagggtttccaaaacaggtgctgccacaaccaatgcctatcaagaaaacaaagcctcaacagccggtctccgagcccgcagcaccagagcagcctgctccagaacccaagcaccccgctagagccccagcacggggagacagcgaggatcgcagaggacccggtcagaagaccggacccgaccctgcatctgctccgggtcgtggcaactatgggcctcccgtgcgtagagcttccgaggccaggatgtcctcttcttcacgggatagtgaaagctgggatcattctggaggtgccggtgactccagccgcagcccagccggtttgcgacgcgcaaacagcgtacaggccagtaggccagcacctggatcggtccagagtcctgccccaccccagccaggacagccaggcactccaggcggatctcgacccggaccaggtcccgcagggagattccccgatcagaaacccgaagtggctcctagtgatcccggtaccacagcccctcctcgcgaggagagaactggcggagtaggcggatacccagctgtgggtgccagagaggatcgaatgtctcacccatccggcccatattctcaagcatcagcggcagcaccacagcctgcagccgctagacagccgccaccccctgaggaggaggaagaggaagcaaattcttatgactcagacgaagcaactaccttgggagcactggagttcagcctcttgtacgaccaggacaattcttctcttcaatgtacaattataaaagctaaggggttaaaacccatggattccaatggactggctgacccttacgtgaaactccacctgctcccaggcgcttcaaagagcaacaagcttcgcacgaaaacccttagaaacacccggaaccccatctggaatgagactctcgtctaccatggaattaccgatgaggatatgcagcgcaagaccctacggatctcggtttgtgacgaagacaaattcggacacaatgaattcatcggagagaccagatttagtttaaagaagcttaagcctaaccagcgaaagaactttaacatctgtctagaaagagtgatccccatgaaacgcgcagggaccaccggatctgctcgaggaatggctctgtacgaagaggagcaggtagagcgggttggagacatcgaggagcgtggtaagatcctggtatccttgatgtactccacgcagcagggtggcctgattgtcggaatcattcgatgcgtgcacctcgctgccatggacgcaaatggctattcagaccccttcgtgaaactttggttgaagcctgatatgggtaaaaaagctaaacacaagacacaaattaagaagaaaacactcaatccagagttcaacgaagagttcttctacgatatcaagcactctgatctcgcaaagaaatctcttgacatctccgtttgggactacgacattggaaaatccaacgactacataggcggttgtcagcttggaataagtgcgaaaggggagcgcctgaagcactggtacgaatgccttaagaacaaagataagaagattgagcgttggcatcagctccaaaacgaaaatcatgtttcttccgattag

SEQ ID NO: 237783 - DNA, 378 bp, synthetic construct
  misc_feature 1..378: note = Description of Artificial Sequence: Synthetic coding sequence
  source 1..378: mol_type = other DNA
atgacggataccgtgttctcaaactcttcaaatagatggatgtatccctccgataggcccctgcagtccaacgataaagagcagcttcaggcgggttggtcagtccaccccggtgggcagccggacagacaacgcaaacaggaagaactcactgatgaggaaaaggaaataatcaaccgtgttatcgccagagctgagaaaatggaagagatggagcaggaaagaatcgggaggctggtagatcgactggaaaatatgcgcaaaaacgttgccggtgacggcgttaaccgatgtatactttgcggggagcagttgggaatgctgggctcagcttgtgttgtatgtgaagactgcaaaaaaaacgtctgcaccaaatag

SEQ ID NO: 237784 - DNA, 546 bp, synthetic construct
  misc_feature 1..546: note = Description of Artificial Sequence: Synthetic coding sequence
  source 1..546: mol_type = other DNA
atgaccgatacggtgttcagtaattcttcaaacagatggatgtacccctccgaccgcccactgcaaagcaatgataaggaacaactgcaggctggatggtctgtgcacccgggagggcaaccagaccgccaaaggaaacaagaggaactgactgatgaggagaaggaaatcatcaacagggtaatagcgcgagctgaaaagatggaggagatggaacaagaacgcattggccgtctggtggacagactcgaaaatatgaggaagaacgtggccggtgatggagtgaaccgatgcattctgtgtggggaacagctgggaatgttaggttccgcttgcgtggtgtgcgaagactgcaaaaaaaatgtctgcaccaagtgcggggttgagactaataatcgactacactccgtctggctctgcaagatttgtatagagcagcgggaggtgtggaaaagatccggcgcttggtttttcaaaggctttcctaaacaggtgctcccccagcctatgcctatcaaaaaaaccaagccgcagcagcccgtgtag

SEQ ID NO: 237785 - DNA, 285 bp, synthetic construct
  misc_feature 1..285: note = Description of Artificial Sequence: Synthetic coding sequence
  source 1..285: mol_type = other DNA
atgaccgacactgtgttcagcaactcaagtaacaggtggatgtaccccagcgatcgacctctgcaatcaaatgataaagagcagttgcaagccggttggagcgtccaccctggtggccaacccgaccgtcagcgtaaacaggaggagctgactgacgaagaaaaagagattatcaatcgtgttatcgctagagctgaaaagatggaagaaatggagcaggagcggattggcagactggttgacaggttggagaatatgcggaagaatgtggcaggtgatggctag

SEQ ID NO: 237786 - DNA, 363 bp, synthetic construct
  misc_feature 1..363: note = Description of Artificial Sequence: Synthetic coding sequence
  source 1..363: mol_type = other DNA
atgacagacacggtgttttccaattcatctaacaggtggatgtacccgagtgacaggccactccaaagtaacgacaaggagcagctgcaagcgggatggtccgtgcatccaggcggacaacctgatagacaaagaaagcaggaggaactgaccgacgaggaaaaagaaatcatcaaccgggtcatcgctcgcgctgagaaaatggaagagatggaacaagaacgtattgggagactcgtagatcgcctggagaatatgcgtaaaaatgttgcaggggacggcgttaacaggtgcatcctgtgtggagagcagctcggcatgctgggatctgcttgtgtcgtgtgtgaggactgcaagaagtag

SEQ ID NO: 237787 - DNA, 405 bp, synthetic construct
  misc_feature 1..405: note = Description of Artificial Sequence: Synthetic coding sequence
  source 1..405: mol_type = other DNA
atgactgacacagtgttcagcaattcaagcaataggtggatgtacccctctgatagaccattgcagtctaacgataaggagcagttgcaggcgggttggtctgtgcaccccggtggtcagcctgataggcagcgcaagcaggaagagctgacggatgaggagaaagaaataatcaatcgggtgattgccagagctgagaaaatggaagagatggagcaggagcggattggcaggctggttgaccggctcgaaaatatgaggaagaacgtggcaggggacggagttaacagatgtatactgtgcggggagcagctcggcatgctcggtagcgcctgtgtggtgtgcgaagattgtaaaaagaacgtttgtaccaagtgcggagtggagactaataatcgcttgtag

SEQ ID NO: 237788 - DNA, 948 bp, synthetic construct
  misc_feature 1..948: note = Description of Artificial Sequence: Synthetic coding sequence
  source 1..948: mol_type = other DNA
atggcagatacaatctttggctccggcaatgaccagtgggtgtgccccaacgatcggcagctggccctaagggccaagctgcagactgggtggagcgtacatacctaccaaacagagaagcagagacgcaagcaacacttatcccccgcagaagttgaagctattctgcaggtgatccagagagccgagcgattagacgtgctcgagcaacaacgtataggacgcctagtggagagactcgaaaccatgcgtagaaatgtgatggggaatggactctcgcagtgtctgctctgcggagaggtgctggggtttctcggctccagctctgtcttttgtaaggattgcaggaaaaaagtgtgtacgaaatgtggcatcgaagcatctcccggacaaaagcgccctctgtggctctgcaagatatgcagcgagcagcgggaggtgtggaagcgttcaggagcatggttctacaaggggctcccaaaatacatcctccctctcaaaacccccggtcgcgctgacgatccacacttcaggcctctgcctacggagccagctgagcgtgaaccacggtcaagcgagacatcccgaatttatacctgggccaggggaagggtcgtgagcagtgactccgattccgatagtgacctgagtagcagctcgctggaagatcgcctcccctccacaggcgtgagggataggaagggggataaaccatggaaggagtcaggcggatctgtggaagcacctcgtatgggtttcacacatccacctgggcacttgagcggctgccaaagctcactggccagcggtgagactggcactggatccgcagatccgccagggggacctcgtccaggcctgaccagacgtgcccctgtgaaggacactcccggaagagcaccagcggctgatgcggctcctgccggacccagctcctgcctgggttag

SEQ ID NO: 237789 - DNA, 861 bp, synthetic construct
  misc_feature 1..861: note = Description of Artificial Sequence: Synthetic coding sequence
  source 1..861: mol_type = other DNA
atggctgacacaatttttggctcaggtaatgaccagtgggtttgccccaacgaccgacaattggctcttcgagctaagttgcagaccggatggagcgtccatacctaccagaccgagaagcaaagacgcaaacagcacctttcaccagctgaagtggaggcaatcctgcaagtaattcaaagagctgagagacttgatgttttggagcagcagcgcattgggaggctggttgagagactcgagactatgcgcagaaatgtgatgggaaatggactttctcagtgtctcctttgtggtgaggttctgggatttttgggaagctctagtgtgttttgtaaagactgccggaaggtatggaagagaagtggcgcttggttctacaaagggctgccgaagtacatcctgcccttgaagactcccggaagagcggatgatcctcacttccggccactgcccacagagcccgctgaaagagaacctcgaagctccgagactagtagaatctacacatgggccaggggaagagtcgtgtcttcggactctgattcagactctgacttatcttctagttccctggaggaccgattgccctccacgggcgtgcgagatcggaagggcgataagccatggaaagaatccggagggagcgtcgaagccccacgaatggggttcacccaccctcccggacacctctccgggtgtcagtcttcactagcaagcggcgagactgggacaggcagcgcagaccctcccggtggaccaagacctggactgaccaggcgagcacccgtcaaggacaccccgggtagagccccagccgcagatgccgcacctgcaggaccatcatcatgtctgggttag

SEQ ID NO: 237790 - DNA, 861 bp, synthetic construct
  misc_feature 1..861: note = Description of Artificial Sequence: Synthetic coding sequence
  source 1..861: mol_type = other DNA
atggctgacactatttttgggtctggcaacgatcagtgggtttgtcctaacgacagacagttagcattgagggccaagctgcaaacagggtggtcagtccacacttaccaaacagaaaagcagagaaggaaacagcacctgagcccggcagaggtggaggctattttacaggtcatccagagagctgagcggctcgacgtgctagagcagcagcgcatcgggaggttggtcgagaggctggagactatgcgcagaaacgtcatgggaaacggacttagccaatgcctgctgtgcggcgaagtgttgggtttccttggctcttccagcgttttttgtaaggattgccgtaaagtctggaagcgaagcggcgcttggttctataaaggactgccgaagtacatcctgcccctcaaaaccccaggacgagcagacgacccacattttcgcccattaccaactgagcctgcggagagggagcctcggtcaagcgaaacatcgaggatatacacatgggccaggggtagggtcgtgtcttccgactcagatagtgactcagatctgagctcctcgtccttagaggatagactgccgtccaccggcgtgcgtgacaggaaaggggataaaccatggaaggaaagtgggggttccgtagaggccccacgaatgggatttacccacccccctgggcacctcagcggatgccagtccagcttagcaagtggtgagacaggcactggctcagcagatccccctggagggcctcggcctggcctcacccgaagggctcctgtcaaggatactccaggcagggcgccagccgctgacgcagcaccagccggtcccagcagctgcctgggatag

SEQ ID NO: 237791 - DNA, 2331 bp, synthetic construct
  misc_feature 1..2331: note = Description of Artificial Sequence: Synthetic coding sequence
  source 1..2331: mol_type = other DNA
atgaaccctgaggagcagattgtgacgtggctcatatccctgggtgttctcgagtcgcccaaaaagaccatctgtgaccccgaagaatttctgaagagctctctgaagaacggagtcgtcctgtgtaagctaattaatcggcttatgcctggaagcgtagagaaattctgcctggacccccaaacagaagccgactgcatcaataatatcaacgactttttgaagggctgtgcaaccttgcaggtcgagattttcgacccagatgatctttactcaggcgtgaatttcagtaaagtcctgtccactcttctggctgtcaacaaggccacagaagaccagctgagcgaacgcccttgcggaaggagttcatctttgagcgccgctaacacttcacagactaatcctcagggtgctgtatcatcaaccgtgagtggcctgcagcgtcaaagtaagaccgtggagatgactgaaaatggaagccaccagctgatcgtgaaggctcgcttcaacttcaaacaaaccaatgaagatgagctaagcgtctgcaagggcgacataatttacgtgacacgcgttgaggagggcggatggtgggagggcaccttgaacgggaggactggctggtttcctagtaactacgtgcgggagattaaatcgtctgaacgacccctctcccctaaagcagtcaaaggcttcgaaaccgccccactcactaaaaactactacaccgtggtgctgcagaacatcctagacaccgaaaaggagtacgcaaaagagctgcagtcgcttttggtaacatacctgcggcctctccagagtaacaataatctgtctactgtggaggtgactagtctgctgggaaatttcgaggaggtgtgcactttccagcagactctgtgccaggccttggaggagtgttccaaatttccagaaaatcaacataaggtggggggatgtctgctgagtctgatgccacacttcaagagcatgtacctggcttattgtgctaaccacccctccgctgtaaatgttctcacccaacatagcgacgaactggagcagtttatggaaaaccagggagcctcctcacccggaatacttattctcaccacgaatctgtctaagccattcatgagattagaaaagtacgttaccctgcttcaggagctggagaggcacatggaagatacccatcctgaccatcaggacattctcaaggctattgtggcttttaaaacactgatgggccagtgtcaggacctgaggaaaaggaaacaattggagcttcagatcttaagtgagcctatacaggcctgggagggcgaggatatcaagaatcttggcaatgtcatttttatgtcccaagtcatggttcagtatggagcttgcgaggaaaaggaggaaaggtacctgatgctcttctccaatgtccttattatgctatccgcgtctcctcggatgtctgggttcatataccaggggaagatccctattgcagggacagtggttacccgcttggacgagattgaggggaacgactgtacgttcgagattaccggaaatacagttgaaaggatagtggtgcactgcaataacaaccaggattttcaagagtggctggagcagctgaatcgccttatccggggacccgcatcttgctccagtcttagtaagaccagcagctcttcctgttccgcacatagtagttttagctctacgggacagccccgtggcccactggaaccgccacagatcataaagccatggtctctgtcatgcctaagacctgctccccctctgcgtccgtcggctgccctcgggtataaggaacgcatgtcatacatactgaaagagagcagtaagtcccctaaaaccatgaagaaattcctgcacaagcgtaagaccgagagaaagccctccgaggaggaatacgtcattcgtaagtccaccgctgctctcgaggaagacgcacagatcctgaaggtgattgaagcttattgtacgtccgcaaactttcagcagggacatggatcaagtactaggaaagattctattccacaggtgcttctccccgaggaagaaaagctgatcatcgaagagacccgctccaatggtcagaccatcatggaagaaaagagccttgtggacacagtctacgcactcaaggacgaggtccgagagcttaaacaggagaacaaaaggatgaaacagtgcctggaagaagagctcaagtccagaagagacctggaaaaactcgtgagacgacttcttaagcaaactgatgaatgcatccgaggggagtcatcctccaagacaagcatcctcccatag

SEQ ID NO: 237792 - DNA, 1869 bp, synthetic construct
  misc_feature 1..1869: note = Description of Artificial Sequence: Synthetic coding sequence
  source 1..1869: mol_type = other DNA
atgacagaaaatgggagtcatcaactcatagtgaaggccaggtttaacttcaagcagacaaatgaggatgaattgtctgtctgcaaaggagacattatatacgtcacccgagttgaggaaggagggtggtgggagggtaccctaaacggcaggaccggctggttccccagtaattatgtgcgggaaataaaatcttccgagcgtccactttccccaaaggccgtaaaaggcttcgaaacagcgcctttgaccaagaactactacacagtggtcctgcaaaatattctggacaccgagaaagagtacgctaaagaactgcaatcgctactggtgacatatttacgacctctgcaaagtaataacaatttgtccaccgttgaggtgacatccctactgggcaactttgaggaagtttgcaccttccaacaaactctgtgtcaggcgctggaagagtgctccaaattccctgagaatcagcacaaagtgggaggctgtctgttatcattgatgccacacttcaaatccatgtacctggcctactgtgctaaccaccccagcgctgttaacgtgctcacacaacactctgatgagctggaacagtttatggaaaatcagggggcaagtagtccaggaattctcatcctcaccactaatttgagcaagccttttatgaggctcgagaaatatgtgactctgctgcaggagctcgaaaggcatatggaagacacgcatccagaccaccaagatatccttaaggccatagtcgcttttaagactctcatgggacagtgccaggatctcagaaaaagaaaacagctcgaactgcagatcctgtcagagccgatccaggcttgggagggcgaggacattaaaaaccttggaaacgtgatttttatgagccaggttatggtgcagtacggcgcttgcgaggaaaaggaggaacggtacctcatgctgttctctaatgtactgatcatgctctctgcgtcaccaaggatgagtggattcatttatcagggtaagattccaatagcgggaaccgtggtaacacgtctggacgagatcgaaggcaatgattgtaccttcgagataactggaaatactgtggaaagaatcgtggtacattgtaataacaatcaggactttcaagaatggttagaacagcttaaccgattgattcgtggacccgcatcatgctcgagcctgtcaaagacatcttcttcctcctgttctgcacattcttctttttcgtcaacaggccaacctcgcggacccctcgagccaccccaaatcatcaaaccttggtccttgtcttgtttacggccagcgccacccctgcgaccctccgcggctctgggatataaggagcgcatgtcctatattctcaaggagagttcaaaatcccctaagactatgaaaaagtttctgcacaagcggaaaacagagcggaaaccgtccgaggaggagtacgtaattcggaaatccaccgccgcactggaagaagacgctcagatccttaaagtcattgaagcatactgcacctcagccaacttccaacaggggcatggctcttccacccgcaaagacagcattccccaggtgcttctgcctgaagaggagaagctgattatcgaggagacgagatccaatggacagacgatcatggaggagaagtccctggtagatacggtatacgctttaaaggatgaggtccgagaactaaagcaagaaaataagaggatgaagcaatgcctggaagaggaactcaaaagcaggagggaccttgaaaagctggtgcgcaggctgctaaagcagacagatgaatgtattagaggtgaatcatcttctaagacgagcattctgccctag

SEQ ID NO: 237793 - DNA, 1869 bp, synthetic construct
  misc_feature 1..1869: note = Description of Artificial Sequence: Synthetic coding sequence
  source 1..1869: mol_type = other DNA
atgacggaaaatggctcccatcagctgatagtcaaagctagattcaactttaaacagaccaacgaggatgaactgtcagtttgcaagggtgacataatttacgtgaccagggttgaggagggtggctggtgggaggggaccctgaacgggaggaccggctggtttccatccaattatgtgagagagatcaagagcagcgaacgcccattatcgccaaaagccgtaaaagggttcgaaactgccccacttacgaagaactattacactgtggtattacaaaatatattggatacagaaaaagaatatgcaaaagagctgcagagcttgctggtgacatacctgcggcctctgcagtctaataacaatctgagcaccgtcgaagtgacatctctgctgggtaactttgaagaagtatgcacctttcagcagacattgtgtcaagctctcgaagagtgtagcaaatttccagagaatcagcacaaggtgggcggttgtctgctgtcattgatgccgcacttcaaaagcatgtatctggcttattgtgctaatcatccctcagccgtgaatgtgctgactcagcatagcgacgaattggaacagtttatggagaaccaaggggctagctctcctgggatattaatcctgaccactaacttatcgaaacctttcatgaggcttgagaaatacgtcacccttctacaggagctggagcggcatatggaagacacacatcccgatcatcaggacattttgaaggctattgtggcctttaagacactcatggggcagtgtcaagacctgaggaagcggaaacagctagagctccaaatcctgtccgaacctatccaggcatgggagggtgaggacataaagaacctgggcaacgtcatctttatgagtcaagtcatggtgcaatatggcgcttgcgaggagaaggaggaaagatatcttatgctgtttagcaacgtgctgataatgctgagtgcctcacctcggatgtcaggttttatttatcagggtaagatccccatcgctggaactgttgtgacacgtctggatgagatcgagggcaatgattgcacattcgaaattaccggtaacacagtcgaacggatcgttgtacattgtaacaacaatcaggacttccaggagtggctggaacagctcaacaggttaatccgcggtccggcttcctgctctagcttaagtaaaacctccagctcttcctgtagcgcccattccagtttttcaagcacagggcagccacggggacccttagagccacctcagatcattaagccatggagcctctcttgtctgcgcccagctcctcccttgcgtcctagtgccgctctcggatataaggaaagaatgtcgtatatacttaaggagtcgagcaagtctcccaagacgatgaaaaagttcctgcacaaacggaaaactgagcgcaagccttctgaagaggagtatgtgataaggaaatctaccgccgctctggaggaggacgcacagattctgaaggtcattgaggcatactgtacatctgctaatttccagcaaggacatggcagctctactcggaaggactctataccccaggtgctgctccctgaggaggaaaaattaatcatcgaggagacacgctcgaatggtcagaccattatggaggaaaagtccctggtggatactgtttatgccttaaaggacgaggtgcgggagctgaagcaagaaaataaacggatgaagcagtgcctagaagaagagttgaagtcgagacgggatctggaaaaattagtgcgacgactgttgaaacaaactgatgagtgtatacgcggagaaagttcaagcaaaacgtcaattcttccttag

SEQ ID NO: 237794 - DNA, 1950 bp, synthetic construct
  misc_feature 1..1950: note = Description of Artificial Sequence: Synthetic coding sequence
  source 1..1950: mol_type = other DNA
atgactgagaacggatctcaccagttgatcgtgaaggcgaggttcaattttaaacagacgaacgaagatgagcttagtgtttgtaagggagacattatctatgtcacacgagtggaggaaggcggttggtgggaaggcacccttaacgggcgtacgggatggtttcctagtaattatgtgagggaaatcaagtcctcagatggcgtgtctctgctcctgcctggtttagagtgtaatggcgctatcagtgctcaccacaatctctgcctacctggctcaaagcgcccactctcacctaaggcagtgaagggctttgagacagcacccttaactaaaaactactacaccgtagtccttcagaacatcttggatacggagaaggaatatgccaaagagctgcagagtctgctggtcacttatttaagacccctgcagtctaacaataatttgagtactgtggaagtgacaagcctgttgggaaattttgaagaagtctgcaccttccagcaaaccctttgccaggcattggaggaatgttcaaaattcccagagaaccagcataaggttggcggttgtcttctatccctgatgccccactttaaaagcatgtacctggcctattgtgcaaatcaccccagtgctgtgaacgtgctaacgcagcactctgatgaactggagcagttcatggaaaatcagggagcatccagtccaggaatcttaatattaaccacaaacctcagtaagccatttatgcgcctagaaaagtatgtgactttgttacaggagctcgagagacacatggaagacacacacccagatcatcaggacatcttgaaagcaatcgtcgcgttcaagactcttatggggcagtgccaggatctgagaaagagaaaacagctggagctgcagatcctgtccgagcctatccaagcctgggaaggagaggatatcaaaaacttaggtaacgtcatcttcatgagtcaggtcatggtgcagtacggggcttgtgaggagaaggaggaacgctacctgatgctcttctctaatgtcctcattatgttatcagctagtccacgtatgtctggtttcatctatcaaggaaaaatacccatagcaggcaccgtggttacgagattggatgagatagaaggcaatgactgtaccttcgagattacaggcaacacagtcgaacgcatcgttgtccattgcaataacaaccaggatttccaggaatggttggaacaattaaaccggttgatcaggggtcccgcaagttgctcatctctgagcaagacctcttcatcttcatgtagtgctcactcttccttctcttcaactggccagccccgtgggcctttagagcctccccagatcatcaagccatggtccctctcttgcctgagacctgcccctccacttcgtccatcagctgcgctcggctataaggaacggatgagctacatcctcaaagagagcagcaagtctcccaagaccatgaagaaattcctgcacaaacgaaaaactgaacgaaaaccttctgaagaggagtacgtaattcgcaagagcaccgctgctctcgaggaggatgcccagattcttaaggtgatagaggcctactgtacatccgctaatttccagcagggccatgggtcatcgaccagaaaagactccataccccaggtgttactccccgaggaagaaaaactcattattgaggaaacccgatctaacggccaaaccatcatggaggagaagtcgctggtggatacagtgtacgctctgaaggacgaagttagagagcttaagcaggagaataaaaggatgaaacagtgcttggaggaagagttgaagagccgtcgggatctggagaagctagtaaggcgactgctcaaacaaaccgacgaatgtatccgaggcgaaagctcatctaaaacctctatcttaccttag

SEQ ID NO: 237795 - DNA, 1869 bp, synthetic construct
  misc_feature 1..1869: note = Description of Artificial Sequence: Synthetic coding sequence
  source 1..1869: mol_type = other DNA
atgacggagaatggctctcaccagctaatcgtcaaggcgcgttttaattttaagcaaacaaatgaggatgaactgagtgtgtgcaaaggtgacatcatttacgtgacaagagtggaagaaggtggatggtgggagggcacactgaacgggagaactggctggttcccatccaattatgtgcgcgaaatcaaaagctccgagcgcccactttctcctaaggcagtcaaggggtttgaaactgcgccactcacaaagaattactacaccgttgtactccagaacattctggacactgagaaggagtatgcaaaggagctgcagagtcttctagtcacatatctgcggccactgcagtcaaataataacctcagtaccgttgaggtgacttccctcttaggcaactttgaggaggtctgcacgtttcagcagacactgtgccaggcgctcgaggagtgcagcaaattcccagaaaatcagcacaaagtgggaggatgtctgctgagccttatgccacattttaaatccatgtaccttgcctactgtgccaatcaccctagtgctgttaacgttttgacacaacacagcgacgaactagagcagttcatggaaaaccagggggcatcatctcccggaattctcatcctgacgaccaatctatcaaagccattcatgcggctcgaaaagtacgtgactctgcttcaggagctggaaagacacatggaggatacacaccctgaccaccaagacattctgaaggccatagtagccttcaaaacattgatgggacaatgccaggatctcagaaaacggaagcagctagagctgcagattcttagtgagcccatacaagcctgggagggagaagacatcaaaaaccttggtaatgttattttcatgagccaggtcatggtgcagtacggagcttgtgaggaaaaggaggaacggtaccttatgcttttcagcaacgtgctcatcatgctttccgcttcacctaggatgagcggttttatttatcaggggaaaatacccatagctgggacagtcgtgacacggctggacgaaattgagggcaacgattgtacgttcgagattaccgggaacaccgtggagaggattgtcgttcactgcaacaacaaccaagattttcaggagtggcttgagcaactcaacaggctcattagaggcccagcatcctgctctagccttagtaaaacaagcagctcctcctgctcggcccactcctccttttcctctacaggacagccaaggggacccctggaaccacctcagattataaagccctggagtctatcgtgtctgcggccagcgcctccactgagaccatctgccgcacttggctataaagaggcatttacgtttgtgtttgaggagtctagcaagagtcccaaaaccatgaagaagttcctacacaagaggaaaaccgaacgtaagcccagcgaagaggagtatgtgattcgaaaatcgaccgcggctcttgaagaagacgcacagatcctgaaggtgattgaggcctattgcacatcagctaactttcaacagggccacggatcaagcacccggaaggacagcatcccgcaggttttgctcccagaagaagagaaactgattattgaagagacaaggagcaacggccagaccattatggaggagaagtctttggtggacacagtctatgcattgaaagacgaggtgagggaactgaagcaggagaataaacgcatgaagcaatgcttagaggaggagctgaagtctagacgggatcttgaaaagctggtcaggaggctcctgaagcagaccgatgagtgcatcagaggggagtctagctctaagacttctattttgccgtag

SEQ ID NO: 237796 - DNA, 1896 bp, synthetic construct
  misc_feature 1..1896: note = Description of Artificial Sequence: Synthetic coding sequence
  source 1..1896: mol_type = other DNA
atgttttacgctcactttgtactctcgaagaggggcccactagcaaaaatttggctggccgctcactgggacaaaaagttaacaaaggcacatgtttttgaatgcaaccttgaatcttctgtggagagcattatctctccaaaggtgaaaatggctttgcggacctcaggtcacctcctgctgggggtggtcaggatttaccatcgcaaagcaaagtatctcctcgcggattgcaacgaagctttcattaagatcaaaatggccttcaggccaggggtggtggatcttcctgaagagaaccgcgaggccgcatacaacgctatcacactgcctgaggaattccacgacttcgaccagccgctccctgatcttgatgatattgacgtggcgcagcaattcagtcttaaccagtcacgggtggaagagatcacgatgcgcgaggaggtcgggaacatcagcatcctgcaggagaacgatttcggtgactttgggatggatgaccgagagattatgagagaggggagcgctttcgaggacgacgatatgctcgtgagtactacaactagcaacttactactggagagcgaacaatcaacctccaatctaaatgagaaaattaatcatcttgagtacgaggatcaatataaagacgataacttcggcgagggtaacgacggcggtattctggatgacaagctgatctccaacaacgatggtggcattttcgatgaccccccagcactcagcgaggctggggttatgcttcctgagcagccagcccacgacgacatggatgaggacgataatgtgtccatggggggtcctgacagtcctgacagcgtcgacccagtagagcccatgcccaccatgactgatcaaaccactctagtgccaaacgaggaggaagcatttgccctcgagccaattgacattactgttaaagagactaaagcaaaacggaaacgcaagctgatcgtggattcagtgaaggaattagattccaagacaattcgggcacaactgtctgactacagtgatatcgtcacaacccttgacctggcccctcccaccaaaaagcttatgatgtggaaagagacaggcggagttgaaaagctgttctctcttcctgcacagcctctgtggaacaatcggctactcaagctcttcactagatgtttgacacctctggtacccgaggatctgaggaagcgacggaaggggggagaagctgataatctggacgagttccttaaagaattcgagaaccctgaggtaccgagggaggatcagcagcagcagcaccagcagcgtgatgtgatcgacgaaccgataattgaagagccttctcgtcttcaagagtctgtaatggaggcttcccggaccaacatagatgaatcagctatgcctccaccacccccacaaggcgtgaaacgcaaggccggacagatcgatcctgagcctgtgatgcctccgcaacaggtcgagcagatggaaatcccccctgtcgagctgcccccagaggagccaccaaatatttgccagcttattcccgaactggaactcctgcccgagaaagaaaaagagaaagagaaagagaaggaggacgacgaggaagaagaagacgaggatgcatctggtggagaccaggatcaggaggaacgccgatggaataagcggactcagcagatgctccatggcctgcagcgggctctggccaaaaccggagccgagtccattagcctattggaactctgccgcaatacaaataggaagcaggctgccgcaaagttctatagttttctcgtgctcaagaagcagcaggccattgaactgacgcaggaagaaccctatagtgatataattgcaactcctggccctcggttccatataatttag

SEQ ID NO: 237797 - DNA, 501 bp, synthetic construct
  misc_feature 1..501: note = Description of Artificial Sequence: Synthetic coding sequence
  source 1..501: mol_type = other DNA
atggcaccaaaaaaagcaaagaagagagccggaggagccaatagcaacgtcttctccatgttcgaacaaactcagatccaggagttcaaagaggccttcactatcatggatcagaacagagacggcttcattgataagaacgacctgagagataccttcgccgcactgggacgcgtcaacgtgaagaatgaggagattgacgagatgatcaaagaagccccaggcccaatcaattttaccgtattcttaaccatgtttggcgagaaattgaaaggggcagatccagaggaaaccattctgaacgccttcaaggtgttcgatccagaagggaaaggggtgctgaaggcagactacgttagagagatgcttacaacacaggccgaaagattttctaaggaggaagtggaccagatgtttgcagcctttccaccggacgtgactggcaatttggactataaaaatctggtacatatcattacacacggagaggaaaaggactag

SEQ ID NO: 237798 - DNA, 909 bp, synthetic construct
  misc_feature 1..909: note = Description of Artificial Sequence: Synthetic coding sequence
  source 1..909: mol_type = other DNA
atggttcggccagttaggcacaaaaagcctgtgaattactcacaattcgaccatagcgactctgacgatgacttcgtgtccgccactgtacccctaaataaaaagagccgcacagcacctaaggagctgaagcaggataagcctaagcctaacctgaacaatctgcgcaaagaggaaatccctgtgcaggagaagacccccaaaaagagactgcctgagggaacattttctatcccagccagcgccgtaccatgcactaaaatggccctggatgacaagctgtatcagagagacctggaggtggcattggcgctgtcagtaaaagaactgcccacggttaccaccaatgtgcagaatagccaagataaatccatcgaaaagcatggcagtagcaagatcgagacaatgaataagagcccacatattagtaactgctctgtggcaagcgattatctggatctcgacaagatcacagtggaggatgacgtggggggagtccagggcaagcggaaggccgctagtaaggcagcagcccagcagcggaagatccttctggaggggtccgatggagacagtgctaacgacaccgaacctgacttcgctccaggtgaagactcggaggatgacagtgatttctgtgagtctgaggacaacgacgaggatttctccatgcggaaatcaaaagtcaaagagattaagaagaaggaggttaaggttaagtcccccgtcgaaaagaaggagaagaagtcaaaaagcaagtgcaatgccttagccgcatctggaggatctcgaagttcgtcaagtcccctcgtcgtagtgtccgttaagtctcctaatcaatcactccggctgggactgtcaaggctggccagggtcaagcccctccatccaaacgctacttccacatag

SEQ ID NO: 237799 - DNA, 1008 bp, synthetic construct
  misc_feature 1..1008: note = Description of Artificial Sequence: Synthetic coding sequence
  source 1..1008: mol_type = other DNA
atggtaaggccagtcagacacaaaaagccagttaattactcccagttcgaccattccgattcggatgatgactttgtcagtgcaacagtcccgctcaataaaaaaagtagaactgcacccaaggaactcaagcaggacaagcccaagcctaacctgaacaacctgagaaaggaggaaatccccgttcaggagaaaacacccaaaaagcgaatggccttagatgataagctgtatcagcgcgatctggaggtagcactcgcactgagcgtaaaggaactccctacggtgaccaccaacgtgcagaactcccaggacaaatcaatcgagaagcacggcagtagtaagatcgagacgatgaataagtcaccgcacatttctaactgtagtgtcgcatccgattatctcgacctggataaaataaccgtcgaggatgatgtcgggggtgtgcagggaaagaggaaagcggcttccaaggcggcagcacagcaaagaaaaattctgctcgagggctctgatggagactctgcaaatgatactgagcctgacttcgctcccggagaggattccgaagacgatagtgacttctgcgaatctgaagacaatgatgaggatttctccatgaggaaatcgaaggtgaaagagatcaagaaaaaagaggtcaaagttaagtctcccgtcgagaagaaagagaagaaatccaaatccaaatgcaatgcactggtaacatcggtcgatagtgcccctgccgctgtgaagagcgagtcccaaagtttgcctaagaaagtctctttgagcagtgataccacacggaaaccactggagatcagaagcccgagcgcagaatccaagaaaccaaagtgggtgcccccagccgcatcagggggtagtaggtcaagcagctcccccctcgttgtggtgagtgtgaagtcgcctaaccagagtctgaggttgggtctgtccaggctggccagagtcaaacctttgcacccaaatgccacaagtacgtag

SEQ ID NO: 237800 - DNA, 702 bp, synthetic construct
  misc_feature 1..702: note = Description of Artificial Sequence: Synthetic coding sequence
  source 1..702: mol_type = other DNA
atgaataaatctcctcatatctcgaactgctctgtggctagcgattatctggatctggataaaatcaccgtggaggatgatgtggggggagttcaaggcaaacgcaaggccgctagcaaggcagctgcacagcagaggaaaatcctgctcgaaggatcagatggagattccgccaatgatactgagcctgacttcgccccaggagaagacagcgaagacgactcagacttctgcgagtcagaagacaacgacgaggatttcagcatgcgcaaaagtaaggtcaaggagattaaaaagaaggaggtcaaagtcaagagccctgtggagaaaaaggaaaaaaagagtaagtccaagtgcaatgcactggtcaccagcgttgattctgccccagccgctgtcaagtctgagtctcagagcttgcccaagaaggtgtctctttcatcagacacgactcgcaaacctctggagattcgctcaccttcagcagaaagtaagaaacctaagtgggttccccctggcatggcttacctatcttccagaacgggggcttggaaaattatcacagccgcatctggcggatcaagatccagctcatcccccctggtagtggtatccgtgaaaagcccaaaccagagtctgcggctgggtctctctaggctagcacgcgtcaagccactccatcccaacgccacaagcacctag

SEQ ID NO: 237801 - DNA, 408 bp, synthetic construct
  misc_feature 1..408: note = Description of Artificial Sequence: Synthetic coding sequence
  source 1..408: mol_type = other DNA
atgagaggcaagacgttccgctttgaaatgcaacgagatctcgtatcttttccactctcccccgctgtcagagtcaaacttgtttctgccggttttcagacggccgaagagctcctcgaggttaaaccgtctgagctgagcaaggaagttggaatcagcaaggccgaggccctggaaacgctgcaaattatccgcagggagtgtttgacaaataagcccaggtacgccggaacaagcgaatcccacaaaaaatgcacagccctggagctcctggagcaggagcacacgcagggctttatcatcacattctgcagtgcactggacgacatcctgggcggtggggttcccttaatgaaaactaccgagatctgcggcgctcccggagtaggtaaaacccagctctggtag

SEQ ID NO: 237802 - DNA, 855 bp, synthetic construct
  misc_feature 1..855: note = Description of Artificial Sequence: Synthetic coding sequence
  source 1..855: mol_type = other DNA
atggcagagttggtacctttcgccgtgccaatcgaatctgacaagactcttctggtgtgggaactgagctctgggcctacagctgaagcactccatcattcgctgtttactgccttctcacaatttgggttactgtattccgtccgcgtgtttcctaacgctgctgtagcgcacccaggattctacgccgttatcaaattctattccgcacgggctgctcatcgcgctcagaaggcctgtgatagaaaacaacttttccaaaagagccccgtgaaagtacgactaggcacaagacataaggctgtgcagcatcaggctcttgccctgaacagctccaagtgtcaagagctggccaattactattttggctttaatggctgctctaagcgaatcattaagcttcaggagctgagcgatctggaagaacgtgaaaatgaagactccatggttcctctgcccaaacagtccctcaagtttttctgcgcattagaggtcgtcttgccttcttgtgattgccgaagtcccggaattgggctggtcgaagagcccatggacaaagtggaggagggccctctctctttcctgatgaaaagaaagaccgcccagaaactggccattcagaaagctttgtccgatgcgtttcagaagctgttgatcgtagttctcgaatctgggaagattgccgtcgagtatcgccctagcgaggatatcgtgggcgtccggtgcgaggaggagctgcacggtctgatccaggttccctgtagcccctggaagcagtatgggcaggaagaagagggatacctcagcgacttttccctggaggaggaggagttcagattgcctgagctggactag

SEQ ID NO: 237803 - DNA, 351 bp, synthetic construct
  misc_feature 1..351: note = Description of Artificial Sequence: Synthetic coding sequence
  source 1..351: mol_type = other DNA
atgcaccttctagtaccgcctccgcagcattcactgtttaccgcttttagtcagtttggcctactctactccgtgagagtgttccctaacgccgctgttgcccaccccggtttctatgccgtgatcaagttctatagcgcacgtgccgcacatagagctcagaaggcttgcgatcgcaagcagttattccagaaaagccccgttaaggtccgactggggacaaggcacaaagcagtgcagcatcaggccttggctttaaacagctctaagtgccaagaactcgctaactactacttcggcttcaacggttgtagcaaacgtatcattaaagatcactatcactcactatag

SEQ ID NO: 237804 - DNA, 711 bp, synthetic construct
  misc_feature 1..711: note = Description of Artificial Sequence: Synthetic coding sequence
  source 1..711: mol_type = other DNA
atggctgaactcgtgcccttcgcagtaccaatcgaaagcgataaaaccttactcgtttgggagttgagctccggcccaacagctgaggccctccaccattctctatttaccgccttctcacagttcgggctcctgtattccgtacgggtgttcccaaatgctgccgtagcccatccgggattttatgccgtgatcaaattctattcggccagagctgctcacagagcacagaaggcttgtgataggaaacagttgttccagaagtctccagtgaaagtgcgcctgggtacccggcacaaagcagtgcagcatcaagcactcgctctgaactctagtaagtgccaagagctggccaattactactttggcttcaatggctgtagcaagaggatcattaaattgcaggagctgtccgacctggaagagagagaaaatgaagactcaatggtgccactgcccaaacagagcctgaaattcttctgcgccctggaggtcgttctgccctcctgtgattgtcgctctccaggcattggcttagtagaagagccgatggataaggtggaagaggggcctctgagttttctgatgaaacggaagaccgctcagaagttggcgatccagaaagctttgagtgatgcatttcaaaaactccttattgtggtgcttggtaagaccgtcctcattatattagaagttctgcaattccaatag

SEQ ID NO: 237805 - DNA, 786 bp, synthetic construct
  misc_feature 1..786: note = Description of Artificial Sequence: Synthetic coding sequence
  source 1..786: mol_type = other DNA
atgcatttgctggttcctcctcctcaacacagtctctttacagccttcagtcaatttggattgctttatagcgtacgagtttttcccaacgccgctgtggcccatccaggtttctatgctgttattaaattctatagcgcacgggctgcccacagggcccaaaaagcatgtgaccgaaagcaactcttccaaaaatcccccgtaaaagtgcgcttgggcacccggcacaaggccgtgcagcatcaggccttagcactaaactcctctaagtgccaagagctggccaattattacttcggcttcaatggctgctctaaacggataataaagctccaggagctgagcgatctggaagagcgggagaatgaagactctatggtgcctcttccaaagcagtccctgaagttcttctgtgctctcgaagttgttctcccttcctgcgactgccggagccctggaatcggactggtggaggagcctatggacaaggttgaggaaggccctttgtcatttttgatgaaacggaaaacggcccagaaactagcaatccaaaaagccctgagcgacgcctttcaaaaactgttgatcgtggtgctggagagtggaaagattgcagtcgagtatcgacccagcgaggacatcgtgggagtgcggtgcgaggaggagctgcacggccttatccaggtgccatgtagcccatggaagcagtacggacaggaggaggaagggtacctttctgatttcagtcttgaagaggaagagtttcgattgccagagctggattag

SEQ ID NO: 237806 - DNA, 393 bp, synthetic construct
  misc_feature 1..393: note = Description of Artificial Sequence: Synthetic coding sequence
  source 1..393: mol_type = other DNA
tttggtttcaacggatgttccaagcggatcataaaactccaggaacttagtgacctagaagaaagggaaaatgaagactcgatggttcccttgccaaagcaaagcctcaagtttttttgcgctctggaagtggtcctgccttcatgcgactgccggagtcctggcatcggattggtcgaggaaccaatggacaaggtggaagaagagtctgggaaaattgccgttgagtataggccatccgaggacattgttggagtgcgctgcgaagaggagttgcatggattgattcaagtgccatgcagcccgtggaagcaatatggccaggaggaggaaggatatctttccgacttttccttggaggaagaagagtttcgcctgcctgagctggattag

SEQ ID NO: 237807 - DNA, 501 bp, synthetic construct
  misc_feature 1..501: note = Description of Artificial Sequence: Synthetic coding sequence
  source 1..501: mol_type = other DNA
atggcggagttggtacctttcgccgtgcctattgaatctgacaaaacacttctggtttgggagctgagttctggacccacagcggaagccttgcaccatagccttttcacagccttcagccaattcggactactgtattcagtgcgggtgtttccaaacgctgctgtggctcatcctggattttacgccgtcattaagttctattctgccagagccgctcacagagcccagaaggcctgcgatagaaaacaattgttccagaaatctccagtgaaggtgcgtcttggcacacgccataaggcagtgcagcaccaagccctcgctttaaacagttctaaatgccaggagttagccaattattattttggttttaatggctgttctaaacggattattaaagtgccttgttccccctggaaacaatatggccaagaggaagaaggctatttgtcagacttctctctggaggaggaggaattccgcttacctgagttagactag

SEQ ID NO: 237808 - DNA, 642 bp, synthetic construct
  misc_feature 1..642: note = Description of Artificial Sequence: Synthetic coding sequence
  source 1..642: mol_type = other DNA
atgcatctgctggttcctcccccacagcattcactgtttacggctttcagccagttcggactgctgtactctgtaagagtcttcccaaacgctgccgtcgcacatcccggtttctacgctgtgataaaattctacagcgccagggccgcacacagggctcaaaaggcgtgcgataggaaacagttgtttcagaagtctccagtgaaagtgcggctgggaaccaggcataaagccgtccagcaccaggctttggcgctcaacagttccaaatgtcaagaactggctaattattacttcggatttaacgggtgtagcaagaggattattaagttacaagaattatccgacctggaggagcgagaaaacgaagacagtatggttccattgccaaaacagtcactcaagtttttttgtgctctggaagtggtgcttccaagctgtgactgtcgcagcccaggcatcgggttagtggaagagccaatggataaggttgaagaaggacccctctcattcctcatgaaaaggaagaccgcacagaagctggctatccagaaggctctgagtgacgcctttcagaagttgctgatcgttgttctggggaaaaccgtactgatcatcctggaagttctccaattccagtag

SEQ ID NO: 237809 - DNA, 756 bp, synthetic construct
  misc_feature 1..756: note = Description of Artificial Sequence: Synthetic coding sequence
  source 1..756: mol_type = other DNA
atggcagaactagttcctttcgccgtgcccatagaaagtgacaagacactgcttgtgtgggagctcagcagtgggcctaccgctgaagctttgcatcactcacttttcactgctttctcacagtttgggctactctattctgtaagagtttttcctaacgcagccgtagcccatccagggttctacgccgtgattaagttttactcggctcgggcagcccatagggcccaaaaggcgtgtgatagaaaacagctgttccaaaaatctcctgtgaaggtaagactcggcactcggcacaaggccgtccagcatcaggccctggccctcaactccagcaagtgccaagaattggctaactattatttcggattcaacgggtgctccaagcgcatcattaaactgcaggagctatctgacttggaggagagggaaaacgaggattctatggttccacttccgaagcagagcttaaaatttttttgcgccctggaagtggtgttgccaagttgcgactgtaggtcaccaggaattggtctggtagaggagcccatggacaaggtggaagaggagtccggcaagatcgcagtcgaatatcgcccttctgaagatatcgttggcgtccgctgcgaggaggaactccatggcttgatccaggtgccttgctctccttggaaacagtatggccaggaggaagagggctaccttagtgatttttccctggaagaagaagagttcaggttgcctgagctggattag

SEQ ID NO: 237810 - DNA, 420 bp, synthetic construct
  misc_feature 1..420: note = Description of Artificial Sequence: Synthetic coding sequence
  source 1..420: mol_type = other DNA
atggccgagctggtgcccttcgcggtccccatcgaaagcgacaagactctgcttgtttgggagttgtccagtggacccaccgcagaggcgctgcatcactcactgtttacggccttttcacagtttgggctcctgtacagcgtgcgtgtgtttcccaacgctgccgtggctcatccagggttttacgctgtgattaagttctactccgcaagagctgcccaccgcgcacagaaagcctgcgaccgcaagcagttgtttcagaagagcccagtgaaagtcaggctcggcactcgccataaggcggtccagcaccaggctcttgctctgaattctagcaagtgccaagagctcgcaaattattatttcgggttcaatggttgtagtaagaggatcatcaaggatcactaccattctttgtag

SEQ ID NO: 237811 - DNA, 432 bp, synthetic construct
  misc_feature 1..432: note = Description of Artificial Sequence: Synthetic coding sequence
  source 1..432: mol_type = other DNA
atgcacctccttgttccacccccacagcactcactttttacagcgtttagccaattcggcttgctgtattccgtgcgagttttccccaacgctgctgtcgcacaccccggtttttacgccgtcatcaagttttatagtgcgagggccgctcacagggcccagaaggcttgtgacagaaagcagctgttccagaaatcaccagtaaaagtgagactgggaacaagacataaggccgtacaacaccaagccctggccctgaacagctccaagtgtcaggagctcgctaattactacttcggtttcaacgggtgttcaaaaagaatcataaaagtgccctgttctccttggaagcagtatgggcaggaagaagaaggatacctctctgacttttccctggaagaagaggagtttagacttccagaattggattag

SEQ ID NO: 237812 - DNA, 2733 bp, synthetic construct
  misc_feature 1..2733: note = Description of Artificial Sequence: Synthetic coding sequence
  source 1..2733: mol_type = other DNA
atgagacgaagtgcggcaccttcccagctccaggggaacagttttaaaaaacccaaatttatcccccctgggagatctaacccaggattaaacgaagagattaccaagctaaaccccgatataaagctgtttgagggagtcgcaatcaacaatactttcctccccagtcaaaatgaccttcggatttgcagtttaaacctgccatcggaggaatctactagagagatcaataacagagataattgttctggcaagtactgcttcgaggcacctactctggcaacccttgacccacctcacactgtgcattcagctcctaaagaggtcgctgtgagtaaagagcaagaggagaagtccgactcattggtaaagtatttctctgtggtctggtgcaaaccctccaagaagaagcacaaaaaatgggaaggcgacgccgtgttaatcgtcaaaggcaagagtttcatcctcaaaaatctggagggcaaggacattggcagaggtatcggatacaagttcaaggagcttgagaaaatcgaagaagggcagaccctgatgatttgtgggaaagaaatcgaggtgatgggggtcatcagccccgacgacttttctagtggcaggtgctttcaattaggtggtgggagcaccgccattagccacagcagtcaggttgccagaaaatgtttttctaatcctttcaaatctgtatgcaagccatcttccaaggagaatcggcaaaatgactttcaaaactgtaagcccagacacgatccttatactcctaatagtctggtcatgccaaggcctgataaaaaccaccagtgggttttcaataagaactgctttccgctcgtcgatgtggtcattgatccttacctagtgtaccatctcaggccgcatcagaaagaaggaattattttcctatatgagtgcgtcatgggaatgcgcatgaatggcaggtgtggggctattctcgccgacgagatgggcctgggtaagacactccagtgtatttcattgatctggaccctacagtgccagggcccttatggcggaaagcccgtgataaagaagacattaatagtcacacctggaagtcttgtcaacaattggaagaaagagtttcagaagtggctgggcagtgagcgtatcaagatctttacagtggatcaggaccataaggtggaagagttcatcaagagcatcttttactccgtcctgataattagttacgagatgctgctcagatctcttgatcagataaaaaatatcaaattcgacctgcttatctgtgacgaaggccaccgcctaaagaatagcgccatcaaaacgacaaccgctctgattagccttagctgtgagaaacggatcattttgaccggaactccaattcagaacgatcttcaggaattcttcgccttaatcgactttgttaaccctggcattcttggctccttgagttcttatcggaaaatctatgaagagcctattattctgtcccgcgagccctccgcaagcgaagaggaaaaggaactaggagagagacgagcagctgaactgacttgtctcacaggcttgttcattctgagacgaacgcaagagattatcaacaagtatctgccacctaaaatagaaaacgtcgttttctgtagacctggcgctctgcaaatcgagttatacagaaaactgctgaattcccaggtagtacggttctgtctgcagggccttctggagaattcccctcacctcatctgcatcggcgctctgaaaaaactgtgtaaccacccatgtctcctctttaactccatcaaagaaaaggagtgttccagcacctgcgacaagaatgaagagaaatccttgtacaagggcctgttgtctgtatttccagccgactacaaccccctgctgtttacagaaaaagaaagcggaaaactgcaagtgctgtcaaaactcctcgccgttattcacgaactcaggcccacagagaaggtggtcctggttagcaattacacgcagactctgaatatactgcaagaagtgtgcaagcgacacgggtacgcttacacgcgcctggacgggcagacccccatttcccaacgacaacaaatcgtggatggtttcaactcacagcacagcagcttctttatcttcttgttgtctagcaaagctggcggagtggggctgaatcttatcggaggcagccatttaatactgtacgacattgactggaacccagctaccgatatccaggcaatgtcaagggtttggagggatgggcagaaatatccggtgcatatttacagattactgacaacagggaccatcgaagaaaagatatatcagaggcagatttccaagcaggggctgtgtggggcagtggtagacctgaccaaaacgtctgagcatatacagttctccgtggaagagctaaagaacctcttcactcttcacgagtcttctgattgcgttacgcatgacctcctggactgtgaatgtaccggggaggaggtacatacgggagactctttagagaagttcatcgtgtcacgcgattgtcagctaggaccacatcatcagaaatccaatagtttgaagcccctgtctatgtcccagctgaaacagtggaagcacttcagcggtgaccatttaaatctaacagaccccttcctggagcgtataaccgagaacgtgtcattcatttttcagaacattaccactcaggctaccgggacatag

SEQ ID NO: 237813 - DNA, 900 bp, synthetic construct
  misc_feature 1..900: note = Description of Artificial Sequence: Synthetic coding sequence
  source 1..900: mol_type = other DNA
atggtgggcaaagccaggtcatccaatttcacgttgtccgaaaagctcgatctgctaaaactggtcaaaccctatgtgaagatcctggaggagcacaccaataagcattctgtgatagtggaaaaaaatagatgctgggacattatcgccgttaactacaacgcaattggagtggatagaccccctaggaccgcccagggtctgagaacactatacaaaagactcaaggagtacgcgaagcaggagctgttgcagcaaaaggagacacagtcagattttaaatccaacatctctgagccaaccaaaaaggtgatggagatgatcccccagatctcttcattctgcctagtacgggaccgtaaccacatccagtctgcaaatctggatgaggaggctcaagctgggacctcttcgctccaggtcatgttagatcatcacccagtcgctatcacggtcgaagtgaagcaggaagaggacatcaaaccaccccctcctctggtgctgaactcacagcagagcgacactttagagcagagagaagagcacgagcttgtacatgtcatggagcggtcattaagcccctcattaagtagtgtggatatgagaatgactagcagtccctccagtattcccagacgcgacgatttctttcgtcatgagtcgggggagcattttagaagcctccttgggtacgatcctcagatcctccagatgttaaaagaagagcatcagatcatcttggaaaaccaaaagaactttgggctttacgtccaagaaaaacgagacgggcttaagagaaggcaacaactggaagaggaactcttacgcgcaaagattgaggtggaaaaattgaaggcgattcggctcaggcacgacctcccggaatataattctctttag

SEQ ID NO: 237814 - DNA, 378 bp, synthetic construct
  misc_feature 1..378: note = Description of Artificial Sequence: Synthetic coding sequence
  source 1..378: mol_type = other DNA
atgcgtagaagcgcagcgccttctcagctgcagggaaactcttttaagaagcctaagttcatacccccaggccgttccaaccctggccttaacgaagaaatcaccaagttgaaccccgacatcaagctgttcgagggtgtcgcaatcaacaacacctttttacctagccaaaatgatctgcgcatatgcagtctaaaccttccctccgaggagagtactagggaaatcaacaaccgggacaactgctccgggaaatactgctttgaagccccaacgttggccactctcgatccccctcataccgttcattctgctccgaaggaggttgccgtgtcaaaggaacaggaagagaagtccgattctctcgtaaaatattag

SEQ ID NO: 237815 - DNA, 354 bp, synthetic construct
  misc_feature 1..354: note = Description of Artificial Sequence: Synthetic coding sequence
  source 1..354: mol_type = other DNA
atgaggagatctgcagcgccatcccagctgcaaggcaatagctttaagaagcccaagtttatccccccaggacggtctaaccccggattgaatgaagagattactaaattgaacccggacatcaagctcttcgaaggcgtggcgatcaataacacttttttaccctctcaaaatgacctgagaatttgcagtctcaacctgccgtcagaagaatctactcgagagattaacaatcgcgacaactgctccggtaaatattgtttcgaggcacctacgctggctactctggatccaccgcatacagttcagacctggatgaggcgacataggctcgtgcctgttcattatcgctag

SEQ ID NO: 237816 - DNA, 477 bp, synthetic construct
  misc_feature 1..477: note = Description of Artificial Sequence: Synthetic coding sequence
  source 1..477: mol_type = other DNA
atgctggatcatcaccctgtggctattacagtagaagttaagcaggaggaagatatcaaaccacccccacccctggtgctaaattcccaacaatccgataccttagagcagagagaagaacacgagttggtgcacgtgatggaaaggagtctctcacctagtctgagctccgtggacatgaggatgacaagttctcccagctccatacctcggagagatgactttttcagacacgaaagtggagagcacttccggtctctgctgggctacgacccccagatcctgcagatgctcaaagaggagcatcagattatcctggaaaaccagaagaactttggtttgtatgtccaagagaagcgtgacggattaaagaggcgccaacagttggaggaagaactgctccgcgcaaagatagaggttgaaaagctcaaagccatccggctccggcacgaccttcctgagtataactctctctag

SEQ ID NO: 237817 - DNA, 1749 bp, synthetic construct
  misc_feature 1..1749: note = Description of Artificial Sequence: Synthetic coding sequence
  source 1..1749: mol_type = other DNA
atgggcctgggcaagactctacagtgtatcagtcttatctggaccctgcagtgtcagggaccctacggcggaaagcctgtcatcaaaaagacattaatcgtgacaccgggtagcttagtgaataactggaaaaaggaattccaaaagtggctgggttccgagagaatcaagatcttcactgtggatcaggaccataaagtggaggagttcattaagtctatcttttacagcgtattaataatttcttatgagatgctgctgaggtccttggaccagatcaagaatatcaaattcgacctgctgatctgtgacgaaggccaccggttaaagaattctgcaatcaagactactactgcactcatcagtctgagctgtgaaaaaaggattatcctgactggtacacctattcaaaacgacctgcaagaattcttcgctctcattgattttgtcaatccgggaattttaggttcactctcttcatataggaaaatctatgaggagccaatcattctctcccgcgaaccaagcgcctccgaggaggagaaggagctgggagaacgggagcagctcaaccttctggcatccctcgacagcctccttagacgcacacaggagatcattaacaagtaccttcctccgaaaatcgaaaacgtcgttttctgccggcctggggcattacaaatcgagctgtaccgaaaactgcttaattcacaggtggtgagattctgcctgcaagggctgttggagaactctccccacctgatttgtatcggggctctgaaaaaactctgtaaccacccctgcttgctctttaactcaatcaaggaaaaagaatgttcttcaacctgcgacaagaacgaggagaagtctctctataaagggttgctgtctgtttttcctgccgactataaccccctgctatttaccgagaaagaaagcggaaagcttcaggtgctgagcaaactgctcgccgtgattcacgagttgcgacccacagagaaggtcgtgctggtttctaactacacacagaccctcaacattctgcaggaggtctgtaagcgtcatggttatgcctacacccgtctggatggccagacccccatttcccaaagacagcagatcgtggacggatttaactctcagcattcttccttttttattttcctgctgagctccaaagccggaggagtagggttgaacctcattggtggtagtcatttgattctctacgacattgactggaaccccgcaaccgacatacaggcaatgtctagagtgtggagggacggacagaaatacccagttcacatatatcggctgttgacaacagggaccatcgaagaaaaaatttatcagcgccagatctcaaaacaaggcctgtgcggggcagtcgttgacctgacaaagacatcagaacacatccagttttccgtagaggaactcaagaacctgtttacactgcacgaatcaagcgattgcgtgactcatgatctgcttgactgcgagtgtacgggggaggaggtacacaccggcgattctctcgagaagttcatcgtgagcagagactgtcagctgggacctcaccatcagaaatcaaacagcctgaaaccgctgtcaatgtcgcagctgaagcagtggaagcatttcagcggcgatcatctgaatcttacagaccccttccttgagagaatcacagaaaatgtttcttttatcttccagaatattactactcaggcaactggtacgtag

SEQ ID NO: 237818 - DNA, 1290 bp, synthetic construct
  misc_feature 1..1290: note = Description of Artificial Sequence: Synthetic coding sequence
  source 1..1290: mol_type = other DNA
atggcggcaatgctgaagtgcgtgatgagcggtagtcaggttaaagtgttcggcaaggccgtgcaggctctgtctcggatatcagatgaattttggcttgacccatctaagaaaggcttggctcttaggtgtgtgaactctagtagatccgcctacggatgtgtgcttttttctccggtcttctttcagcattaccagtggagcgccttggtcaaaatgtcggagaatgagcttgacacgaccctgcatctaaaatgcaaattaggaatgaagagcattctgcccatttttaggtgcctcaacagtcttgagcgcaatattgagaagtgcaggattttcacacgcagcgacaaatgcaaggttgtcattcagttcttctatagacatggcatcaaacgcactcataatatctgtttccaggagagccagcctctgcaggtaatcttcgataaaaatgtgtgtacgaacacccttatgattcagccccgacttctcgccgatgcaatcgttctttttacgagctcacaggaggaagtgaccttggcagttactcctcttaacttttgcctcaagtctagcaatgaagaaagcatggacctttccaacgccgtgcacagcgagatgtttgtgggctctgacgagtttgacttcttccagattggcatggatacagagattactttttgcttcaaggagctgaagggcattctgacattcagcgaggctacccacgctcccattagtatctattttgactttccgggaaaacctcttgccctatccatcgatgacatgcttgttgaggccaacttcatcctggcgacattggcggacgagcagagtcgggcatcttctcctcagagcttgtgtctctcccagaaacggaagcggtctgatctcattgaaaagaaggcaggcaaaaatgtgacaggtcaggcactggaatgcatctctaaaaaggccgctcccagacggttatatcctaaggagaccttgacaaacattagtgcactcgagaactgtgggagtccagcaatgaaaagagttgacggagacgtaagcgaggtgagcgaaagcagcgttagtaatactgaagaggtcccaggcagcctgtgcctgcgcaaattttcctgcatgttcttcggggcagtgtccagcgaccagcaggagcattttaatcatccttttgactccctggccagagctagcgatagtgaagaggatatgaataacgtctgctgtagaaaagagttcaatgggagcgacgctaagtacttctgtattatctag

SEQ ID NO: 237819 - DNA, 1038 bp, synthetic construct
  misc_feature 1..1038: note = Description of Artificial Sequence: Synthetic coding sequence
  source 1..1038: mol_type = other DNA
atgtccgagaacgagctcgacaccactttgcatctgaagtgtaagctgggcatgaagtccattctgccaatatttcgatgtctgaattcattggagcggaatatcgagaagtgccgcatctttacccgcagtgataagtgcaaggtggttatccagtttttctacaggcacggaatcaagcgaacccataatatatgcttccaggagtcacaacccttgcaggttatctttgataaaaatgtgtgtactaacaccttgatgatccagccacgcttactggccgacgccatagttctgtttacgtctagtcaagaggaggtgactctggcggtgaccccccttaacttttgcctcaagtcgtcgaacgaggaaagcatggacctttcaaacgccgtgcacagtgagatgttcgtcggcagtgacgagtttgacttttttcagatcggtatggatacagaaatcaccttctgcttcaaggaattaaaaggtatcctgacatttagcgaggctacccatgcgcctattagcatatatttcgactttcctggcaagccacttgccctgtcaatcgatgatatgttggttgaggccaatttcattctggccacactggcagatgagcaatcacgagcttcctcaccccagtctctgtgcctgtctcaaaagaggaaaaggtctgatctcattgagaagaaggccggaaagaacgtcactggacaggcccttgagtgtatcagtaagaaggcagccccacgccgactgtatccaaaggaaacacttacaaatatatctgcattggaaaactgtgggagccccgcaatgaaacgggtcgatggagatgtctcagaagtgagcgaaagttcggtgagcaacaccgaagaagtccccggatctttgtgccttcgcaaattctcctgtatgttcttcggcgctgtctcgagcgaccagcaagaacatttcaatcatccttttgactctctcgcacgcgcttctgattccgaggaggatatgaataacggaagcttctcgattttttag

SEQ ID NO: 237820 - DNA, 1038 bp, synthetic construct
  misc_feature 1..1038: note = Description of Artificial Sequence: Synthetic coding sequence
  source 1..1038: mol_type = other DNA
atgagcgagaacgaactggacaccaccctacaccttaaatgtaagctggggatgaaaagtatactccccatatttcgttgcctcaattcccttgagcggaacatcgaaaagtgtcgcatctttacccggagtgataagtgtaaggttgttatccagttcttctaccgtcacggtattaagcggacccacaacatttgtttccaggaaagccagccgctccaggtgatttttgacaagaacgtgtgtacgaacacactcatgatccaacccaggctattggccgacgccattgtcctgttcacctcaagtcaagaagaggttactctagccgtgacgcctctgaatttctgcttaaagtccagcaacgaagaaagcatggacctgagcaatgcggtccacagtgaaatgttcgtcgggtccgatgaatttgactttttccagatcggtatggacactgagattactttctgtttcaaagagcttaaaggcatcttgaccttctcagaggcaacacacgctccgataagcatttatttcgacttcccaggcaagcccctggcgctgagcattgacgacatgcttgttgaagcaaatttcatcctggctactctcgccgacgaacagtcgagagcctcatcaccgcaatctctgtgcttaagtcaaaagcggaaacgctccgatcttattgagaagaaagccggaaaaaacgtgactgggcaagctttggagtgcatctctaagaaagcggcacccaggcgcctttaccccaaagagaccttgacaaacatcagcgccttggagaattgcgggtcccccgcaatgaagagagttgatggcgacgtgagtgaggtgtctgaatcatccgtaagcaacactgaggaggtgccgggatctctttgcttgcgaaagttcagttgtatgttttttggggcagtgtcctccgatcaacaagagcactttaatcaccccttcgactctctggccagagcctccgattccgaggaagacatgaataatggaagcttcagtattttctag

SEQ ID NO: 237821 - DNA, 1449 bp, synthetic construct
  misc_feature 1..1449: note = Description of Artificial Sequence: Synthetic coding sequence
  source 1..1449: mol_type = other DNA
atgggctgcgtgcagtgtaaggacaaggaagccacaaagcttaccgaagagcgagatggtagtctgaaccaatcaagcggatataggtacggcactgacccaactcctcaacattacccttccttcggcgtaaccagtatccctaactataataactttcacgcggcaggcggtcaaggcctgacagtgtttgggggtgttaattcatccagtcatacgggaactctccgcactcgcggtggcacaggcgtcactctgtttgtggcattatacgattatgaggcaaggaccgaggacgacttgtccttccacaaaggcgagaagtttcagattttgaattcaagcgagggggactggtgggaggcccgatccttaaccaccggtgaaaccggatatatcccctccaactacgtggcccctgtcgattccattcaggcagaggaatggtacttcggcaagctcggtagaaaggacgcagagagacaactgcttagctttggtaaccccagggggacgtttctaattcgggaatcagagaccaccaagggggcttattcgctctctattagggactgggatgatatgaagggcgaccacgtcaagcactataaaatcagaaagctggacaacggcggttattacattaccacccgggctcagtttgagaccttgcagcagttggtgcagcattactccggtacctggaacggcaatactaaggtggcaattaagactctgaagccagggaccatgagtcccgaatcatttctggaggaggctcagatcatgaagaaattgaagcacgataaacttgtgcagctatatgctgtggtctcggaggaaccaatctacatcgtgaccgaatacatgaataagggatccctccttgattttctcaaagatggagaaggtcgggcattgaagttaccaaatctggtagacatggctgcccaggtggccgctgggatggcctatatagaaaggatgaattacattcatcgcgatcttagatcggccaacatactcgtgggcaatggactgatatgcaaaatagcagactttggtctggcacggctcatcgaggataatgagtacacagctaggcagggagctaagtttcccatcaaatggactgcccctgaggccgcattgtatggacggttcactatcaaatcagacgtctggtcttttggcatcctgctaaccgagctggtgaccaaggggagggtgccctatcccggtatgaacaatagagaggtgctggagcaggtggagcggggatacagaatgccatgtccccaggattgcccaatcagcctccacgagttaatgattcattgctggaagaaggacccagaggaaagacctacctttgagtatctgcagagcttcctggaggattactttactgccaccgaaccccagtatcagccgggagagaacttatag

SEQ ID NO: 237822 - DNA, 1410 bp, synthetic construct
  misc_feature 1..1410: note = Description of Artificial Sequence: Synthetic coding sequence
  source 1..1410: mol_type = other DNA
atggaggactctacatcaccgaagcaggagaaagagaatcaagaagagctcggagagactagacgtccatgggagggcaagacggcggcaagcccccagtattctgaacctgaaagcagtgagccactggaggccaaacagggccctgagacaggacgccagagccgctccagcagaccctggtcgccgcagagccgggctaagactcctttgggagggcctgccggaccggaaacatctagtcctgcgccagtctcaccgagggagccctcctccagtccctcccctttagcacccgctagacaggacctggccgctccccctcagagcgacaggaccaccagtgtgattccggaagccggaactccataccccgatcctctggaacagtcatcagacaaaagggagtcgacccctcaccacacctcgcaaagcgaaggaaacacattccaacagagccagcagccgaagccccatctctgtgggcgacgcgatgtatcctacaataatgccaagcagaaggagttgcgctttgacgttttccaggaagaagatagtaattccgactacgacctgcagcagcctgcccctggaggtagcgaagtcgccccaagcatgctcgagatcacgattcagaacgccaaagcttaccttctgaaaacgtctagtaatagcggattcaatctgtacgatcaccttagtaatatgctcaccaaaatattgaacgaaagacccgaaaatgctgtagacatttttgagaatattagccaggacgtcaagatggcccacttctctaagaaattcgacgccctacagaatgagaatgaactgctcccgacatacgagatagccgaaaagcaaaaggccctgtttctgcagggccatctggagggagtggaccaggaacttgaggacgagatagggaggtgcaattggtttaatagtatccagaagaatgaggaggaagaagaagaagaggacgaagagaaagacgattctgattatatcgaacaagaagttgggctcccactcctcacgccaatatccgaggacttggaaattcagaacatccccccttggaccacccggctgagttctaacctgatcccccagtacgctatcgctgttctgcagagcaacctatggccgggagcttatgcctttagcaatggcaagaaatttgaaaatttttacataggatgggggcataaatactctccagataattatacgcctccggtcccccctcccgtctatcaggagtatccaagcggccctgaaatcaccgagatggatgatccatcagtcgaggaggagcaagctttccgcgcagcacaagaagcggtgttgctggccgcagagaatgaggagtcagaagaggacgaagacgaggaggatgactatgattag

SEQ ID NO: 237823 - DNA, 1803 bp, synthetic construct
  misc_feature 1..1803: note = Description of Artificial Sequence: Synthetic coding sequence
  source 1..1803: mol_type = other DNA
atggaggattctacaagcccaaagcaggaaaaggaaaaccaggaagagctgggagagactcgcaggccatgggagggtaagaccgcggcttcacctcagtactctgaacctgaaagcagtgagcctctcgaggctaagcaaggcccagagaccggacggcagagccggtccagcagaccgtggagcccacagtcccgagctaaaacaccattgggcggaccagccggtcccgagacttcttctcccgctcccgtcagcccgagggaacccagcagtagcccgagccccttggcacctgccagacaggatctcgccgctccaccgcagtcggatagaacgacttccgttattcccgaggcgggtaccccctaccccgaccctctcgagcagtcaagtgacaaacgagaatccactcctcaccatactagtcagtcagagggtaacaccttccaacagtctcagcagcctaagccgcatctctgcggcagaagggacgtgtcatataataatgccaagcagaaggagctgaggtttgatgtgtttcaggaggaagattccaattccgattatgatttgcagcagcctgcccctggagggagtgaagtggctccttctatgctggagataacaatacagaacgccaaagcctacctgctaaagacctccagtaacagtggctttaatctatatgaccacctgtcaaatatgctgacaaagattctgaatgaaagacccgagaacgcggtagacatcttcgaaaatataagtcaagatgtaaagatggcccatttttcgaaaaagttcgatgccttgcagaatgagaacgaattattgcccacctacgaaattgcagagaagcagaaggccctttttttgcagggccatcttgagggcgtggatcaagagttagaagatgaaattgctgaaaatgcgctccccaatgtgatggagtccgctttttacttcgagcaggccggtgtgggactaggcacagacgagacgtatcggatctttctggcgctaaaacagcttaccgatacacacccaattcagcggtgtaggttctggggaaagatccttggactagagatgaattatattgtggcggaggtcgagttcagggagggcgaagatgaggaggaggtggaggaagaggacgttgcggaagagcgggacaatggggagagtgaggcccatgaggacgaggaagacgagctgcccaaaagcttctataaggcgccacaggcaattccgaaagaagaatcccgaactggcgcaaacaagtacgtctattttgtgtgcaacgagcctggtcgcccttgggttaaacttccaccagttatccccgcacagattgtgatcgccagaaagattaaaaaattctttaccggtaggctcgacgctccaattatctcctatccccctttccccggaaatgaatccaattatcttagagcacagatcgctcggatttcagcaggcacacatgtcagcccactcggattctatcagttcggcgaggaggagggcgaggaggaagaagaggcagagggcggtagaaacagttttgaggagaatcctgatttcgaagggattcaagtgatcgatttggtcgaatctctgtctaactgggtccatcacgtgcagcacattctgagccagagatttagaatttatcccccagggcagcatggatatcctcagatcagttttcacaacatgctgcttcagagctttaaccccactttcggactggagcatatgccttccccgatggccaagagtctaaagatctctacgtag

SEQ ID NO: 237824 - DNA, 1536 bp, synthetic construct
  misc_feature 1..1536: note = Description of Artificial Sequence: Synthetic coding sequence
  source 1..1536: mol_type = other DNA
atgcttgaaataaccattcagaacgcaaaagcttatctgctgaagacatcttctaactcaggctttaatctgtatgatcacctgtcaaacatgctgaccaagatactcaacgagcgccctgagaacgcggtcgatatttttgagaatatatcacaagacgtgaaaatggcccacttctccaaaaaattcgatgcactacagaatgagaatgaactcttgcctacctacgaaattgccgagaaacagaaggcactctttctccagggccatttggaaggcgttgatcaagaactggaggacgagattgccgaaaatgctctgcctaacgtaatggaatcagctttttacttcgaacaagcgggagtgggcctcggtactgatgagacttatagaatttttcttgccttaaagcagcttactgatacccatcccatccaaagatgccggttctggggcaaaattctgggcttggaaatgaactatattgtagccgaagtggagttccgggagggtgaggacgaggaagaagtggaggaggaggacgtagctgaggagagagacaacggcgagagcgaagcacacgaggatgaggaggatgagctgcccaaatcgttttacaaggcacctcaagccatccccaaggaagagagccgtacgggagctaacaagtacgtgtactttgtgtgcaacgagccaggacggccttgggtgaagcttccgccagtgatcccggcacagattgtaattgccaggaaaattaaaaagttcttcactgggagactagacgccccaattatatcttacccaccattccctggcaacgaaagtaactatctgagagcacagatcgcccgaatcagtgctggcacacacgtttctccactgggcttttaccagttcggggaggaggagggcgaagaggaagaggaggcagagggcggacggaattcatttgaagagaatcctgattttgagggcatccaggtgattgatctggtcgagagtttgtccaattgggtccatcatgtgcaacacatcctaagtcaggggaggtgtaattggttcaacagcatccagaagaacgaagaagaggaggaggaggaagatgaggaaaaggacgattcggattatatcgagcaggaggtcggactgcctctcctcactccaatttccgaggacctggaaatacaaaatattcccccttggacaacccggttgtcttccaacctgattccccagtacgctatagctgtgctgcagagcaacctttggccaggagcctacgcgttcagcaacgggaaaaaattcgagaatttttatattggatgggggcataagtattcccccgataactatacccctcctgtgccacctccagtataccaagagtaccctagtggccctgaaattaccgagatggatgatccttcagtcgaagaggaacaggctttccgtgccgctcaggaggcagtactgctggctgcagagaatgaggaatcagaagaagacgaggacgaagaggatgattatgactag

SEQ ID NO: 237825 - DNA, 531 bp, synthetic construct
  misc_feature 1..531: note = Description of Artificial Sequence: Synthetic coding sequence
  source 1..531: mol_type = other DNA
atgttagtgaaacgggactaccggtatgaccgggtgctgttttggggaaggatcctgggactggtagcagactattacattgcacaggggctgtcagaagaccagctcgctccccgtaagacactctatagcctgaattgcaccgagtggagtctgctcccgccagctaccgaggaaatggtagcacagagcagcgtggtgaaggggaggttcatgggtgacccttcatacgagtatgagcatactgagctacagaaggtgaacgagggggagaaggtgttcgaagaggaaatcgtcgtccagatcaaggaagagacacgcttggtgagcgtaatagaccagattgacaaagcggtggctattatcccacgcggagcattgtttaagactccttttgggccaactcacgtaaataggacattcgaggggtattacaattggtacaagacccccgcacctcatcccacatgcgatggcaaccaaggagttagggcccgtggccgaagtcctagcttgggaaggttcctgtag

SEQ ID NO: 237826 - DNA, 831 bp, synthetic construct
  misc_feature 1..831: note = Description of Artificial Sequence: Synthetic coding sequence
  source 1..831: mol_type = other DNA
atggacgctgattctctgttgctgtccctcgagctcgccagtggctccggacaaggactgagccccgaccgcagggcctctctcttaacatctttgatgctcgtcaagcgcgactacaggtatgatcgcgttctattttgggggagaatcttgggtctcgtcgcagattattatattgcgcaagggttgtccgaagaccagctggccccacggaaaactctctacagtcttaactgtacagaatggtccctgctaccgcctgccaccgaagagatggtggcccaaagctcggtggtgaagggcagatttatgggcgatccctcatacgagtacgagcatacggagctgcagaaggtcaatgaaggcgagaaagtcttcgaagaggagattgtggtgcaaattaaagaagaaactagactagtgagtgtaattgaccaaatagacaaggccgttgccatcattccccgaggtgcgctgtttaaaacccctttcgggccaacccacgtaaatcggacttttgagggcctgagcctgagtgaggcaaagaagctgtccagttacttccactttcgggagcctgttgagctcaagaacaagacactgctggaaaaggcggatctcgaccctagcctggatttcatggacagcctggagcatgatattcccaaaggtagttggtccatccagatggaacggggtaatgctctcgttgtactgcggtctcttctgtggcccggtttgaccttttaccatgccccaaggaccaagaactacggctacgtgtatgtgggcaccggtgagaaaaacatggacctgcccttcatgttgtag

SEQ ID NO: 237827 - DNA, 921 bp, synthetic construct
  misc_feature 1..921: note = Description of Artificial Sequence: Synthetic coding sequence
  source 1..921: mol_type = other DNA
atggatgctgacagcctcctccttagcttggaactagcctctggttctggacagggactgtcacccgaccggagggcctcattgttgacctccctgatgctggttaaaagggattaccggtacgatagagtgctcttttggggacgcattctcggactggtcgctgattactatatagcccagggattatccgaagatcagcttgccccacgcaaaactttatattccttgaactgcactgagtggtctctgcttccccctgctaccgaagagatggtggcccagagtagtgttgtgaagggacgcttcatgggagatccctcttatgaatacgagcacactgagcttcagaaggttaacgagggagaaaaagtattcgaggaagaaatcgtgatcgataaagccgtcgcaataatccctaggggcgctctatttaagaccccatttggccctacacatgtgaaccgcacgttcgaaggcctctctttgagcgaagcgaaaaagttgtcctcctatttccacttccgggaacctgtcgaactgaagaataaaacactgttggagaaggcggacctcgacccaagccttgattttatggatagcctcgaacacgacatccccaaaggatctgaggctgtggtgcaaggcgattttacctggctgctgtccaggtgtggctttgggtggccttgcagctgggatagctgctctgtcagcatgcgcgtactcgaacacccagacggcgagggtcaatgcccaggcggtgctgcccaacccgctcttgccggaccccatctcctgccctgttctccacatcaggagctgtggctccgcttgcgcggacactggagggaagaacatggcctggcactccacgcaatcgaatgggaaccagcttggatgttcctgaacagagtgtag

SEQ ID NO: 237828 - DNA, 402 bp, synthetic construct
  misc_feature 1..402: note = Description of Artificial Sequence: Synthetic coding sequence
  source 1..402: mol_type = other DNA
taattgaactgtacagaatggtccttgctgccccctgccaccgaagagatggttgctcaatcatccgtcgtgaaagggcgtttcatgggcgatcccagctacgagtatgagcacactgagctccaaaaggtcaacgagggggaaaaagtgttcgaggaagaaattgtagtgcaaataaaagaagaaacacggctagttagtgtcattgaccagatcgacaaggcagtggctataattcctaggggcgcactctttaaaacaccttttggaccgacgcacgtcaatcgcaccttcgaaggatattacaattggtataagacacctgcaccccatcctacttgtgacggaaaccagggcgttagggcccgaggtagatcacccagccttgggaggtttttatag

SEQ ID NO: 237829 - DNA, 1086 bp, synthetic construct
  misc_feature 1..1086: note = Description of Artificial Sequence: Synthetic coding sequence
  source 1..1086: mol_type = other DNA
atgtgggtcctgactcctgcagcgttcgccggaaagctgctgtccgtgtttcggcagccactttcatctctgtggagatctctcgtgccactgttttgttggctaagggccacgttctggctgctggccactaaaaggcgcaaacagcagctggtactgagaggccctgacgaaacgaaagaggaagaggaggaccctccactccccaccacacccaccagtgtgaactaccacttcacccggcagtgcaattataaatgcgggttttgtttccacacagccaagacttcatttgttctgccgctggaggaagctaagaggggtctgctcttgctgaaagaggccggaatggaaaaaatcaacttctctggaggcgagcctttcctgcaggatcgaggcgaatatttagggaaactcgtgcgattttgcaaggttgagctgagactgcctagcgtttcaattgtttcaaacggttcattaatccgggagcgatggtttcagaattacggagaatacctcgacatccttgccatctcatgtgattctttcgacgaggaggtgaatgtgctgatcggcaggggccagggaaaaaaaaaccacgtcgagaatctgcagaagcttcgaaggtggtgtagagactatagggtcgcgtttaagatcaactcggttatcaataggtttaatgtggaggaggatatgacagaacaaattaaggcacttaaccctgtgagatggaaggtgtttcaatgcctgctcatagaaggagagaactgtggcgaggatgcactgcgggaagcagagcgattcgtgatcggtgatgaagaattcgagcgatttctggagaggcacaaagaggtaagctgcctcgttcctgagagtaaccagaagatgaaggactcctacctgatcctggacgaatatatgcgcttcctgaattgtcggaagggcaggaaagatcccagcaagtccatcttagacgtgggggtggaggaagccattaagttttcaggttttgacgagaagatgttcctgaaacgcggaggaaagtacatatggagcaaggctgacctgaaactcgactggtag

SEQ ID NO: 237830 - DNA, 765 bp, synthetic construct
  misc_feature 1..765: note = Description of Artificial Sequence: Synthetic coding sequence
  source 1..765: mol_type = other DNA
atgctccactcttcccattaccccggaatggagaagattaatttttctggcggtgagccgttcctgcaggatcgtggcgagtacctggggaagcttgtccgcttttgtaaagtggaactgcggctccctagcgtttctattgtaagcaatggcagcctaattagagaacgctggttccagaactacggggagtatttggatatcctggccatctcctgcgacagtttcgatgaggaagtaaacgtcctgattggccgaggacagggcaaaaagaatcacgtggagaatttgcagaagctacggaggtggtgtcgtgactaccgggtggccttcaaaatcaactccgtgataaatagatttaacgttgaggaggacatgacggagcaaatcaaggctctgaatccggtcaggtggaaggtctttcagtgcttgttgattgaaggagagaactgcggcgaggacgccctgagggaagcagagcgcttcgtaatcggcgatgaagaatttgaacgattcctggagcggcacaaggaggtcagctgcctcgtccccgaatccaatcagaagatgaaggatagctacctgattctggatgagtatatgagatttttgaattgccgaaagggcagaaaagatcctagtaagtcaattttagacgtgggagtagaggaggctattaaatttagtggcttcgacgagaaaatgtttcttaagcggggagggaaatacatatggagcaaagcagatctcaagctggattggtag

SEQ ID NO: 237831 - DNA, 1674 bp, synthetic construct
  misc_feature 1..1674: note = Description of Artificial Sequence: Synthetic coding sequence
  source 1..1674: mol_type = other DNA
atgtataaacgtaacgggctaatggccagtgtgctcgttacctctgcaactcctcagggctcctcctcttccgacagcctggaggggcaatcttgcgactatgcctctaaatcctatgatgctgtggtatttgatgtcttgaaagtgacgcctgaggaatttgcttcacagataacgttgatggatatcccagtgtttaaggccatccagccggaggaacttgctagttgtggctggtcaaagaaggagaagcattctctagcgccaaacgtggtcgcttttaccaggcgcttcaaccaagtgtccttttgggtggtccgtgaaatcctgaccgcgcagacactaaagattcgggcagagattctgagtcacttcgtcaagatcgcaaagaagctgctggaactgaataatctacatagtctgatgagcgtcgtgtcagcccttcagagcgcccctattttcagactgacgaagacttgggccctgttaaacaggaaggacaagactaccttcgagaaactggattatctgatgtctaaggaggataactataagcgcaccagagaatacattcggtccctgaagatggtgccatccatcccatacctcggaatttatctactggacctcatttacattgattccgcttatccggcttccggtagtataatggaaaatgaacagcgcagtaatcaaatgaacaatatcctccgaatcatagccgatttgcaagtttcctgctcgtacgatcatctgacgacactcccgcacgtacagaaatatctgaagagcgtgaggtacatcgaggagcttcagaagtttgtggaggatgacaactacaaattgtccttgcgtatcgaacccggaagctcgagcccacggctggtgtcatcaaaggaggacctggctggcccttctgctggctcagggtctgcacgattctcacgcagacccacctgccccgacaccagtgtggctgggtcactcccaacaccgcctgtgccacggcacagaaagtctcatagtctaggcaacaacatgatgtgtcagttgtctgtcgtggagtccaaatcagctacctttccttccgaaaaagccaggcatctgctcgatgactcggtgctggagtccagaagcccgaggagggggctggccctcacttctagctccgccgtgaccaatggactgagcctgggctcttctgaaagctctgagttcagtgaagaaatgtccagtggactggagagccctaccggtccatgcatttgctcactaggtaattcagccgctgtgccaacgatggaaggcccactccgccgaaaaaccctcctcaaggagggcagaaaacctgctcttagtagctggacccggtactgggtaatcctgagcggctccacactcctctattatggagccaaatctctcagaggtacagatagaaagcattacaagtccacaccaggaaaaaaggtgtcaatagtagggtggatggtacaactgcccgatgacccggaacatccggatatctttcagcttaataatcccgataagggcaatgtatataaatttcaaaccggtagtcggttccacgctatcctgtggcataagcacctggatgacgcgtgtaaatcaaacagacctcaggtccccgctaatcttatgtccttcgagtag

SEQ ID NO: 237832 - DNA, 522 bp, synthetic construct
  misc_feature 1..522: note = Description of Artificial Sequence: Synthetic coding sequence
  source 1..522: mol_type = other DNA
atgtacaaacgcaacggactgatggcctcggtactggtcacatcggctacgccgcagggatcctcctcttctgatagtcttgaaggacaatcctgcgactatgctagcaaaagttatgatgccgtcgtgttcgacgtcctcaaggtgacaccagaagagtttgccagccagattaccctgatggatattccggtgttcaaagccattcaacccgaagaactggcttcttgtggatggtccaaaaaagaaaagcactccttggccccaaacgtggttgcgttcactagaaggttcaaccagaaactgctggaactgaacaatctccacagtctgatgtcagttgtgagcgccctgcagagcgccccaattttcaggctcacaaaaacctgggccttgctgaatcggaaagataagacaaccttcgaaaaattggattatttaatgagtaaagaggacaactataaacgtacccgcgagtatatccgcagccttaaaatggtgccaagcatcccctacctatag

SEQ ID NO: 237833 - DNA, 1590 bp, synthetic construct
  misc_feature 1..1590: note = Description of Artificial Sequence: Synthetic coding sequence
  source 1..1590: mol_type = other DNA
atgtacaagcgtaatggcctgatggcctctgtgctggtgaccagcgcaacccctcagggttccagcagtagcgactctctcgaaggtcagtcctgcgattatgcttctaaaagctatgatgccgtagttttcgacgtgcttaaggttacaccagaagagtttgccagccagattacccttatggacatcccagtgttcaaggccatccagcctgaggaactcgcgtcctgtggatggtctaagaaggagaagcactctctggcccctaatgtggttgctttcacaaggaggttcaaccaagtgagcttttgggttgtgcgagaaattctgacagcgcagaccctcaaaatacgcgcagagattctttcacacttcgtcaaaatcgccaaaaaactgctggagttaaacaacctgcatagtttgatgtctgttgtgtccgcactgcagtctgctcccatctttcgcttgaccaaaacttgggccctgctgaatcgaaaagacaagaccacctttgagaagttagattacctgatgagcaaggaggataattataagcggactcgtgaatatatacggtctttaaagatggtgccgtccattccctacctgggtatctacctgctggacctgatatatattgatagcgcatatccggcatctggctccatcatggaaaatgagcagcggtcaaaccaaatgaataacatccttaggattatcgccgatctgcaggtgagttgtagctacgaccacttgacgaccctcccccatgttcagaagtaccttaagtctgtgaggtacattgaagagctccagaaattcgtagaagatgataactataagctgtcacttcgcattgagccaggtagctcctctcccaggctcgtcagcagtaaagaggacctggccggacctagcgcgggttccggctcagccagattcagtcggagaccaacttgtcctgacactagcgtggcaggatcactcccaaccccacccgtccccagacaccgcaaaagccactccctcggaaacaaccgcggtcgattatacgccactcttgggccaaactggcgggtgcctgtgcggaattcacccaggaccaggagttgcgtatattccccgacgggtccttgtatatgtagcctcgggaacagcgcagcggtaccaaccatggaagggcctctgagaagaaagaccctgctcaaagaggggagaaaaccagctctctccagctggacccgatattgggtgatcctaagtggatctactctgctgtactacggcgcaaagtctctcagggggacagaccggaaacacgtgtccatcgtgggctggatggtgcagctgcctgatgatcccgaacacccagacattttccagctcaacaacccggacaaggggaacgtgtataaattccagacaggctctcggtttcacgccatactttggcacaagcatcttgacgatgcttgcaaatctaatcgcccacaggaagctggagctgctccgggaccaacaggtacggactcccatgaagtcgaccacttggagggcggagccggtaaagaggccggtccttgtgcctag

SEQ ID NO: 237834 - DNA, 918 bp, synthetic construct
  misc_feature 1..918: note = Description of Artificial Sequence: Synthetic coding sequence
  source 1..918: mol_type = other DNA
atgtataaacgcaacggcctcatggcctcagtccttgtgacatccgctaccccccagggctccagctccagcgactcgctagaaggacagagctgtgactatgcatctaagtcttacgacgctgttgtgttcgacgtgctcaaagttacacctgaggagttcgcctcccagatcacgttaatggacatacccgtcttcaaagccatacagccagaggaactggcttcttgtggatggtccaaaaaggagaaacattccctcgctcctaacgtggtggccttcacccggagatttaaccaggtgtccttttgggtggtacgagagatcttgaccgctcagacactgaagattcgggctgagatcctctctcacttcgtgaaaatcgcaaagaagctattagagctgaacaacctgcactcactaatgtccgtggttagtgctctgcagtctgctcccatttttcgtctcacaaagacctgggctttacttaatcggaaggataaaactactttcgagaagctggactatctgatgtctaaagaagacaattataaaaggactagagaatacattcgaagcctcaaaatggtgccaagcattccttacctgggaatctacttgctcgatctaatctacattgactccgcttaccccgctagtggaagtattatggaaaatgaacaacggtctaaccagatgaacaatatcttaagaatcattgcggatttacaagtcagctgcagctatgatcatttaactaccctaccccacgtgcagaaatatttaaaaagtgtgcggtacattgaggaattgcagaagtttgtagaagacgacaattataagctctccttaaggatcgagccaggcagtagctcaccacggctcgtgagctcaaaagaggacttggctgctatgtag

SEQ ID NO: 237835 - DNA, 642 bp, synthetic construct
  misc_feature 1..642: note = Description of Artificial Sequence: Synthetic coding sequence
  source 1..642: mol_type = other DNA
atgtataagcggaacggtctgatggccagtgtactggtgacaagcgctacccctcaggggagcagtagcagcgattctttggaggggcagagttgcgattatgcttccaagtcgtatgatgcggtggttttcgacgtattaaaagtgacacccgaggagttcgcatcccagatcaccttgatggacattcccgtgttcaaggccattcagccagaagaactcgccagttgcggctggagtaaaaaagaaaagcactcacttgcgcctaatgtggtagcatttacccggaggttcaatcaagtgtctttctgggtagtaagagaaattctgacagcacaaaccctaaaaattcgagcggaaattctatctcacttcgtcaaaattgctaaaaagctattggagctgaataacctccattcattaatgtccgtggtgtcggcactgcagtctgctcctatcttccggctgactaaaacctgggccttactgaatcgaaaagataaaactacttttgaaaagctcgactacctgatgtctaaggaagacaattacaagaggacgcgggaatacatcaggtccctcaaaatggtcccatcgatcccttatctggggagatcattgaattggctcattttcttctag

SEQ ID NO: 237836 - DNA, 327 bp, synthetic construct
  misc_feature 1..327: note = Description of Artificial Sequence: Synthetic coding sequence
  source 1..327: mol_type = other DNA
atgtataagcggaatggtttaatggcatccgtgcttgtaacatccgccaccccacaaggctctagcagcagcgattctcttgaggggcagagctgcgactacgcttcaaaatcctatgacgctgtcgtgtttgacgttctgaaagtaacccctgaagagttcgctagccagatcactttgatggacatccccgttttcaaagccatccagccagaaaagggctggccagcaagaatggaagacagtctgcagaaatcaactgttagcagcagaccacatgatacattgcaattcaggaaaactctgcccgtggggcctgggacctag

SEQ ID NO: 237837 - DNA, 1155 bp, synthetic construct
  misc_feature 1..1155: note = Description of Artificial Sequence: Synthetic coding sequence
  source 1..1155: mol_type = other DNA
atgtataaacgaaacggcttaatggcatctgtacttgtcacgtccgcaactccgcaggggtcatcatctagtgacagtttagagggacagagttgcgattacgccagcaaatcttacgatgcagtggtgtttgatgttttgaaggttacgcccgaagagttcgcaagtcaaattaccttgatggatatacctgttttcaaagccatccagcctgaagagcttgcatcctgtggatggagcaagaaggaaaagcacagtctcgcacccaatgtggtcgcattcacccgaagatttaaccaggtcagtttttgggtggtgcgggagattctgaccgcccagacattaaagattcgcgcagagatcctgtcgcatttcgttaagattgctaagaagttgctggaactgaataatctccatagtcttatgagtgtcgtgtccgcactgcagagtgcccctatatttcggttaacaaagacctgggcgctcttaaaccgcaaagacaaaacaacctttgagaaactcgattatctgatgagcaaggaggacaactataaacgcactagagaatacattagatcgctgaaaatggtcccctctattccctacttgggcatctacctgctggatctcatttacatcgatagcgcttacccggcttctggcagtattatggaaaatgaacagaggtccaaccaaatgaacaatattttacgcattatcgcggatttgcaggtgagctgcagctacgatcatctgacgacacttccccatgtccaaaaatacctgaagagcgtcagatatattgaggaattgcagaagtttgtcgaggatgataattacaagttgagcctgcgcatcgagcccggttcaagcagtccgagactagtctccagtaaggaggacttagctgtttcccatttgagctccctgtcccaccagggccaggcagaagaggcacggctgaaaccaacttcaggacagcaccctgcttggatgtggcccagcagttcgcgcgtgcccgcagctcctccggctagcgctgctccccgttctccctggccccgaaacttgcgcaatgaccagggtcagcccggtgccgttgccttaacctgcaatcctagcacactgggaagtcggtcacgccgaataacatag

SEQ ID NO: 237838 - DNA, 1614 bp, synthetic construct
  misc_feature 1..1614: note = Description of Artificial Sequence: Synthetic coding sequence
  source 1..1614: mol_type = other DNA
atgtacaagcgtaacggcctcatggcatccgtcctggtgacctctgccactcctcagggctctagtagttccgacagcctggagggtcagtcctgtgactacgccagtaagtcgtatgacgcggtcgtatttgacgtgttgaaggtgacccccgaagagtttgcctctcagattacactgatggatatccccgtatttaaggctatacagcctgaggagttagcttcctgcggctggagtaaaaaagagaagcattctctagcacctaatgtcgtggctttcacgagaagatttaatcaggtgtccttttgggttgtgcgagagattctcacagcacagaccctgaagatcagagccgagattttgagccactttgtcaagatcgcaaagaagctcctggaacttaacaatctgcactccctgatgtctgtcgtctctgcactccagagcgccccaatctttcggctgaccaagacatgggccttgcttaatcgcaaagacaagaccacctttgagaagctcgactacttgatgtctaaggaggacaattacaaacgtacacgagaatatattcgctctctgaaaatggtaccatcaattccctacctggggatatacctcctcgacctcatttacattgactcggcctatcccgcttccggatccattatggaaaatgagcagcgaagtaaccaaatgaataatattctcaggataattgcagacttacaagtctcgtgcagctacgaccacctcacaacgcttccccatgtgcaaaaatatctgaaatcagtgcgttatatcgaagagcttcaaaagttcgtagaagacgacaactacaaactgtctctcagaattgagcccggatcatcgagccctaggcttgtgagctctaaggaagacctagctggcccttccgccggatctggctcggccagattctcacggagaccgacttgccccgacacctctgtggccggtagcctacccacaccacccgtgccccgtcacagaaagagtcactcacttggcaacaacaggggaagactctatgccacgctcggaccaaattggcgagtgccagtcaggaacagtccccgaacaaggtcttgcgtatacagcccaaccgggccttgcatttgctccctaggtaactccgccgctgtccccacaatggaggggccactgagacggaagactctgcttaaggaaggcaggaagcccgcactgagctcatggacaagatactgggtgatcctgtccggctctacacttttgtactacggcgctaagagcctcaggggtacagatcgcaagcactacaaaagcacccctggtaaaaaagtcagcatcgtcggctggatggtgcagttgcctgacgatcccgagcatcccgatatttttcagcttaacaacccagataagggaaatgtttacaagtttcagaccgggagtagattccacgctattctgtggcacaagcatctcgacgatgcttgcaaatctaatcgtccacaggaagctggagccgcaccagggcctactggaactgattcccacgaagtggaccatctggagggcggagcagggaaagaggccggaccatgcgcctag

SEQ ID NO: 237839 - DNA, 462 bp, synthetic construct
  misc_feature 1..462: note = Description of Artificial Sequence: Synthetic coding sequence
  source 1..462: mol_type = other DNA
tagaactcaccccgaactcgctcctgtgtgtactctccaaccggcccttgtatatgtagtctcgggaactccgcggctgtacccactatggaaggacctctgaggcggaaaacgttgttgaaggaggggaggaagcccgctttatcttcttggacccggtactgggtgatcttatctggttctactctgctgtattatggcgctaaatctctgcgcggtactgacagaaagcactacaaaagtacccccggtaagaaggtgagcatcgtgggctggatggtacagctgccggacgaccccgaacaccctgacatcttccagctgaataatcctgataaggggaacgtttacaaatttcagacaggctcacggtttcacgctattctgtggcacaagcacttggacgatgcctgtaaatcaaaccggccacaagtacccgctaatctaatgtcgttcgagtag

SEQ ID NO: 237840 - DNA, 6252 bp, synthetic construct
  misc_feature 1..6252: note = Description of Artificial Sequence: Synthetic coding sequence
  source 1..6252: mol_type = other DNA
atgtttagtaagaagcctcatggagacgtgaaaaagtccactcagaaggtcttggatactaagaaggatgctctgacaaggctcaagcacctgcggattgtgattgagaacgccgagtcaatagatctcaagcagttctttgaccagcattttagccacatctactacgtgtttttcgagaatttcgttaccatcgaggcgagtttgaagcaaaaagggcacaagagccagcgtgaagagctcgacgctatactgttcatctttgaaaagatcttacagcttttgccagagcgcatccaccagcgatggcagttccatagtattggactgatcctgaagaaactactgcacaccggtaattccctgaagattcggcgagagggagtgcgcttgtttcttctgtggcttcaagccttgcaaaacaactgctctaaggaacagctctggatgttctcatgtttgattccaggtttctcagcgccacagagcgagcacggcccacgcacactagataacttgattaatcctcctctcaatctgcaggagacccaggttactatcgaagagattacaccactggtgccccctcaatccggcgacaaaggacaagaagacctgaccagctatttcctggaggctctgctgaaatatattgtcattcaggtgaagtctctggagtggaagaacaaggagaaccaggagcggggatttagcttcctcttcagccactttaagaagtactatctcccgtatatcttccccaacatctgtaaggaaaactccctttatcatccaatcctcgatatcccgcagatgagaccgaaaccacattatgtggtaatcaagaaagatgccgagaccaacgaggctatttattgcaccaaggaaccctttatcaaggcacgcgtgattgtgatcaggtggttggtgtccttttggctcgagcccaaaccccacacaggcccacacatcccagggatggaaggcgaagtgttgccaaaaaacatccagcgcgctgccgctagtctcgtgtccagagaagagagcaaaaatgataacgctgataagacagacagaactacggagccagaacagtcgcattccaacacatctacgttgaccgaacgggagccttcttctagtagtttgtgtagcattgatgaagaacacctcactgacatcgaaattgtcagaagggtatttagttcaaagcgcagcaatgtgaactttgtgacagagatcttccgtcaagctttcctgctgcctatctgcgaggccgcagccatgcggaaagtagtgaaagtataccaggaatggattcagcaggaggagaaacctctgtttatgcaggagccagaagagattgttatcacttctagcgaccttccatgcattgagaatgtgactgaccacgacatctcaatggaagaaggagagaaacgggaggaggagaacgggaccaatacggcagatcacgttagaaactcctcctgggctaaaaacggttcataccagggtgcactacataacgcctccgaggaagcaactgaacagaacattcgagccggaacacaggcggtgctgcaggtgtttataattaacagcagtaacattttcttgcttgagcccgcaaacgagattaagaacctccttgatgagcataccgatatgtgtaaacgcatcctgaacatctatagatacatggttgtgcaggtttcaatggataagaagacgtgggagcaaatgctgctggtcctgttgagagtgaccgaatcagtccttaagatgccctctcaagcctttctgcaattccagggcaagaagaatatgacgctcgcaggcaggctggcagggccacttttccagacactgatagtggcctggatcaaagcgaacctgaacgtttacatctcacgcgaactttgggacgatctactcagcgtcctgagttctctgacttattgggaagagcttgcaaccgagtggagtctcactatggaaacactcactaaggtcctggctcgcaatttgtacagtctggacttatctgatctccccctggataagctgtcagagcaaaaacaaaagaagcacaagggaaagggggtgggtcatgaattccagaaagtgagtgtcgataaatccttcagcagggggtggtccagggatcagcccggtcaggcgccaatgcgccagaggagtgccaccaccactggaagccccggaacagagaaggccaggtccatcgtgcggcagaagacggttgctatgcgcagccgtagcatcggggagtgtgctctcccctccgcctacatccgcagcgctaaatccgcgccagtgctgattcacaccagtaagccatttttgccagacatagtccttactcccctgtctgatgaactgtccgatattgacgatgcacagatcctgccaaggagtactcgcgtgcggcatttctcacaatcagaagaaacgggcaatgaggtgtttggagccctcaatgaggaacaacccttgccacggtcatcaagcacatccgatatcctggagccatttaccgtggagcgtgctaaggttaacaaggaggacatgagccagaagctgcctccccttaactccgacattggcggatcgtctgccaacgtgcccgatttgatggacgaattcatcgccgaacgactcagaagcggaaatgcatctaccatgactcgaaggggatcctctccgggatctctggagatcccaaaagacctgccagacatccttaataaacagaatcagatgcgccctatcgacgaccccggagttccttctgagtggacctcgcccgcatctgccggttcctccgacttgattagctccgattcccatagtgattctttttcagcttttcagtacgatggacgaaaatttgacaacttcggattcggaactgacactggtgtgacctcgagcgccgatgtggactcaggaagcggtcatcatcagtctgctgaggagcaggaagttgcaagcctgaccacactccatatagattctgaaacttcgtccctgaatcaacaggctttctctgccgaggtggcgaccatcaccggcagtgagagcgcatcgcccgtgcacagtcctctgggatcacggtcgcaaaccccctcaccctccactctcaatattgaccatatggagcagaaggacctgcagctggatgagaaattgcatcattcagtgctgcaaactcccgacgatctcgagatctcagaattccctagtgagtgttgttcagtcatggccggagggacactgacaggctggcatgcggatgtcgctaccgtaatgtggagaaggatgctcggcattctcggggacgtgaattctataatggaccctgaaatccacgctcaggtgttcgactatctgtgcgaactctggcaaaacctcgcaaagattagggacaatctgggcatctcaacagacaacttaacctccccttcacctcctgttctgattcccccattgcggatcctcacaccatggctgttcaaggcgaccatgctcaccgataagtataagcaaggtaaactgcacgcctacaaactaatttgcaatactatgaagcgaaggcaggatgtgtctccaaacagggacttcctgacacacttttacaatataatgcactgcggtcttctccacattgaccaggacattgtaaatactatcattaagcactgctcgccccagttctttagcctgggactgccaggcgctacaatgctgataatggacttcattgttgctgccggaagagtggcaagttccgcattccttaacgctccgagggtggaggctcaggtgctgctgggcagtctcgtgtgtttcccaaatctgtactgcgagttgccgtctctccatcccaatataccagacgtggccgtgagtcagtttactgacgtaaaggagcttattatcaaaacagtgctgtcatcagcgagggatgagccctcggggccagcaaggtgtgtggccctgtgcagtctggggatttggatatgcgaggagcttgtccacgagtcacatcacccacaaataaaggaggctctcaatgttatttgtgtgagcttgaagtttactaacaagaccgtagctcatgtggcctgcaatatgttgcatatgttagtgcactatgtgccaaggcttcagatctaccagcctgactcaccactgaaaattattcagatcttgatcgccacgattacacatctgctgcccagcaccgaggcaagcagctacgaaatggacaagaggttagttgtttcgttactcctctgcctcctggactggatcatggcattgccgctcaagactttgctccagccatttcatgctacgggagccgaatctgacaaaacagaaaaatctgttcttaactgtatctacaaggtgctacacgggtgtgtgtacggcgctcagtgtttcagcaacccgaggtactttcctatgtctctcagtgacttggcctccgtggactatgaccctttcatgcaccttgaatccctcaaggagcccgagcccctgcactcgcctgacagtgagcggagtagtaagcttcagcccgtaactgaagtgaagacccagatgcagcatgggctcattagtattgccgcaagaacagttataacacatctggtgaatcacctgggacattatcctatgtccggaggacccgcaatgctgaccagccaggtctgcgagaaccatgacaatcattatagtgagtctacagaattgtcccccgagctgtttgaatctccgaacattcagtttttcgtattaaacaacactacattagtgtcatgtattcagatccggtccgaagagaatatgccaggaggtggcctttcggctggattagcatccgcaaattcgaacgtgaggataatagtgagagacctgagcggaaagtactcctgggattccgctattctgtacgggcctccaccagtttcaggactctctgaaccaacgagctttatgctgtcactttcccaccaagagaaaccagaagagcctcccacttctaatgaatgtctcgaggatatcaccgtcaaggatggcctctctctccagtttaaaagattccgggagactgtcccaacatgggacaccatacgtgacgaagaggatgtcctggacgaactcctgcagtacttaggtgtgacctcacccgagtgcctccagagaaccgggatctctctaaatatcccagccccacagcccgtctgcatctccgagaaacaagaaaatgacgtgattaatgccattttaaaacagcataccgaggaaaaagagttcgtagagaagcacttcaacgatctgaatatgaaggccgttgagcaggatgagcctataccacagaaaccgcagtccgccttctactactgtagactcttgttatccatcctgggcatgaattcatgggacaagaggaggtccttccaccttctgaagaaaaacgagaagttgttaagagagctgagaaatctcgactcacgacagtgtagggagacgcacaaaatagcggttttctacgtggcagagggccaggaagataagcattccatcctcaccaacaccgggggaagtcaggcatacgaagatttcgtcgcaggtcttgggtgggaagtcaacctcaccaaccactgcggattcatgggtggccttcagaaaaataaatcgactggactgaccactccatacttcgcaacttcaacagtcgaagtcatcttccatgtgagcacccgtatgccctccgattcagacgactcccttacaaaaaagctgagacacctgggaaacgacgaagtccatatcgtgtggagtgaacacaccagagactatcgcagaggtattatccccacggagttcggagatgtgcttatcgtgatctaccctatgaagaatcacatgttctctatccagatcatgaaaaaacctgaggtgcccttcttcggtccactcttcgacggggctattgttaatggtaaggtgttgccgattatggtgcgggcaacggctatcaacgcctctcgggcattgaaaagtctgattccgttgtaccagaacttctatgaggaaagggctaggtatctgcagactatcgtgcagcatcatctagaaccaactaccttcgaggattttgcagctcaggtgttttccccagctccctaccaccatcttccgtccgacgcagaccactac

SEQ ID NO: 237841 - DNA, 6252 bp, synthetic construct
  misc_feature 1..6252: note = Description of Artificial Sequence: Synthetic coding sequence
  source 1..6252: mol_type = other DNA
atgttctccaagaagcctcatggagatgtaaagaaatctacccaaaaagtgctcgatacaaaaaaggacgctctgacccggctaaagcacctaagaatcgtcatcgagaacgcagagagtatagacttaaaacagttttttgatcagcacttctcgcacatctactacgtgttcttcgagaatttcgtgactatcgaagcctctcttaaacagaagggacataagagtcagcgggaagagctggatgcaatactgtttatattcgagaaaattctccagttgctccccgagagaatccaccaacgctggcagttccacagcattggacttatcctgaaaaaacttctgcatactggaaactctctcaaaatccgcagggagggggtgcgcctgttcttgctgtggctccaggccctgcagaacaactgcagcaaagagcagctgtggatgttcagctgtttaatccctgggttctctgcgcctcaatccgaacacgggcctagaacccttgataacctcatcaatcctcccttaaatttacaagagactcaggtgacaattgaagagattactccactggtccccccacagtcgggtgataaggggcaagaagacttaactagttattttctggaagcactcctgaagtacatcgttattcaggttaaatctctggagtggaaaaacaaggaaaatcaagagcgtggcttttcatttctgttctcccatttcaaaaagtattacctgccatatatcttccctaacatttgcaaggaaaattccctgtaccaccctatactagatatccctcaaatgagacccaaaccccattatgtggtgattaaaaaagacgccgagaccaatgaggctatctactgcaccaaagaaccttttataaaggcgcgagttatcgttatacgatggcttgtgtccttctggctcgaacccaaaccccacactggcccacacatccccggaatggagggtgaggtgctgcccaaaaatatccaacgcgcagcggcttccctcgtttcccgggaggagtccaagaacgacaacgctgacaagaccgaccgaacaaccgagcccgagcagtctcatagtaacactagtacactgacggaacgggagcccagtagctccagcctctgctccatcgatgaggagcatctgacagacatagaaatcgtgaggcgggtgttctcttcaaagcgcagcaatgtgaacttcgtcactgaaatctttcgccaggctttcctgcttcccatttgcgaggctgcagctatgcgaaaggtcgttaaggtgtatcaggagtggatccaacaggaggagaaaccattgtttatgcaagagccagaagagatagtgattacgagcagcgatctgccctgtatcgagaacgttactgaccatgatatcagtatggaagagggggaaaagcgggaagaagaaaacgggaccaacacagcagatcacgtccgcaatagctcatgggccaagaatggcagctaccaaggcgcactgcacaacgctagcgaggaagccacggagcagaacatacgtgccggtacacaggccgtcctccaggtcttcatcattaactcctctaatatttttctgttggagccagcaaatgaaatcaaaaatcttctggacgaacacacagatatgtgtaaacgcatactgaatatttaccggtacatggtggtgcaggtgagcatggacaagaaaacttgggagcagatgctcctggttctgctgagggtgaccgaaagcgtgcttaagatgccttcacaggcctttctgcagtttcaaggaaagaaaaatatgactcttgccggaagactggccggtcctctttttcagaccctgatagttgcctggattaaggctaatctgaatgtctatattagccgtgaactctgggatgacctactctccgtgctcagctcactgacttactgggaggaactggctaccgagtggtctttgacaatggagacgctgactaaggttttagctcgcaatttgtactcgcttgacctgtcagatttacctctggacaagcttagcgagcagaagcagaaaaaacataagggcaagggagttggacacgagtttcagaaagtgtccgttgataaatcattcagcagaggttggagtagagaccagccgggacaggctcctatgaggcagcgcagcgcaacgacaactgggtcccctgggacagaaaaagccaggtctatagtgaggcagaaaaccgtggacattgacgacgctcagatcctgccaagatctacccgcgtaaggcacttctcccaatctgaggaaactggtaatgaagtattcggagctctcaacgaagagcagcccctccctagatcatctagcacatcagacatcctggaaccatttacagtcgaaagagccaaggtaaataaagaggacatgtctcagaagctgccccctctcaatagcgacatcggagggtctagtgcgaacgtgcctgacctcatggatgagttcattgccgagcgcctccggtccggtaatgccagtacgatgactagacggggaagcagccccggaagcctggagattccaaaggacctccctgatatcctgaacaaacaaaaccagatgaggccaatcgatgaccctggcgttccttccgaatggacttcgccagcatcagccggtagtagcgacctcattagcagcgatagtcactcggactccttcagtgctttccagtacgatggaaggaaatttgacaacttcgggttcggcacggatactggagtaactagcagtgctgacgtagactccggcagcggacaccaccagtcggccgaagaacaggaggtggcttccctcacgacactgcacattgactctgagacgtcctctctgaatcagcaggccttctctgccgaggtcgccacgattactggttcggaatcagcttctcctgtgcactcgcctctgggttccaggagccaaaccccatccccatccacactcaacatcgatcacatggaacagaaggatcttcagcttgacgaaaagctgcaccactctgttctccaaacgcccgacgacctggagatctccgagttcccatccgaatgttgttctgttatggcagggggaacactgaccggctggcatgctgacgttgccaccgtcatgtggcggaggatgttgggaatcttaggcgatgtgaactctatcatggatcccgagattcatgctcaagttttcgactacctctgtgagctgtggcagaacctggccaagatccgcgataacctggggatcagtactgacaaccttaccagtccttcaccgccagtgcttatccccccactgagaatcctgacaccatggcttttcaaagcgaccatgcttactgacaaatacaaacaagggaagcttcatgcttataagctgatctgcaacaccatgaaaaggagacaggacgtcagtcccaatcgggatttcctgactcacttctataatataatgcattgtgggctcctgcatatcgaccaagacatcgttaacaccatcatcaagcactgctcccctcagtttttctccttgggtctgcctggcgcaaccatgctcatcatggacttcatcgtcgcagctggccgagtggccagcagcgcatttctgaatgcacccagggtggaggcgcaagtgcttctaggctccctggtgtgctttccaaacttgtactgtgagttgccctcgctgcatccaaatataccagacgttgcagttagtcagttcaccgacgttaaggagctgattataaaaactgtgctgagctcagcgagggacgaaccctccggccctgccagatgtgtggcactctgcagtttagggatttggatttgcgaagaattagttcacgagtctcatcatccacaaattaaggaggccctgaatgtaatttgtgtctctctgaaattcaccaacaagacagttgcacatgtggcatgcaatatgcttcacatgctcgtacactacgtgcctcggctgcagatttaccagcccgattcccccctgaaaatcatccagatattgatcgctaccatcactcacctgctcccctctactgaggccagttcttatgagatggataaaagactggtggtgtcactcttactctgcctgttagactggatcatggctctacccttgaaaacactgctgcagcctttccatgctaccggggctgagtcggacaaaacagaaaaatcggtgctgaattgtatatataaagttctccacggctgcgtatatggcgctcagtgcttctctaaccccaggtatttcccgatgtccttaagcgacctggcctcagtggactatgacccttttatgcacctagagtcactcaaagaacccgaaccgctgcacagtccagacagcgaacggagctccaaattgcaaccagtgaccgaggtgaaaacccaaatgcagcacggcctcatttctatcgccgctagaaccgtgatcacccacctagttaaccacctaggacattacccaatgtccggcggtccagccatgcttacctctcaggtgtgcgaaaaccacgataatcattatagtgagagtactgaactgtctcccgaacttttcgagtcgcctaatatccagtttttcgtactcaataacacaacactcgtgtcgtgtattcagatccggtctgaggaaaatatgcccggtggcggtctctcagccggactggcatccgccaattcaaacgtgagaatcattgttagagacctgagcggcaagtattcttgggatagcgcaatcctatacggtcccccaccggtgtctggactttcggaacccacatcatttatgttatccctatcacatcaggagaagcctgaagaacctccaacgtccaacgagtgtctggaagacatcacagtgaaagacgggttgagcctgcagttcaagaggtttagagagactgtgccaacatgggataccattcgtgacgaggaggacgtcttggatgagctgcttcaatacctcggggttacttcccctgaatgcctccagcggactggcatctctctcaacattcctgcccctcagcctgtctgcatcagcgagaaacaggagaacgatgtgatcaatgccatacttaagcagcacacagaagagaaggaatttgtggagaaacacttcaatgatctcaacatgaaggccgtcgagcaggacgaacccatcccccaaaagccccaatccgctttctactactgtaggctgttgctgtcgattctgggcatgaactcgtgggacaaaaggcgaagcttccacctccttaagaagaacgaaaaacttttgagggaactgcggaacttagattctagacagtgccgggagacccataagattgcagtcttctatgtggccgagggacaggaagacaaacactcaatccttacgaataccggcggtagccaagcatatgaggattttgtcgcgggacttggctgggaggtgaatttaactaatcactgcgggttcatgggcggtctgcagaaaaacaagtctactggattaactaccccctacttcgctacgtctaccgtggaggtcatctttcacgtatctacaagaatgccctctgattctgacgatagcttgactaagaagctgcgacatctcgggaatgatgaagttcacattgtatggtcagagcacacaagagattataggcgaggcattattccaactgagttcggcgatgtgctgatagttatttatcccatgaaaaatcacatgttcagcatccagattatgaaaaagcccgaggtaccatttttcggccctttgttcgacggcgctatcgtgaacggaaaggtactccctatcatggtgagggccacagcaataaatgcttctagagccttaaagagcctcatcccactgtatcaaaatttctacgaggagagggccaggtacctgcagacaattgtccagcaccatctcgagccgactacctttgaggattttgctgcccaggtattctctcccgcaccataccaccatcttcctagtgatgccggtagctatccagagatattgccaagcgagactccaactgcaacccaggtggatggcgctgatctggcatccccaatgtcacctaggacctctaagtcccgtatgtctatgaaacttcggagatccagtggcagcgccaataaatcctag

SEQ ID NO: 237842 - DNA, 6221 bp, synthetic construct
  misc_feature 1..6221: note = Description of Artificial Sequence: Synthetic coding sequence
  source 1..6221: mol_type = other DNA
atgttcagcaagaaaccccacggcgacgtgaagaagtcaacccaaaaagtcctggatacaaagaaggatgctctcacaagattgaaacacttgagaatcgtaatcgaaaacgccgaatctatagacctaaaacaattcttcgaccagcactttagccatatctattacgtgtttttcgagaatttcgtgacgatagaagccagtctgaaacaaaagggtcacaaaagtcaacgggaagagcttgatgcaatcctgttcatatttgagaaaatccttcaactcttgcccgaaagaattcaccagagatggcagtttcatagcattggacttattctcaaaaagctgctgcacacaggtaactccctgaagattcgcagggaaggggtgcgactctttctactgtggctgcaggcccttcagaacaactgcagcaaggagcagctatggatgtttagctgtttgattcctgggttttcggctccccaatccgaacacggacctcggacactggacaacctcattaatccacctctgaatctacaggaaacacaggtgactattgaggagattacccctctggtacctcctcagtcgggggataaagggcaggaggacctgacttcttacttcctcgaggccctgctcaaatatatcgtgattcaggtaaagagtctcgaatggaagaacaaggaaaaccaggaacggggattttcttttcttttttcccactttaaaaagtattatctcccctacatcttccctaacatttgtaaggaaaacagcctgtaccacccaatactcgatatccctcagatgcgccctaagccacactacgtggttataaagaaggacgccgagaccaatgaagcaatctactgcactaaggagccattcataaaggccagggtcatcgtcatccgctggctggtttccttttggttggaacccaaacctcatacagggccacacatcccaggtatggagggagaggtcctgccaaagaatattcagagagccgctgcctctctggttagccgcgaggaatccaagaacgacaatgccgacaagaccgaccggaccacggagccagaacaatcccatagcaatacgtccaccttgactgaaagggaacccagctcctcatctctttgtagtatcgatgaggaacatcttacagatattgaaattgtaagaagagttttcagttctaagcgctctaacgttaattttgtgacagaaatctttaggcaggctttccttctgccgatttgcgaagcagctgccatgcgcaaggtggtgaaagtttaccaggagtggatccagcaggaagagaagccactcttcatgcaagaaccagaagagatagtgattacatcttctgacttaccctgtatcgagaacgtgaccgaccacgacatctccatggaggaaggagaaaaacgggaggaggaaaatggaaccaataccgctgatcacgtcaggaatagctcctgggctaagaatggcagctatcagggcgctctccacaacgccagtgaagaagcaacggaacagaacatacgggctgggacccaagccgtcttacaagtgttcattattaactcaagcaatatcttccttctggagccggcaaatgagattaaaaaccttctcgacgagcataccgacatgtgcaagagaatcctgaatatttaccggtacatggtcgtccaagtgagcatggacaagaaaacttgggaacagatgcttctggttctgctgagggtgacggagagtgtgctcaaaatgcccagccaggccttcctgcaatttcagggaaaaaagaacatgacattagctggacggttagcgggacctctcttccagacacttatcgttgcctggattaaagcgaatctcaatgtctatatcagccgtgagctgtgggatgatctcctgtcagtgctgtccagtttaacatactgggaagagctcgccaccgagtggagcctgacaatggaaaccctgacaaaggtgctcgcccgaaatctgtactccctggacctatctgatctcccactcgacaagctgagcgagcagaaacaaaaaaaacacaagggaaagggcgtgggtcacgagttccaaaaagtatctgttgacaagagctttagtcgaggatggtcccgggaccaacctggccaggccccaatgaggcaaaggagcgcaacgacaaccggctctcccggtaccgaaaaggcgaggtcaattgttcgccagaaaactgtcgatatcgatgatgcacagattctcccgaggtcaaccagggtgaggcacttttcccagagtgaggagactgggaacgaggtgtttggggcactgaacgaagaacagccactgccacggtcatcttccacatccgatattctcgagcccttcaccgtggagagggcaaaagtgaacaaggaggacatgagccagaagctccccccactgaattccgacatagggggaagttccgccaatgtccccgaccttatggacgagttcattgctgagcgactgcgctctgggaatgcctccacaatgaccagacgcggtagctcccctggctccctggagatcccgaaagacttgcccgatatcctgaacaagcagaatcagatgagaccgatcgatgaccccggagttccgtccgagtggacatcacccgcaagcgccggatcttccgaccttatctcctcggactcccactctgattcctttagtgcatttcagtatgacggtcggaaatttgataactttggattcggaacagacaccggagttacttcgagcgcagatgtggatagcgggtcaggccaccaccagagtgctgaggagcaggaagtagcttcgctcacaaccctgcatattgactccgagactagctccttgaaccagcaagccttctctgcggaagtagccactatcaccgggagcgaatcggcatccccagtgcattcaccactcggtagcaggtctcagaccccaagcccttcaacccttaatattgatcacatggagcaaaaggatctccagcttgatgaaaaactgcaccactcggtgctgcagaccccagatgacctcgagatctctgagtttccctcagaatgctgttccgtgatggctggcggtaccctgaccgggtggcacgcggacgtggctacagtgatgtggcgacgcatgctgggaatcctgggcgacgttaatagtatcatggatccagaaattcatgcgcaagtgttcgattacttatgtgaactgtggcaaaatttagccaagataagggacaatctgggcatcagcacagacaatctgacctctccttccccacccgtcttgatccccccactacgtattctgaccccgtggctctttaaggccactatgttaacagacaagtataaacaaggtaagctgcatgcatataagctgatttgcaacacaatgaagcgaaggcaggatgtctcacccaatcgggattttctgactcacttctacaacatcatgcactgtggtctgttacacatcgaccaagacatcgttaacaccattatcaagcactgctcccctcagtttttttctctgggtttacccggtgcaactatgctcattatggactttatcgtggcggcaggcagggtggccagcagtgccttcttgaatgcacccagagtggaagcacaggttttgcttgggtcattggtgtgtttccccaatctgtattgtgaactgccaagcctgcatcctaacattcccgatgtcgctgtcagtcaatttacggatgtgaaggaactcattatcaagactgtgctatcgagcgcaagagacgaaccatccggccctgcccgttgcgtagccctctgctccctcggcatttggatttgcgaggagctggttcatgagtctcatcaccctcagatcaaagaggccctgaatgtgatttgtgtttcactgaaattcacaaacaaaaccgtcgcacacgttgcctgcaacatgctgcacatgcttgtgcactacgtccctcgattgcagatttaccagcccgattccccccttaagatcatccagattctgattgccacaattactcatctgctgccaagcactgaagcctctagctacgagatggacaagcgtctggtcgtgtctctgttgctctgtctcctggactggatcatggctctgccattgaaaaccctgttgcagccttttcacgctacaggggcagagtctgataagacagaaaagtccgtactaaactgcatatataaggtgctacatggctgtgtgtacggagcccagtgcttctccaatccaagatatttccccatgtctctgtccgacctcgccagcgtcgattatgaccccttcatgcacttggagtcattgaaggaacccgagccacttcattcaccagatagtgaacggagttcaaaattgcagcccgttacagaggtcaagacgcagatgcagcacggactgatttccatcgccgcacgaactgtcattactcacctggttaatcacctagggcattaccctatgtccgggggtccggctatgctgacctctcaggtatgcgaaaaccatgacaaccactactcagaatccacagagctgtcccccgaactatttgagagtcccaatatccagttctttgtgctgaacaacactacgctggtgagttgtatccagatccggagcgaagagaacatgccgggtggaggactgtctgcaggcctggcaagcgccaatagcaatgtgagaattatcgtgagagacctgtctggaaagtactcttgggactctgccatcctgtatggtccacctcccgtgtccggtctgagcgagccaacttccttcatgttatcgctgtcccatcaagagaagcctgaagaaccccctacctccaacgagtgcctggaggacatcacagtgaaagacgggctgtcactgcagtttaaacggttccgcgagacggtgccaacctgggataccataagggacgaagaagatgtgctggacgagctgctacagtatctgggcgtgacatcgccagagtgtctccagagaaccggcataagcctcaatattcccgcacctcagccagtgtgtataagcgaaaaacaggagaacgacgtaatcaatgcaattttgaaacagcatacagaggagaaggagttcgtggaaaagcacttcaatgatctaaacatgaaagcggtcgaacaggacgagcctattccacaaaagcctcagagcgcattctactactgcaggctgttattgtccatcctgggcatgaactcatgggataagcgccgatcttttcatctgttaaagaaaaatgaaaagctccttcgggaactcagaaatctagattcgcgccagtgccgcgaaacccacaagatagcagtcttctacgtggcagagggccaagaggataaacactctatactgaccaatacgggcggttcccaagcttatgaagattttgtggccggactgggatgggaggtgaacttaacaaaccactgcggttttatgggagggcttcagaagaacaagtctacagggttgaccaccccctactttgcaacctctaccgtggaggtcatattccacgtgtccactcggatgccatccgactctgacgactctttgacaaagaagctccggcacctgggcaacgacgaggtgcacatcgtgtggtctgaacatacacgggactacagacggggaattatccctaccgagttcggtgatgtgctgatcgtcatctacccaatgaaaaaccatatgtttagtatccaaattatgaaaaaaccagaggttcctttctttggcccactgtttgacggcgcaattgtgaacgggaaggtgctgcccataatggtgagagctacggctattaacgcatctagagctctgaagagtctcattcccctctatcaaaatttttatgaggagagggccagatatctacagacaatcgtgcaacaccacctcgaaccaacaacatttgaagactttgcggctcaggtgttctctccggcaccataccaccacttacccagcgatgccgaggaaagaaacgctgttattgttctcttcctgccaaaacctcccctggaaaacattggccacctgaaggcccctactcagcgcttttaccctgtaaagcttcctcagcagagaagata

SEQ ID NO: 237843 - DNA, 6149 bp, synthetic construct
  misc_feature 1..6149: note = Description of Artificial Sequence: Synthetic coding sequence
  source 1..6149: mol_type = other DNA
atgttttctaagaagccccatggcgacgtaaagaaatctacccaaaaggtgctggacaccaagaaggacgcccttactcgtctgaaacatctgaggatcgtcatcgagaacgctgagtctatagatctgaagcagttctttgaccaacacttttctcacatttactatgtattcttcgaaaactttgtgaccattgaagccagccttaaacagaagggacacaagagtcagcgggaagaattggatgccatcctattcatttttgagaagattctacagctgttgccagaacggatccaccagagatggcaattccattccattggcctcatactcaagaagctgttacataccggaaactccttgaagattcgtcgggagggcgtgcgcctgtttctgctgtggttacaggcactgcaaaacaattgctcgaaagagcaactgtggatgttcagctgtctgattccaggcttttccgccccacagagcgagcacggtcctaggacactggacaacctgatcaatcctccactgaatctgcaggagacccaggtgacaatagaggagatcacccccctggtgcccccacagtccggtgacaaaggccaggaagatctgacctcctattttctcgaagccctgttaaagtacatagtgatccaggtcaaatctctcgaatggaagaataaagagaaccaggagcgtgggtttagcttcctgttctcacactttaagaaatactaccttccatacatattccctaacatatgcaaggagaattcactgtatcacccgattctggacataccgcagatgcgccctaaaccccactacgtggttatcaagaaagacgctgagacaaacgaagccatttactgcacaaaagagcccttcatcaaagcccgagtcatagtgatcagatggctagtttcattttggctcgagccaaaacctcatacgggacctcacatacccggtatggaaggagaggtcctcccaaagaacatccagcgagccgcagcatcattggtatcccgtgaggagtcaaagaacgacaatgcggacaagacagatagaaccactgagccagagcagtctcattccaacacttctacactcacagagagagagcctagctcgtcctcactctgcagcatcgatgaggaacatctgacagatattgagatcgtgcggagggtgtttagttccaagcggagcaatgtgaattttgtaacggagatcttcagacaggcgttcctgctacctatttgcgaggctgcagccatgcgcaaagtggttaaagtctatcaagagtggatccaacaggaagaaaagcctctgttcatgcaggaaccggaggagatcgtcattaccagctccgacctgccctgtatcgagaatgtcacagatcacgatatttcaatggaagagggggagaaacgcgaagaagagaacggaactaacacagcagatcatgtcaggaactcatcctgggccaaaaatggcagctaccagggggcactgcacaatgcatccgaagaggccacagaacagaacatccgtgctggcactcaagccgtgcttcaggtgtttatcatcaattcatccaacatcttcctgctcgaaccggctaatgagattaagaatctgcttgatgaacacaccgatatgtgcaaacgaatcctgaatatctatagatacatggtggtgcaggtgagcatggataagaaaacctgggagcagatgcttctggtgctcctccgcgtcactgaaagtgtgctgaagatgccgtctcaggccttcttacagtttcagggcaaaaagaatatgacattggccggacggttagccggtcctttattccagaccctcatagtagcttggatcaaagctaatctcaacgtgtatatcagtagggaactctgggacgatttgctgtcggttctctcatcactcacatactgggaggagcttgctaccgaatggtctctcaccatggagacgctgaccaaagtgctggccaggaacctctactcactggatttgagcgatcttcctcttgataagttgtccgaacagaagcagaagaagcacaagggtaagggtgtcggtcacgagttccaaaaagttagcgtggacaaaagcttcagccgaggctggagtcgcgaccaacctggccaggcaccgatgaggcaacgctccgcaaccactacaggatctcccggtaccgaaaaggcacgttccatcgtgaggcagaaaactgtcgacattgatgacgcccagatcctgcccaggtcaacccgggtacggcatttttcacagtccgaggaaaccggcaatgaggtgtttggagctctgaatgaggagcagcctctgcccagaagtagttccacgtcagacatcctggagcctttcactgtggagcgggctaaggaagcggagcagaacgccacccgcggaagtaccgagggaagtgttcagtcctgcaacggactgttttggaaggaaagttgtagtgacatagggggatcaagcgctaacgtgcctgatcttatggatgagtttatcgctgagaggctcagaagcggtaatgcgtcaacaatgaccagacgtgggtcatcccctgggtcgctggagatccccaaggacttgccagatattcttaataaacaaaatcagatgaggccaatcgatgatccaggcgtacccagcgagtggacttcccccgcaagtgctgggtccagcgacctcatcagctcggattcccatagcgatagtttttccgcattccagtatgacggcaggaaatttgacaattttgggttcggaacagacaccggtgtaacgtcctctgcagatgtcgattcaggctcgggtcaccaccagtctgccgaagaacaagaagttgcctctctgacaactctgcatattgactccgagaccagcagcttgaaccaacaagcattttcagcagaggttgccactattaccggaagtgaatcggcctctccagttcatagcccactgggatctcggtcacagacccccagcccctctactctgaatattgaccacatggagcagaaagacttgcagttggacgaaaagctgcaccacagtgtactacaaacccctgacgatctcgagatctccgagttcccaagtgaatgttgctctgtgatggcaggcggaactctgaccggatggcatgctgacgtcgcaaccgttatgtggagacgaatgttagggatcctgggtgacgtgaatagcataatggatcctgagatccacgctcaagtgtttgactatctatgcgaactctggcagaatctggccaaaattcgggacaatctcggtatcagcaccgacaacctcacgtctccatcccctccagttcttattcctccattgagaattttaacaccttggttattcaaggctactatgttaaccgataagtacaagcaaggaaagttgcacgcatacaagctcatctgcaatactatgaagcggagacaggacgtctctcccaacagagattttctgactcacttttacaacatcatgcactgcggactcttgcatatagaccaggacattgtgaacaccatcatcaagcactgctctcctcaattttttagcttgggactgccgggtgcaacaatgctaataatggattttatcgttgccgcaggacgtgtcgccagctctgcttttctgaatgcccctcgcgttgaggcccaggtgctgttgggctcactggtatgtttccccaatctctattgcgagctcccctctctccaccccaacatccctgatgtggcagtgtctcagttcacagacgtaaaagaactaattattaagactgtccttagctccgccagagatgagccaagcggccctgcaagatgtgttgccctgtgttcactcggcatttggatctgtgaggagttagttcatgagagccatcaccctcagattaaggaagctctcaacgtgatttgtgtgtctctaaaattcacgaacaaaaccgtggcccatgtggcttgcaacatgctccatatgttggtgcactatgtccctaggctgcagatatatcagcctgactccccacttaagataatacagatcctgatagccaccattactcatttgctacctagcaccgaagcatcgagttatgagatggacaaacgcttggtggtatccttattgctctgcctgctcgactggatcatggccctccccctgaaaactcttttgcagccctttcacgcaaccggggcagagtctgacaaaactgagaaatctgtgttgaactgcatttacaaagttttgcacgggtgcgtgtacggcgctcaatgtttctctaatcccagatatttcccaatgtcgctcagcgacttggcgagcgtggattacgacccattcatgcacctcgagagcctgaaagaaccggagcccctgcattcacctgattccgaaagaagctcgaagctccagccagtgactgaggtgaaaacgcagatgcagcacggcctgatctctatagccgctagaacagtgatcactcacctcgtgaaccatcttggccattaccccatgtccggcggaccggctatgctgacctctcaggtgtgtgagaatcacgataaccactactctgagagtaccgagctgtcgcctgaattgttcgagtcccccaatattcagttcttcgtcctgaataatacgaccctcgtgagctgcatccagatcaggagcgaggaaaatatgcctggcggaggtttatccgccggacttgcatcagctaactccaacgtccgcatcatcgtccgcgatctgagtgggaaatattcatgggactcggcaatcctgtacggaccaccgcctgtgtcaggactatcagagccgacgtcgtttatgttatcactttcacaccaagagaagccggaagagccaccaacgagtaacgagtgcttggaggacatcactgtcaaggacggcctctcattgcagtttaaacgctttcgcgagaccgtccctacttgggacactattagggacgaagaggatgtgctggatgaactgctgcagtatctgggagtcactagtccagagtgcttgcaaagaaccggtatttccttgaatatacccgcaccccagcctgtttgcatttccgaaaagcaggaaaacgatgtcatcaatgccattcttaagcaacacacagaagagaaagaattcgtggaaaagcatttcaacgacctgaatatgaaagcagttgagcaggacgaaccgatccctcagaagccacaatctgcgttttactattgtcgcctcctgctctcaatcctcggtatgaactcctgggacaaacggcgtagtttccacctgctgaagaagaatgagaaattactgcgcgagctgcgtaatctggatagccgccagtgccgcgagactcacaaaatcgcagtcttttacgtcgccgagggccaggaggacaaacatagcattctgaccaataccgggggaagtcaagcttacgaagacttcgttgctgggctggggtgggaggtgaaccttacaaaccactgtggttttatgggcggtcttcagaaaaataagtcaacaggcctgactacaccttactttgctacttccaccgttgaggtgatttttcatgtgtctactcggatgccatccgactcagacgattcactgactaagaagcttcgtcacttagggaacgacgaagtacatatcgtttggtctgagcacactcgggattaccgccgtggcatcatccctacagaatttggagatgtcctcatagtgatctatcctatgaaaaaccacatgttctccattcagatcatgaaaaagcctgaggttccctttttcggccctttgttcgacggtgccattgtcaacggaaaggtcctgccgatcatggtaagagccactgcaattaatgcttcacgcgcactcaagagcttgatccccctgtatcagaacttctacgaagaacgggcaaggtacctccaaaccatcgttcagcaccacctggagccaaccaccttcgaagacttcgcagcacaggttttttccccagccccttaccatcacctaccgtccgacgccgaccacta

SEQ ID NO: 237844 - DNA, 6110 bp, synthetic construct
  misc_feature 1..6110: note = Description of Artificial Sequence: Synthetic coding sequence
  source 1..6110: mol_type = other DNA
atgttttctaagaagcctcatggtgacgtgaaaaaaagcacacagaaagtcctcgacacgaagaaggacgccctgacccgcctgaagcacctgcggatcgtcatcgaaaatgcagaatcaatcgacctgaagcagtttttcgatcagcacttttcgcatatctactatgtgttcttcgagaattttgtcaccatcgaagcaagcctgaagcaaaaaggccacaagagccaaagggaagaactggatgccatactgttcatatttgaaaaaatcctgcaattactcccagagcgcattcatcaaaggtggcagtttcatagcatagggctgatcttgaagaagctcttgcacaccggaaatagcctgaaaatacgcagagaaggggttaggctctttttgctgtggttacaggctctccagaacaactgctccaaagagcagctctggatgtttagctgtttgatccccggatttagcgctccacaatcagagcacgggccaagaacactcgacaatctgatcaacccccctttgaatctgcaagaaacacaagtgaccatcgaggagattacgcctttggtgccgcctcagtctggagacaaaggccaggaggacctgacatcctattttctcgaggctcttttgaagtacattgttatacaggtgaaatctctcgagtggaaaaataaagagaatcaagagaggggtttttcctttttgttttctcattttaagaaatattacttaccctatatcttccctaacatctgtaaggaaaactccctgtatcatccaattctggatatacctcagatgagacctaaaccacattatgtggtgattaagaaagacgccgagaccaacgaggcaatctactgcacaaaagagcctttcattaaagctagagtgattgtaatccggtggctggtttcattttggctggaacccaagcctcacactggaccccacatccctgggatggaaggtgaggtcctgccaaagaatatccagcgggctgccgcttcactggtgtcccgtgaagaatccaaaaacgacaatgcagacaaaactgacagaaccactgagcccgaacagtcccattcgaatacatccactctgacagagcgtgaaccgtcgagctctagtttatgtagcatcgatgaggaacacctcaccgacatcgaaattgtgcggagagtgttctctagcaagaggagcaacgttaatttcgtgaccgagatcttccgacaggccttccttctaccaatctgcgaggccgcagcaatgcggaaggtggtcaaggtctaccaagagtggatacagcaagaggagaagccgctctttatgcaggaacccgaagaaattgtcatcacgtcttcggacctgccctgtattgaaaacgtgaccgatcacgacatcagtatggaggagggagaaaagagggaagaggagaacggaacaaacacggcagatcacgtgcggaactccagctgggcaaaaaacggctcataccagggagccctacacaatgcctctgaggaagcgacagaacagaatatccgcgctgggacgcaggccgtgctgcaggtgttcattatcaacagcagcaacatctttctgctggagcctgcaaacgagataaagaatctcctcgacgaacacacagacatgtgtaagagaattcttaacatatatcgctatatggtcgtgcaggtgtccatggacaagaaaacctgggaacagatgcttctcgtactcctccgggttacagagtcggttctaaaaatgccgtcccaggctttcctccaatttcagggcaaaaaaaacatgacattagcaggcaggcttgccggaccattattccagaccctcatcgtggcttggataaaagctaaccttaacgtttacatttcccgcgaattgtgggacgacctgctcagtgtgctgtcttctctgacatattgggaggagctggcaaccgagtggtctctgacgatggagacactcaccaaggttctggcaagaaatctgtattctttagacctctctgatctgcctctggacaaactgtcagagcaaaagcagaagaagcacaagggaaagggggtcggacacgagtttcagaaggtgtccgtggacaagtctttcagtcgcggttggagcagagatcaaccagggcaggctcctatgagacagcggtctgcgaccacaacagggtcaccaggtactgagaaggcacgcagcattgtccggcagaagaccgtcgacatcgatgatgcccagatcctccctcgatctacaagggtaagacacttctcccagtccgaagagaccggcaacgaagtgttcggggctctgaatgaagaacagccactccccagaagctccagcacttctgacattctggagccattcacagttgaacgagccaaggtgaacaaggaggatatgtctcagaaactgcccccactgaacagcgacatcggtggatcatccgccaatgtgccagaccttatggatgagtttatcgcagagaggctgcgatctggtaacgcgtccactatgacacgcagaggaagcagccctggttcgttggaaatcccaaaagacctacccgacatcttgaacaagcagaaccaaatgcgtccaatcgatgatcccggtgtaccctctgaatggacatcaccagcatcagccggttctagcgacctgatctcatctgactctcactccgactcatttagcgcatttcagtacgatggcaggaagttcgataatttcggcttcgggacggataccggagtgacctcatctgccgacgtggactcaggcagcggccaccaccaaagcgccgaggagcaggaagtggcatcattgaccactctacatatagattcagagacctcctcccttaatcaacaagcattcagcgcggaagtggccacgatcaccggaagtgagtctgcttcgccggtgcattcaccactcggatctcgcagccagactccctcaccctccacactgaatatcgaccacatggaacagaaggatcttcaactcgatgagaagcttcaccacagtgtattacagactcccgacgatttagaaatctctgaattcccttcagaatgttgctccgtaatggcagggggtacattgactggctggcatgcggacgttgctaccgtaatgtggaggcggatgctcggcattctcggggatgtaaatagtataatggatccagagatccatgctcaagtgttcgactatttatgtgagctatggcagaacctagccaagattcgggacaacctggggatctcaacagataacctgactagtccctcacctcccgttttgattcctcctttgcggattctgacaccatggctctttaaagccaccatgctaaccgacaagtacaaacaggggaagcttcacgcatataagttgatctgcaacaccatgaaacgccgacaggacgtgtcccctaaccgcgacttcctgacacacttttataatattatgcactgcggcctgttgcacatcgaccaggacattgttaataccatcattaaacactgctctccacagtttttttccctcgggcttccgggagctaccatgctaataatggatttcattgtggcggctggcagagtcgcctccagcgccttccttaacgcccctagggtggaggcccaggtcctcctggggtcactggtgtgttttcctaatctttactgcgagctgccaagcctgcatcccaacatccctgacgttgcagttagtcagtttacagacgtgaaggaacttattatcaagacagtgctgtcaagcgcccgagacgagccatccggtcccgctcgttgtgttgctctgtgctcattaggcatctggatctgcgaagagctggtgcacgagagtcatcaccctcagattaaagaggccctgaatgtcatctgtgtcagcctcaaattcaccaataagacagtggctcatgtggcgtgcaacatgttgcatatgctggtgcactatgtgcccagactgcagatctaccaacccgattcacctctaaagattatacagatactgatcgctacaataactcatctgctgccatccaccgaggcaagctcttacgagatggataagaggctggtcgtgagcttgctgctgtgtcttcttgattggataatggccctccctcttaaaactttgctccagcctttccacgcgaccggggcagagagcgacaaaactgaaaaaagcgtactgaactgtatctacaaagttctgcacggctgtgtctacggggcacagtgtttcagtaatcccaggtatttcccgatgtctctaagtgacctggcctcagttgactacgacccattcatgcatctggagtcccttaaagagcccgaaccacttcactctcctgatagcgagcgaagcagcaaactgcagccagtcactgaagttaagacccagatgcagcatggcctcatctcaattgctgccagaaccgtgatcacacatctggtaaaccacctaggtcactaccctatgtcaggcggtcccgctatgctaacatctcaggtgtgcgagaatcacgataaccactactcagagtccactgagctgagccccgagttattcgagtcccccaatattcagtttttcgtactcaacaatacgaccctcgtatcgtgtattcagatccggtctgaagagaatatgccagggggtggcctgagcgcagggcttgcgtctgcgaactcgaacgtccgcattattgtcagggatctgtccggcaagtactcctgggatagcgccattctgtatggccctcctcccgtcagcgggctgagcgaacctactagttttatgctgtctttgagtcaccaggagaaaccagaggagccaccgacttctaatgaatgcctggaggacatcaccgtgaaggacggactgagcctgcagtttaaaaggttccgcgagactgtgcctacttgggacactatcagagatgaggaagacgttctagacgagctgttgcagtatctgggggtcacctctccagaatgtcttcaaaggacgggtattagtctgaatatacctgctcctcagccagtttgcatctccgagaaacaggaaaacgatgtgatcaatgcgattctcaaacagcatacagaggagaaggagtttgtagaaaaacacttcaacgatctgaatatgaaagccgtagaacaagacgagccaatacctcaaaaaccccagtccgcgttttattattgccgcttattactgtcgatcctgggcatgaacagttgggacaagagacgctcttttcatcttctcaagaaaaacgaaaagctgcttagagaactcagaaacctcgactcgcgccagtgtagggagacgcataagattgctgtcttttatgttgctgagggccaggaagacaagcacagtattctgactaataccggaggttcgcaagcgtatgaggatttcgtggcagggctgggatgggaagtcaacttgacgaatcactgtggtttcatggggggtctgcaaaaaaataagagcacagggttgaccacaccttacttcgcgacttctaccgtagaagtgatcttccatgttagtactagaatgcctagcgattccgacgattctctaaccaaaaaactgcggcatctggggaatgatgaggtacatatcgtatggagcgagcacacgagagactaccggcgaggaatcatcccaaccgagtttggggacgtgcttattgtgatatacccaatgaaaaatcacatgttctctattcagatcatgaaaaagcccgaggttccttttttcggacctctgtttgacggggctattgtcaatgggaaagtccttccaatcatggtgagagccactgccattaatgcgagtcgggcattgaagtcacttatacccttgtaccaaaacttctatgaagagagagcgcgttacctgcagaccatcgtgcagcaccacctggagccaactaccttcgaggatttcgctgcgcaggtgttttcacccgctccctatcatcacctgcctagtgacgcggatcatta

SEQ ID NO: 237845 - DNA, 6251 bp, synthetic construct
  misc_feature 1..6251: note = Description of Artificial Sequence: Synthetic coding sequence
  source 1..6251: mol_type = other DNA
atgttttcgaagaaacctcacggtgatgtgaaaaagagcacgcagaaagtactcgacaccaaaaaagatgccctgactcggctgaaacacctaagaatagtcatcgagaatgctgagtcaattgatttaaagcagtttttcgaccagcacttctcccatatctactatgtattttttgaaaatttcgtgactatcgaagcctccctgaagcaaaaagggcacaagtcccagcgagaagaactcgatgctattttatttatctttgagaaaattctgcagcttctgccagagcggatacatcagcgttggcaatttcatagcatcggtctcatactgaaaaagttgcttcacactgggaacagtctgaaaatccgcagagagggcgttcggctctttttgctatggcttcaagctctgcagaacaactgttcaaaggaacaattgtggatgtttagctgcctgattcctggtttctccgccccacagagtgagcacggacccaggactttagataatttgatcaaccctccactcaatttgcaggaaacacaagtaacaatcgaggagattacccccctagttccaccccagagtggggacaagggccaggaagacctgacctcatatttcctggaagcactcctcaagtacatagtgattcaggtgaaaagccttgaatggaagaacaaggagaatcaggagagggggttctccttcttatttagtcatttcaagaaatactatcttccctacatttttccaaatatctgcaaggaaaactccctgtatcacccaattttagatatcccccagatgaggccaaagccccattacgtagtgatcaaaaaggatgctgagactaatgaggctatctattgcaccaaggagccttttataaaggccagagtgattgtgattagatggctggtcagcttctggcttgagcctaagcctcacaccgggcctcatatacccggtatggagggcgaggtgctccctaaaaacatccagcgagcagcagcttcacttgtttcacgggaagagagcaagaacgacaatgccgataagaccgatagaacaacagagccggagcaatctcatagtaacaccagtacattgaccgagcgggagccctcttccagcagcctatgctcaattgatgaagaacacctcactgatatcgagattgtcagacgcgtgtttagctctaagcggtctaacgttaactttgtgacagaaatctttaggcaagcatttctgctgcctatttgtgaagccgcagcaatgagaaaagtggttaaggtttatcaggagtggatccaacaggaggaaaaacctttgtttatgcaggaaccagaggagatcgttataacaagtagcgatttaccatgtattgaaaatgtgactgaccacgacattagtatggaagagggagaaaaacgggaagaggagaacgggacaaataccgccgaccacgtgagaaacagctcctgggccaaaaacggatcctatcagggagccctccacaacgcgtccgaagaggcgacagaacagaacataagggctggcactcaggccgttttacaagtgtttatcattaactccagcaacattttcctccttgagccagcaaatgagattaagaatctgttagacgagcatactgacatgtgcaagcgtatattgaacatctatcgatacatggtcgttcaggtgagcatggacaagaagacttgggagcagatgctcctggtcctcctgcgggttaccgaaagtgtcctgaagatgccatcccaggcttttttgcagttccaagggaaaaaaaacatgacgcttgcaggaagattggctggcccattgtttcagacccttatagtggcatggatcaaggccaatctgaatgtttacatctcccgggaactgtgggacgatctgctgtccgtcctgtcttccctcacctattgggaggagctggccacggaatggtctctcacaatggaaaccctcactaaggtgctggctcggaatctctacagcctggatctcagtgacttgcctttggacaagctgtccgagcaaaaacagaaaaagcacaaaggaaaaggcgtcggccacgagtttcagaaagtctctgtggataagtccttcagtcggggttggtcacgcgaccaacctggacaggctcctatgaggcagcgttcagcaacaacgaccggaagccctgggaccgaaaaggccagaagtatagtacgccagaagactgttgctatgcggtctagaagcatcggagagtgtgccctgccctcggcatacatccgatccgctaagtctgcacccgtgttgatccatacctccaaacctttcctgcctgacattgtgctgaccccgctatccgacgaattatctgatattgacgacgcccagattttgccaaggtctacacgcgtcaggcacttctcccagagcgaagagaccggtaacgaggtgttcggcgctctgaatgaagaacagcctctccccaggtccagctctacgtcggacatactggaaccctttacagtggagagagccaaagtgaacaaggaggacatgtcacagaaattacctcccctcaattcagatatcgggggatcttctgcaaatgtgccagacctgatggatgaattcattgccgaacgactgcgctctggaaacgccagtaccatgacacgccgaggatcaagtccgggatccttagaaatacccaaagacttacctgatatcctgaataagcagaatcagatgcgtcccatcgacgatccaggagtgccctccgaatggacaagtcctgccagcgccggaagctctgacctgatcagtagcgatagccattccgacagcttcagcgctttccagtacgacgggaggaagttcgacaattttgggttcggcacggatacaggggtcacatctagcgctgacgtcgattccggctcaggacaccatcagtccgctgaagaacaagaggtagcttcactgactacattacacattgattctgagacaagttccctcaatcaacaggccttcagtgcggaggtagccactataacaggttcggaaagcgctagtcccgttcactcaccactggggtctaggagtcaaaccccctcccctagcacacttaacatcgatcacatggaacaaaaggacctccaactagatgagaagctacatcattcagtactgcagaccccagatgatctggagatctccgagttcccatctgaatgctgtagtgtgatggcagggggtactttgacaggttggcatgctgacgtggccacggtgatgtggagacgcatgctcgggatactgggtgacgtgaatagcataatggacccagagatccatgcacaagtctttgactatttgtgtgaactgtggcaaaatctggctaaaatcagagacaacctcggaatcagcacagacaacctcacttcaccatctccacccgtgttgataccccctctgcgcattcttacaccctggctgttcaaggctacaatgctgactgataagtataaacaggggaaattgcacgcctacaaattgatctgtaatacgatgaagagaaggcaggatgtttccccaaaccgggattttttgacccacttctacaacatcatgcactgcgggttactccatatagaccaggacatcgtaaatacaatcattaagcattgttccccccagtttttttcgctaggactgccaggcgcaactatgctaattatggattttatcgttgcggctggacgcgtagctagttccgcgttcctgaacgcccctagagtggaggctcaagtgcttctgggcagcctggtttgtttcccaaacttgtattgtgagctgcccagtctacaccccaacatcccggatgtcgccgtctcacagttcacggacgtcaaagagctgatcatcaaaacggtacttagtagtgctagggatgagccctccggcccagcgaggtgtgtggcactttgcagcttgggtatttggatctgtgaagaactcgttcatgagtcacaccatccacaaatcaaggaagccctgaacgtcatctgcgtatctttaaaattcactaataagaccgttgcccacgtagcttgcaacatgctacacatgcttgtgcactatgtccctagacttcaaatctatcagccagattccccattgaagatcattcagattctcatagcgacgatcacacacctcctgccaagcactgaggcaagcagctatgaaatggataaacgtctggtggtcagtctgctgttgtgcctcttggattggataatggctctccccctgaagacattactgcaacctttccacgccaccggggctgagagcgataagactgagaagtctgtgcttaactgcatctacaaggttttgcacggatgtgtttacggggctcagtgtttctcgaatcctcgttattttccgatgtcgctatctgacttagcatctgttgactacgaccccttcatgcacctagagtctttgaaagagccagagcctctgcactccccggactctgaacgtagctctaaactgcagcccgttacggaagttaaaacacaaatgcagcatggcctgatcagtatcgcagcaagaacggttataacccacctggtcaaccaccttggccattaccccatgagtggtggtccggcaatgttaacatcgcaggtttgtgagaaccacgacaaccactactctgagagcaccgagctgagccccgagctgttcgagagtcctaatattcaatttttcgttttaaacaataccaccctcgtgtcttgcatccaaataaggtccgaagaaaacatgcccggaggtggcctttcagctggacttgcctccgctaattctaatgtcagaatcattgtaagagacctgtcggggaagtactcatgggatagcgccatcttgtacggacccccaccagtgtccggactttcagaacctacgtcctttatgctgtcactgtcacatcaagagaaacccgaggaaccaccaacttccaacgagtgtctggaggacatcacggtgaaggacggcctgtcactacagtttaagaggtttcgcgagactgtgccaacgtgggacactatccgggacgaagaagatgtgctcgacgagctgctgcaataccttggagtaacatctccagaatgtttacagcggactgggatctccttaaacattcccgctccccagcccgtgtgtatctctgagaaacaggaaaacgatgttatcaatgccatcttaaaacagcacacagaagaaaaagagtttgtcgaaaaacacttcaacgatctaaacatgaaggcagtggaacaggacgagcctattccccagaagcctcaatctgctttctattattgccggttgctgctgtccatactcggtatgaacagctgggataaacggagatcttttcatttgcttaaaaaaaacgagaaacttcttagggagcttcgaaacttggacagccggcagtgccgggaaacacataagatcgcagtgttctatgtggccgaggggcaggaggataaacatagtatcttaaccaacacaggaggttcgcaagcctacgaagactttgttgctggcctgggctgggaggtgaatcttaccaatcactgcggattcatgggagggctacagaagaataagtccaccggactgacaaccccttacttcgccacaagcacagtggaggtgatatttcacgtgtcaactagaatgccctctgactctgatgattcactgaccaagaagctcaggcacttgggaaacgacgaggtgcatatagtgtggagcgagcacacccgggactaccgccgtggaattattcccaccgaattcggtgacgtccttattgtcatctatcctatgaaaaaccatatgttctcaatccaaattatgaagaaacccgaagtgcccttcttcggaccactgttcgacggggcaattgttaacggtaaggtgctgccaatcatggtgcgtgctacagcaatcaacgcctcgagggcccttaagtctctgatcccattgtaccaaaatttttacgaggagcgggctaggtaccttcaaaccatagtgcagcaccaccttgagccaactaccttcgaagacttcgccgcacaggtcttctcccctgctccttaccatcatctaccaagcgatgctgaccatta

SEQ ID NO: 237846 - DNA, 2169 bp, synthetic construct
  misc_feature 1..2169: note = Description of Artificial Sequence: Synthetic coding sequence
  source 1..2169: mol_type = other DNA
cagatcctcattgctacaatcacccatctgctgcctagcacagaggcctcaagctacgaaatggataagagactcgtcgtgtccctgttactgtgcctcctggattggatcatggctcttcccttgaagaccctcttacagccatttcatgcaactggagccgagtcggataaaaccgaaaagtctgtgctaaattgtatttataaggtgctgcacggttgtgtgtacggggctcagtgttttagcaacccaaggtatttcccaatgagtctgtctgacctggcgtctgttgattacgacccatttatgcacttagagagtctcaaagaacctgaacccttgcacagtccagacagtgaaagatccagcaagctccaaccagtgaccgaagtcaagacgcagatgcagcatgggttaatctcgattgccgctcggacggtcatcacccatctggtcaatcacctcggacactatcccatgagcggcggtcctgcaatgctgacctcccaagtttgcgaaaaccacgataatcattactccgagtctaccgagctgagcccagagctgtttgagagcccaaacatacagttctttgtcttgaataacacgactctggtcagctgcatccagatccggtcagaggagaatatgcccggtggtgggttgagtgccggactcgccagtgctaatagtaacgtgaggatcattgtgcgtgacctaagcggaaagtatagctgggattccgctatcctgtatggcccacctccagtgagcgggttatcagaacctacttctttcatgctgtcactgtcgcaccaggagaaaccagaggagccacctacctctaatgaatgcttagaggacatcaccgtgaaagacggtctgagcctccagttcaagaggttccgtgaaacggttccaacttgggacaccattagggatgaagaggatgtcctggatgaactcctacagtacctcggagtcacgtcccctgagtgcctccaaaggactggtatctctctgaacatccctgccccacagccggtgtgtataagcgagaaacaggaaaacgacgtgataaatgcgattcttaaacagcacactgaagagaaagagttcgttgagaagcacttcaatgacctgaatatgaaagcggtggaacaagatgaaccgatccctcagaaaccccagtccgcgttttactactgtcgcttgcttctgagcattcttggcatgaactcgtgggataagcgccgaagcttccatctgctcaagaagaatgaaaagctcttgcgcgaactgcggaacctggactctcggcagtgtcgggagacccataagatcgctgtgttttacgtggcagaagggcaagaggacaagcacagcatcctaacgaacactggcggttctcaggcttatgaagattttgtcgcgggattggggtgggaggtcaacctgacaaatcattgcggattcatgggagggttacagaagaataagtccacaggactaactactccttatttcgctacatcaaccgtcgaggttatttttcacgtatctacccgtatgcccagcgactccgacgactctctgactaaaaagctgagacacctcggcaatgacgaggtccacatagtgtggtccgagcacaccagggattatcggaggggaattataccaaccgaattcggcgatgttctgatcgttatctatcccatgaagaaccatatgttcagcattcaaattatgaagaagcctgaagttccgtttttcggcccacttttcgacggcgcaatcgtgaacggcaaggtgctccccattatggtcagggctacagccatcaacgccagtcgcgcactgaagagcttaatccccctgtatcagaatttctacgaagagcgcgctaggtacctccagacaatcgtccagcatcatctcgagcctactactttcgaggatttcgccgcacaggtgttctcaccagcaccctaccaccacctgcctagtgatgctgtcggatcttatcctgagatcctcccctcagagacgcccacagcaacccaagtcgacggggcagacctggctagcccaatgagccctcgaacatctaagtcacgtatgtccatgaagctgagacgctcctccggaagtgcgaataagtcatag

SEQ ID NO: 237847 - DNA, 2709 bp, synthetic construct
  misc_feature 1..2709: note = Description of Artificial Sequence: Synthetic coding sequence
  source 1..2709: mol_type = other DNA
atggtgcaaaggatgtgggccgaggctgcgggtccagcaggcggtgctgagcctctctttcccggaagtcggcgatcaagatctgtgtgggacgccgtgcggcttgaagttggagtgccagatagctgtcctgttgtgctgcactcattcacacagctagatcccgacctccctcggcctgaatcaagtacccaggaaattggcgaggagttgatcaatggggtgatttattcgataagcctccgtaaggtgcagttgcatcacggcggtaataaaggacaacggtggctgggttacgaaaacgagagtgcactgaacctgtacgaaacttgtaaggtgaggaccgtaaaagccggaacactggaaaaactagtggaacatttggttccagccttccagggcagtgacctctcctatgtgacgatcttcctgtgtacctacagagccttcaccactactcagcaggtgttagaccttctgtttaagagatatggctgtattctgccatactctgacgaagatggaggtcctcaggatcaacttaagaatgctatatcttctatactggggacatggctagatcaatactccgaggatttctgccagccgccagactttccatgcctcaagcagctcgttgcgtacgtgcaacttaatatgcccggatccgacttagagaggagagcacacctgctgctggctcaactggagcatagtgagcccatcgaggccgaacccgaggcgctgtcccctgttcctgcactgaaacctacccccgagctagagttggccctgacaccggcaagagctccatcccctgttccagcccctgcaccggaacccgagcccgcacctacaccagccccagggtcagaactggaggtcgcacctgcccctgctcctgaactgcagcaggcgccagagccagctgtgggactggagtctgcgccagcacccgctctggaactcgaaccagcaccagagcaggaccccgcacccagccagactctagagctcgaacccgctcccgcaccagttccttcgttacaacctagctggccttcccctgtggtggccgaaaatggcctttcagaggagaaaccacatctgttggtttttcctccagacctggtggcagagcagtttactcttatggatgccgagctcttcaaaaaagtcgtcccatatcattgcctgggctccatctggtcccagcgtgataagaaaggtaaagaacatctcgcaccaactataagagctacagttactcagttcaactcagtcgccaactgcgttatcaccacctgcctgggaaatcgctccaccaaggctcctgaccgcgcaagagtggtagaacactggatcgaggttgccagggaatgtaggatccttaaaaacttcagctctctgtacgccatcctgtccgctctgcagtccaattccatccacagactcaagaagacatgggaggacgtgtcccgggattcttttagaatctttcaaaagctgtccgaaatattttctgacgaaaataattattccttaagccgcgaactgttgatcaaagagggcactagcaaattcgcaacccttgagatgaacccaaagagggcacagaagcgaccaaaggagactggtattatccaggggaccgtaccatacctggggacattcttgaccgatctcgttatgctcgacaccgccatgaaggactacctgtacggccgtctgatcaatttcgagaagcgacgaaaagagttcgaggtgatcgcccaaattaaactgctccagagcgcctgtaacaattatagtatcgcccctgacgagcagttcggagcctggttcagggccgtggagagactatccgaaacagagtcttataacctgtcctgtgaactggagccacctagcgagagtgccagcaacacacttcggaccaagaaaaacactgccatagttaagcggtggtctgatcgtcaggcaccctccaccgagcttagcacctccggctctagtcactcaaaatcctgcgatcagctgagatgcggcccttacctctcaagcggggacatcgcggatgctctgtccgtgcatagtgctggatcttccagttcagatgttgaggaaattaacatttcgttcgtaccggaatcccccgacggccaggagaagaaattttgggaaagcgcctcacagagcagcccagagaccagtggcatcagctccgcaagcagcagcacgagttcatccagcgccagcaccaccccagtggccgctaccagaactcacaaacgaagcgtaagcggcttgtgcaacagctcaagcgcacttcccctgtacaatcagcaggtgggggactgctgcattatccgggtctcgctggacgtggacaatggcaacatgtataagtccatactagtgacgtcacaagacaaagcccctgccgtcataaggaaagccatggacaagcacaacctggaagaggaagagcccgaggactacgagttactccagatcctcagcgatgatcggaagctaaagatccccgaaaacgccaatgttttctacgcaatgaatagcacagcgaattacgactttgtcctcaagaagagaacattcaccaagggggtgaaggttaaacacggggcttcctcaacactgccacgcatgaaacagaaagggttaaagattgccaaaggaattttctag

SEQ ID NO: 237848 - DNA, 2745 bp, synthetic construct
  misc_feature 1..2745: note = Description of Artificial Sequence: Synthetic coding sequence
  source 1..2745: mol_type = other DNA
atggtccagaggatgtgggcggaggcggctggccctgctggtggggctgaacccttgttccccggaagcagaagatcacgctctgtgtgggatgccgtgcggctcgaggtaggggtgcccgactcatgtcctgtggtcctccacagctttacacaacttgatccggatctgccgagacccgagtcttctacccaggaaatcggggaagagctgattaacggcgtgatctacagcatatccctgcggaaagtgcagctccatcatggtggaaacaaagggcaaaggtggttaggatatgagaatgaaagcgccctcaacctctatgagacctgcaaagtccgtactgtcaaagcgggaacgctggagaagctggtcgagcacctggtcccagcattccaaggtagtgacctctcctatgtgacaatctttctttgcacttacagggctttcaccacaactcagcaggtgcttgatttactgttcaaaagatacggaaggtgcgatgccttgacggccagtagccggtacgggtgtatactgccttactctgatgaggacggcggaccccaggaccaacttaagaatgccattagttccattcttggtacatggctcgaccaatactctgaggatttttgccagccgcctgattttccatgcttaaagcagctggttgcctacgtgcagctgaacatgcctggttctgacttggaaagaagggcacacttactcttagcacaattagagcattccgaacctatcgaggcggagccagaagcactcagtccagtgccagccctgaagccaacaccagaactggagctggcccttacccctgctcgagcaccctctcctgtgccagccccagcaccagaacctgagcctgctcccacacctgcgcctgggtctgagttagaggttgcaccagctcccgctccagagttgcagcaggctcctgagccagccgtcggattggagtccgcccctgctcctgcgttggagctcgagccggcacctgagcaagacccagctccctcccaaaccctggaattggagcccgcacccgctcctgttccctctcttcagccttcttggccttctccagtggtggccgagaacggcctgagtgaagagaagcctcatttgctggtttttcctcctgaccttgtggcagaacagtttacactgatggacgctgaattgtttaaaaaagtcgttccatatcactgtttaggctcgatctggagccagagagacaagaaaggcaaggaacatctagctcccactattcgtgccacggtgacacaatttaatagcgtcgccaactgcgtcataaccacgtgtctgggaaatagaagtacaaaggctccagaccgggctagagttgtggaacattggatcgaagtcgctagagagtgccgcatccttaaaaattttagcagtctgtacgcgatattatcagcattgcaaagcaactccatccaccgcttaaagaagacatgggaagatgtctccagggacagttttaggatcttccagaagctctcggagatcttcagcgacgagaacaactacagtctctcccgggaacttttgatcaaggaaggtaccagcaagttcgccaccctggagatgaatcctaaacgggctcagaagcgtccaaaagagacagggattatacagggcactgtgccttacctgggcacttttttgaccgatctcgttatgctagatacagccatgaaagactacctttacggcagactcattaattttgaaaagcggaggaaggagttcgaagttattgcacagattaaactgctgcagtccgcatgtaacaactattcgatagcaccagatgaacaatttggggcttggtttagagcagttgaaaggctgagcgagaccgaaagttataacctgagctgcgaattggagccaccatcagagagtgcctcaaacactttacgcacaaagaagaacacggcaatcgtcaagcggtggtcagacagacaggccccaagcactgagctgtcaacttccggatcatctcattcaaagtcatgcgatcagctcagatgtggcccatacctgagctcaggagacatcgccgacgctttgtcagtgcatagcgcgggatcaagcagcagtgatgtcgaagagataaacatcagctttgtacccgaatcacccgacgggcaagagaagaaattttgggaaagtgcatcacaatctagccccgaaacttcggggatctcatcagcatcgtcctccacaagttcatcatccgcctctacaactcctgtcgcagccacaaggacacataaacggagtgtctctggcctgtgcaactctagttccgcactcccactctacaaccagcaggtcggcgattgttgtattatcagggtgtccctagatgtcgataatggtaatatgtacaagtcgatcctcgtcacgtcacaggacaaagcaccagccgtgattagaaaggcgatggataaacataacctggaagaggaagaacctgaggactatgagctgctccaaattttgagtgatgacagaaagttgaaaataccagaaaacgcgaatgtcttttatgccatgaattctactgcgaattatgactttgtgctcaaaaagagaacctttactaagggagtcaaagtgaagcacggggctagcagtaccttaccacgaatgaagcaaaagggcctcaaaatcgcgaaaggcattttttag

SEQ ID NO: 237849 - DNA, 1341 bp, synthetic construct
  misc_feature 1..1341: note = Description of Artificial Sequence: Synthetic coding sequence
  source 1..1341: mol_type = other DNA
atgcccggaagcgacctcgaacgcagggcccatctgctgttggcacagctggagcactccgaacccatagaggctgagcctgaggcacttagccccgtccctgccctaaaaccgactccagaattagagctggccctgaccccggctcgtgcaccgtcccccgtaccagcccctgcacctgagcccgagccagcccctacaccggcacccggttctgagctggaggtcgctcctgcccctgcccctgaattgcagcaggcccctgaacctgcggtgggcctggagagcgcaccagccccagcactggagctggagcccgcacccgagcaagacccagctccatctcaaactctcgagctggagcctgccccagccccagtgccttctcttcagccctcatggccaagcccagtggtggccgagaatggcctatctgaagaaaaaccacacctgctggtcttcccgcctgacctggttgctgagcagtttaccctgatggacgccgagtgcaggattttaaagaactttagcagtctgtatgcaatactgtcagccttacagtcaaacagcattcacagactcaaaaagacttgggaggatgtttctcgcgactcctttcggatttttcagaagctgtccgagatcttctcagacgaaaacaattattctctttctcgggagctgcttattaaggagggcacgagtaaattcgcaactctggagatgaaccctaaacgagcacagaagcgacccaaggagacaggcataattcagggcaccgttccctatttgggcacgtttctcaccgatctcgtgatgctggataccgcaatgaaagactatctctacggcagactaatcaattttgagaaaaggcgtaaggagttcgaagtgatcgcacagattaagctacttcaatcagcatgtaataattacagcattgctccggatgagcagtttggagcctggttcagggctgttgaaaggctgagcgaaaccgagtcctacaacctaagctgtgagttggaacctccctccgaaagcgcatccaatacccttagaacaaagaagaacacagctatcgttaagcgatggagtgatagacaggccccatcgaccgagctgagcacatccgggtcatctcactcaaaaagctgcgatcagcttcggtgtggaccctacctgtcctccggcgacattgcagatgcgctgagtgtacactccgctggatctagctccagcgacgtcgaagaaataaacattagcttcgttcctgagtctccagatggccaggaaaaaaagttctgggaatccgcatcccaaagctcccccgagacatag

SEQ ID NO: 237850 - DNA, 2658 bp, synthetic construct
  misc_feature 1..2658: note = Description of Artificial Sequence: Synthetic coding sequence
  source 1..2658: mol_type = other DNA
atgtgcttgtggggtcactcaaccgcacccgctcacacactgtcttctcctcctctcctgttctgttccttaccatgcgctctgcatcttcaacccggaactggacaccctcccggtcaggtgccaagaaaaagcagcacccaggagattggggaagagctaataaacggggttatatactcaatcagcctacggaaagtgcagctgcaccatggcggtaacaaggggcagcgttggctgggctatgagaatgagtcagcactcaatttgtatgagacctgcaaagtaagaacagtgaaagccggaacgttggagaaactcgtcgagcaccttgtgcctgccttccagggctccgacctgagttacgtgacaatcttcctgtgtacctatcgtgcgtttaccaccacgcagcaggtgctggatctgctatttaagaggtatggctgtatccttccttacagcgacgaagacggtggacctcaggatcagctcaaaaacgccatttcttcaattttgggtacttggcttgatcaatacagcgaagacttctgccagcccccagacttcccctgcctcaagcagctggtcgcctacgttcagttaaatatgcccggatcagatctggagaggcgagcccaccttctgctcgcccagctggagcactcagagccaattgaagccgaacccgaagcattgagccccgtgcccgcactgaaacctacccctgagctggagctggcactcactcctgcacgtgccccatcaccagtccctgctcccgctccggaacccgagccagcgcctacgcccgcacccggatccgaattggaggtagccccagcgcctgcccctgaactccaacaagcacccgaacctgctgtcggactcgagagcgctcctgctcctgcgctggagttggagcctgccccagaacaagatcctgctccttctcaaactctggagctggaacctgctcccgctcccgtgccaagtctacaacctagctggccctccccagttgtggccgaaaacggcctcagtgaagaaaaaccccacctgctcgtctttccccctgatctggttgcggaacagttcaccttaatggacgcagaactttttaagaaggtggtcccgtaccattgtcttgggtcgatctggtctcagcgcgataagaaaggcaaggaacacctggccccaacaattcgtgccacagttacccagttcaactcagtcgctaattgtgtaattaccacttgcctaggcaatcgaagcacgaaagcacctgatagggcccgagttgttgagcattggatagaggtagctagggagtgtcgcatcctgaaaaacttctctagcctttacgccattctgtcagccctccagagcaactccatccacaggttgaagaaaacatgggaggacgtgagccgcgactcgttccgtatttttcaaaagctaagtgagatcttctccgatgagaataactattccctttcccgcgagctgctcatcaaagaaggaacctcaaaatttgccacgctcgagatgaacccaaagagagcccagaagagacccaaggagactgggatcatccagggaaccgtcccatacctgggcacttttctgactgatctcgtgatgctggacacagctatgaaggattatctttatgggagactgattaacttcgagaaacggagaaaagaattcgaagttatcgcacagattaaactactgcagtcagcgtgcaataattacagcattgcacccgacgaacaattcggcgcatggttccgggcagttgagagattgagcgaaaccgaatcttacaatctctcatgtgaattggagcctccttcggagtccgcgtctaacacactgcgcacaaaaaaaaatactgccatagttaagcggtggtctgacagacaggccccaagcactgaactctctacctccggttcttctcactctaagagctgtgatcagttaagatgtggcccttatctctcatcaggcgacatcgctgacgctctctcagtgcactctgctggctcatcctctagcgatgttgaagaaatcaacatctctttcgtgcctgaaagcccagacggtcaggaaaagaaattctgggaaagcgcttctcaatcctctccagagacatccggcatctcgtccgcgagttcaagcaccagctccagcagtgcttctacgactccagttgctgccacaagaactcacaaacgaagcgttagcggactgtgtaactccagtagcgctttgcctctgtataatcagcaggtaggggactgttgtattataagggtcagcctggatgtagacaacggtaacatgtacaagtctattctcgttacaagtcaagacaaggcaccagctgtgatccggaaagcgatggataagcacaatctggaggaggaggaacctgaggattacgaactgttacagattctctccgatgacaggaagcttaaaatccctgaaaacgcgaatgtgttttatgcaatgaatagtaccgctaattacgacttcgtgctcaaaaaacgaacttttaccaagggggtaaaggtcaaacatggcgcatccagtactctccccaggatgaagcagaaaggcttaaagatcgccaagggtatattctag

SEQ ID NO: 237851 - DNA, 2742 bp, synthetic construct
  misc_feature 1..2742: note = Description of Artificial Sequence: Synthetic coding sequence
  source 1..2742: mol_type = other DNA
atggcacgcgaagctgggcaagtttgcgcacgccctgctgtgcccagaggccgaaagggctccgtgttttttgcctgtgtcagcgtggtcaccgcccgtaggagagctgtggctcgcagagcagcactccagtctcccactccctggctggcaccattacccgcacccgctactacagaatcctccacacaggaaataggtgaagaactgatcaacggcgtcatctatagtatctcgttacgtaaggtgcaactccatcatgggggtaacaaaggtcagcgctggttgggttacgaaaatgagtctgccttgaacttatacgagacctgcaaagtgagaactgtgaaggcaggcacactcgaaaaactggtggaacacctggtaccagcgttccagggaagcgacctctcttatgtcactattttcctgtgcacttatcgcgcatttacaaccacccagcaggtgctagacctcttgtttaagagatacggacgttgtgacgctttaacagcctcatctcggtacggctgcatactgccttattcagacgaggacggagggcctcaggaccagctcaagaacgctatctcttccattctgggcacatggctggatcagtattcagaggacttctgtcagcccccagattttccatgcctcaagcagttagtggcctacgtgcagttgaacatgcctggttctgaccttgaacgcagagctcatctgctgctcgcccagttggagcattccgagcccatcgaagcagaacccgaagccctttcccctgtacctgcactcaaacccactcccgagttggaactcgccctgacccccgcaagagcccctagcccggtgcctgcccctgcccctgagcctgagcctgctccaacgccagctcccggaagtgagctagaggtggcccctgcccctgccccagagctgcaacaagccccagaacctgccgtcggattagagagcgctcctgcacctgctttggagctcgaaccggctccggagcaggatcccgcaccatcgcagaccctggagctggagcccgcacccgctcccgtgccctcactgcagccgagctggccctcccctgtggtggccgagaacggccttagtgaagagaagcctcatctgctggtgttccctcccgatctggtggccgagcagtttaccctaatggacgcagagttgtttaaaaaagtagttccataccattgcctgggatctatatggtctcagcgcgacaagaagggcaaggaacatctcgcacctactatccgcgcaacagtcacccaattcaattctgtggccaattgcgtgatcacaacctgcctgggcaatcgcagtactaaagccccagatcgagcgagggtagtggagcactggattgaagttgcaagggaatgccgcattctgaagaatttctcatcactatatgccatcctgtctgccttgcaaagcaatagtatccaccgactgaagaagacttgggaagatgtctcccgcgacagttttaggattttccagaagttgagtgagatcttttctgatgagaataactactccctgagcagagaattactgattaaggaggggacttctaagttcgcaacactcgaaatgaacccaaagcgtgcacagaagcgccctaaagagactggcatcattcagggcaccgtgccttatctgggaacttttttaaccgaccttgtgatgcttgacacagctatgaaagactatctctacgggaggctcatcaatttcgagaagaggcgaaaagagtttgaggtgattgcccaaatcaaactattacagtctgcctgtaacaattacagcatcgccccagacgagcagtttggcgcttggtttcgagctgttgagaggctttcagaaaccgagtcatataatctcagttgtgaattggagccaccttccgaatccgcgtcgaacacactgagaactaagaaaaacacagccatagtgaaacgatggtccgataggcaggctccttccacagaactgtccacctctggatcatcacacagtaagtcatgtgaccagttgcgatgcggcccttatctaagctcaggcgacatcgcagacgccctatccgtgcactcagcaggcagcagttcatccgatgtggaggaaattaacatctctttcgtgccagaatccccagacggacaagaaaaaaagttttgggaatcagcatcccaatccagtccagagacaagcgggatcagtagcgcgtcttcttctacatcctcatcgagtgcctccacgacaccggtggctgctacccggacccacaagagatcagtgagcggtctgtgtaatagtagttcagccctgccattatacaatcaacaagtgggcgattgctgtataatccgcgtaagtttggacgtcgataatgggaatatgtacaaaagcatcctggtaactagtcaagacaaagcgccagccgtcatacggaaagccatggacaaacataacttggaagaggaagaaccagaggactacgagcttctccagatcttatcagatgaccgtaaactgaaaattcccgaaaacgcaaacgtcttctacgccatgaactccactgccaattacgattttgtgctgaaaaaacggacttttaccaaaggagtcaaagtcaaacacggagcctcaagtacactgcctaggatgaagcagaaaggtcttaagattgccaaaggtatattctag

SEQ ID NO: 237852 - DNA, 2580 bp, synthetic construct
  misc_feature 1..2580: note = Description of Artificial Sequence: Synthetic coding sequence
  source 1..2580: mol_type = other DNA
atgatggtcgactgccaaagttccacacaggagataggggaggagttaattaatggggtcatatacagtattagccttcggaaggtccaactccaccacggcggaaacaagggccaaaggtggctgggctacgagaatgagagcgcattgaatttgtacgagacatgtaaagtgcgcaccgttaaggctgggacgctggaaaagctggtcgaacatcttgtccctgcttttcaagggtccgacctgtcttacgtgacaatattcctttgcacttatagggccttcaccacgacacagcaagtgctggatctgctatttaaacggtatggacgctgcgatgcactcactgcttcttcacgctacgggtgcatcctgccttactcagacgaagacgggggacctcaggatcagcttaagaatgcaatatcatcaatcttgggcacctggctggatcagtactccgaggacttctgtcagccacccgactttccctgcctgaagcagcttgtggcatacgtgcagttaaatatgcccggaagtgacctcgagcgaagagctcatttgctgttagcacagctcgagcattcagagcctatcgaggctgaacccgaagcactctctcccgtacctgccctgaagcctactcccgagctcgaacttgcccttactcccgctagggccccttcacccgtcccggcacccgctcccgagcctgagcccgcacccaccccggcacccggtagcgaacttgaagtggcacccgcacccgcacctgagctgcagcaggctccggaacccgctgtcggcttggagagtgcacccgctccagccctggagctcgagccagctcccgagcaggatcctgctccctctcagactttagagttagagcccgctccagctcccgtgccctcccttcaacctagttggcctagtcccgtggtggctgaaaacggactcagcgaagaaaagccccatctcctcgtttttcctccagacctggtggcagaacagtttacgctgatggacgcagagctatttaagaaggtggtcccttatcactgcctgggtagcatttggagccagcgcgacaaaaagggcaaggaacacctggccccaaccatacgggcaacggtcacccagtttaatagtgtggccaactgcgtgatcaccacttgcctggggaatagatccactaaagcacctgaccgagcaagggtggttgagcactggatcgaggtggcccgagaatgcagaattttgaagaacttttccagcctctacgccatcctaagcgcgttacaaagcaatagtatccatcgtttgaaaaagacctgggaagatgtttcccgggactcctttcggattttccagaagctgagtgagattttcagtgacgagaacaattatagtctatcccgcgagctgttaatcaaagaggggacaagtaaattcgccaccctggagatgaacccaaaacgcgcacagaaacggccaaaagagaccggcatcatccaaggcaccgtgccatacctgggtacattcctgactgacctggtgatgctggatacagccatgaaagattacctgtatggaagattgatcaacttcgaaaaaagaaggaaggagttcgaagtaatagctcaaattaagcttctgcagagtgcctgcaataactactctatcgcaccagacgaacaatttggagcatggtttagagcggttgagcggttatctgaaactgagtcctataatctctcatgtgagttagaacctccctcagagtctgcatcaaacacgttgcgcactaagaagaacaccgccatcgtgaaacgatggtccgatagacaggcaccctcaaccgaactgagcacatcaggttcctcccactctaagtcttgtgaccagctgagatgcgggccttacctctccagcggagatattgcggacgctctgtctgtgcacagcgccggatcgtcatcatctgacgtggaagagatcaacatcagtttcgttccagaatcacctgatggccaggaaaaaaagttctgggaatcagcatcacagtcttcgcctgaaacaagtggtatatctagcgcatcttcctccacctctagctcctccgctagtacaactccagtcgcagccacaaggacacacaagcggtccgttagtggcctgtgcaacagctcttctgctctcccactatataaccaacaagtaggtgactgttgtatcattcgagtcagcctggacgtcgacaacggaaacatgtacaaaagcattttggtcacaagtcaagataaggcaccagccgtgatcaggaaggctatggacaaacataaccttgaagaagaagaacccgaagattatgagcttctgcagattctgagcgatgaccgtaagcttaagatcccagaaaacgctaacgtgttctacgctatgaatagcactgcgaactacgattttgtcctaaaaaagcggacattcactaagggcgtgaaggtgaagcacggtgcatcttccacactgcccaggatgaagcaaaagggcttaaaaatagccaagggaatattctag

SEQ ID NO: 237853 - DNA, 930 bp, synthetic construct
  misc_feature 1..930: note = Description of Artificial Sequence: Synthetic coding sequence
  source 1..930: mol_type = other DNA
gtcgttgcagaaaacggtctgtcagaggagaaacctcacctactggtgttcccacctgacctagtggccgaacaatttacattgatggatgctgagtgcaggatcctgaagaatttcagcagcctgtatgcgattctgagcgctctgcagtccaatagtatccataggcttaagaagacctgggaggatgtgtcccgggactcattcagaatctttcaaaagttaagcgagattttctccgatgagaataactacagcttgagccgggaacttcttatcaaggaaggaactagcaaattcgcaaccctggagatgaacccgaagcgtgcgcagaaacgcccaaaggagacgggtattattcaggggaccgtgccatatctcggcaccttccttactgatctcgtgatgctcgatacggcaatgaaagactatttgtatggccgactcattaacttcgaaaagagacgcaaagagttcgaggtcatcgctcagattaaactgttacagtctgcgtgtaacaactactcaatcgccccagacgagcagtttggagcctggtttcgggcagtcgagaggctgagcgaaactgaaagttataacctgagctgtgagttggagccccctagcgagagcgcatccaacactctgcgaaccaagaagaacacggcgatcgtgaagagatggtctgaccggcaggccccatcgactgaactgtcaacctccgggtcttcccacagcaagtcttgcgatcagctgagatgtgggccttacctctcgtccggcgatatcgcagatgctctatcggtccacagcgcgggatccagttcaagcgacgtcgaagagatcaatatctctttcgtgcccgagtcccccgatgggcaggagaagaaattttgggaatccgcctctcagtcctccccagagacatag

SEQ ID NO: 237854 - DNA, 2958 bp, synthetic construct
  misc_feature 1..2958: note = Description of Artificial Sequence: Synthetic coding sequence
  source 1..2958: mol_type = other DNA
atgcaccgtcgcaggctggcactcgggcttggcttctgtctgctcgctggcacatccctgtcagtgttgtgggtgtacctggaaaactggcttcctgtgtcctatgtgccgtattatctcccctgtcctgagatcctcccaatgatgatggccttgtcttgtttatgtcatcagcaacacgaggccgctctgcaggaaggagaggccacccccgcaagaggaatggtgactgtgccaagtgcacaggcagcaggcgcacaagctcatactgctgcagacacacacactctcgtgggagctcacaggctcaggggtaatctacagccgagggccagtgccgctcacctgcccgctaccgagcccgatcattggggacatggcgtgtgccggggagagagctctactcaagaaatcggcgaggagctcattaacggtgtgatctatagcattagcctgaggaaagtccagctccaccacggaggaaacaagggccagagatggttaggctatgagaatgaatccgccttaaatctgtacgaaacatgcaaggtccgaacggtgaaagccggtacactcgaaaagctcgtcgagcacctagtgcccgcattccaggggagcgacctaagctatgttaccatctttttgtgcacttatcgggctttcacaaccacccagcaggtgctggatcttctttttaaaaggtatggtcgatgcgatgccttgacagcatctagtagatatggctgtattttgccatatagtgatgaagatggcggtccacaggaccagctgaaaaatgctatatcttcaattcttggcacttggctggaccaatatagcgaggacttttgccaaccgcctgactttccttgtctgaagcaactggtggcctatgttcagctcaacatgcctggcagcgatctagaaaggcgggcacatcttctgttagcacagcttgaacactccgagccaattgaggccgaaccagaagcattaagtcccgtccccgctcttaaacccactccagagctggagttagctctgacacccgctagggctccatctcctgtgcctgcgcctgctcccgagcccgagccggctccgacacccgcacccggatctgaactcgaagtcgcaccagctcctgcgcctgagttacagcaggccccagagcccgcagttggcctggaaagtgcccctgcgccagccctagagctcgagccagcccctgagcaggatccagccccatctcagaccctcgagttggaaccagctccagcaccagttccttccctgcagccaagctggccctcaccagtagtggctgagaacggactcagcgaggaaaaaccgcacctgctggttttccctcctgatctggtggccgaacagttcactctgatggatgccgaactgttcaagaaggttgtcccttatcattgtctcggctctatctggtcgcagagggacaaaaaaggcaaggagcacctcgccccaactatcagggcaacagtgacccagtttaattccgtggcaaactgtgtgattacaacgtgtctaggaaatcgcagcactaaggcacccgaccgggctagggtggtcgagcactggatcgaggttgcacgcgagtgccgaatattgaaaaacttctcatcgttgtacgccatcctcagtgcccttcagagcaattccatacacagattaaagaaaacatgggaggacgtaagccgcgacagctttcgaatattccagaaattgtctgagatcttctcagatgaaaataattacagcctgtctcgggagctcttgatcaaggaagggacaagtaagtttgcgactctggaaatgaatcctaagcgtgcgcagaaacgccctaaagagacgggcattatacagggtactgtaccctatctgggaacgtttcttaccgatttggtaatgctggatacagcaatgaaggattacctctacgggaggctgataaatttcgagaaaagacgcaaagaattcgaagtaatagcgcagataaagctgcttcagagtgcctgtaacaactattcaattgctcccgatgagcagtttggggcttggttcagggccgttgaacggttatccgaaactgaaagctacaatctttcgtgcgagcttgagccaccctccgagtcagcgtccaatacccttaggacgaaaaaaaacaccgccattgtgaaaaggtggtctgacagacaagcgccatccacagagttatccacttcaggatcgagccactccaagagctgtgaccaattgagatgcggcccatacctgtcttcgggtgacattgccgacgctctgagcgtgcactctgcaggctcatcgagcagtgacgtcgaggagatcaacatatccttcgtacctgagagcccagacggacaggagaagaagttttgggaatccgcttcgcaaagcagccctgaaacatctggaatttcatccgcaagttccagcactagtagttcctctgcctccaccacacccgtggctgccactagaactcataagagatctgtgtccggactgtgtaacagcagctcagctctgcctctctataaccaacaagttggagattgctgtatcatccgcgtgtctttagacgtagataacggaaacatgtacaaatccatccttgttacttcccaggataaggcccctgctgtgatccgaaaagccatggacaaacacaatttagaggaggaagagccggaggattacgagctactgcagatcctctcagacgacaggaagcttaaaatacctgagaacgccaacgtgttttatgcgatgaactcaaccgcaaactatgatttcgtgctgaaaaaaagaaccttcacgaagggagtaaaagtaaagcatggcgcttctagcaccctccctcgaatgaagcaaaaaggactgaagatcgctaaaggcatattctag

SEQ ID NO: 237855 - DNA, 2412 bp, synthetic construct
  misc_feature 1..2412: note = Description of Artificial Sequence: Synthetic coding sequence
  source 1..2412: mol_type = other DNA
atggaggttaaaccagtgggggagccaacccaggaggtcagtaagttcaaattgagcacaaaggtggagtctacgggtcactggctggtggaggatcatgtgcgaatctgggaagtgctgaaaaccgaggagagctcaatccaggattggggtgaggaagtagaggagggggctgtgtaccacgtaacccttaagagggttcagatccagcaggcagccaacaagggggctcgatggttgggggtggaaggagatcagctcccacccggacacactgtgtcacagtatgagacctgtaaaattaggacgatcaaggccggtaccttagaaaagctggtggagaatctcttaacagcctttggggacaatgattttacatatatttccatttttctgtccacctatagaggattcgccagcacgaaagaagtgctagaactgctcttagatcgatacggaaacctgactagtcctaattgtgaagaagacgggagtcagagctccagcgaatctaaaatggtcatccgtaatgcaatcgcctccatattgcgagcctggttagatcagtgtgccgaggatttccgtgagccaccgcactttccatgtttgcaaaaattgctcgactacctgaccagaatgatgcctggcagtgatccagagagacgggctcagaacctgttggagcagtttcagaaacaagaggtggagactgacaacgggcttcctaacactataagcttctccttggaagaggaggaggagctcgagggcggagaatctgccgagttcacatgtttttccgaggatttagtagcggagcagttgacttatatggacgcccaattatttaaaaaagtcgtcccacaccactgtctggggtgtatttggagtcggcgagataaaaaggagaacaaacacctggcccctacaatcagagccacaatctctcagttcaacactttaactaagtgcgttgtcagcacaatactcggcggtaaggagctcaagacacagcagagagctaagattatagagaagtggatcaacatcgcgcacgaatgtcggctgctcaagaactttagttctctgagggctatagtgagcgctctgcagtccaacagcatttaccggcttaagaagacatgggctgccgtgcctcgcgaccgcatgctgatgttcgaggagttaagcgacattttctctgatcacaacaaccatcttacatcccgggaactgcttatgaaagaaggcacaagtaagtttgctaatctcgattccagtgtgaaagaaaaccagaaaaggacacagaggaggttgcaattgcaaaaggacatgggagtcatgcagggcacggtgccatacttgggaacttttttgacagatttgacgatgctcgacacggcactgcaggactatatcgaagggggacttatcaattttgagaagcggcgaagggaattcgaggtcatcgcccagattaaattacttcaatcagcatgcaatagctactgtatgaccccagaccagaaattcattcagtggtttcagcgtcaacaattgttaaccgaggaagagagctacgccctctcttgcgagatagaggccgctgctgatgcctctaccacgtctcccaaacctaggaagagtatggtcaaacgcctgagtttgctctttctgggtagcgacatgatcacctcccccaccccgaccaaggagcagcccaagtctaccgctagcggatcatcaggcgagagcatggactccgtatccgttagctcttgtgagtcaaaccattccgaggcggaagaaggttcgatcacccccatggatactccggatgagcctcagaaaaagctgtctgaatcctcctcatcgtgtagttctatccattcaatggatacaaacagtagtggaatgagcagcctgataaatcccctctcctcacctccctcttgtaacaataaccctaaaatccataaaaggtctgtttctgttaccagtatcactagcaccgtgctgcctccagtatacaatcaacagaatgaagatacatgcatcattagaatttctgtggaggacaacaatgggaatatgtacaaatcaatcatgctcacatcacaggataagacccccgcagtgatacagagagccatgctaaaacacaatctcgattcagatcctgcagaggaatatgaactggttcaggttatctctgaggacaaggaactggtgatccctgacagcgcgaacgtgttttatgcaatgaattcccaggtcaactttgatttcatactgcgtaagaagaattccatggaggagcaggttaaactccgctcccgcactagccttaccctgcctcgcacagccaaaaggggctgttggtccaatcggcactcaaagataaccctctag

SEQ ID NO: 237856 - DNA, 2307 bp, synthetic construct
  misc_feature 1..2307: note = Description of Artificial Sequence: Synthetic coding sequence
  source 1..2307: mol_type = other DNA
atgaagttattgtggcaggctaagatgtccagcatccaggactggggcgaagaggtagaagagggagctgtgtatcatgtgaccctcaaacgggtacagatccaacaagcagctaacaaaggagcacgctggctgggcgttgaaggtgaccagctgcctcccggacacaccgtgagccagtacgagacatgtaaaattcgcaccatcaaggccggaacgctggaaaaacttgtcgaaaacttgctgaccgcttttggtgacaacgattttacgtacatcagcatcttcctcagtacttataggggatttgcaagcacaaaagaagtactggagctcctgttggatcgctacggcaacctcacaagtcctaattgtgaggaggatggatcacagtcatcttccgagtcgaagatggttattaggaacgctattgcttctattctgagagcttggctggaccagtgcgccgaggactttagagagccgccacattttccttgccttcagaagctactggactacctgactagaatgatgccaggctcggaccctgagcgaagggcacagaatcttctcgagcagtttcagaaacaagaagtggaaacagataatggcctgccaaatacaatctcattctctttggaggaagaggaggagctagagggcggtgagagtgcggaattcacctgtttctccgaagatttggtcgcagagcagcttacctacatggacgcgcagttgttcaagaaagtggtgcctcaccattgcctgggctgtatctggtctcggagagacaaaaaagaaaacaagcacttggctccgactattcgggcaaccataagtcaattcaacactctcacaaaatgcgtcgttagtacaatacttggcggtaaagagctaaaaacccaacagcgggcaaagattatcgaaaagtggattaatatcgcccacgaatgtaggctgctcaagaatttttcttcgctgcgcgctatcgtatccgccctccagtccaatagcatctataggctgaagaagacctgggccgcagtgccccgagacaggatgttgatgttcgaggagctgagcgacatcttcagtgaccacaacaatcatctgacttctcgggagctgctgatgaaagaaggcacatcgaagtttgctaacctggactcatctgtgaaggaaaatcagaaaaggacccagcgcaggctgcagttacagaaggatatgggagtgatgcaagggactgtgccttacctcgggacctttttgaccgatcttaccatgctggacactgcactgcaggattacattgagggcggactaattaatttcgagaagcggaggagggagttcgaagtcatagctcagataaagctgctccagagcgcttgcaacagctactgtatgactcccgaccagaaattcatccaatggttccaaagacaacagttactcaccgaagaggaaagttatgccctgagctgcgaaatagaggccgctgccgacgcctcaactacctcccctaagcccagaaaaagtatggttaaacgcctgtcgttactgttcctgggatctgacatgatcacgtccccaacccctaccaaggagcagcctaagagcaccgccagtggctctagcggcgagtcaatggactctgtgtcagtcagttcttgcgagagtaatcacagcgaggccgaggagggttctatcactcccatggacacgcctgacgagccacagaaaaaattgtctgagtcatcaagcagttgctcttcaatccactctatggatacaaactccagcggtatgtcttcccttatcaaccccctgtctagccctccctcatgcaacaataatcctaagatccacaaacgaagtgttagcgtcacatcgattacatccactgtgctcccccctgtgtataaccagcagaatgaagacacatgcatcattcggatctcggtggaggacaacaacgggaacatgtataagagcatcatgctgaccagtcaggacaagactccagccgtgatccaaagagctatgctaaagcacaacttagactcagatccagcagaggaatacgagttagtacaggtgattagtgaggacaaggaactggtcatccccgatagcgctaacgtgttttacgcaatgaactcccaagttaatttcgatttcatcctgcggaagaaaaattccatggaggagcaggtcaaattgagaagccgcacaagccttaccctgcctaggacggccaaaaggggctgctggagcaatcggcactcaaaaattactttgtag

SEQ ID NO: 237857 - DNA, 2412 bp, synthetic construct
  misc_feature 1..2412: note = Description of Artificial Sequence: Synthetic coding sequence
  source 1..2412: mol_type = other DNA
atggaggtgaaaccagtgggcgaaccaacccaggaggtgtcgaagtttaaactaagcacaaaggtggaatccacagggcactggctcgtagaagaccatgtgcgcatttgggaggtgctgaagaccgaggaaagttctatccaggactggggggaggaagtggaagagggcgcagtgtatcatgtgaccttaaaaagagtccagatccaacaagctgctaacaaaggcgctcgctggctgggcgtcgaaggcgatcaactgccacccggacacacagtcagtcaatatgaaacatgtaaaatccggacgattaaagctggcaccctcgagaagctggtggaaaacctactgacagcattcggtgacaatgacttcacatacatcagtatcttcctcagtacctaccggggattcgcgagtacgaaagaagtgctcgagttacttctggatcgatacgggaatctgaccagcccaaattgtgaggaggacggctcccagtcttcttccgagtccaaaatggtgatacgtaacgccatagcctctatcctaagagcctggcttgaccaatgcgctgaagattttagagagccccctcactttccttgcctccagaaactgttagattaccttaccaggatgatgcccggaagtgatcctgaaaggagggcacaaaatctgctcgaacagtttcaaaagcaggaagtggaaacagataacggactgcctaatactatcagctttagtttggaagaagaggaagagctggaaggaggtgaatcagccgaatttacttgtttcagtgaagatctggtggcagaacagttgacctacatggacgcgcagctttttaagaaggtcgtgccacaccattgcttaggctgcatctggagcagacgcgacaagaaggaaaacaagcatctggccccaaccatccgcgctactatctcacagttcaataccctcacaaagtgtgtggtgtccactattctgggaggtaaggaactgaaaacacaacagagagccaagatcattgagaaatggattaacatagctcacgaatgccgcctcctgaagaatttctcttcactccgcgcaatcgtgtccgcactgcaaagtaattccatttaccggctgaaaaaaacgtgggccgctgtcccccgagacagaatgctgatgtttgaggaactctctgacatcttcagcgaccataataaccacctaacatcacgtgagctgctcatgaaggagggaacctcgaagtttgccaaccttgacagctctgtgaaggagaatcaaaagcggacgcagaggcgccttcagctccagaaagacatgggcgtcatgcagggcacagtgccgtatctcggcacattcctgaccgatttgacaatgcttgacaccgcactgcaggattacatcgagggcggactgattaatttcgagaaaagacgtcgcgagtttgaagttatcgctcagattaagctcctgcagtcagcctgtaactcttattgtatgactcccgatcagaaatttatccaatggttccaaagacagcagctcttaacagaggaggaatcatacgccctcagctgcgaaattgaggccgcagcagacgcttcaacaacatctcctaagcctcggaagagtatggttaaaaggctttcactgctattcctgggctctgatatgatcactagcccaactcctaccaaggagcagcctaagagcactgcttccggctcttccggtgagtctatggacagtgtgtccgtttcatcctgtgagtctaatcattccgaggctgaagagggctctatcacacccatggacacacctgacgagccacagaaaaaactgtccgaatcctcttcctcctgttcatctatccatagtatggacacaaatagctccggcatgagttccctgataaatccactcagctcacctccctcatgcaacaacaaccccaagattcacaagcgctctgtgagtgtgaccagtattacctctaccgtgcttccccctgtatataatcagcagaacgaagacacgtgtataattaggatctccgtggaggataacaatggcaatatgtataagagcattatgctgacgtctcaagacaagactccagccgtcattcagagagctatgcttaaacacaacctggatagtgatcccgcagaggagtacgagttggtgcaggttatctctgaggacaaagagctggttattcccgatagcgctaacgtattttacgccatgaactcccaggtgaatttcgattttatccttcgtaagaagaattcgatggaggaacaggtgaagttgcggtctcgcaccagtctgacactgccaaggacagccaagagaggctgttggtccaacaggcattccaagatcaccctgtag

SEQ ID NO: 237858 - DNA, 2301 bp, synthetic construct
  misc_feature 1..2301: note = Description of Artificial Sequence: Synthetic coding sequence
  source 1..2301: mol_type = other DNA
atggaggtaaagcctgtcggagagcctacccaggaggttagcaagtttaaactcagcacaaaagtcgagtccacagggcattggctggttgaagatcacgtgcggatctgggaggttctgaaaacagaagaagtcgagggcgaccagctacctccagggcacacagtctctcaatacgagacttgcaaaatccgcaccatcaaagcgggaactctggagaaactggtagaaaacctgctgacggcctttggagacaatgatttcacttatatctctatctttttgtcaacctaccgcggattcgcgagcaccaaggaggtgctggagctgcttctggacaggtacggcaatctaaccagcccaaattgcgaggaggacggttctcagagtagttcggagtcgaagatggttattaggaatgccattgcctcaatcctgcgtgcatggctggaccagtgcgccgaggacttcagggaaccacctcatttcccttgtctgcagaaactgctggattacttgaccaggatgatgcccggatccgatcccgaaaggagagcacagaatctcctggagcagtttcagaagcaggaggtcgagactgataacggccttccgaacacaattagcttttctttggaggaagaggaggaattagagggcggagagtcagccgagtttacatgttttagtgaggacctggtagcagagcagctgacatacatggatgcgcagctgttcaagaaggtggttccccaccactgtctggggtgcatctggtctaggagggacaagaaagaaaataagcacctggcaccaacaatacgagcaactatctcccagttcaatactcttactaaatgcgttgtgtcgacaatcttgggcggtaaagaacttaagactcagcagcgagcgaagataatcgagaaatggattaatattgcacacgagtgccgactgttaaaaaacttcagctccctgagggcaatcgtgtcagcgctgcagtctaactcaatctaccgcctcaaaaaaacatgggctgcagtgcctcgagacagaatgctgatgttcgaagaactgagtgatattttctccgatcacaacaaccatcttacttccagagaacttctgatgaaagagggcacatcgaagtttgcgaatctcgattcatcagtgaaggagaatcaaaaaagaacacagcgcaggctgcaactccagaaggatatgggcgttatgcaaggcacggtgccctacttggggacttttctaaccgatctgaccatgctggacacagcactgcaagattatatagagggtggactaatcaactttgagaagcggcgtcgggaatttgaagtcatcgcccagataaaattgctgcagtcggcttgcaattcttactgcatgaccccggaccagaagttcatccaatggttccaaaggcagcagctccttactgaggaagagagttatgcactctcatgcgagattgaagccgcagctgacgcgagcacaacttcaccgaaaccccgtaagagcatggtcaaaaggctgagccttctgttcctcgggtcagatatgataacaagtcctactccaaccaaagagcagccaaagagcaccgcgagtggctctagtggggagtcaatggactccgtgtcagtgagcagctgcgagtccaatcatagcgaggccgaagagggatctatcactcccatggacactcccgacgagcctcagaagaaactttcggaatcgtctagctcttgttcctctatacattcaatggacacaaattcatctggcatgagctccttgatcaaccctctcagcagtcccccttcatgcaataacaatccaaaaatccacaaacggagcgtgtcagtcacctccataactagcacagtcctgcctcccgtatacaaccaacaaaacgaagatacttgcatcattcgcataagtgtagaagacaacaatggtaacatgtataaatcaatcatgctgacgagccaggacaaaaccccagctgttatacaaagagcaatgctgaagcataacttggacagtgaccctgccgaggaatacgaactggtgcaggtgatctcagaggataaagaattggtgatccctgactcagccaatgtcttctatgccatgaactctcaggtcaactttgacttcatcttgcggaagaagaactctatggaggaacaggtgaagctgcgcagcagaacgagcttaacattgccgcgtactgctaagcgagggtgctggtccaatcgacactcaaagattactctatag

SEQ ID NO: 237859 - DNA, 2220 bp, synthetic construct
  misc_feature 1..2220: note = Description of Artificial Sequence: Synthetic coding sequence
  source 1..2220: mol_type = other DNA
atgaaactcttgtggcaggcgaaaatgtcatcaatacaggattggggagaagaggtggaggagggggctgtttaccacgtaacacttaaaagggttcagatccaacaagctgcgaataaaggcgcaaggtggctgggggtcgagggcgatcaactgcctcctggacacaccgtcagtcaatacgaaacttgtaagataaggactattaaagcaggtactttggaaaagctggtggaaaaccttcttacagcatttggagacaatgatttcacctacatctccatattcctgagcacttatcgcggttttgcatccacaaaagaggtcctagaacttctcctcgacagatatggtaatctgacttcgcctaactgtgaggaagatggctcccagtcgtcatctgagtcaaagatggttattcgcaatgctatcgctagtatactccgcgcttggctggatcagtgtgctgaggattttagagagccgccacacttcccatgcctgcaaaaactgctggactatcttacaagaatgatgccaggttcagacccagagagacgagctcagaatctccttgagcaattccaaaaacaagaggtcgagacagacaacggtctccccaatactatttcgttcagcctggaggaggaagaggagttggaaggcggagaaagtgcagagttcacgtgcttctcggaggatttggtggctgagcagttaacatacatggatgctcagctgtttaagaaagtggtgcctcatcactgccttggctgtatctggtcccggagagataagaaggagaataaacatctcgcgccaaccatcagggctacaattagccagtttaacactcttacgaaatgcgtggttagcacaatccttgggggtaaagaactgaagacacaacagagggccaaaatcattgagaaatggatcaacatcgcacacgagtgtcggcttttaaaaaacttttctagtctgagggccatcgtatctgccctgcaaagcaactccatttaccgccttaaaaagacttgggcagccgttccacgagaccgtatgctgatgtttgaagagctatctgacatttttagcgaccacaataatcatctcacaagccgggagttgcttatgaaagaaggaacctctaagttcgccaacctggatagttccgtaaaggagaatcaaaagcgcactcagcgaagactccagctacagaaagatatgggaggcctgattaatttcgaaaagcggagacgcgaatttgaagttattgcacagattaagttgctacagagtgcctgtaattcctattgcatgacacctgaccagaagttcatccagtggtttcaacggcagcagctgctaactgaggaagagtcatacgcactgtcctgcgaaattgaagctgctgccgacgcgtctactacctcccccaaacctcggaaatctatggttaaaagactgtctctgctttttttggggtcagatatgatcacttcacccactcctacaaaagagcagcctaagtcgaccgcgtctggcagctcaggggagtccatggatagtgtgtcagtttcatcttgtgagtctaaccactcagaagcggaagaaggctcaatcacaccaatggacacgcccgatgaacctcaaaagaagctgagcgagagcagttccagttgctcatcgattcactccatggacacaaacagtagtggaatgtctagtttgattaacccattgtcatcacctccgagctgtaacaataaccccaaaatccataaacggtcagtgtctgtaactagtatcacatcaacagttctgccccctgtgtataatcaacagaacgaagacacttgtattattcgcatctccgtcgaagacaacaacggcaacatgtataagtctattatgctaacttctcaggataagactcctgccgtgatccagcgggcaatgttaaagcataatttggactcagaccccgctgaggaatacgagctggtccaagtaatatcagaagacaaagagttagttattcctgatagcgccaatgtattttacgctatgaatagccaggttaattttgattttattttaaggaagaaaaattccatggaggagcaggtgaagctgaggagcaggacgtcattgaccctaccaaggactgctaagcgcggttgctggtctaatcggcattccaaaataactctttag

SEQ ID NO: 237860 - DNA, 1173 bp, synthetic construct
  misc_feature 1..1173: note = Description of Artificial Sequence: Synthetic coding sequence
  source 1..1173: mol_type = other DNA
atgggttccttcaaggacagaggagacggcctgccaaacaccatctcctttagcttggaagaagaggaagagctcgaagggggagaatcagcggagttcacatgtttctccgaggatctggttgccgagcaactgacgtatatggacgcccagctcttcaagaaagtggtgcctcaccattgtctcggttgtatatggagtagacgggataaaaaggaaaacaagcacttggctcccacgatcagggccacaatctctcaattcaataccctgacaaagtgcgtcgtatccaccatcttgggcggaaaggaactgaagactcagcaaagggccaaaattattgagaagtggatcaatatcgcccatgagtgccgcctcttgaagaacttcagttcattgagggctatagtgagcgctctccagtccaactccatttacaggctaaaaaagacatgggcagccgtccctagagacaggatgctcatgtttgaggagttgtcagatattttttctgatcacaataaccacctcaccagtcgggaactgcttatgaaggagggaactagtaaatttgcgaacctggacagcagtgtgaaggaaaaccagaagcggactcagcgcaggcttcaactccagaaagatatgggcgtgatgcaggggacggtaccttacctggggaccttccttactgatctcaccatgctggataccgcactgcaggactacattgagggcggactgataaacttcgagaagcggcgacgagagttcgaggtaatcgcccaaatcaagctgctccagagcgcgtgcaattcttattgtatgaccccagaccaaaaatttatccagtggttccagcgccagcagctgctgaccgaagaggaatcgtacgcactatcctgcgagatcgaggcggcagcagacgcttccactacttctcctaagccaagaaagtctatggtcaagagattgtccttgctgttcttgggcagcgatatgataacttcaccaacccctaccaaagagcagcctaagagcaccgcttcaggcagctcgggtgaatccatggatagcgtcagtgtttccagctgcgaaagcaaccactcagaggctgaggaaggatccatcacgccaatggacacccccgacgagccacagaagaaggcactgtag

SEQ ID NO: 237861 - DNA, 1422 bp, synthetic construct
  misc_feature 1..1422: note = Description of Artificial Sequence: Synthetic coding sequence
  source 1..1422: mol_type = other DNA
atgcgaaagctgcttacaaacctcccggctgccgctgttttgtctgcccaggtatactctgcagtgcttcagggcctatgggaggagaatgtttgcgggacacccggtcggacccgcgtatgtaccgccttgctatatgggcaggtttgcccattccaggattctactgatgggctgcggactattacctcaattctgttcaactggccccctgagaacacgtcagtgtattaccagcctcctcagcgcagctccttccgcattaagttggccttcagaaatctttcttggcctgggctggggctggaggaccaccaggagatagtgctaggccagttagtactcccagaaccgaatgaagctaagcccgacgatcccgctccaaggccagggcagcacgccctcaccatgcctgctctcgagcccgctccacctttgctagccgatctgggcccagccctcgagcccgagagtcccgcagctctgggcccacccggatatctgcatagcgcccctgggcctgcacccgcacccggagagggtcctccacccggtaccgtgttggagccacagagcgctccagagagcagttgtccgtgcaggggctccgtgaagaatcagccatccgaggaacttcccgacatgaccactttcccaccgaggctgctggccgagcagcttacactgatggacgccgagctgttcaaaaaagttgtgcttcacgagtgtttggggtgtatctggggccagggccatctgaaaggcaacgagcatatggctcccaccgtccgtgcgacaattgcccattttaatagattgaccaattgcatcaccacctcgtgcctgggtgatcattccatgcgtgccagagaccgggctagggtggttgagcactggataaaggtggcgagagaatgcttgtccttgaacaacttttcttctgtccatgtcattgtcagcgctctgtgttcgaacccaatcggccagctgcataaaacgtgggccggagtctctagtaaaagcatgaaagaactaaaagagctttgcaaaaaagacaccgcagtgaagagagaccttttgattaaggctggatcttttaaagtcgccacacaggaaaggaatccacagcgcgttcagatgcgcctgaggcgtcaaaaaaagggtgttgtgcctttcctgggtgattttctcacagaattacagagactcgacagcgccataccagatgatctcgacgggaatacaaataagcgctctaaggaggttcgcgtccttcaggagatgcagctccttcaggtggcagctatgaattacaggcttcgaccattggagaaatttgttacgtatttcacccggatggagcagctgtcagataaggagtcttacaagctgtcttgtcagctcgaacctgaaaacccttag

SEQ ID NO: 237862 - DNA, 1743 bp, synthetic construct
  misc_feature 1..1743: note = Description of Artificial Sequence: Synthetic coding sequence
  source 1..1743: mol_type = other DNA
atgcgcaaactgcttactaacctcccggctgccgcagttctgtcagctcaagtgtattctgccgtcctgcaaggtctgtgggaagagaacgtttgtgggactcccggtagaacaagagtttgtaccgccctgctatacggacaagtgtgtccctttcaggattcaacagacggactccgcacgattaccagcatattatttaattggcctcctgaaaacacctcggtctattaccagccgccacagcgctcctccttccgaattaaacttgctttccgaaacctttcctggccaggcctgggactggaggatcaccaggagatcgtcctcggacagttggtactgcccgaaccaaatgaagctaagcccgacgaccctgcacccaggcctggccaacacgcactgacaatgcctgctcttgagccagctccccctctgctcgctgaccttggccctgcgctagagccagaaagtcccgcagctctcggcccacctgggtatctccatagcgctccaggtcctgccccagctccaggggaaggccctccaccagggacagttctggaaccgcaaagcgcccctgagagctcatgcccctgccgtggatctgtgaagaaccagccttcagaggaactccctgatatgactacttttccgcctagactactagcggaacaattgaccttgatggacgctgagctcttcaaaaaggtggttttacatgagtgtctcgggtgcatctggggacaagggcacctcaagggtaacgaacacatggcccctaccgttagggccacaatagcccacttcaataggcttacgaactgtattaccacctcatgcttgggcgatcacagcatgcgagcaagagacagggcgagggtggtggaacattggatcaaggtggcccgtgagtgtctcagcctgaataatttctcctcggtgcatgtgatcgtctccgccctgtgtagcaatccaattggtcagctgcataaaacctgggccggtgtttcttcaaagtccatgaaagagctcaaggagctgtgtaaaaaggacactgctgttaaacgcgacctgcttatcaaggccggaagttttaaagtggctacacaggagcgaaatccacagagagttcaaatgcggctgagacggcagaagaagggtgttgtcccgtttttgggagatttcctcacagaattgcaacggctcgacagtgccattcccgatgatcttgacgggaacactaacaaaaggagcaaggaagtcagggtcctccaggagatgcagttgctccaggtggctgcaatgaactatcgcctccggccacttgagaaatttgttacgtacttcaccagaatggagcaattaagcgataaagaacgctgggggttcaccatgatgtcccgtatagtttccaactcatggccacaggccattcatccccctcagccgccaaaagtacttactctgcagctccaggcagtgctgccagccggtgcaaggaaacccgtgggatggcagcatcccgctgtcgccggaaacccaccgggttgctggcctgaacaccgactgtgcactatccctcacccagatcgtcggcatcagggcactacttccagacgactggcggctcaattacatctggctctcgacccccatcaccaattactgcttttggcacgaatacggccttgggatttttgtgaatctgggggacgcccattctacgtgtatttcctatag

SEQ ID NO: 237863 - DNA, 1968 bp, synthetic construct
  misc_feature 1..1968: note = Description of Artificial Sequence: Synthetic coding sequence
  source 1..1968: mol_type = other DNA
atgacggagtgttttctacccccaacatcaagtccgtcagaacaccgccgagtggagcacggcagtggactcacgagaacaccttcttctgaggagattagccctaccaagtttcctggactctacaggaccggggaaccctctccgcctcatgacatcctgcacgaaccccctgatgtggtttcggatgacgaaaaggatcatggcaagaaaaagggcaaattcaaaaaaaaggagaagcggactgagggctacgctgcattccaggaggactcctccggcgatgaagcagaaagcccttcaaaaatgaagagatccaagggcattcatgtatttaaaaagccgtccttctcaaaaaagaaagaaaaggacttcaagattaaagagaaacctaaagaggagaagcacaaggaagagaaacataaagaggaaaagcacaaggagaagaagtccaaggacttaacggccgcagatgtcgtgaaacagtggaaggagaagaagaagaagaagaagcctatacaagaacccgaagtcccacagatcgatgtgcctaatctgaagcccatcttcgggatcccactggcagacgccgtcgaacggactatgatgtacgatggcatcaggttgccggcagtctttcgggaatgtattgattacgtggaaaagtacggcatgaaatgcgaggggatttatagagtctcaggaattaagagtaaagtggacgaactcaaggcggcttatgaccgtgaagagagcacaaacctggaggactacgagcccaacactgtggccagccttcttaaacagtatctaagggatctgccggaaaatctcctaacaaaggagctgatgccaagattcgaggaagcatgtggccgtactacggaaaccgaaaaggtccaagaatttcagcgtctgctgaaagagctgcccgagtgcaactacctgttgattagttggctgatagtgcacatggaccacgtaatcgcaaaggagctggagacaaaaatgaatattcagaatatatccatagtcctgtctccaacagtgcagatttctaacagagtactctacgtgttctttacgcatgttcaggagctgttcgggaacgtagtcttgaagcaggtgatgaagcctctcagatggtccaacatggccaccatgcccacccttcccgaaacgcaagccggtatcaaggaagagattcgtaggcaggagttcctgctgaactgcctccacagagatctgcagggcggaatcaaagacctcagcaaagaagagcgcttgtgggaggtccagcggatccttacagccctgaagcgaaagctacgagaggcaaagagacaggaatgcgaaaccaaaattgcccaggagatcgcatcactgagcaaagaggatgtatcaaaagaagagatgaacgagaacgaagaggtaattaatatcctgctggcccaggagaatgagatcctgactgaacaagaagagctgcttgctatggaacagtttctacgacggcagattgcgtccgagaaagaggaaatcgagaggctaagagcagaaattgccgagattcagtcccgtcaacaacacgggagaagtgagactgaagaatattccagcgagagtgaaagtgagagcgaagatgaggaagaactgcagattatactggaagatctgcagcgccaaaatgaagagctagagatcaagaataatcatcttaatcaggccatccacgaagagcgggaagcaatcattgagctgcgggtgcagctccggcttctccagatgcagagggcaaaggcagaacagcaggcccaagaggatgaggagccagagtggaggggcggagctgtgcagccacccagggacggagtcctggagcctaaagctgccaaggagcagcccaaagctggtaaggaaccggcaaaacccagcccatcaagagataggaaggagacctctatctag

SEQ ID NO: 237864 - DNA, 1968 bp, synthetic construct
  misc_feature 1..1968: note = Description of Artificial Sequence: Synthetic coding sequence
  source 1..1968: mol_type = other DNA
atgacggagtgctttctgccacccactagctctccctccgaacacaggcgtgtcgagcatggttccggtttaacccggacaccatcttccgaggagatttccccaactaagtttccagggctataccggactggggagcccagcccccctcacgatattctacacgagccacccgatgtggtatctgatgatgagaaagaccacggcaaaaagaaagggaagttcaagaagaaggagaaacggacggagggatacgcagcattccaggaagactcttcaggggatgaagccgagtcccctagcaaaatgaaaagatctaaagggatacatgtgttcaaaaagccttcctttagtaagaaaaaagagaaagactttaagataaaagaaaagccgaaagaagagaagcacaaggaggagaaacataaggaagaaaagcataaagagaagaagtcaaaagatttgacagccgctgacgtagtcaaacagtggaaagaaaagaaaaagaaaaagaaacccattcaggaacccgaagtgccacagattgatgtccccaacctaaaaccaattttcggcatacccctggctgacgccgtcgagcgcactatgatgtacgacggtattaggctgcccgctgtgtttagggagtgtattgactatgtcgagaaatacggcatgaaatgtgaaggtatctacagggtttcaggcatcaagtcaaaggtcgatgaactgaaagccgcttacgatagggaggaatccacgaacttggaggactatgaacctaatactgtggcatctcttctgaagcagtacctacgcgacctccccgaaaacctactcacaaaggagcttatgccaagatttgaagaggcctgcggccgtacgaccgagactgagaaagtccaggagtttcagcggctccttaaggagctccccgagtgtaattacctgttgatcagctggttgatcgtccatatggaccacgttattgccaaggagcttgagacgaagatgaatattcagaacatctccatagtgctgagcccaacagtccagatcagcaacagggtcctatacgttttcttcacccacgtgcaggagttgttcggcaatgtagttctcaaacaggtgatgaagcctttacggtggtccaatatggcaaccatgccaaccctgccggagacgcaggcaggcattaaagaggagataagacgccaggaattcctgttgaattgcctgcacagagatctgcaggggggaataaaggatttgtcgaaggaggagagactttgggaagtgcagaggattctgactgccctgaagcgcaagctgagggaggcgaaaagacaggaatgcgagacaaagatagctcaggagattgcatctctgtcaaaggaggacgtctccaaggaagagatgaacgaaaacgaggaagtgatcaacatcttattggcgcaagagaatgagattctgacggaacaggaagagcttctggccatggaacagtttctgaggaggcagatcgcatcagagaaagaagagattgaacggttgagagccgagatcgcagaaattcagtcccggcagcagcatggacgctcagagaccgaagaatacagttctgaatcagaatcggagtcagaagatgaagaggaacttcagattatcctcgaagacctgcagcgccagaatgaagagctcgagatcaagaataaccatttgaatcaggcgatccatgaagagagggaggccattatcgaacttcgagtccagctgagactcctgcagatgcaacgggctaaggcggagcagcaagcacaagaggacgaagagcctgagtggagaggaggcgcagtgcagccacctcgcgacggcgtcctcgaaccaaaagccgctaaggagcaaccaaaagcgggtaaagagccagctaagcctagcccctcaagggaccggaaggagacatcaatatag

SEQ ID NO: 237865 - DNA, 1044 bp, synthetic construct
  misc_feature 1..1044: note = Description of Artificial Sequence: Synthetic coding sequence
  source 1..1044: mol_type = other DNA
atgacagaatgcttcctgccacctacttcgtcaccttctgagcaccggagagtagagcacggatctggcctgactaggactccatcatcggaagagataagccccaccaagttcccaggtctctatcgaacgggagagcccagccctccccacgatattctgcatgaaccccctgatgtcgtttccgatgatgagaaagaccatggaaagaagaagggcaagtttaagaaaaaggagaaaaggaccgagggatatgcagcctttcaggaggacagtagtggagatgaggccgagtccccttctaagatgaaaaggtccaagggcattcacgttttcaagaagccgtccttcagcaagaaaaaagagaaagactttaagattaaagaaaaacctaaagaggagaaacataaagaagagaagcataaggaagagaaacacaaggagaaaaaatcgaaggacctaactgctgccgatgtggtgaaacagtggaaagagaagaagaagaaaaagaagcctatccaggagcccgaggtcccacagattgatgtgccaaatcttaagcctatcttcggcatccctttggccgatgctgtcgagcgcacaatgatgtacgacggaatcaggcttcccgctgtgtttcgtgaatgcattgattacgtagaaaaatatggcatgaagtgcgagggcatttaccgagtgtctggtatcaagagcaaggtggatgaactcaaggcagcgtacgatcgcgaggagagtactaaccttgaggattacgagcctaatactgtcgccagcctgttgaagcagtatttaagggacctgcctgaaaatttgctgactaaagagcttatgccgaggtttgaagaggcttgcggacgtacaacggaaactgaaaaggtacagagctccggcgaggaagccgcaagatcatgccagttcctgaccgctggaaccagtaagggcctgctgaccggccttgtgaaggggtctcacctgggtctggtccaccctcaaagaatgctgttcaagcctgagatcttttag

SEQ ID NO: 237866 - DNA, 1980 bp, synthetic construct
  misc_feature 1..1980: note = Description of Artificial Sequence: Synthetic coding sequence
  source 1..1980: mol_type = other DNA
atggaagctgccgctgccgcagcggcagccgcagccgctgccgctgccgctgggggaggttgtggctccggaccccctccacttctcctgagcgaaggcgagcagcagtgctattcggaacttttcgcaagatgcgccggagctgccggaggtgggccaggatcaggtccaccggaggctgccagagtggccccagggactgccaccgccgctgccggaccggtcgccgacttgtttcgtgccagtcaactacctgccgaaacactccatcagattacagaactgtgtggcgctaagcgggttggatacttcggaccaacacagttctacatagcactgaaactcattgccgctgcccaatctggtctgcctgtgcggattgaaagcatcaaatgcgaactgcccctgcccaggtttatgatgagtaagaacgatggtgagattaggtttgggaacccggcagagctccacgggaccaaggtgcagatcccctacctcactactgaaaagaactctttcaaaagaatggacgatgaagataagcaggaaacgcagagcccaacaatgagtcccttggctagtcccccatcatcaccaccccactaccaacgggtgccgcttagccacggatattctaagttacgctcaagcgcagaacagatgcacccagccccttacgaagctaggcagcccctggtccaacctgagggatcttcaagcggtgggccaggcacaaagccgctgaggcaccaagctagcctcattcggagcttctcggtggaaagggaattacaagataatagttcctaccccgatgagccctggcgcataacagaagaacagagagaatactacgttaatcagttcaggagcctgcagcccgacccaagctcattcattagcgggagcgtagcgaaaaatttcttcacaaagagcaaattatccataccagaactctcgtatatctgggagctaagtgacgcagactgcgatggcgctctgaccctccctgaattttgcgcagcatttcatctcatcgtggcacggaaaaatggatatcctctgcctgaggggctgcctcccacccttcagccagaatacctacaggctgcattccccaagccaaagtgggactgtcagcttttcgattcctattctgagtcattgcctgccaatcagcagccaagggacctcaaccgcatggaaaaaacatccgtgaaggatatggctgatctgccagtcccaaaccaggacgttacctcagatgacaagcaggccctcaagtcaacaatcaacgaagctctcccaaaagacgtctcagaggacccagcaacccctaaggacagcaacagcctcaaggcgagaccaagatctagatcatactcgtctaccagtattgaagaggccatgaagcgcggagaagaccctcctacgccaccaccacggcctcaaaaaactcattccagagcatccagcctcgatctgaataaagtttttcagccctctgtccctgcgacaaaatcaggacttctaccgccacctcctgcactcccaccacgcccatgcccctcccagtccgaacaggtttcagaagcagaacttctcccgcagcttagtagagcaccatcgcaggcggctgaatcttcgccagcaaagaaggatgttctctattcccagccaccttcaaagcccattcgaaggaagttcagaccagagaatcaggctactgagaaccaggagcctagcactgccgcttccggcccagccagtgcggctactatgaagccgcatcccaccgtgcagaaacagtctagcaagcagaaaaaggccattcagactgctatccggaagaataaggaggccaatgcggtgctggctcggctgaactctgaacttcaacagcagcttaaagaggttcaccaggagagaatcgccctcgaaaaccagcttgaacagctccgtcccgttacagtcctctag

SEQ ID NO: 237867 - DNA, 1983 bp, synthetic construct
  misc_feature 1..1983: note = Description of Artificial Sequence: Synthetic coding sequence
  source 1..1983: mol_type = other DNA
atggaggccgcagccgcagccgcagcagccgcagccgcagcggcagctgctggaggcggatgcggcagcggacctccccctcttcttttaagcgagggagaacaacaatgctatagtgaactgttcgcccgatgtgctggagccgctgggggtggaccagggagcgggcctcccgaagctgccagagtggcccctggaactgcgactgccgcagctgggcctgttgccgacctcttcagagcttcgcaactgcccgcagagacactgcaccagattactgagctgtgtggggcaaaacgagtcggctacttcggaccaactcagttttacattgccctgaagctcatcgcagcagcacaaagtggcctccctgtgagaattgagtccataaagtgtgagctgccattgcccagatttatgatgagtaaaaatgacggcgaaattcgatttggtaaccccgcagaactccacggcactaaggttcaaattccatacctaaccacagaaaaaaattcattcaagcgcatggacgacgaggataagcagcaggaaacgcagtcccccaccatgagtccactcgcctctccaccatcctcgcccccacactaccagcgagtgcctttatcacacggttattctaagctacgatcctcagctgagcaaatgcacccagctccttatgaagccaggcagcctctcgtccagccagagggttcctccagtggcggaccagggactaaaccgctccggcaccaggccagcctgattaggagttttagtgtggagagggagctgcaggacaacagctcctacccagacgaaccttggcgcatcactgaggagcaacgagaatattacgtcaaccagtttcgaagtttgcagccagacccttcttctttcatttcgggctctgtcgctaagaatttctttacaaagtctaaactttcaatccctgagctcagctatatatgggaactctcagatgctgattgtgatggtgccctgacacttcccgaattctgtgctgcatttcatttaattgtggcaagaaagaatgggtatccactaccagagggtctccctcccacacttcaaccagagtaccttcaggctgcgttcccaaagcctaagtgggattgccaactgttcgactcatactccgaatcgctgccggcaaatcagcagccgagggacttgaataggatggagaagactagcgtcaaggacatggccgacctccctgtcccaaatcaggacgtgaccagtgacgacaaacaggcattaaagtcgacaatcaacgaagccctgccaaaagacgtgtcagaggacccggctactcctaaggacagcaacagtttgaaggcacgaccacggtcccgttcctatagcagcaccagcatcgaggaggccatgaagcgaggggaggatccacccacacctccgccaagaccgcagaaaacccattccagggcctcttcactggacttaaataaggtatttcagccctctgtccctgccacaaagtcaggtcttctgccccctccgcctgcgctcccaccaaggccatgcccctctcagagcgaacaagtaagcgaagctgaactgcttccacagcttagccgggcaccctcccaagcagccgaaagctccccggcaaagaaagatgtgttgtacagtcagccaccctctaagcccattcgcaggaaatttcggcctgaaaaccaggccacagaaaaccaggagccaagtactgcagcatcaggtcccgcaagcgccgctacaatgaaacctcatcctaccgtccagaaacagtcctctaaacagaaaaaagccatccaaaccgcgatacggaaaaacaaggaggccaatgcagtgctcgccagattaaactccgagctgcagcagcaactgaaagaggtccatcaagagcgaatcgctctggagaaccagctggagcagcttcgacccgtgacagtgctgtag

SEQ ID NO: 237868 - DNA, 1824 bp, synthetic construct
  misc_feature 1..1824: note = Description of Artificial Sequence: Synthetic coding sequence
  source 1..1824: mol_type = other DNA
atggaggccgcagccgcagccgcagccgctgccgcagccgcagctgccgctgggggaggttgtggcagcggtccacctcctctcctcctgtctgagggcgagcagcaatgctatagcgagctgttcgccaggtgtgccggagccgctggcggaggacccggatccggacccccagaggctgctcgcgtcgctcctggtactgccaccgctgccgcagggcctgtggctgacttattccgtgccagccagttaccagctgaaacgctgcatcagatcaccgagctatgtggtgccaagagggtggggtattttggaccaacccagttctatatcgccctgaagctgattgctgccgcacagtcaggacttcccgtgcgcatagagtctattaagtgtgagctacccttgcctagattcatgatgtctaaaaatgatggcgagatccggttcggcaaccctgcagaactgcacggaactaaggtccagatcccatacttgacaactgaaaaaaattcttttaagcggatggatgacgaggacaagcagcaggagacccaaagcccaaccatgtcccccttggcttcgccgccaagcagtccccctcattaccagcgggtgcccttaagccatggctattcaaagttaaggtcctccgctgagcaaatgcatccagcaccctacgaagccaggcagccgctcgtgcagcctgaaggctccagttcaggcggacctgggacaaaaccgctccgacatcaggcaagcctgatacgctctttcagtgttgaacgcgaactgcaagataactcttcttatcccgatgaaccatggcggatcactgaagaacaacgcgaatactacgtgaatcagttccgctccctccagccagatcctagttcctttatctctgggagcgtggctaagaattttttcactaaatcgaagctgtctatccctgagttgagctatatctgggagttgtcagacgctgactgcgatggcgctctcactttgcccgagttctgcgcggcatttcatctgatcgtggctagaaaaaacggatacccactgccagaggggttgcccccaacacttcaacccgagtacctccaggcagcctttcctaaaccaaagtgggattgccagcttttcgactcctatagcgaatctttaccagctaatcagcaacctagagatttgaaccgaatggaaaagacatcagttaaggatatggcagacctgccagtgcccaaccaagatgtgacatctgacgataaacaggctctaaagtcaaccatcaacgaagcactccctaaagacgtgagcgaggacccagctacacccaaagactctaattcgctgaaagcaaggcctagaagcagatcatactcatctacctccatcgaggaagctatgaagaggggagaagatccgcctacccccccaccacggcctcagaaaactcactcacgagcaagctctctcgacttaaacaaggtatttcagccgtctgttcccgctaccaaaagcgggcttttgcctccccctcctgcccttcctccaaggccttgccccagccagagtgagcaggttagtgaggctgaacttctccctcagctcagccgcgctccctcacaggccgctgagtcttcgcctgccaaaaaagacgtgctctactctcagccgcctagcaagcccatccgacgcaaattcagacccgtttgtggtatccaacccctcattagtattgagcttcgggctttccggacgtctcggcatctttttaatgtcagcctggtacactggcaggccctcagtatcgcctag

SEQ ID NO: 237869 - DNA, 1380 bp, synthetic construct
  misc_feature 1..1380: note = Description of Artificial Sequence: Synthetic coding sequence
  source 1..1380: mol_type = other DNA
atgatgagcaagaatgatggtgagatccgcttcgggaaccctgctgagctgcacggaacaaaagtgcagataccatatttgaccaccgaaaaaaattcttttaaaaggatggacgatgaagacaagcaggagactcagagccctactatgtctccattggcttccccaccttcgtccccaccacactatcaaagagtgcctctgtcccacggctacagtaagcttagatccagcgccgaacagatgcacccagccccatacgaggcacgccagcccctagttcagccagaaggaagctcctcaggaggacctggcacgaagccactgcggcaccaagcctccctcatacgctctttttccgtcgagcgcgaactgcaagacaattcctcctatcctgacgaaccctggcgcattacagaggagcaacgagaatactatgtgaatcaattcaggagtcttcaaccagacccatcttccttcatttcagggtccgtcgccaagaacttttttaccaagagtaaattgtctatccctgagttgtcttacatttgggaattgagtgacgccgattgcgatggggctttgaccctccccgaattctgtgccgcatttcatttaatcgtggctcgaaaaaatgggtatcccctcccagaaggcttgccgcctaccctgcaacccgaatatctgcaggccgcatttccaaagccaaagtgggactgtcagcttttcgattcatacagcgaatctcttcccgcaaatcagcagcccagagatcttaacagaatggagaaaactagcgtgaaggacatggctgatctgccggtgcccaaccaagacgttacttcagacgacaaacaggcactgaagtcaacaattaacgaggctctgccaaaggacgtgtcagaggacccagctacaaaatccggacttttgcctccccctcccgctttgcctccaaggccatgtcccagtcagtcggaacaggtatctgaggctgaactccttccccagctttctcgggcaccatcacaggctgccgagtccagcccagccaagaaggatgttctgtattctcagccgcctagcaagcccataaggagaaagtttaggcccgaaaaccaggctacggagaatcaggagccatccacagccgcttccggccctgcatcagccgcaactatgaaacctcacccaactgtccagaaacaatcatcgaaacagaagaaagcgatccaaacagccataaggaaaaacaaagaagccaatgccgtcctcgcgagattaaattctgagttgcagcaacagctcaaagaggttcatcaagaaaggatcgcattggagaatcagctggagcaactacggcctgttaccgtgctgtag

SEQ ID NO: 237870 - DNA, 1863 bp, synthetic construct
  misc_feature 1..1863: note = Description of Artificial Sequence: Synthetic coding sequence
  source 1..1863: mol_type = other DNA
atggcagccgctacagcagatccaggcgctggtaatccacaacccggagattcatctggcggaggcgctgggggagggctcccatcacccggagaacaggagctatctcgtaggctgcaaagattgtatcccgcagtaaaccaacaagagaccccgcttccgaggtcatggagccctaaggacaaatacaactatataggcctttctcagggcaatttaagagtgcattataaaggccacggtaaaaaccataaggatgccgctagcgtgagggccacacaccctattccagcagcttgtggaatctactacttcgaggtcaaaatcgtgtctaaagggagggacggatacatgggaatcggtctgtccgctcaaggagttaacatgaaccggctgcccggatgggacaaacatagttacgggtatcatggggatgacggccattcattctgctccagcggcacaggccagccttatggtcccaccttcaccacgggtgacgtgataggatgctgtgtcaacctgattaatggtacatgcttctacaccaagaacggtcattctctcggaatcgcctttaccgaccttcccgcaaacctgtatcctaccgtgggactacagactcctggggaaatcgtggatgcgaacttcggccagcagccatttctgtttgacattgaggactatatgagagagtggcgcgctaaggttcaggggacagtacattgtttcccgatcagtgccaggctcggggaatggcaagccgtgctgcagaacatggtgtcttcatatcttgtgcatcatggttactgtgctactgctacagcctttgcacgcatgactgagacccctattcaggaagagcaggcctctataaaaaacaggcagaaaatccagaaactcgtcctcgagggccgtgtgggcgaggccattgaaacaacgcagagattctatcctggattgttagagcacaacccgaacttgctgttcatgctcaaatgtcgtcagttcgtcgagatggtgaacggaaccgacagcgaggtccgatccctgtcttcgcggtcacctaagtcgcaggacagctatccagggagtccttctctgtctcccagacacggcccatcctcgtcacatatgcataacacaggtgcagatagcccaagctgttctaacggcgtggcctcgaccaagagtaaacaaaatcattctaagtaccccgctccaagctctagttcttctagcagctccagctctagctcatcctctccgagttcagtaaactactccgaatcgaatagcaccgatagtaccaaaagccaacatcactcatcgacttccaaccaagagactagcgacagcgaaatggaaatggaagccgagcactaccctaatggcgtgctgggtagtatgtcgactcgaatcgtcaacggcgcatacaaacacgaggatttgcaaactgacgaatctagcatggatgatcggcatccgaggcggcagctttgcggcggaaaccaagctgcgactgagagaataatcctgttcggcagggaattacaggccttgtctgagcagttaggccgagagtatggaaagaacctcgctcacacagagatgctgcaagatgccttcagcttgctggcttatagcgatccatggagctgtccagtaggacagcagctggatcccatacagcgagagccagtgtgcgccgctttgaactcagccatactggaatctcagaatttgccaaaacagccacccttgatgcttgcgcttggtcaggcatcagaatgcctgaggctcatggctcgcgcagggttgggctcatgttctttcgcccgtgtagatgactatcttcactag

SEQ ID NO: 237871 - DNA, 1602 bp, synthetic construct
  misc_feature 1..1602: note = Description of Artificial Sequence: Synthetic coding sequence
  source 1..1602: mol_type = other DNA
atgggtatcggattgtcggctcagggtgtgaatatgaatcgcctgcccggttgggacaagcactcctatggctaccatggcgatgatggccactccttttgttctagcggcacagggcagccctacggcccaacatttaccaccggcgatgtgattgggtgttgcgtcaatcttatcaacgggacatgtttctacactaagaacggacacagcctcggtattgcatttaccgacctcccagctaacctttaccccactgtggggctgcagacccctggcgagatcgtggacgccaattttgggcagcagccctttctgttcgatatcgaggattatatgagggagtggcgagcaaaagtgcagggcaccgttcactgctttcccatctcagccaggctaggggaatggcaggccgtgcttcaaaacatggtctcttcctatctggttcaccacggctactgcgcaacagcaactgcttttgccagaatgaccgagacccctattcaggaagagcaagccagtataaaaaaccggcaaaaaattcagaagctggtgctcgagggacgggttggcgaggcaatcgaaactacacagcggttttacccgggtctactggagcataatcctaacttgctttttatgcttaaatgtcgccagttcgttgaaatggtgaacggtacggattcagaggttagaagcctgtcatctaggtctcctaagtctcaagatagttacccgggttcaccctctctttcccccaggcatggtccatcatccagtcatatgcataacaccggggcagactccccatcttgctctaatggagttgcgtcaactaaatcgaagcaaaaccattcgaaataccccgcaccttcctccagttcatcctcaagctcttcttcaagtagctctagcccctcctcagtcaactattctgaaagcaacagtaccgatagtaccaagagccagcaccatagttccacatcaaatcaggaaacctcaaatccctggctgcagctggagcgtcgccctaaccaggctgcccctaccacccctccaggcccaaccccaacctccacgccccctcactcagattcggaaatggagatggaagccgaacattatccaaacggagtgctgggatccatgtctacccgcatagtgaatggcgcatataagcacgaggatctacagacagacgaaagcagcatggatgacaggcaccctcggagacagctatgcggaggcaaccaggccgcaactgagcgcataatcctgtttggacgcgaactgcaagcactttcagaacagctgggaagggagtacggaaaaaacctggctcatactgaaatgctgcaggacgcctttagtctcttagcatactccgatccttggagttgtcctgtcggacagcagctagatcccatccagagggagccggtgtgcgccgctctgaactcagctattctcgagtctcaaaacctgccaaagcagccccctcttatgctcgctctcgggcaggccagcgaatgcttgcgcctgatggcccgtgctggtctgggcagctgttcatttgctagggtggacgactacctgcattag

SEQ ID NO: 237872 - DNA, 540 bp, synthetic construct
  misc_feature 1..540: note = Description of Artificial Sequence: Synthetic coding sequence
  source 1..540: mol_type = other DNA
atgggttgggataagcattcttatggataccatggggacgatggccattccttctgctcttctgggacagggcagccctacgggcctaccttcactaccggggacgttatcggctgctgcgtgaatctgatcaacggcacctgcttctacactaagaacggccacagtttgggaattgcttttactgatcttccggcaaatctgtaccctacggtgggcttgcagacaccaggcgagatcgtagacgcaaattttggccagcagccttttctctttgatattgaagactatatgcgcgagtggcgagccaaggtgcaggggactgtgcactgctttccaatttcagccagattgggggagtggcaggctgtgctgcagaatatggtatctagttatctcgtgcaccatgggtactgtgccaccgctaccgccttcgcccgaatgacagaaacgccaatccaggaggagcaggcctccattaaaaatagacagtccaaggtgtactccacattcccttttccgttcctaacctgtccttag

SEQ ID NO: 237873 - DNA, 1785 bp, synthetic construct
  misc_feature 1..1785: note = Description of Artificial Sequence: Synthetic coding sequence
  source 1..1785: mol_type = other DNA
atggccgctgctaccgctgaccccggagccggaaacccacagcccggtgacagttctggaggaggcgctggcggtggcctgcccagcccgggagaacaagaactcagtcgtcgcctgcagaggctctatccggctgttaatcagcaggagacacctctcccgaggtcttggagtcccaaagacaaatacaactacatcgggctgtcccaaggcaacctgcgggtccattataagggtcatggaaagaatcataaggacgccgcttctgtgagagcaacacaccctattcccgcagcctgtggcatctattattttgaagtgaagattgtatctaagggtagagacggctacatggggataggtttatccgctcagggtgttaacatgaatagacttcccggtatcgcgttcaccgaccttcctgccaacctgtaccccactgtaggccttcagacaccgggtgaaatagtggacgcgaattttggccagcaaccctttctgttcgatatagaggactacatgcgtgaatggcgtgcaaaggtgcagggcaccgtccactgtttccctatctcagcccgtttaggggagtggcaggcagtgcttcagaacatggtttctagctacttagtgcaccacggctactgcgcgacagccaccgccttcgctaggatgaccgagacgcccattcaggaggagcaagcatccataaagaatcgccaaaagattcagaagctcgttctggaaggaagggtgggagaggccatcgagaccacccagagattctaccctggcctcctggagcacaaccctaacctgctgttcatgttgaagtgccggcagttcgtcgagatggtcaatggtacggattccgaggtgaggagtctctcatcacgaagtccaaaatctcaggactcctatcctggttcgcctagtctgagtcctcggcacggcccatcatcgagtcatatgcataacactggcgctgactctccttcctgctcaaacggggtggcatcgaccaaaagcaagcaaaatcactcgaagtaccccgctccatcctcctcctctagctcctccagcagcagttcttcatcctcccccagctcagtgaattacagtgaatccaattcaactgacagcactaagagccagcaccactcctccacgtcaaatcaggaaacatctaacccatggctccagctcgagagacgtcctaaccaagccgctcctaccacgccgccagggcctacgccgacgtccacccctccacatagtgattctgaaatggagatggaggctgagcactacccgaatggagttctgggatcaatgtcgaccagaatcgttaacggggcttacaagcatgaggacctacagactgacgagagcagtatggatgaccggcatcctagaaggcagttatgtggcggaaaccaggctgcaacagaaaggatcatcctattcgggagagaacttcaggctctctctgagcaactgggtcgagagtacggaaagaatcttgctcacacagagatgttacaggacgcttttagtttgctggcgtattccgacccctggagctgccctgtgggacaacagctggacccaatccagcgggagccagtgtgcgccgcactgaatagcgccattctggagtcgcagaacttgcccaaacagcccccactgatgcttgcccttggacaggcctccgagtgcctgcgcctcatggcccgagcaggtctgggatcatgctctttcgcaagagttgatgactatcttcactag

SEQ ID NO: 237874 - DNA, 1176 bp, synthetic construct
  misc_feature 1..1176: note = Description of Artificial Sequence: Synthetic coding sequence
  source 1..1176: mol_type = other DNA
atgagagagtggcgtgccaaggtacagggtacagtccattgcttccccatctccgctcgtttgggcgaatggcaggctgtcctgcagaatatggtgagtagctacttggttcaccacggctactgtgccactgctacagcatttgccagaatgaccgagaccccaattcaagaagagcaggcttctatcaaaaaccgccagaagatccagaagctagttttagagggtcgcgtgggcgaagcgattgagaccactcagaggttttatcccggattgttagagcataaccctaacctgcttttcatgctaaaatgtaggcagttcgtcgaaatggtgaatgggaccgattccgaagtgcgatcactttccagccggtctccgaaaagtcaggattcatatcctggttctccatcccttagtcctaggcacgggccaagttccagccacatgcacaatacaggggcagattccccctcatgctctaatggtgtcgcctccaccaaaagcaaacaaaaccacagcaaatatcccgctccgtcctcatcaagctcgtcctcctctagcagttcgagctcctccccttcctcagttaactactccgaatcaaattcaaccgattccaccaagtcccagcatcactcctccacctcaaatcaggagacaagcgattcggaaatggaaatggaagccgaacattatccaaatggagtgttagggtccatgtccactaggatcgtgaatggtgcatataagcacgaggatttgcagactgacgagtcttctatggatgataggcatcctcgcaggcagctgtgtgggggtaatcaagcggcaactgaacgaattatattgtttggcagggaattgcaggctctctctgaacaattaggccgagagtatggcaagaacctcgctcatacggagatgctgcaggacgcctttagtcttctcgcctattccgacccctggagctgtcccgtcggccagcagctggatcccattcagcgtgagccggtgtgtgctgcactgaactccgctatcctggagagccagaatctgccgaagcaacccccactgatgttagccctcggtcaggcctctgagtgtttgcgactcatggcacgcgcaggcttaggttcatgctcctttgccagggtggacgattatctacactag

SEQ ID NO: 237875 - DNA, 3267 bp, synthetic construct
  misc_feature 1..3267: note = Description of Artificial Sequence: Synthetic coding sequence
  source 1..3267: mol_type = other DNA
atggcactgcattttcagtcactggccgagctagaagttctgtgcactcatctgtatattggtacagatttaacacagagaatcgaagccgagaaagccctgctggagctcatcgattcgccagagtgcctaagtaagtgtcagctgctgctggaacagggcactacctcctatgcccaattgctggcggctacttgtctcagtaagctagtgtctcgggtgagccctttaccagttgagcaacgcatggatatccgcaactacattctgaattatgttgccagtcagccaaagttggccccattcgtgatccaggccctgatacaagtgattgctaagatcactaaacttgggtggttcgaggtgcagaaagaccaattcgtgttcagagagattatcgctgatgtaaaaaaatttctgcagggcactgtcgagcattgtatcatcggcgtcataatccttagtgaactgacccaagagatgaacttagtggattacagccggccttctgcaaagcacagaaagatcgctacctccttcagggatacttccctgaaagatgtgttagtgctggcatgctctctcttgaaggaggtctttgccaagccactcaacctccaggaccagtgccaacagaatttagtcatgcaggtactcaaattggtcttgaactgcctgaattttgatttcatcggaagctctgccgatgagtcggcggacgacctgtgcaccgttcagattcccactacttggagaactatctttctggagcccgagactctcgatttgttttttaatttatatcatagtctacccccactgctttctcagctcgccctgtcatgtctcgtccaattcgcgagcaccaggagatccttatttaattctccagaaagggccaagtacctcgggaatctaatcaagggcgtgaagaggatactagaaaatcctcagggtctgagtgacccgggtaactaccatgagttctgccgctttcttgctcggctgaaaactaactaccagctgggggaactggtgatggtgaaagagtacccggaagtgatacggctaatagccaattttactatcacatccttacagcactgggagtttgctcccaattcagtccattacctcctcactctgtggcaaaggatggtcgcatccgtgccatttgtgaagagtaccgagccccatctgctggacacgtatgcccctgaaatcaccaaagcttttattacttctcgccttgatagcgtggccatcgtggtccgcgaccacctggatgaccctctcgatgataccgctactgtcttccaacagctcgaacagttgtgcacagtgagtcggtgtgagtatgagaagacttgcgccctgctcgtccagctattcgaccaaaatgcacaaaactaccagaagctgctgcacccttacagcggggttaccgtggacataacgatccaggaggggaggctggcctggctagtctacttagtggggaccgtcgtagggggaagactcacatatacctccacagacgagcacgacgcaatggatggcgagctgtcctgtagagttttccaactgatttcgctcatggatactggactgccccgatgctgcaatgagaagattgagctcgccatcctgtggttcctggatcagttccgcaaaacctatgtcggagatcagttgcaacggacatccaaggtgtacgcaagaatgagtgaggtgctcggcatcactgatgacaaccatgttctggagacgttcatgacaaagatcgtgacgaacctcaagtactgggggcgatacgaacccgtaatttcacggactctgcagttcttgaacgacttgtctgttgggtacatcctgctcaaaaagctcgtgaagatagacgcagtgaaatttatgctgaagaaccacactagcgagcactttcccttcttggggattagcgacaatcactcgctctctgatttccgttgtaggaccacattttatactgccctgactcgcttgcttatggtggacctaggagaggacgaggatgaatttgagaattttatgctcccattgaccgtggcctttgaaacagttctacagatcttcaacaacaactttaagcaggaagacgttaagagaatgctgatcggactagcgagagatctcagggggatcgcttttgcgctcaacactaaaaccagctacacaatgctttttgactggatgtaccctacttacctgcccttgcttcaaaatgccgtggaacgctggtacggcgaaccaacctgcactaccccaatcctgaagcttatggccgagctgatgcaaaatcggtcccagaggctgaactttgatgtaagctcccctaatggcatcctactgtttagagaggcttctaagatggtgtgtacatacgggaatcagatcttgtcactgggatcattgtccaaagaccaaatctatccaatgaaactgaagggaataagcatctgttactcggctctgaagtcagcactgtgcggcaattacgtgtccttcggtgtctttaagctctatggggacaaccacttcgataatgtgcttcaggcctttgtgaagatgctgcttagtgtttcccatagtgacctgctgcagtataggaagttgtcacaatcctactacccattgctggagtgtctcactcaggatcatatgtcctttattatcaatctggaaccgccagtgttaatgtatgtcctgacttccatttcggagggtctaactaccctcgataccgtcgtgagcagctcctgttgcacatcgctcgattacattgtgacctacctttttaagcatatcgcaaaggagggaaaaaagcccctgcgatgtagagaagcgacacaagctggtcagaggcttctacatttcatgcagcagaatcccgatgtgctacagcagatgatgtcagtgctcatgaacacaatcgttttcgaagactgccggaaccagtggagcgtgtccaggcccctcctgggcttgattctgctgaatgagaaatacttttcagagctgcgggcatccctaatcaactcccaaccgcttcctaaacaagaggtccttgctcagtgctttagaaatctgatggaaggcgtggagcaaaatctgtccgttaagaatcgtgatagatttacccagaatttatctgtatttcgaagggacgtcgctgaggcactacggtctgatggcaacaccgaaccttgtagtctagacatgatgagctag

SEQ ID NO: 237876 - DNA, 1557 bp, synthetic construct
  misc_feature 1..1557: note = Description of Artificial Sequence: Synthetic coding sequence
  source 1..1557: mol_type = other DNA
gtgtacgcaaggatgagcgaagtgctcgggatcacggatgataatcacgtcttagagacatttatgaccaaaattgtgacaaacctgaagtactggggccgatacgagcctgtaatttcacggaccctgcaattcttgaacgacctatcagtaggatatatacttctgaagaaacttgttaaaattgatgccgtgaaattcatgctgaagaaccatacttccgagcacttcccttttctaggaatttcagacaatcactccttaagcgactttcgttgtcgcacgacattttataccgcactcactagattgctgatggttgaccttggtgaggatgaggacgagttcgaaaatttcatgcttcctttgaccgtggcttttgagactgtcctccaaatttttaacaataacttcaagcaggaggatgtcaaaaggatgctgatcggcctcgcgagagacctgcgtggaattgcatttgctctgaacacaaaaacgagttacaccatgctgtttgactggatgtaccccacatatctgcctctgctacagaatgcagtggagaggtggtatggagaacccacctgtacaacacccatcctcaagctcatggccgagctgatgcagaaccggtcccagaggctgaactttgacgtctcttccccaaatggaatcctgttgtttcgcgaggcctctaagatggtttgtacttatggcaatcagatcctgtccctgggatccctgagcaaggatcagatttatccgatgaagttgaaggggatatctatttgttattccgcacttaaatctgccctctgcggaaattacgtgagcttcggggtcttcaaactgtatggcgacaaccacttcgataatgtgctgcaggcctttgtgaaaatgctgctgtcagtttctcactctgatctgctgcagtaccggaaactgtcacaatcctactatccattgttggagtgcttgacccaggaccatatgagttttatcatcaatcttgagccccctgtcctcatgtatgtactgaccagcatctcagaaggattaacgacgctagataccgtcgttagcagttcatgttgtacatcgcttgattacatcgtcacatacctgtttaagcatatagctaaagaggggaagaaaccccttagatgccgcgaggctacacaggcaggccagaggttgcttcacttcatgcagcaaaaccccgatgtgttgcagcagatgatgtctgtgctcatgaataccattgtgtttgaagactgcagaaatcaatggagcgtttcccgaccgctgctgggactgattctcctcaacgagaagtacttttctgaactgcgtgcttctttgatcaactctcagcctctccctaagcaggaagtgctggcccagtgctttagaaatctcatggagggggtcgaacagaacttgtctgtcaagaaccgcgaccgattcactcaaaatctttcagtgttccggagagatgtggcagaagcccttcggagcgatggcaataccgagccttgctccctggacatgatgagctag

SEQ ID NO: 237877 - DNA, 1419 bp, synthetic construct
  misc_feature 1..1419: note = Description of Artificial Sequence: Synthetic coding sequence
  source 1..1419: mol_type = other DNA
atggacatccgtaactacattctaaattatgtggcttcccagcctaagctagcgccatttgtgatacaagcgttaatccaggtcatagccaaaataacaaagctcggttggtttgaggtgcagaaagatcaattcgttttccgggaaatcattgctgacgtgaagaaatttctacaggtggactactcgaggccatcagccaagcacagaaagatagccactagctttcgggataccagcctgaaagacgtgctggtgcttgcttgctcgctgttgaaagaggtgtttgctaaaccattgaacctacaggatcagtgccagcagaacctagtaatgcaggtgttaaagcttgtcctgaattgtcttaactttgacttcatcggtagcagcgcagacgaaagcgccgatgatctgtgcactgtccagatcccaactacttggcgcaccattttcctggaacccgaaactctcgacctttttttcaatttgtaccacagccttcctcccctcctttcacagctcgcgttatcctgtctggtccagtttgccagcactaggcgtagtctgtttaatagccccgagcgggcaaaatatctggggaacttaattaaaggcgttaaaaggattctggaaaatccccagggcttaagcgacccaggcaattatcacgagttctgcaggttcctcgcgcgtctgaaaaccaactaccaacttggggagctggtcatggtgaaggaataccctgaagtgattaggctcatcgctaacttcacaatcacatccctgcagcattgggaatttgccccaaattcagtacattatcttcttactctatggcagaggatggtggcatcagtccccttcgtcaagtctaccgagccccaccttttagatacttacgcacccgagatcactaaggcctttatcacaagcaggctcgacagtgtggctattgtggtgcgggatcacctggatgacccgctagatgacaccgccacagtcttccagcaactagagcagttatgcaccgtgtctcgatgtgagtatgaaaagacctgtgccctgttagtccagctgtttgaccaaaatgcccagaactaccaaaaactcctacacccatactccggtgttaccgtggacatcacaatacaagaaggaaggttggcctggctagtgtatctagtgggcacagtcgtgggagggcgtctgacctatacaagtaccgatgaacacgacgccatggatggcgaactgagttgtcgagtattccagctgatttctttaatggatacaggcctgcccaggtgctgcaacgagaaaatagaactagctattctctggttcctggaccagttccggaagacctatgtgggcgatcaacttcagcgaacatcaaaaaagacatttatttacctctag

SEQ ID NO: 237878 - DNA, 9675 bp, synthetic construct
  misc_feature 1..9675: note = Description of Artificial Sequence: Synthetic coding sequence
  source 1..9675: mol_type = other DNA
atgcgcagatctaaagccgatgtagaaaggtatattgccagtgtgcagggctcaactccatcaccacggcagaagtcgatgaaggggttttactttgctaaactgtattacgaggccaaagaatatgacttagctaaaaagtacatatgcacctacatcaatgtgcaagaacgagatcctaaagcccatagatttttgggtctcctttacgagttagaggaaaacacggacaaagctgtcgagtgctatcggagatccgtcgagctcaatcccactcaaaaggacctggtgctgaaaatcgcggaactgctgtgtaagaatgatgtgaccgatggcagggccaagtactggctcgaaagggcagccaagctgtttccaggctctccggcaatttataagcttaaggagcagctcctcgactgcgagggcgaagacggctggaacaaacttttcgacttaatccagtctgaactctacgtaaggcccgatgacgtgcacgtgaatatcaggctggttgaagtttacaggtctacaaaaaggcttaaagacgccgtcgctcactgtcacgaggccgagcgtaatatcgccctgagatccagcctcgaatggaactcttgcgttgtccagacactgaaggagtacctcgaatctcttcagtgtctggagtctgataagagcgactggagagccacaaatacagacctgctgctggcctacgcaaatctgatgctgctcactttgtcaactagggacgttcaggaaagtcgagagctgctgcagagcttcgattcagcactgcaaagcgtcaagtcccttggaggcaatgacgagttgtcagccacttttctggaaatgaagggtcatttctacatgcacgcgggtagcctcttactgaagatgggtcagcacagctctaacgtgcaatggagagcactgtccgaactcgcagcactttgctatcttatcgcatttcaggttcccaggccaaaaatcaagctaatcaaaggggaagctggccagaatctcttagagatgatggcttgtgacaggctgtctcaatcgggtcacatgcttctgaacctgtcccgtgggaaacaggacttcctgaaggagatcgtggagacttttgcaaacaaaagcgggcaaagtgctctgtatgatgcactcttcagttcacagagtccaaaagatacaagctttctagggagtgatgacatcgggaacatcgacgtccgagaacctgagcttgaagacctgacgcggtatgacgtgggagccatccgcgcacataacggatcactccagcatctcacctggttgggactgcagtggaacagtcttcccgctcttcccggaatacgcaaatggttgaaacagctgtttcatcatctcccccacgagacttcgagacttgaaactaacgcaccagagtcaatctgcatactagacctcgaggtgtttctcttaggtgttgtgtatacatcccatctgcagctcaaggagaagtgtaatagccaccacagctcatatcagccactgtgcctgcctctgcctgtttgtaagcagctttgtaccgaaaggcagaagagctggtgggacgctgtctgcactctgatccatcgaaaggccgtgcccggtaacgtagccaaattacgcctcttggtgcagcacgagatcaacacgctccgtgcacaggagaagcatggcctgcaacccgcactgctcgtgcattgggctgagtgtctgcagaagacaggtagtgggctgaattccttttatgatcaaagggagtatatcggccgatctgttcactattggaagaaggttttacccctgctgaagattattaaaaaaaagaactccataccagagccaattgacccgctttttaagcacttccacagcgtggatatacaggcctccgagattgtcgagtacgaggaagatgcacacataacctttgctattctggatgccgtgaacggcaacattgaagacgctgtgactgcatttgaatctataaagtccgtggttagctattggaatttggccttaatttttcatcgtaaggccgaggatatcgagaatgacgccctgagcccggaggagcaggaggaatgcaaaaattacctgcggaaaaccagagactatctgattaagatcatcgatgactccgactcaaatctctctgtggtgaagaaactgcccgtgcctctagagtctgtgaaagaaatgttaaattctgtgatgcaggagctagaagactactccgagggaggccctctatacaagaacggcagtctcagaaatgctgattcagagatcaagcactctactccaagcccaacccggtactctctgagccccagtaagtcctacaaatatagccccaaaacgcctccccgttgggcagaggaccagaatagtctgctcaaaatgatctgtcaacaggttgaggcgataaaaaaggaaatgcaggaactcaaactgaactctagcaattctgcgtcacctcacagatggccaactgagaactatggcccagattcagtacctgatgggtaccagggcagccaaacttttcacggagcccctttgacagtcgccactacaggtcctagtgtttactactcccaatctcctgcctacaattctcaatatcttctgcgcccagccgctaacgtgacccccacaaaaggccctgtgtacggcatgaaccggttacctccgcagcaacacatctatgcttatccacagcaaatgcatacaccccctgtccagtcctcatctgcttgtatgttttcacaggaaatgtacgggccacccgcactgagattcgagtccccagccacgggcatcctcagcccacggggtgacgactacttcaactataacgtccagcaaacttctactaatcctcctcttcccgagcccggttactttactaagccgcctatcgcagctcacgctagccgctctgcagaatctaagacgatagagttcggcaaaaccaatttcgttcaacctatgccaggcgagggattaagaccctccttacctacacaagcccataccacacaacctaccccattcaagttcaactccaattttaagtccaacgatggggattttactttcagcagtcctcaggtggtgactcaacctccacccgctgcatatagcaattctgaatcccttttgggactcttgacaagcgataagcccctgcagggcgatggctactccggagcaaaaccgatcccgggtggccagaccatcggacccagaaataccttcaatttcggtagcaagaatgttagtggcattagcttcacggaaaacatgggatcttcacagcagaaaaattccgggttcaggcggtctgacgacatgtttaccttccatggtccgggaaagagcgtctttgggacgccaactctcgaaactgcgaataaaaatcatgagactgacgggggatctgcccacggggacgacgacgatgacggaccacacttcgaacctgtggttcctcttcctgacaagattgaagtgaaaaccggcgaggaggacgaggaagagttcttctgcaaccgagccaagctgtttcggtttgacgtggagtcaaaggaatggaaagagaggggtatcggtaacgtcaaaatccttcggcacaagacgagcggcaaaatccgactcttaatgcggcgtgagcaggtgctcaagatttgcgctaatcactatatcagccccgacatgaagttgacacctaatgctggaagcgacaggagttttgtctggcacgccttagactatgccgatgagctgcctaagccagagcagctggcaatacgtttcaagaccccagaggaggccgcactgttcaagtgtaaatttgaggaagcccagtccatcttaaaggcccctggaaccaatgtagccatggcttcaaatcaggcggttcgcattgtgaaagaacccacgtcgcacgataataaggacatttgtaagtccgacgccggaaatctaaattttgaatttcaggtggccaaaaaagagggctcctggtggcactgcaattcttgcagccttaagaacgcttctaccgcgaagaaatgtgtgtcttgccaaaacctcaatccttccaataaggagctggtgggcccacccctggccgaaaccgtgtttaccccgaaaaccagccctgagaatgtccaggatcgttttgcactggtgactcccaagaaggagggccactgggactgttcaatttgtctggtgaggaacgaaccaacagtgtctcgctgcatcgcctgtcagaatacaaagagcgctaataagagtggctcttcttttgtgcaccaagcgtccttcaaattcggacaaggcgatctgcccaaacccatcaatagcgacttccgttctgtattttctacaaaggaggggcagtgggactgtagcgcctgccttgtgcagaatgagggttccagcaccaagtgcgcagcctgtcagaatccccgaaagcaaagtctgccagctacaagtattcccacccctgcctcattcaagttcggaacaagtgaaaccagcaagacgctgaaatccggctttgaggacatgtttgccaaaaaagaagggcagtgggactgctccagctgtcttgtgagaaacgaagcaaacgccacccggtgcgtggcctgccagaatcccgacaaacctagcccatccacgtcagtgcccgctcccgctagtttcaagttcggcacgtccgagacctcaaaagcccctaagtctggcttcgaaggcatgttcacaaaaaaggagggccagtgggattgcagcgtgtgcctggtacgcaacgaggcttccgcgacaaaatgcatcgcctgccagaatcccggtaagcaaaatcagaccacctctgcagtaagcaccccggcatcaagcgagacttccaaagccccaaagtcagggtttgagggcatgtttacaaaaaaagaaggccaatgggactgttctgtttgtttggtgcgcaacgaagctagcgcaaccaaatgtatcgcctgtcagaaccccggaaagcagaatcagacaaccagcgccgtcagtacacccgcatcctcagaaaccagtaaggctccgaagtcaggcttcgaggggatgttcactaaaaaggaaggacagtgggattgctccgtttgtctggttaggaacgaagcaagtgctacaaagtgtatcgcttgtcagtgccccagtaagcagaatcagacgacggcgattagcacacccgcatcatcagagatatccaaggcccctaagagcggttttgaaggcatgttcattaggaagggtcagtgggattgcagtgtctgttgcgtgcaaaatgagagttcgtccctgaaatgtgtggcctgtgatgctagtaaacctacacataagccaatcgctgaagccccaagcgcttttactctggggagcgagatgaagctccatgattctagtgggagccaagtgggtaccggattcaaaagcaatttctcagagaaggcctctaagttcggtaacacagaacagggattcaagttcggacatgtcgaccaggagaatagcccatcctttatgtttcaggggtcctctaacactgagtttaaaagcactaaggagggcttcagcatacctgtgagcgctgatggttttaagtttggtatcagcgagccgggaaaccaggaaaaaaagagcgagaaacctctggaaaacggcacaggtttccaggcacaggacatcagtggacagaaaaacgggaggggcgtgatctttggacagacctctagcacatttacctttgccgacctggccaagagcacaagcggcgagggttttcagttcgggaaaaaggatcccaattttaaaggattcagcggcgctggggagaaattattcagttctcaatatggtaaaatggccaacaaggctaacacctcgggggattttgaaaaagatgacgacgcgtataagacagaggacagcgacgacattcactttgagccagtggtacaaatgcccgagaaggtggaacttgtcactggggaggaggacgagaaagtgctgtatagccaacgtgttaaactgttcaggttcgacgccgaggttagccagtggaaagagaggggtctgggaaacctcaagatccttaagaacgaggtcaatggtaaacttcggatgctgatgagaagggagcaggtgcttaaggtgtgtgcaaatcactggataacgaccaccatgaatcttaaacccctttctggaagtgacagggcctggatgtggttagcttctgatttttctgatggggatgctaagctcgagcagctggccgcaaagttcaagacccccgagctggccgaggaattcaaacaaaagtttgaagagtgccagcgacttctgttagacatacccctacagactccgcataagctggttgatacaggcagagccgctaaactgatccagagagctgaagagatgaagagcggcctcaaggactttaagactttcctcacaaatgaccaaaccaaagtcaccgaggaagagaacaagggtagtggaaccggcgctgcaggcgcatctgatacgacgatcaaaccaaatcctgagaacaccggtccaaccctcgagtgggacaattatgacctgcgggaagacgccctggacgacagcgtgtctagtagcagcgtgcacgcgtcccccctggcgtcctcacccgtccgaaagaacctcttccggtttggagaatccaccactgggtttaatttttcttttaaatccgccctgagtccaagtaagtctcccgctaaactcaatcaatcaggaacatccgtgggaaccgatgaggaaagtgatgtgacgcaggaggaagagagggatggacaatattttgaaccggtcgtgccactgcctgacctggtcgaagtgagttcaggagaagagaatgaacaggtagtgttcagtcacagagctaaactgtaccggtatgacaaagacgtggggcagtggaaagaacgaggcatcggagacatcaagatcctccagaattacgacaacaagcaggtcagaatcgtaatgcgcagagatcaggttctcaagctgtgcgccaatcaccgcatcaccccagacatgacgctccagaatatgaagggaacggaacgcgtttggctatggactgcctgcgacttcgccgatggtgagcgcaaagtcgagcatcttgcggtcagatttaagctacaggacgtagccgactcttttaaaaagatttttgatgaagccaagacagcccaggaaaaggatagtttgattacgccccacgtatcaaggtcctcaactcccagagaatcaccttgcgggaagattgcagtggcagtcttagaggaaacaactagagagagaacagatgttatacagggggatgatgtggccgacgcaacaagcgaggttgaggtgagttcaacaagcgagacgacgcccaaggctgtggtgtccccgccaaaatttgtgttcggtagtgaatctgtaaaatctatctttagttccgagaagtcgaagccattcgcattcggtaatagcagcgccaccgggagcctctttgggtttagtttcaatgcgccattaaaatccaataacagcgagactagcagtgttgctcagtccgggtccgagtcaaaagtagaacccaagaagtgtgagttgagcaaaaattcggatatcgaacagtcatccgatagcaaagtcaagaacctttttgcgtctttccccaccgaagagtcttctatcaattataccttcaagaccccagagaaggccaaggagaagaaaaagcctgaggattcaccatcggatgatgatgtgctgatcgtctatgagctgacaccaacagctgagcagaaggccctggccacgaaactcaagctaccgccaacgttcttctgttacaagaaccgcccagactatgtgagtgaagaagaggaggatgatgaagactttgaaactgcagtgaaaaaactaaacggcaagctttatctggacggatccgaaaaatgccgccctctagaggagaacactgccgataacgagaaggaatgtatcatcgtgtgggagaagaaacccaccgtcgaagaaaaggcgaaagctgatactcttaagttgcctcccacatttttctgcggagtgtgcagtgacacagatgaagataacgggaatggagaggattttcagagcgaactgcagaaggtacaggaggcccagaaatcccagacggaggagatcacatccaccaccgattctgtgtacacaggcggtaccgaggtcatggttccctctttttgcaaaagcgaggaacctgattctatcacaaagtctatcagctctcctagtgtttcaagcgagaccatggacaagcccgtagatctctcgactagaaaggagatagacacagactccactagtcaaggagagtcaaagatagtctcattcggcttcggtagcagcacagggctctccttcgccgaccttgcttctagtaacagcggggatttcgccttcggcagcaaagacaagaactttcagtgggctaacaccggggcagctgtcttcggaacccagtctgttggaacccagagcgctggtaaggtgggggaagacgaagatgggtccgacgaggaggtggtccataacgaagacatccacttcgagcccatcgtctcactccctgaggttgaagtgaaaagcggggaggaagacgaggaaattctcttcaaagaacgggctaagctgtataggtgggatcgggacgtgagtcaatggaaagagaggggtgtgggggacattaagattctgtggcataccatgaaaaactattacagaattcttatgcgtcgtgaccaggtttttaaagtgtgcgccaatcacgtaattaccaaaacgatggagctaaagcccctcaacgtgagtaacaatgccttagtgtggacagcctctgactatgcagatggagaagccaaggtggagcagcttgccgtcaggtttaagacgaaggaagttgctgattgcttcaaaaaaacctttgaggagtgtcaacagaatctcatgaagttacagaaaggccacgtgtctctggccgcagaattatctaaggaaaccaatccagtggtctttttcgacgtgtgtgccgacggcgagcccctgggcaggatcactatggagttgttttcaaacatcgtccctcgaaccgctgagaattttcgcgctttgtgcacgggggagaagggcttcgggttcaaaaattcaatcttccacagagtgatcccagattttgtttgccaaggtggtgacatcaccaagcacgacggaaccgggggacagagcatctatggagacaagttcgaggatgagaatttcgatgtgaagcatactggccctgggctgctgtcaatggccaatcaagggcagaacaccaataatagccagtttgtgatcaccctcaaaaaggctgagcacctggactttaaacacgttgtcttcggatttgtgaaggatggcatggataccgtgaaaaaaatcgaatctttcgggagccctaaagggagtgtgtgccggagaatcaccattacagagtgcggccaaatatat

SEQ ID NO: 237879 - DNA, 1500 bp, synthetic construct
  misc_feature 1..1500: note = Description of Artificial Sequence: Synthetic coding sequence
  source 1..1500: mol_type = other DNA
atggctgatctggccaacgaagaaaagcccgctatcgcccctccagtcttcgtgttccagaaggataagggacagaagcgaagcgcgggagggtccagtcctgaaggcggagaggacagcgacagggaggacgggaattattgccctcctgtgaagagggagaggacctcaagcctcacacagttccccccaagccagagcgaagaacggtcaagtggattccgacttaaaccgcctacactaattcacggacaagcaccatctgccggactcccaagccaaaagccaaaagagcagcaacgctccgtgctgagaccagcagttctgcaggccccacagcccaaggctctatctcaaaccgtcccttcaagcggcacgaacggagtgtctctgccagctgactgcaccggtgcagttcctgctgcctctcctgacacggctgcatggcggagtccatccgaggcagccgacgaggtgtgtgctctggaggaaaaggaacctcagaaaaatgagagcagcaatgcatctgaggaagaagcctgcgagaaaaaggaccctgctacccagcaggccttcgtgttcgggcaaaacctgcgggaccgagtgaaactcattaacgagagcgttgacgaagcagacatggaaaacgccggacacccaagtgccgatactccgacggctacaaactatttcctgcagtacatttcatcttcactggagaattctacgaatagcgcagatgcctcctccaataagttcgtgttcggtcagaatatgtctgaaagggtgctgagcccaccaaaattgaacgaagtgtcgagcgacgcaaatcgcgaaaacgctgccgcagaaagtgggagcgaaagctctagccaagaggctaccccggagaaagagagtctcgccgaatcggctgcagcctacacaaaggccaccgcacgaaagtgccttctggagaaagtcgaagtgatcacaggtgaagaggccgagtcgaatgtcctccagatgcagtgtaagcttttcgttttcgataaaaccagccagagttgggtagaacgtggacgcggacttctgcgactgaacgatatggcctccacagatgatggaaccctacagtcccgcctcgtgatgaggacccagggtagcctgagacttattctgaataccaagctgtgggctcagatgcagattgataaggccagcgagaaatcgattcggattactgcaatggacaccgaggaccagggagtgaaggtgttcctgatcagcgcctcctccaaggatacggggcagctatatgctgccctccaccataggattctagctttgagatcacgggtcgagcaggaacaagaagcaaagatgccagcgcctgagccaggtgccgcacctagcaacgaagaggacgactctgatgatgacgacgtgttagccccaagcggcgcaacagctgcaggggctggagatgagggagatggccaaactaccgggtccacgtag

SEQ ID NO: 237880 - DNA, 1194 bp, synthetic construct
  misc_feature 1..1194: note = Description of Artificial Sequence: Synthetic coding sequence
  source 1..1194: mol_type = other DNA
gctgacgtgactaaggccgaaaagcctgccattgcccctcctgtcttcgtcttccagaaagataaaggtcaaaaaaggagcgctggaggaagctcaccagaaggaggtgaagactctgacagagaagacggtaactactgtcccccagtgaagagggagcgaacgtcatcactgacacagtttccaccgtcccagagtgaggagcgttcctcaggctttaggctcaagccgccaacactgattcacggacaggccccaagtgctggcctgccatcacagaaaccaaaagagcaacagcggtctgtgcttcggcctgcagtcctgcaagcccctcagcctaaagccctgtctcagacggtcccgtcgtccgggacaaatggcgtgtccctgccagcagattgtaccggtgcggtgccagcggctagtcctgatactgccgcatggcggagtccaagcgaagcagcggatgaagtatgcgccctcgaagaaaaggaaccacaaaaaaatgagagctcaaacgcttctgaggaggaggcatgtgaaaagaaagaccccgcaacccaacaagctttcgtgtttggtcagaatctcagagatagggtgaaactgattaacgagtctgtggatgaggctgatatggagaacgcaggacatccttcggcagacacgcccactgcaactaactacttccttcagtatattagttccagccttgaaaattcaaccaacagcgccgacgccagttcgaacaagttcgtctttgggcaaaatatgtctgagagagtcctgagtccgcctaagcttaacgaagtgtcttccgacgctaatcgggagaatgcagctgccgaatcaggatccgagagctcaagccaggaggccacccccgaaaaggagtccttagccgagtccgctgctgcgtacactaaggccaccgctagaaaatgtctgctggagaaagttgaagtaattactggtgaggaagcggaatctaatgtgctgcaaatgcaatgcaaactgttcgtgttcgacaaaacaagccaaagctggtggctcctacgacaccctcatccatcacatcctgctgtgggcccttgcctgtgtggggagcagcctgccctgtgcccatgtcctgggctgcctaattaccgtccagggacgcccgcacagctgggcggattgctcgttagggtgtag

SEQ ID NO: 237881 - DNA, 1704 bp, synthetic construct
  misc_feature 1..1704: note = Description of Artificial Sequence: Synthetic coding sequence
  source 1..1704: mol_type = other DNA
atggctgacctggccaacgaagaaaagcctgccatcgccccaccagtctttgtttttcagaaggataagggccaaaagagcccggctgaacagaagaacctgagcgacagcggtgaggagccgaggggggaggcagaggctccacaccatggcacaggtcatccagagagcgcaggcgaacatgccttggagcctcctgccccagcgggagccagtgcatccacccccccacctcctgcccctgaagctcagctccctccgttccccagggagctcgctggccgatcagccggtggtagcagccccgaggggggtgaggatagtgaccgtgaggatgggaattattgtccaccagtcaagagagaaagaacctcttccctgactcagttccctccttcccaatctgaggagagaagttctgggttccggctgaagcctcctaccttaattcatgggcaggccccatcagcgggactgccctctcagaaacctaaagagcagcagcggtccgtgctgaggcccgcagtgttgcaggctccccagcccaaggctttgagtcaaactgtgccatcttccggcactaatggggttagtcttccagctgactgcactggcgcagtgcctgctgctagtcccgataccgccgcatggagatccccttcagaggcagccgacgaggtgtgcgctttggaggaaaaagagccacaaaagaacgagtcatccaacgcctcggaggaggaagcgtgtgagaaaaaagatcctgctactcagcaggcttttgttttcggacagaatctaagagatcgtgtcaagttgattaacgagagtgtcgacgaagccgatatggagaacgccggtcatccctcggccgacaccccaactgcaacgaattactttcttcaatatataagcagtagtctagaaaactctaccaattcagcagacgcctcttcaaataagttcgtatttggtcagaacatgagcgagagggtcctctcgcccccaaaactgaacgaggttagttccgatgctaaccgcgaaaatgcggctgctgaatccgggagcgaatcgtctagccaggaagccacaccggagaaagagtccctggctgaaagcgccgcagcttacaccaaggctaccgcgagaaaatgtctgctcgaaaaagtggaggtcatcactggagaggaagcagaaagcaatgttttacagatgcagtgtaagttattcgtcttcgataagacatctcaatcatgggtggagcgagggagaggactgctgaggctgaatgatatggccagcaccgacgatggcaccttacagtccaggttagtaatgcgcactcaagggagcctgcggcttatcttgaataccaaattgtgggctcaaatgcagattgacaaagcgagcgagaagtctatcaggataacagccatggataccgaagaccagggggtgaaagtttttcttatatcagcttcatctaaggataccggacagctgtatgcagcactgcatcatagaatattggcgcttaggagtcgcgtggaacaggagcaggaggctaagatgcctgccccagagccaggagccgctcccagtaatgaagaagacgattctgatgatgatgatgtgcttgcgccatctggtgcaaccgccgcaggcgctggcgatgagggagacggccagaccactgggtctacctag

SEQ ID NO: 237882 - DNA, 1689 bp, synthetic construct
  misc_feature 1..1689: note = Description of Artificial Sequence: Synthetic coding sequence
  source 1..1689: mol_type = other DNA
atggctgacctggcgaatgaggaaaaacccgctatcgccccaccagtgtttgtctttcagaaggacaaaggccaaaagtccccagcagagcagaagaatctgagcgacagtggggaggaacctcgtggcgaagccgaggcacctcatcatggcactggccatcccgagtcggctggcgagcatgcgctggagccccctgcccctgcaggggcatcagcctccacaccccctccgccagcccctgaggcccagctcccccctttccccagagagctagccggtcggtcagcaggtggttcaagtcccgagggcggagaggattctgacagagaggacggaaactactgccccccagtaaaacgcgaaaggaccagtagtctgacccaatttcctccatctcagagcgaagagagaagcagcggattcagactgaagcccccaaccctgattcacggacaggccccttctgcaggattacccagccagaaacctaaagaacagcagaggtctgtgctgcgccctgctgtattgcaggcacctcaacctaaggctctgtctcaaactgtaccaagttccggcaccaatggcgtgtccctgccagcagactgcacaggagccgtgccagcagcctcacccgataccgctgcctggcgcagcccctccgaggcagccgacgaagaaaaagagcctcagaagaacgagtcttccaacgcttcagaggaggaagcttgcgagaaaaaggatcccgcaacccaacaggcctttgtgttcgggcagaacctgcgagatcgggtaaaactgatcaacgagagcgttgatgaagctgatatggagaatgctggacacccgtccgccgacacgccaactgccacaaattactttttgcagtatatctcatcgtcgctggagaactcaactaacagtgcggatgctagctctaacaagtttgtgtttggccagaacatgtcagaacgggtgctatcacctcctaagcttaacgaggtgtcatctgatgccaatcgcgagaatgccgctgccgaatctggctcagaatcatcctcccaagaagctacaccagaaaaagagtccttggcagaatccgcagcagcctacacgaaggccacagctagaaaatgcttgctggagaaggtagaggtcattactggagaggaggcagaatctaatgtgcttcagatgcagtgtaagctattcgtgtttgataagacgtcacagtcctgggttgaaagaggcaggggcctgctcaggctcaatgatatggcatcaacggacgatgggaccctgcagtcacgcctcgtgatgcggacccaaggatccctgcggttaatcctcaatacaaaactgtgggcacagatgcagattgacaaggcctcagagaagtcgatccgcatcacagcaatggacaccgaagaccagggagtgaaggtcttcctgatttcagcttccagtaaggataccgggcagctatatgccgcactgcaccacagaatcctagcgctgcggtctcgagtggagcaggaacaagaagctaaaatgcccgcacctgagcccggagcagcccctagtaacgaggaagatgactctgacgacgatgacgtgttggcacctagtggggctactgctgctggtgctggcgatgaaggcgacgggcagaccaccggtagcacatag

SEQ ID NO: 237883 - DNA, 1320 bp, synthetic construct
  misc_feature 1..1320: note = Description of Artificial Sequence: Synthetic coding sequence
  source 1..1320: mol_type = other DNA
atggctgacctggccaatgaggaggaaaggtcgtcaggcttccgacttaaaccacctactttgattcacggccaagcaccttcagccggtctaccttctcaaaagcccaaagaacaacaaagaagtgtgctgaggcctgcagtccttcaagcaccccagccaaaagctctcagccagacagtgccctctagcggtacgaacggagtatcactgcccgctgactgtaccggagccgtccccgcagccagtcccgataccgctgcttggcgtagcccgagtgaggcagccgatgaggtgtgtgccctggaagagaaggaacctcagaaaaatgagagttctaacgcctcagaggaagaagcgtgtgagaagaaagatcccgcaactcagcaggcctttgtatttggacagaatctgagagaccgggtgaaacttatcaatgaatctgttgacgaggccgacatggaaaacgcaggccacccctccgccgacacacctactgcgactaattactttttgcagtatatttcaagtagcctagaaaactcaaccaatagtgctgacgcgagcagcaacaaatttgtcttcggccagaatatgtctgagagggtgctgtcccccccaaaattgaatgaagtctcatcagatgccaacagggaaaatgctgcggctgaatctggcagtgagtcttccagccaggaggcgactcctgaaaaggaatctctggccgaatccgctgctgcgtatacaaaggctactgccagaaaatgtctcttagagaaagtggaagtgatcactggtgaagaggcggagtccaatgtgcttcaaatgcaatgtaaactgttcgtgttcgacaaaacttcccagtcctgggtagaacgtggccgaggcttgctgcgactgaacgacatggcttctacggatgatggcaccttgcagtcccgccttgtaatgaggacccagggttcactcaggctgattctgaacacgaagctatgggcccaaatgcagatagacaaagcgagcgaaaagagcattcgcataacggccatggataccgaggaccaaggagtgaaagtttttttgatctcggcgtcatccaaagacaccgggcaactctacgccgctcttcaccatcgcatcttagcgttgaggagtagggtggagcaggaacaagaggcaaaaatgccagcacccgagcccggtgccgctccttctaatgaggaagatgacagtgatgacgacgatgtactcgccccttccggcgcaacggccgctggagccggagatgaaggggacgggcagacaacgggttctacgtag

SEQ ID NO: 237884 - DNA, 2190 bp, synthetic construct
  misc_feature 1..2190: note = Description of Artificial Sequence: Synthetic coding sequence
  source 1..2190: mol_type = other DNA
atgagtggtcaaccaccccctccccctccgcagcagcagcagcagcaacagcaactttccccccctccccctgcagcacttgccccagtatcaggggttgtgctccccgctccgccagcggtcagcgcaggttctagccctgcagggtctcccggtgggggagccggtggggaggggctgggtgctgccgcagcggcactgctcctgcatccccctccacctcccccacccgcaacggcagctccaccaccccctccacccccaccacctccccctgcgagcgctgccgctcctgccagtgggccaccagcgcctcccggtctggccgcagggccaggccctgccggaggagctcccacgcctgccctggtcgctggttcctcggcggctgccccatttcctcacggcgatagtgctttgaatgaacaagagaaggaactacagagaaggctgaagcgactttaccctgccgtggatgaacaggaaacccctctccccagaagctggagccctaaggacaagtttagctatatagggctgagccaaaataacctcagagttcattacaaggggcatggcaaaacaccaaaagacgcagccagcgtcagagcaacccatccgatccccgctgcctgtggcatctattattttgaggttaaaattgtcagtaagggtcgcgatggctatatggggatcggcctcagcgctcagggcgtgaacatgaataggcttccaggatgggataagcattcatacggctatcacggtgacgacgggcactctttttgtagttccggtacaggtcagccctatggaccaacctttaccactggcgatgtcatcggctgttgtgtaaacctgattaataacacgtgcttctatacaaagaacgggcactctcttgggattgcgttcacagacctgcccccaaacttatacccgaccgtggggctgcagacgcccggagaagtggtggacgccaatttcggacagcaccccttcgtgttcgatatagaggattacatgagggagtggagaacaaagatccaggcccagatcgatcgatttccaatcggagatcgggagggtgagtggcaaactatgatccagaagatggtctcatcttatctggtccaccacggctactgcgccaccgcagaggcctttgccaggagtaccgaccaaacagtgctggaagagctggccagcattaaaaatcgccagagaattcagaagctcgtgctggctgggcgtatgggcgaggccatcgaaacaacccagcagctttaccctagtcttctggaacggaatcctaatcttttgttcacgttgaaggtgagacagttcattgaaatggttaacggcacagattcagaagtccgatgcctgggtggaagaagcccaaagagccaggacagttatcctgtttcacctaggcctttctctagcccttccatgagcccttcccatggcatgaatatccataacctggcttccgggaaggggtcaaccgcccatttctcaggctttgaatcatgttcaaacggtgttatttctaacaaagcacaccagagttactgccactccaacaaacatcagtcctccaacttgaatgtccccgagctcaacagtataaatatgagccgctctcagcaggtgaacaattttacttccaacgatgtcgatatggaaacagatcactactcaaacggggtgggtgagacttcgtccaatgggttcctgaacggctcctcaaagcatgatcacgaaatggaagattgtgacactgagatggaggtcgatagttcacagctcagaagacagctctgcgggggttcccaagccgctatcgagcggatgattcacttcgggagagagctgcaggcaatgtctgaacagctccgaagggactgtgggaaaaacaccgctaacaaaaaaatgttgaaagacgcgttctcactgctcgcttatagcgacccatggaatagccctgtgggaaaccagctggaccctattcagagggagccagtctgctccgctctgaattcagcaattttggaaactcataacttgcccaagcagcctcccctggctctggctatgggacaggctacccagtgccttggactgatggcccgtagtggaatcggcagctgtgctttcgccacggttgaggactacctacactag

SEQ ID NO: 237885 - DNA, 1176 bp, synthetic construct
  misc_feature 1..1176: note = Description of Artificial Sequence: Synthetic coding sequence
  source 1..1176: mol_type = other DNA
atgtccggacaaccaccacctccgccaccccagcaacagcagcagcagcaacagctttccccgcctccacccgctgctctggcacccgtctccggcgtggtacttccagccccaccggcagtgagtgctgggagcagtccagccggatcccctggcggaggagccggaggtgagggcctgggcgctgcagccgctgcactcttgctccacccgcctcccccaccaccacctgcgaccgctgccccaccccctccacctcctccaccccctccaccagcaagtgctgcagcaccagcttccggacctccagccccacccggactagccgcaggccctggccctgccggaggagctccaacccccgcactcgtggctggttcctccgctgcagcaccatttcctcatggggattccgcccttaacgagcaggaaaaggaactccagcggaggctgaagaggctgtaccctgccgtggacgagcaggaaacccccctccctaggagttggtcacctaaggacaaatttagctatatcggcctgtctcagaacaatctacgggtccactataaaggacatggtaagacccctaaggacgccgcttccgtcagagccactcatccaatccctgccgcatgcggcatttattatttcgaagtcaagatcgtctctaagggcagagatggttacatgggcattggtctttccgctcagggtgtgaatatgaaccggctccctggatgggataaacacagctacgggtaccacggagacgatgggcacagtttctgtagcagcggtaccggccagccctatggaccgactttcacaacaggagacgtaatcggatgttgcgtgaatctgattaataacacttgtttctatacgaaaaatgggcactccttgggtatagcttttaccgacctccctcccttggattacccagtcagtcctagaccttttagcagcccctctatgagccctagtcacggcatgaatatccacaacctggccagtggaaagggaagtaccgcacatttctctggattcgaatcttgtagcaacggcgtcatctcgaacaaggcacaccagtcgtactgtcacagcaataagcatcaatctagtaacgagtgtacccgaaccaaacaatacaagtacgtaaaaattacagcttcatag

SEQ ID NO: 237886 - DNA, 1503 bp, synthetic construct
  misc_feature 1..1503: note = Description of Artificial Sequence: Synthetic coding sequence
  source 1..1503: mol_type = other DNA
atgggtatcgggttgtccgcccagggtgtcaatatgaaccgattgcctggttgggataagcatagttatggctatcacggtgacgacggacattccttctgttcttctgggactggccagccgtatgggccaacttttaccactggtgacgtcatcggctgttgtgtcaacctgataaacaacacatgtttttacactaagaatggacacagtctggggatagccttcacagacctgccccctaatttatatcctaccgtaggcttacagacaccaggcgaggttgtggacgcgaacttcgggcagcaccctttcgtttttgatatcgaagactacatgcgcgaatggcgtacaaaaatccaggcccagatcgacaggtttcccattggcgatagggagggggaatggcaaacaatgatccaaaaaatggtttccagctaccttgtgcaccacggctactgcgccactgctgaagctttcgcgagaagtaccgatcagacagttttagaagagcttgcttccattaaaaatagacaaaggatacaaaagcttgtactcgctgggagaatgggggaagctattgagacaactcagcagttgtacccttccttgctggaaaggaaccctaacctgttgttcacactcaaagttagacagttcatcgagatggtcaatgggaccgattctgaagttaggtgtctgggcggtagaagtccgaaatcacaggactcttacccggtgtctcctcgccctttcagtagcccatcaatgtcccctagccacggtatgaacattcacaacttggcctctggcaaaggatcgactgcccacttttccggctttgagtcttgttctaacggagtaattagcaataaagctcaccaatcctactgtcattccaacaaacatcaatccagcaatctgaacgtgccagagctgaatagcatcaacatgtcgcgatcccagcaggtcaataatttcacaagtaacgatgtggacatggagactgaccactacagcaatggcgtcggagagacatcctctaatggtttcctgaatggcagtagcaagcacgaccacgaaatggaggactgcgataccgagatggaggtggacagcagccaactcaggcgccagctgtgcggtggctcccaggccgcaattgagcgaatgatccatttcggcagagagctgcaggccatgtctgagcagctgcgccgtgactgtgggaagaacaccgcaaacaaaaagatgcttaaggatgcattcagtctacttgcttatagcgacccttggaacagcccagtcggcaatcaacttgatccaatacagcgtgagcccgtgtgttccgctctgaattccgccatcttggagacacataacctgcccaagcagcccccactcgctctggccatggggcaagctacacagtgtttagggctgatggcacggagcgggataggaagctgcgccttcgccaccgtcgaagactacctccattag

SEQ ID NO: 237887 - DNA, 387 bp, synthetic construct
  misc_feature 1..387: note = Description of Artificial Sequence: Synthetic coding sequence
  source 1..387: mol_type = other DNA
atgtttgatgtgacctctcgagtgacttacaagaatgttcctaattggcatcgcgacctcgtgagggtttgtgagaatattccaattgtcttgtgcgggaacaaagttgatatcaaagaccggaaggtgaaggctaagtctatcgtcttccaccgcaaaaaaaatctgcagtattatgatatcagcgccaaatccaactataattttgagaaaccgttcctgtggctggctcgcaagcttattggcgatccgaacctcgagtttgtcgccatgccagcgctggcacccccagaggtggtgatggacccagcactggcagcccaatatgagcacgacttggaagtcgctcagactactgccttaccagacgaagacgacgatctgtag

SEQ ID NO: 237888 - DNA, 702 bp, synthetic construct
  misc_feature 1..702: note = Description of Artificial Sequence: Synthetic coding sequence
  source 1..702: mol_type = other DNA
atggctgcacagggagaaccccaggtgcagttcaagttggttctcgtgggtgacgggggaacaggcaagaccacctttgtgaaacggcaccttactggcgagttcgaaaagaaatatgtcgctacactgggagtcgaggtacaccctcttgtattccacacaaaccggggaccaattaagttcaatgtctgggataccgctgggcaggagaagttcggaggcctgagggatgggtattacattcaggaaatgggcatccatcacgttgctcatgctggacttgaactgatgagctcagcacaatgtgccataattatgttcgacgtaacgtccagggttacgtacaagaatgtcccaaattggcaccgtgatctagtgcgggtgtgtgagaacatccctatcgtcttgtgcggcaacaaagttgacattaaggaccggaaagttaaagccaagtcgattgtctttcaccggaaaaaaaatcttcaatactatgacatctctgcaaaaagtaactacaattttgaaaaacctttcctctggctagccagaaagctcatcggggatcctaacttggaattcgtagctatgccggcactcgcacctccagaagtcgtgatggaccctgcccttgcagcacagtatgaacacgacttggaagtggcccagacgaccgcccttccagatgaggatgacgacttatag

SEQ ID NO: 237889 - DNA, 651 bp, synthetic construct
  misc_feature 1..651: note = Description of Artificial Sequence: Synthetic coding sequence
  source 1..651: mol_type = other DNA
atggccgcacagggggagcctcaagtccaattcaagctggtactggttggtgacggtggcaccggcaagacgacctttgtgaaacggcatctgaccggcgagtttgagaaaaaatatgtagccactctcggtgtcgaggtgcacccactggtttttcatacaaaccggggaccgatcaaattcaatgtgtgggacacagctggccaggaaaagtttggaggcctgagggatggttactacatacaggcacagtgcgccattatcatgttcgatgtaacttcccgagtaacttataaaaacgttccaaactggcacagggaccttgtacgggtatgtgagaacatacccattgtcttgtgtggaaacaaggtggacattaaggaccgcaaagtgaaggctaaaagtatagtgttccacaggaaaaaaaacctgcagtattatgacatatctgccaagagcaattataactttgaaaaaccgtttctgtggctagctaggaaactgattggagatcccaacctcgagttcgtcgctatgccagcactggcccctccagaggtggtcatggatccagcccttgccgctcagtatgaacacgacctggaagtcgctcagactacggccctgcccgatgaggatgatgacttatag

SEQ ID NO: 237890 - DNA, 705 bp, synthetic construct
  misc_feature 1..705: note = Description of Artificial Sequence: Synthetic coding sequence
  source 1..705: mol_type = other DNA
cgaagaaggcgcttaaggttgcgtcgcctcaattgcgcgtccgccatcttccccgctagtgtgggccgtgcacgtaggaggttttggaagctcgtcttggtgggagacggcggaactgggaagacgacctttgttaagcgccacctaaccggcgaatttgagaaaaagtacgtagcaaccctaggggtcgaagtgcaccccctggtattccatactaaccgcggacctattaaattcaacgtgtgggacaccgctggccaggagaaattcggcggtcttcgtgacggatactatatacaggctcagtgcgcaattatcatgttcgacgttacctcacgggtgacgtataaaaatgtgcccaattggcacagagacctggtgcgcgtctgtgagaatatccctatcgtgctgtgtggaaacaaagtggatatcaaggatcggaaagtgaaggcgaaaagtattgtcttccataggaagaaaaatctccagtattacgacatatccgccaagtcaaactataactttgaaaagcctttcctctggctggccagaaaattaattggcgatcccaatctggaattcgtggccatgccagccctcgctcccccagaggtcgtcatggaccccgctttagccgcacagtatgaacatgatctcgaagttgcccagacaactgctttgcctgacgaagatgacgatctgtag

SEQ ID NO: 237891 - DNA, 387 bp, synthetic construct
  misc_feature 1..387: note = Description of Artificial Sequence: Synthetic coding sequence
  source 1..387: mol_type = other DNA
atgtttgatgtcacgtctagggtcacctataagaatgtacctaactggcacagggatctagtcagagtgtgcgagaacattccgatcgtactgtgcgggaataaggtcgatattaaggaccgaaaagtgaaggcaaaaagcatagtgtttcatagaaagaagaaccttcagtactatgatattagcgccaaatccaattataacttcgagaagccatttttatggctcgcccgaaagctcattggcgacccaaatctggagtttgttgccatgcccgcactggcccctcctgaagtggttatggacccggcactcgcagcccaatatgagcatgacctggaggtcgcccagacaactgcgctaccggatgaggacgacgatctgtag

SEQ ID NO: 237892 - DNA, 651 bp, synthetic construct
  misc_feature 1..651: note = Description of Artificial Sequence: Synthetic coding sequence
  source 1..651: mol_type = other DNA
atggcagcccagggggagccccaggtgcagttcaagttggttctggttggagacggtgggaccgggaagaccacctttgtcaagagacaccttacaggtgagttcgaaaaaaagtatgtggctactctgggcgtcgaggtgcacccactggttttccacactaatcggggtcccatcaagttcaacgtttgggacactgctgggcaggagaagttcggcggactccgcgacggatactatatccaggcccaatgcgccatcattatgtttgatgttacatcacgagtgacatacaaaaatgtgcccaattggcatcgcgatctggtacgcgtctgtgagaacattcccatcgtgctgtgtgggaacaaggtggacatcaaagatcggaaggttaaagcaaagtccatcgtgtttcatcggaagaaaaatctgcaatactatgatatctccgctaagagcaattacaactttgaaaaacccttcctctggttagctagaaagcttatcggtgaccctaacctagagtttgttgcaatgcctgccctggctccaccagaggttgttatggatccagctctggcagctcagtatgagcacgacctggaagttgcacagacaaccgctctgcccgatgaggacgacgacctgtag

SEQ ID NO: 237893 - DNA, 5270 bp, synthetic construct
  misc_feature 1..5270: note = Description of Artificial Sequence: Synthetic coding sequence
  source 1..5270: mol_type = other DNA
atgcgacggtccaaggcttatggcgagcggtacttggctagtgttcagggatccgccccttcacctggcaaaaagttgcgcggattctacttcgcaaaactgtactacgaggctaaggaatatgaccttgctaagaaatatgtgtgcacctatctctccgttcaggaacgcgatccaagggctcatcgcttcctgggactgttgtacgagctggaggagaacaccgagaaggctgtggagtgctaccgccgaagtctggagcttaaccctcctcagaaggacctggtcctcaagatagcggaactgctgtgtaagaatgatgtgaccgatggacgtgccaagtactgggtggaaagggccgctaagctgttccccggatcgcccgctatctataagctcaaagaacatctgctcgactgtgagggcgaggatggctggaataagctgtttgattggattcagagtgagttgtacgtccggccagatgatgtacacatgaatatccgattggtggaactgtacaggtctaataaacgcttgaaagacgctgtagctagatgccatgaggcagagcgcaatatcgctctccgctccagcctagaatggaactcatgcgttgtccaaactttaaaggaatatctcgaatcactgcaatgtttagaatccgataagagtgattggcgggcaacaaatactgacttgctcttggcatacgccaacctaatgctgctcacgctgagtaccagggacgttcaggagtctcgggaattgctggagtcgttcgacagcgccttacaatctgcaaaatcctccctggggggaaacgacgagttgtcagctaccttcctggagatgaagggccacttctatatgcacgctggatctttattgctgaagatgggtcagcacggcaacaatgttcagtggcaggcattgtctgagttggccgcattgtgttatgtaattgcgttccaggtgcccagaccaaagatcaaactgattaaaggagaggccggacagaaccttctggaaatgatggcatgcgatcgcctttcacagtctggtcacatgctgttgaacttgtctagagggaagcaagattttctgaaagaagtggtggagacctttgccaacaaaagcgggcaatccgtgttgtacaatgctttgttttcctcacagagctccaaggatacatcttttctgggatctgacgatatagggaacatagatgtccaggagccagagttagaggatctggccaggtacgacgtgggcgctatccaggcgcacaacggttcccttcagcaccttacctggctcggcctccagtggaacagtctgcctgctctgcctggtatcagaaagtggctaaagcagttgttccatcacctgccacaagaaacgtctaggctcgaaacgaatgcccctgaatctatttgcatcttggacctggaagtgttccttctcggagtggtttacactagtcacctccagttgaaggaaaagtgcaattcacatcacagcagctaccagcccctatgcttacctcttcctgtctgtaagagactgtgcactgagaggcagaagtcctggtgggatgctgtgtgtaccctgatccaccgcaaagcagtacccggaaacagtgcggagcttcgtctggtagtgcaacacgaaatcaacactctgagagcccaagagaagcatgggctacagccagcactgctagtacattgggctaaatgcctgcaaaagatggggaggggcttaaactcttcttatgatcagcaggaatacattggacggtcagtgcactactggaaaaaagtgctccctctgctaaaaattatcaaaaagaattccataccagagcctatcgacccactgtttaagcacttccacagtgtagatatacaggcttccgaaatagttgaatatgaggaagacgcacatattacatttgcaatcttggatgccgtccacggcaacatcgaggatgccgtgacagcattcgaaagtataaagtctgtcgtttcctactggaacctggcactgatcttccaccgcaaggcggaagatattgagaacgacgccgtgttccctgaagaacaggaagagtgcaagaactatctgagaaaaacaagggattacttgatcaaaatcatcgacgattccgattctaacctatcggtggtgaaaaagctgccagtgccactggaatcggtgaaggaaatgctgaaatcagttatgcaagaactcgaggattattctgaaggtggcccactgtataaaaatggtagcttaagaaacgctgattcagaaatcaagcactcaaccccaagtcctactaagtacagcctcagtccttccaagtcatacaagtatagtccaaagacaccacctcggtgggccgaagatcaaaattcactgcgcaaaatgatctgtcaggaagtgaaagcaatcaccaagctaaattctagtaagtcagcaagcagacacagatggcctaccgaaaactatgggcctgacagtgtgcctgatggatatcaagggtctcagacatttcatggggcaccactcaccgttgcaactacaggtcccagcgtgtattactcccagtctcctgcctataactcacagtatctcctgaggcctgcagctaacgtgaccccaaccaaaggctcctccaatacagagtttaaatcaacaaaagagggcttttctatcgctgttagcgctgacggcttcaagttcggaatttcagagcccggaaaccaggagaaaaagtctgaaaagccacttgagaacgataccggcttccaggcacaggacatttccgggcagaaaaatggaagaggcgtgatctttggacagacctccagcacgtttacatttgccgacgtggccaagtccacttctggagaggggtttcagttcggcaaaaaggatcctaatttcaagggatttagcggggctggcgaaaagctgttttcttcgcagtgcggtaaaatggcaaataaggccaatacgagcggcgattttgagaaagatgacgatgcctgcaagacagaggatagtgatgacattcacttcgagccagtggtacagatgcccgaaaaggtggagctcgtcaccggggaagagggagagaaagtgctatactcacagggcgtgaagctgttcaggtttgatgccgaaattagccaatggaaggagcgcggactggggaacctgaaaattctaaagaacgaggtcaatggaaaaccccgtatgctgatgcggagggatcaggtcctgaaggtctgcgctaaccactggattacaacaacaatgaaccttaagcctttgtccggttccgacagggcttggatgtggttggcatccgacttttccgacggagacgctaagctcgaacgcctcgccgcacagtttaagacccctgagttggcggaggaattcaaacaaaaatttgaggaatgccagagactcttgttggatattccacttcagacacctcacaaactggtcgataccgggagagccgcaaagctgattcagcgggctgaggagatgaagtcggggctgaaggatttcaaaacgttcctgaccaacgaccagactaaggtcacggaggaggagaataagggatcaggcaccggagcagctggagcgagcgacacgaccatcaaacccaaccccgagaacacaggtccaaccttagaatgggacaattatgatctgagggaggatgcgcttgacgacaatgtaagcagttcctccgtgcacgattcgccactcgccagttcccctgttaggaagaacattttcagattcgacgaaagcaccactgggttcaatttttccttcaagtccgcactgtccctgagtaaatctcccgcaaaactaaatcaaagtggcacgtccgtgggcactgatgaagagagcgacgtaacacaggaagaagaacgcgacgggcagtactttgagcctgtcgtgcctctcccggaccttgttgaggttagcagcggggaggaaaatgaacaggtagtttttagtcaccgggctgaactgtaccgttatgataaagacgtgggccaatggaaggaacggggaattggggatataaagatccttcagaactacgataataagcaggtacgaatcgttatgaggagagatcaagtgctgaagctctgtgccaaccataggattaccccggacatgtctctgcagaacatgaaggggacagagagggtatgggtgtggaccgcatgtgactttgcagatggcgagcggaaagtggagcacttggccgtccggtttaagctgcaggacgttgccgacagcttcaaaaagatctttgacgaggccaaaacggcgcaagaaaaggactcgctgataacaccgcacgtgtccagatcaagcacgcctagagaatcaccatgcggaaaaatcgctgtcgccgtgctcgaagagactactagagagcgcacagacgtcatccaaggcgacgatgtggccgacgccgctagtgaagtggaggtgtcatcgacgagcgaaaccacgactaaggctgttgtctccccccctaagttcgtgtttgggtccgagtcagtcaaacgaatttttagctctgagaagagtaaccctttcgccttcggcaatagttcagctacagggagtctgtttgggttttcttttaacgccccactgaagtctaatgatagcgaaaccagcagcgtcgcacaaagtgggtcagaatcgaaagtggaacctaagaaatgtgaattatccaaaaacagtgacattgagcaatcatccgattcgaaagtgaagaacctttccgcctcatttcctatggaagagtctagcatcaactatacctttaagacccccgaaaaggaacctcctttgtggcatgccgagttcaccaaggaggaactggtgcagaagctctcctccaccaccaagagtgctgatcagttgaatggtctcctgagagagaccgaagctacaagtgcggttttgatggaacagataaagcttctgaagagtgaaatcagacgcctcgagaggaatcaggaagagagcgccgcaaatgtggaacacctgaaaaatgtccttttacagttcatcttcttgaaacccggatccgaaagagagtccctgctccccgtcattaacacgatgctgcagctgagtcctgaggagaaaggtaagttagcagccgtggcccaggggctccaggagacctcaatccctaaaaagaagta

SEQ ID NO: 237894 - DNA, 5246 bp, synthetic construct
  misc_feature 1..5246: note = Description of Artificial Sequence: Synthetic coding sequence
  source 1..5246: mol_type = other DNA
atgaatgtcatgggtttcaacactgaccggctggcgtggacgcggaacaagctcagggggttctacttcgccaagctctattatgaagccaaagaatacgatctggccaaaaagtacgtgtgcacctatctttctgtccaggaacgggatcccagggcgcatagatttctgggacttctctatgagctagaagagaacaccgagaaagcggttgagtgttatcggagatctctcgagctgaatcccccacagaaggatctggtgctcaagattgctgagctgctgtgtaaaaatgatgtgacagatgggcgagctaagtactgggtagagcgagcagccaaactgtttccaggctccccagccatttacaagcttaaagagcatttgctcgactgtgagggcgaggatggatggaacaaactgttcgactggatccagtcagagctgtatgtgcggccagacgacgtgcatatgaatattagactagtagagctatacagatctaacaaaagactgaaggatgccgtagcacgatgccacgaagccgaaaggaatatcgcgttacgttccagcctggagtggaactcatgcgtggtgcagacattaaaagagtacctggagagcttacagtgcctggagtccgacaaaagcgactggcgggctactaataccgatctcctgctggcatatgctaacctcatgctcctgacattatctactagagacgtgcaggagagcagagaactactagagtctttcgacagcgcgctgcaatccgcaaagagctctcttggagggaatgacgaactttctgccacttttctggaaatgaaaggtcacttttacatgcacgccggatctttacttctgaagatgggacagcacggaaacaatgtgcagtggcaggcgttgagcgagctcgcagcactatgttacgtaattgccttccaggtccccagacccaagatcaaactgattaagggggaggctgggcagaacctcttggagatgatggcttgtgaccgactgtcgcaatctggacacatgttactgaacctgtccagagggaaacaggatttcctcaaagaggtcgttgagacgttcgccaacaagagcggtcagtccgttctttataacgccctgttctctagtcagtcttcaaaagatacctccttcctcggcagtgatgacattggaaatatagacgtgcaagagcccgagctcgaagacctggctagatacgacgttggcgctatccaggctcataacggaagtctccagcatctgacatggctcgggcttcagtggaacagcctgcccgcactgccgggaatccgcaaatggctgaagcaattgttccaccatttgccacaggagacgagtcgtcttgagacaaatgcccctgaatcaatttgcatcctcgatctcgaggtgtttttgttgggggtggtctatacctcccaccttcaattaaaggagaaatgtaatagtcatcactcaagctaccagcccctctgcctaccactgcccgtgtgtaagaggctatgtaccgagagacagaagagctggtgggatgcagtgtgtactctgattcaccgtaaagccgtccccggaaactctgccgagttgcggttggtggtccaacacgagatcaatactctcagagcgcaggagaagcacggtcttcaacctgcattactggtgcattgggccaaatgcctacaaaagatgggcagggggttgaactcatcttacgaccagcaagagtacatcgggagaagcgtccattactggaaaaaggtcctgcccctattaaaaataattaagaagaacagtatacctgaaccgatcgacccactgtttaagcacttccatagcgtggatattcaagccagtgaaatcgtagaatacgaagaggatgcacacataacgtttgccatccttgacgccgttcatggtaacattgaggacgcagttaccgctttcgaatctattaagagcgtggtaagctactggaacctcgccctgatctttcacagaaaggcagaggacatcgaaaatgacgcagtgttcccagaggagcaggaggagtgtaaaaattacttacgtaaaacccgcgactacctgatcaaaatcattgatgacagcgacagtaacctgtccgttgtgaaaaaattacctgtgcctttggagtccgtcaaagagatgcttaaaagcgtaatgcaggagctagaggactacagtgagggcggaccattatacaagaatggctccttgagaaatgcagatagcgaaatcaagcactctactccctcccctacaaaatacagcctttccccaagtaagagttataaatattcgcctaagacacccccacggtgggcagaggatcagaactccctgcggaagatgatatgtcaagaagtgaaagctatcactaagctgaactcgtcgaagtcggcatcaaggcatcgttggcccacggaaaactatggccctgacagtgtacctgatggatatcagggatcacagacattccacggtgctcccttgactgtggccaccacaggacctagtgtctattacagtcagtccccagcctacaattcccaatatctgttacgcccagcagccaacgtcaccccaactaaaggttccagtaacacagagttcaagtccaccaaagagggcttctctatcgcagtatccgctgatgggttcaaatttggtataagcgagcccggaaatcaagagaagaagtccgagaagcccctggaaaacgacaccggcttccaggcacaggatatctcaggtcagaagaacggcagaggcgttattttcggacaaaccagctccacttttaccttcgctgatgtcgctaagtcaacttccggcgaggggtttcagttcggcaaaaaagatcctaattttaaggggttttctggtgccggagaaaagctcttcagttctcagtgtggcaagatggccaataaagccaatacatccggagacttcgagaaggacgacgatgcatgcaaaaccgaggacagtgacgacatacactttgaacccgtggtgcagatgccagagaaggtagagctggtgaccggggaggaaggggaaaaagtcctgtacagccaaggtgtgaaactcttcagattcgacgctgagattagtcaatggaaagagaggggcctcggaaatctgaaaatcctcaagaatgaggtcaacggcaaaccgcgtatgcttatgcgaagggaccaggtccttaaggtctgcgctaaccattggatcacaaccacaatgaatctgaagcccctgtctggctctgaccgcgcttggatgtggctagccagtgacttctcagatggagacgcaaagctggagcgtcttgcagcgcagttcaagacacccgagctggctgaggagttcaaacagaaatttgaggagtgtcagaggttattattggatatcccactccagacccctcataaattggtggatacggggagggccgcaaaactaattcaacgggctgaggaaatgaagagcgggttgaaggatttcaagaccttcttgactaatgaccaaactaaagttacggaggaagagaataagggctctgggacaggagcggctggggcttccgacactacaatcaaacctaatccggagaacactggtccaacactggaatgggataactatgatctgagagaagacgccctggacgataacgttagcagcagctcagtacatgattctccattagcatcatctcccgttagaaagaatatattccgattcgacgagagtactacgggattcaacttcagctttaaaagcgctctttcgttaagcaaatctcctgccaagcttaatcagagtgggacctctgtcgggacagatgaggagtccgatgtgacccaggaagaggagcgggacggacagtacttcgaaccagttgtcccactgccagacctggtggaagtcagcagcggagaagagaacgagcaggtggtgttcagccacagggcagaactttacagatacgacaaggatgttgggcagtggaaggaacggggaatcggtgacattaaaatccttcagaattatgataataaacaagttagaattgttatgcggagggaccaagtgcttaaactgtgtgccaaccaccggatcactcccgatatgtcactacagaatatgaaggggacagagagagtctgggtgtggactgcctgtgacttcgctgacggagagcggaaagtagaacacctagcagtccggtttaagcttcaggatgtggccgattcctttaagaagattttcgacgaggccaaaaccgctcaagagaaggatagcctgattactccccatgtctcacggagtagcactcctcgagagagcccctgcggaaagattgcagtcgccgtgctcgaagaaaccacacgggagcgaacagacgtcatccagggtgatgatgtcgcagacgcagcgagtgaggtggaagtgtcctctaccagcgagacgactactaaggctgttgtgtcaccccctaaattcgtgtttggatccgaatctgttaagcgtatattctcatccgaaaagagcaacccatttgcgttcggcaacagttctgctaccggctcactatttggttttagttttaacgcccctctcaaaagtaatgactccgagactagctctgtcgcccagtctgggagtgaatcaaaagtcgaacccaagaagtgtgaactgagtaaaaattctgatatagagcagtcaagcgattctaaggtgaagaacctgagcgccagttttccaatggaggagtcgtccatcaattacacgttcaagacgcctgagaaagagcctcctctgtggcacgccgagtttaccaaagaggagcttgttcagaagctttccagcaccaccaaatccgctgatcagcttaatggcttactgcgcgaaacagaggcaacctccgccgttctgatggaacagatcaaattgttgaaatcggagattcgccgactagagcgaaatcaggaagaaagtgccgcaaatgtggaacacctaaaaaacgtgctgctccagttcatcttcttgaagcctggttcagaaagggaaagtcttctcccggtcataaatacaatgttacagctgtcccctgaggagaagggaaaactcgccgcagtggctcagggactacaagagacgagtattcccaagaagaaata

SEQ ID NO: 237895 - DNA, 1935 bp, synthetic construct
  misc_feature 1..1935: note = Description of Artificial Sequence: Synthetic coding sequence
  source 1..1935: mol_type = other DNA
atgctcatgcgcagggatcaggtgctcaaggtgtgcgccaatcactggattaccacaacaatgaatctcaagcccttgtcaggatcagacagggcctggatgtggctggcttcggatttcagtgacggggatgccaaactcgagcgacttgctgcacagtttaagacacccgaacttgccgaagagttcaagcaaaagtttgaagaatgccagagactgttgctggatattccacttcagacccctcacaaactggtggatacaggcagagccgctaaactcattcagagggctgaagaaatgaaaagcggcctcaaggatttcaagacgtttctcacaaacgatcagaccaaggtaaccgaggaagagaacaagggaagtggcacaggcgcagcaggggctagtgacaccactatcaagccgaaccccgaaaataccggcccaacactggagtgggataactacgatttacgggaggacgctctcgacgataatgtatctagctctagcgtgcatgacagcccgctcgcaagtagccctgtccgtaaaaatatattccgttttgatgagagcacgactggatttaacttttctttcaagtccgccctttccctgagtaagtcaccggcaaagctcaaccagtccggaactagtgtgggcacagacgaagagagcgatgtgactcaggaggaggagcgtgatgggcagtatttcgagcctgttgttcccctaccagatctagtcgaggtgagctcaggtgaagagaacgagcaggtagtgtttagccaccgtgcagagctttaccgctacgataaagacgtcggacagtggaaggaacgcggaatcggggacatcaaaatcctgcagaactacgacaataagcaggtaagaattgtaatgcgcagagaccaggtactgaagctctgcgccaaccacaggataacccccgacatgagcctccagaatatgaagggtaccgaaagggtttgggtgtggaccgcatgcgacttcgccgatggcgagcgaaaagtggagcatctggccgtgagattcaaactccaggatgtcgccgattcttttaaaaagatcttcgatgaagcaaagacagcccaagaaaaggattcactgatcacaccacacgtgtcccggtccagtacaccacgcgaatctccgtgtggtaaaattgccgtggccgtgttggaggagaccacccgtgagaggaccgacgtaatacaaggcgatgacgttgccgatgcggcatccgaggtagaagtgtctagcacttccgaaacaacgaccaaggcagtggtaagccccccaaaattcgtctttggaagcgaaagtgtcaaaagaatcttcagcagtgagaagagcaaccccttcgccttcgggaactcatccgctaccggcagcctgttcggcttcagctttaacgctccactcaagagcaacgactcagaaacttcctccgtggcccagagtggcagtgagagcaaagtggagcccaagaagtgtgagctgtctaagaactcagacatcgaacagagctccgatagcaaggtcaagaacctctcggcctcattccccatggaagaaagctcaatcaattatacatttaaaacccccgagaaagaacctcctttatggcacgccgaattcactaaggaggagttggtgcagaagctcagttcgaccacaaagtccgccgatcaattgaatggactgctgagagagacagaagccacgtccgcggtgcttatggagcagatcaaacttctcaagagcgagatacggcgattggaacggaaccaggaagagtcagcagcaaatgtggagcatctgaagaatgttctgcttcagtttatctttctgaagccgggtagcgagcgcgaaccctcgtcatgctataagtatgacgtggcagcccagccttag

SEQ ID NO: 237896 - DNA, 5246 bp, synthetic construct
  misc_feature 1..5246: note = Description of Artificial Sequence: Synthetic coding sequence
  source 1..5246: mol_type = other DNA
atgaatgtgatgggtttcaatactgatcggcttgcttggactagaaacaagttaaggggtttttacttcgccaaactgtattacgaagcaaaggagtatgacctggctaaaaagtatgtgtgtacctacctgtctgtccaggagagggacccccgtgcccacaggttcctggggttgctgtacgagctcgaagagaataccgaaaaggccgttgaatgctaccgaagaagcctggaattgaatccacctcagaaagatctagtcttgaagatcgcagaactactgtgtaaaaacgacgtgacagacgggagagcaaagtactgggtggaacgtgctgcaaagttattccccggttctcccgcaatctataagcttaaggagcatctcctggattgcgaaggtgaagacggatggaacaaactgttcgattggatacagtccgaactgtatgtccgaccagacgacgtgcatatgaacatcaggttagtcgaattgtatcgcagcaacaaacggctgaaggatgcggtggctcgctgccatgaggctgagcggaatattgcgctgagaagtagccttgagtggaactcttgcgtggttcagacactaaaggagtatttggagtccctacagtgtctggagtccgataagtctgactggcgcgcaacaaataccgatctcctgctggcttatgcaaatctgatgctcctgaccctctctacgagggatgtgcaggagagtcgcgaattgctcgagagttttgactctgccctccagtcagccaaaagttccctgggtgggaatgacgaactgtctgcaactttcttggaaatgaagggtcatttttacatgcacgctggaagcctgctgttgaaaatgggccagcatggcaataacgttcagtggcaagccctttcagaattggcggctctgtgctacgtgatagcttttcaggtccctaggccaaagattaagttgataaagggagaagcgggacagaacctccttgagatgatggcatgtgataggctgtcacagtctggtcacatgttgctgaacctgtctcggggaaagcaggattttcttaaagaggtggtggaaacatttgcgaacaaatctggacaaagcgtgctgtataatgccctgttctcgagtcagtcaagcaaggacacctcattcttaggcagcgatgatatcggcaatatagatgtgcaggaacccgaattagaagacctggctcgatatgacgtcggcgcaatccaggcgcacaacggaagtctgcaacacctgacttggctcggcttgcagtggaattcgttgccggctctaccaggaattcggaagtggcttaagcagttatttcatcatctgccccaggagacctcacggctagagactaacgcaccagagagtatctgtatactggatctggaggtgtttctgctgggcgtggtgtataccagccacctgcagctcaaggagaaatgcaatagccatcacagtagttatcagcctttatgcctgcccctaccagtctgcaagaggctgtgcaccgagagacagaaaagctggtgggacgccgtttgcactttgattcaccgaaaagccgtgcccggaaatagcgctgagcttagacttgtcgtgcagcacgaaattaacactcttcgggcacaggagaaacacggactccagcctgccctgctggttcactgggccaagtgcctgcagaaaatgggcagggggctgaacagctcttacgaccagcaggagtacataggtcgctccgttcattattggaagaaggtgcttcccctgctaaagatcattaaaaagaactctatccctgaacccatcgaccctctttttaagcacttccattcagtggatatccaagccagcgagatcgttgaatacgaagaagatgcccatattacttttgctattctcgacgcagtccatggcaacatcgaggatgctgtgaccgccttcgaatctattaagagcgtcgtttcttattggaacctggccctgatatttcatcgcaaggccgaggacatagaaaatgacgccgtattcccggaagaacaggaggagtgtaaaaattaccttcgaaaaacccgggactacctcatcaaaatcatcgatgattctgactcgaacctgtctgtggtgaagaagctacccgtccctctggagtccgtaaaagaaatgctgaaatccgtgatgcaggaacttgaggactattccgagggagggccactctacaaaaacggatccctgcgcaacgcagattccgagataaagcactctactccttcacctaccaagtatagtctctctccgtccaagtcctataagtattcccctaagacaccccctaggtgggccgaggaccagaattctctgcgcaagatgatttgccaggaagtcaaagcaattaccaaactcaactcatccaaaagcgcatcacgtcaccgatggcccactgaaaactatggccctgactccgtccctgacggatatcagggctctcagactttccatggcgcaccactgacagttgcgactacaggtcccagcgtgtactattcacaatctccagcatataactcccagtatctgctaagacccgcagcgaacgtgacgccaacaaagggttcttccaacactgagttcaaatccaccaaggaaggttttagcatcgccgtgtctgcggacggattcaaatttgggatcagtgaaccaggcaaccaggagaagaaatcagagaagcctcttgagaacgacacgggcttccaggcccaggacatatctggacagaagaacgggagaggcgtaatcttcggccagacgtcaagcacttttacgtttgccgatgtagcaaagtcaacctctggtgagggattccagtttgggaaaaaagatcccaatttcaaaggcttctccggagctggcgaaaaactattcagttcccaatgtgggaaaatggccaacaaggcgaataccagtggcgacttcgaaaaggacgatgacgcgtgtaagaccgaagactctgatgatatccacttcgagcccgtggttcagatgcccgaaaaggttgagctagtgacaggtgaggagggtgagaaggtcctatattcccagggagtcaaactgtttaggttcgacgccgagattagccaatggaaggaaagggggctaggcaacctgaaaatccttaagaacgaagtgaatggtaagccccgaatgcttatgcgccgtgaccaggtgcttaaagtgtgtgctaaccattggatcactaccacaatgaatctgaaacccctcagcgggtccgacagagcgtggatgtggcttgcatctgacttctccgacggagacgccaagttggaaagattagctgcacagttcaaaaccccagaattggccgaagaattcaagcagaaattcgaggaatgtcagcgactgctactagatatacccctccaaaccccgcacaaactcgttgataccggccgagcagccaagctcatccaacgagcagaggagatgaagagtggtcttaaggatttcaagactttcctcacaaatgatcagaccaaggttaccgaggaggaaaacaaaggttcagggaccggggctgccggagcttctgatacaacaattaagcccaatccagagaacaccggcccaacccttgagtgggacaactacgatctgcgcgaggatgccctggacgacaacgtgtcctccagctctgtccacgatagtccacttgccagttcccccgtgagaaaaaacatatttaggttcgacgagtcaacaacgggcttcaatttttcctttaaatcagcattatcactgtccaaatcccccgcaaaactgaatcaatcaggcacctcagtaggaactgatgaagagtcagacgtgacccaagaagaggagcgggacgggcagtatttcgaaccggtggtgcctctgccagatcttgtggaggtgagtagcggcgaggagaatgagcaggtggtgttttctcatagggccgagctatatcgatatgataaagatgtgggtcagtggaaagaacggggaatcggggacatcaaaattctacagaactatgacaacaaacaggtcaggattgtcatgcgtagagatcaggtactgaagctgtgcgctaaccaccgcataacaccggacatgtcccttcagaacatgaagggcaccgagagagtatgggtctggacagcctgtgatttcgccgatggtgagaggaaggtggaacatctggccgtgcgattcaaattgcaggatgttgccgacagctttaagaagatctttgacgaggcaaaaactgcccaggaaaaggactctctcattacgccacatgtgagtcggtcctccacgccacgggaatctccctgcgggaagatcgcagtggccgtgctcgaggaaactaccagggagcgaaccgacgtcattcagggggacgacgtagccgatgccgcatcggaagtggaagtttcatccacttccgagaccactacaaaggctgtggtgagtccacccaaatttgtgtttggcagtgaaagtgtgaaacgcatattttcgtctgaaaagagtaatccttttgctttcggaaactcaagtgccactggatcattgttcggtttttctttcaacgcgccattaaagtctaacgactccgagacctcttctgtggcacaatccggttcggaaagtaaagttgagccgaaaaagtgcgagctctccaagaacagcgacatcgagcaaagttctgattctaaggttaaaaatctctcagcctcttttcctatggaagagagctcaattaattacacctttaagacccccgagaaggagcctcccctttggcacgccgaattcaccaaagaggagctggtccagaagctctccagcacgaccaaatccgcagatcaattgaacggactcctgcgcgaaacagaagccacctctgcggttctgatggagcagattaagttgctcaagagcgagattcggaggctggagcgcaatcaggaggagtccgcagctaatgtggagcatctgaaaaacgtacttctccaattcatatttctgaaaccagggagtgaaagagaatctctgctccctgtcattaatactatgcttcagcttagtcctgaagaaaagggaaagttagcggctgtagcacaggggttgcaggaaacgagcataccaaagaaaaaata

SEQ ID NO: 237897 - DNA, 3042 bp, synthetic construct
  misc_feature 1..3042: note = Description of Artificial Sequence: Synthetic coding sequence
  source 1..3042: mol_type = other DNA
atgctgaagtccgttatgcaagaactcgaggattattccgagggaggacctttgtacaaaaacggaagcctgagaaatgccgattctgaaattaaacattctactccgtctccaacgaagtatagcttatcaccaagcaaatcctacaagtatagtccaaaaactcccccacggtgggccgaggaccagaactccctgaggaagatgatttgtcaagaggtgaaggccataactaaactcaactcctcaaaaagcgcgagccgccacaggtggcccactgagaactatggcccagactccgttccggacggatatcaaggaagccagactttccacggcgctcctctcacagtcgccactacagggccttctgtgtactatagccagtcccctgcctataactcgcagtacctgctgcgacccgctgcaaacgttactccaacaaaaggcagtagcaacactgagttcaaatctaccaaagagggtttctccatcgccgtgtcagccgacggttttaaatttggcatatccgaacccggtaatcaagagaagaagagcgaaaagcccctggagaacgacaccgggttccaggctcaggatatcagcggacaaaagaacggcagaggggttatcttcggccagacgtcgagtactttcaccttcgcagacgtggcaaaaagtacgtctggggaaggtttccagttcggaaaaaaagacccaaatttcaaggggttttctggtgccggtgaaaaactgttttccagtcagtgtggcaagatggctaacaaagccaacacatccggcgatttcgagaaggatgatgacgcctgtaagaccgaggactccgatgacatccatttcgagcctgttgtacaaatgccggaaaaggtagaactggtgacaggcgaggagggagagaaggtgttgtacagccagggcgtcaagcttttccgtttcgatgccgaaatttcccagtggaaagagaggggcctggggaacctgaaaattctgaaaaacgaggttaacggcaaaccccgaatgctgatgagacgcgaccaggtactcaaagtgtgtgctaaccactggattaccacaactatgaatctgaagcctttgtctggatccgacagagcctggatgtggctcgccagtgatttctctgacggtgacgcaaagttagagcgattggccgctcagttcaagactcccgaactcgctgaagagttcaaacaaaaattcgaagagtgtcaacgcctactgttggatataccattgcaaactccccacaaactggtcgatactgggagagccgcaaagctcatccagagagctgaagagatgaagtcaggtcttaaagacttcaaaaccttcctcacaaacgatcaaactaaggtcaccgaagaagagaacaaaggctctggtactggcgctgccggagctagcgataccaccattaaaccaaacccagaaaacacaggcccaacccttgaatgggataattatgatctgcgagaggacgcccttgatgacaacgtgtcttcctcttcagtgcacgatagtccattagcctcctctcccgtgcggaagaacatcttcagattcgatgaaagcaccacaggattcaacttcagtttcaagtcagctctcagtttgtccaaaagtcctgctaagctgaaccagtccggaacatcagtgggtactgacgaggagagcgacgtgacgcaggaggaagagagagacggccagtacttcgagcctgttgtccctctccctgacctggtggaggtgagttccggtgaggagaacgaacaggtcgtcttctctcatatggcagaactctatcggtacgacaaggacgtaggacagtggaaggaaaggggcattggcgatatcaagatcttgcagaattacgataacaagcaggttagaattgtgatgaggcgtgaccaagtcttaaaactgtgcgcaaatcatcggataacgcccgacatgagtcttcagaatatgaaaggtacggagagggtgtgggtctggacggcttgtgattttgcggatggagagcggaaagtagagcatctagctgtacgcttcaagctgcaggacgttgccgacagctttaagaaaatcttcgacgaggctaagacagcccaagaaaaagatagccttattaccccccacgtgagccgctcaagtacccccagggagtctccctgtggaaaaatagccgtggccgtgcttgaggaaaccaccagagaacggactgacgtgatccaaggcgatgacgtagctgacgctgctagcgaggtggaggtgtcttcaaccagtgagacaacaacaaaggcagtggtctccccacctaaattcgttttcggcagcgagtccgttaaacggattttcagcagcgaaaaatccaatcccttcgccttcggcaacagctccgctaccggctccctgtttggattcagctttaacgctcctcttaaatcaaatgactccgaaacctccagcgtcgcacagtctgggtctgagagtaaagtcgaacctaaaaagtgtgagttgagtaagaacagtgatattgaacagtctagtgattccaaagttaagaacctgtctgccagcttccctatggaggaatcttcaattaattacacttttaaaacacctgaaaaggaacccccactgtggcacgcagaatttaccaaggaggagctcgtacaaaaactgagctccacgaccaagagtgctgaccagttgaacggtctgctgcgggagaccgaagcaacctcagccgtgcttatggagcagatcaagctgctgaagtcagagatcaggcgcttggaacggaatcaggaagaaagtgcagctaacgtggagcatctcaagaatgtgttgctgcagtttatctttctgaagcccggttcagagagggaaagcctcctgccagtcatcaataccatgttacagctttctccagaggaaaaggggaagctggccgctgtggcacagggattgcaggagaccagcatacccaaaaaaaagtag

SEQ ID NO: 237898 - DNA, 5270 bp, synthetic construct
  misc_feature 1..5270: note = Description of Artificial Sequence: Synthetic coding sequence
  source 1..5270: mol_type = other DNA
atgagaaggagtaaggcttatggtgagaggtacctggccagcgtccagggtagtgctccatcccccggaaagaaactgcggggattttatttcgccaagctgtactacgaggccaaagagtatgatctcgccaaaaagtacgtgtgtacttatctatctgtgcaggagagagaccccagagcacatcgctttttggggctgctctatgagttggaagaaaatacagaaaaggctgtagagtgctatcggcgttctctggagttaaatcctccacagaaggatctggtgctgaagattgccgaactgttatgcaagaacgatgttactgatgggcgtgcaaaatactgggtcgaaagagcagccaaactctttcctggttctcccgctatatacaagttgaaggagcacctgctggactgcgagggcgaggacggatggaacaagctgtttgactggattcaaagcgagctatatgtgcggcctgacgacgtgcacatgaacattcgtctcgttgagttatatcgcagcaacaagcggctgaaggacgcggtggccaggtgccacgaagcagaacgcaatatagctcttcgctcctcccttgagtggaactcatgtgtcgtacaaactctcaaagagtaccttgaaagtctgcagtgtctggagagcgacaaaagcgactggcgcgctaccaacacagacctcttgttggcgtacgccaaccttatgcttttaaccttgtcaacaagagacgtgcaggagagccgggagttactggagtcttttgatagtgcattgcagtcggcaaaatcgtcgcttgggggtaatgacgagctcagcgctacattcctggagatgaagggccacttttatatgcatgcgggatccctgcttctgaagatggggcaacatgggaataacgtgcaatggcaagcactctcggagctagcagccctatgttacgtgattgcctttcaggttcccagacctaaaattaaactgatcaagggcgaggcgggacagaatctcctggaaatgatggcgtgtgataggctctcacagtccggacacatgctgttgaatctttccagggggaaacaggacttcttgaaagaggtggtggagacattcgccaataagtcgggacagagcgtcctctacaatgccctattttcatctcaatcctccaaagatacgtcatttctggggtcagacgacattgggaatattgatgtgcaagaaccggaactggaagatctcgccagatacgacgtgggtgctatccaggcccataatgggagcctccagcacctgacttggcttggcctacagtggaatagcttaccagctcttcctgggattcgaaagtggcttaaacaactctttcatcatctgccccaggagactagtcgtctcgaaacaaacgcaccagagtccatatgcattctggatctcgaagtgtttctgctgggcgtggtctacacgagccacctgcagttaaaggaaaaatgtaattctcaccattccagctaccagcccctctgcctgcccctgccagtgtgcaagcggctttgtacagagaggcagaaaagttggtgggatgcagtttgtactttgatacatagaaaggcagttcctggcaatagtgccgagttgagactggttgtacaacacgagattaataccctccgcgctcaggagaagcacggacttcagcctgccctgctcgtgcattgggcaaaatgcctccagaagatgggccgaggtctcaatagctcttacgatcagcaggagtacataggtcgctccgttcactactggaagaaggttttgcctttgttgaaaattattaaaaagaacagcatcccagagcctatcgaccccctatttaagcactttcactcagtcgacattcaagcctccgaaatcgtcgagtatgaagaggacgcgcacatcacttttgccatcctggacgccgtgcacggcaacattgaagatgccgtgaccgcttttgagtccataaagtcggtggtgagctattggaacttggccttaatctttcacaggaaagctgaagacattgaaaacgacgcagtatttcccgaggagcaggaagaatgcaagaattatcttcgcaaaacaagagactatcttattaaaataatagatgacagcgacagtaatctaagtgtggtgaaaaaactacctgttcctcttgagagcgttaaggaaatgctgaagagcgtaatgcaagagctagaggactacagcgagggagggccactctacaaaaatggctctttaagaaatgcggattcggagattaagcacagcactccctccccaacgaaatacagtctgagtccctcgaagtcttataagtatagccccaagactccacccaggtgggccgaggatcaaaattcacttaggaaaatgatctgccaagaagtgaaggcaatcacaaagctgaattcttccaaaagtgcatcccgccaccgttggcccaccgagaattacgggccagactcggtgcccgacggctaccaaggcagtcagacctttcatggtgcccctttgactgtggcgacgactggtccttctgtgtattatagtcagagcccggcttacaactctcaatatcttctacgcccagccgctaacgtcacccctacgaagggcagttcaaataccgagtttaaatcaaccaaggagggcttcagcatcgccgtaagcgccgacggcttcaagtttggaatctccgagccaggaaaccaagagaagaagtccgagaaaccattagagaacgataccggctttcaagcacaggacattagcggccaaaaaaacggtcgaggtgtgatttttggacagacttccagtacattcacatttgccgatgtagccaagagcacctcaggggagggatttcagtttgggaagaaggatcctaactttaagggctttagtggcgctggagaaaaacttttcagttctcagtgtgggaagatggctaacaaggctaacacatctggcgattttgaaaaggatgacgatgcttgtaagacggaagacagtgatgatatccatttcgagccggttgtacagatgcctgaaaaggttgagctagtgacaggcgaagaaggagagaaagttctctattctcaaggggtcaaactctttcggttcgatgcagaaattagccaatggaaggaacgaggcctgggtaacctcaaaattctgaaaaatgaagtaaatggaaagccgagaatgctgatgcggagggatcaagtactgaaggtttgtgcgaatcactggattaccaccaccatgaatcttaaaccactgagtggaagcgatcgcgcatggatgtggctggcgtccgacttttcagatggcgacgcaaagttagagaggcttgccgcacaatttaagacccctgagcttgccgaagaatttaagcagaagtttgaagagtgtcaacggcttcttctcgacatcccgctgcaaacccctcacaagttggtcgacaccggcagggcagccaagctgatccaaagggcagaggaaatgaaatccggattaaaggactttaagacctttctgaccaatgaccagacaaaggtgaccgaagaagagaataagggctccggtacaggggctgctggtgcctctgacaccacgatcaagcctaatcccgagaacactggccctaccttagagtgggacaattacgatttgcgcgaggacgcactggatgataacgtcagctctagctcagtgcatgattcccctctggcctcatcgcccgttcgcaagaacatattccggttcgacgagagcaccactggcttcaattttagctttaagtccgctttgagtctgtctaaaagtcctgccaagttgaatcagtctgggacgagtgtgggaacggatgaagagtcagacgtgacacaagaggaagaacgagacgggcagtactttgagccggtagtgcctctgccagacttggtagaagtgagctccggtgaagagaacgaacaggttgttttcagccacatggctgaactgtacagatatgacaaggacgtgggtcagtggaaggagcgaggcatcggggatatcaaaattctgcagaattacgataataaacaagttaggatcgttatgcgccgagatcaggtgctcaagctttgtgctaaccacaggattacccctgacatgtcattgcaaaacatgaagggtacagagcgcgtgtgggtgtggacggcatgtgatttcgcagacggcgaaaggaaagtggagcaccttgccgtcagatttaagctccaggacgttgcggattcttttaaaaaaatctttgacgaggcgaagaccgcccaggaaaaggactccctgataacaccccatgtctctagatcttctacaccccgtgaatccccctgtggcaaaattgcggttgccgtcctcgaggagacgacgagagaacgtactgatgtgatacagggggatgacgtcgctgacgccgcttctgaggtggaagtgagctctacgtccgaaacgaccacaaaggccgtggtgtcccctccaaaattcgtgtttggttctgagtccgtcaagaggatttttagttccgaaaaatccaatccctttgcctttgggaattcatcagcaacaggctcactgtttggctttagcttcaatgctccccttaagtccaacgacagtgaaacgtcatcagtggcccagagcgggtccgaatccaaggtggagcctaaaaaatgcgaactgagcaagaattccgacatcgaacagtcttcagacagcaaggttaagaatctcagcgcctcctttccgatggaggaatcctctattaattacaccttcaagacccccgagaaagaacctccgttgtggcacgcagagtttactaaagaggagctcgtccagaaactgtccagtacaaccaagagtgctgatcaactcaatggcttgctcagggagaccgaggccactagcgcagtcctcatggagcagatcaaactgctcaagtctgaaataagaaggctggagcgcaaccaggaggaatccgccgctaatgtagaacatctcaaaaatgttctgcttcagtttattttcctcaagccaggatccgaacgggaatccttgttgcccgtcatcaatactatgctgcagctatcacctgaagagaaggggaagctggcagctgtagcccagggtctgcaggaaacttccatcccaaaaaagaagta

SEQ ID NO: 237899 - DNA, 5246 bp, synthetic construct
  misc_feature 1..5246: note = Description of Artificial Sequence: Synthetic coding sequence
  source 1..5246: mol_type = other DNA
atgaatgtgatgggcttcaataccgaccgtctcgcctggactcgtaataagctgcggggattctattttgccaagttatattatgaagctaaagaatatgatctggccaagaagtatgtatgtacctacctatccgtgcaggaacgagatccgagggctcaccgattcttagggctgctgtacgagctcgaggaaaacacagagaaagccgttgagtgttaccggagaagtctggagctcaatccaccccagaaggatctcgtgctgaaaatcgcagaactgctctgtaaaaacgacgttacagacgggcgagcaaagtactgggtcgaacgggctgccaagctgtttcctgggtcacccgctatatacaaactcaaggagcatctcctagactgtgaaggtgaggatggatggaacaaactttttgactggatccagtccgaactatatgttagacccgacgatgttcacatgaacattagattggtcgagctgtacagatccaataagcggctgaaagatgccgtggccaggtgccacgaggccgagcgaaatatcgccctccggagctccctggaatggaatagctgtgtggtgcagacacttaaggaatacctcgagagcctccagtgtttggagtctgacaagtctgattggcgtgctactaataccgacctcctattggcttacgctaatctcatgctgttgacactgtctacaagggatgtgcaggagtctcgggagctcttagagtcttttgactcagccctacagagcgcaaagagctctttagggggaaatgacgagctttctgccacgtttctggaaatgaagggtcatttctacatgcacgccggatccctgctcctgaagatgggacagcacggcaataacgtccagtggcaggccctgtccgaactagctgccctttgctatgtcatcgcgtttcaggtcccaaggccaaagatcaagcttatcaagggggaagccggtcaaaaccttcttgagatgatggcatgcgatcggctgtcacagagtggccacatgctgctgaacctttccaggggcaaacaggattttctgaaagaagttgttgaaacttttgccaacaagtcgggtcagagcgtcctctacaacgccctgttctcaagccagtctagtaaagacacctccttcttggggagcgatgatattgggaatatcgacgtgcaggagccagagctggaagacttggcaaggtatgatgtgggagccatacaagcacacaacggttcactgcagcacctgacgtggctgggcctacagtggaactctttaccagctcttcctgggattcggaagtggctgaaacagctgtttcaccacctgccacaagaaactagtaggctggaaactaacgcaccagaatccatttgcattctcgacctggaagtgtttttactaggtgtggtatacacaagccacctgcagttgaaggagaagtgtaactcccaccattcttcctaccagccactgtgtttgcctctcccagtgtgtaaacggctatgcaccgagcgacagaagtcttggtgggatgcagtgtgtacgcttatacaccgaaaggctgtaccgggaaacagcgcagaactgaggctcgtggtgcagcatgagatcaacaccttgagagcacaggaaaaacacggcctccagcctgctcttctcgttcattgggcgaagtgtctccaaaagatgggccgagggcttaacagctcctacgatcagcaggaatatataggcaggagtgttcattactggaaaaaggttttgcctttattgaagatcatcaaaaaaaattctattccggagccaatcgatcccctgttcaaacatttccacagcgtggacatccaggccagtgagatagtagaatatgaagaagatgcccacatcacctttgcaatcctcgatgcagtccacggaaatatcgaggacgccgtcaccgcctttgaatcaatcaaatcagtagtcagctactggaacctcgccctgatattccacaggaaggccgaggatattgaaaatgacgctgtcttccctgaagagcaagaagaatgtaagaactacttacggaagacccgggactatctgatcaagattattgacgactcagactcaaatttgtcagttgtgaagaagctccccgtgcccctcgagtctgtcaaagagatgctgaaaagcgtgatgcaagagctggaggattattccgaagggggaccactatacaagaacggatccctgcgaaacgctgatagtgaaattaagcactctaccccaagcccgaccaagtactctctcagcccctcaaagtcttataagtactctccaaaaactcctcccagatgggccgaggaccaaaactctctgcgcaaaatgatatgccaggaggttaaggcgataaccaagttaaatagcagtaaaagcgcttctcggcacagatggcccactgagaactatggacccgacagcgtaccagatggctaccagggctctcagaccttccatggcgctcctttgactgtcgctacaacgggaccttctgtgtattactcccagagtcccgcttacaacagccagtacctgcttcgcccagccgcaaacgtgactccgacgaagggaagctctaacacggagttcaaaagtaccaaagagggattctcaatcgccgttagtgcagatggtttcaaattcggaattagtgagcctggtaatcaagaaaagaagtctgagaagcccttggagaatgacaccgggttccaggctcaggatatttcagggcagaagaacggcagaggggttattttcggccagacctcttcaacctttactttcgcagatgtagctaagtccaccagcggggaaggcttccagtttggcaagaaagaccccaactttaagggcttcagcggagcaggcgagaaactcttctctagccagtgcggaaaaatggcaaacaaggccaatacatccggcgacttcgagaaggatgacgacgcctgcaaaactgaggacagcgatgatattcactttgaacccgtggtgcagatgcctgagaaagtggagctggtgactggcgaggaaggggaaaaagtcctctacagccagggcgtgaagcttttcaggttcgatgctgagatctctcagtggaaagagcggggtcttggcaacctgaaaatcctgaagaatgaggtcaatgggaaaccgaggatgttgatgcgccgtgatcaagtgctcaaggtatgcgccaatcactggatcactacaaccatgaatctgaagccgctgtcaggctctgatagagcttggatgtggcttgccagcgatttctcagatggcgacgcgaaattggagcgattagctgcccagtttaagacacccgaacttgcagaagagtttaagcagaaattcgaggagtgtcaaagactgctgctcgacatcccccttcaaacaccacacaaattagtggatacaggaagggcggcaaagctgatccaaagggctgaggaaatgaaaagtggcctgaaggactttaaaacatttctgactaatgatcagactaaagtgactgaggaggagaacaaaggatccgggaccggagctgccggagcttcagacacgactattaagcccaaccccgagaatactgggccaaccctcgagtgggacaactatgacctcagggaagacgccttggacgacaatgtaagctcctcctccgtgcatgactcgccattggcatctagtcccgtcagaaagaatatcttcagattcgatgaatctacaaccggctttaatttttccttcaagtctgcgctgtccctgagtaaatcccccgctaaactaaaccagagcggaacaagcgtgggtacagatgaggaaagtgatgtcactcaggaggaagagcgggacgggcaatactttgagccagtggtgcccttgcccgatttggttgaagtctctagcggtgaagagaatgaacaggttgttttttcacacatggcagagttatataggtacgacaaggatgtgggacagtggaaggaaaggggcataggcgatattaagatactccaaaattacgacaacaagcaagttcgaatcgtgatgaggcgggatcaggttcttaaattgtgtgccaatcataggattactcctgatatgtcactccaaaacatgaaggggactgaaagagtgtgggtgtggacagcttgcgacttcgctgatggcgagcggaaggtagagcatcttgccgtaagattcaagttacaggacgttgcagacagctttaaaaaaattttcgacgaggctaagacggcccaggagaaagacagcctgataaccccgcacgtgtctaggtcttcaacgccgcgtgagagtccatgcggcaagatagcagtcgccgtactggaggagactacgcgtgagcgaacagatgtcatccaaggcgatgacgtcgcagacgccgctagcgaagtggaggtctcatcaacttctgaaacaacaaccaaggcagtggtctctcccccaaaatttgttttcggcagcgagtccgtcaaaagaatcttttcctccgaaaaatctaaccccttcgcctttggcaactcttccgctaccgggtccctgtttggattttccttcaacgcaccacttaagagcaacgattcagaaacgtcaagcgtagcgcaaagcggctcagagtcaaaagtcgaacctaaaaaatgcgaactttcaaagaattccgacattgagcagtcctctgactccaaagtaaagaacctgtccgcgtccttcccaatggaggaatcatcaattaattatacctttaagaccccagaaaaggaacccccactgtggcacgccgagttcacgaaggaagagctagtgcagaaactcagctcaacgacgaagtccgccgatcagctcaacgggcttctcagagagacggaggcaacctcggccgttctgatggaacagattaagcttctcaagtcagagataagacgcctggagagaaaccaggaagagtccgcagctaatgtggagcacttaaagaatgttctcctccagtttatatttttaaaaccaggtagcgagcgagagtccctcctgcccgtcattaacaccatgctgcagctaagtccagaagaaaagggaaagctcgccgctgttgcccagggcctacaggagaccagtatcccaaaaaaaaaata

SEQ ID NO: 237900 - DNA, 1935 bp, synthetic construct
  misc_feature 1..1935: note = Description of Artificial Sequence: Synthetic coding sequence
  source 1..1935: mol_type = other DNA
atgctgatgcggcgagatcaagtcctcaaagtgtgtgcaaatcactggatcactacaactatgaatctgaagccccttagtggttccgatagagcatggatgtggcttgcttcggatttctctgacggcgatgcgaagctggagaggctggccgcacagttcaagactcctgagctggcagaagaattcaagcaaaagttcgaggagtgtcagcggcttcttcttgatattccattacagactcctcacaagctggtagatacaggccgtgccgcaaagctgatacagagggccgaggagatgaagtccggcctcaaagacttcaagactttcctgacaaacgatcaaacgaaggtgaccgaggaagagaataaaggttcaggcacaggggcagctggcgcaagcgacacgactatcaagcccaatccagagaacactggccctacgctagaatgggacaattatgacctccgcgaggacgccctggacgacaacgtttcttcctcctccgtccatgattcacccctggcctcatctccagtgcgcaaaaatatcttcagattcgatgaatcgaccactggcttcaacttcagctttaaatcagctctgtccttgtctaagagtccagccaaattgaaccagagtggcacctccgtgggcactgacgaagagagcgacgtgacgcaagaggaggaaagggacggacagtattttgaaccagtcgtgcctctgcccgatctggtggaagtatcttcaggagaggaaaacgagcaggtcgtgttttctcacatggctgaactgtacagatacgacaaggacgtaggacaatggaaagaaaggggaattggtgacatcaaaatcctacaaaattacgataacaagcaggtccggattgtaatgcgcagggaccaggtgcttaaattgtgcgctaatcaccggattacacccgacatgtccttacagaatatgaaggggaccgagcgtgtctgggtgtggaccgcatgcgattttgcagacggtgagcgcaaagtcgagcacctcgccgtccggttcaagcttcaagatgtcgcagatagctttaagaagatcttcgatgaggccaagacggcccaggaaaaagattcgctcatcacaccacatgtctcaagatcgtccacaccgagagaaagtccgtgcggtaaaatcgcagtagcagtactcgaagagacaactagagaacggacagatgtcatacagggtgacgatgtggcagacgcagcatcggaggtggaggtgtcctctacttcagagacaaccacaaaagccgtcgttagcccaccaaagttcgtctttggttccgagtccgttaagcgcatattcagctcagagaagagcaatcccttcgcatttggcaactcaagcgcaactggcagtctgtttgggttcagcttcaatgctcccctcaaatcgaatgattctgagaccagttccgtggctcagagtggctccgagagcaaggtggaacctaagaagtgtgagctatccaaaaacagtgatatcgagcagagttcagactctaaggttaagaacctgtctgcatccttcccaatggaagaaagcagcattaactacacattcaagactcctgaaaaggagcccccactttggcatgcggagttcacaaaagaagagttagtgcagaagctctcctccaccacaaagagcgctgatcaattgaatggtctgctgcgggaaactgaagctaccagcgccgtcctaatggaacagattaagctgctgaaaagcgagatccggagacttgagaggaatcaggaggagtccgctgcaaatgtggaacatctgaagaacgtgctcctccagtttatatttctcaagcccggaagtgagagagaaccttcctcttgttacaaatacgatgtagctgcacagccctag

SEQ ID NO: 237901 - DNA, 5300 bp, synthetic construct
  misc_feature 1..5300: note = Description of Artificial Sequence: Synthetic coding sequence
  source 1..5300: mol_type = other DNA
atgtcttgcagtaaagcctacggagaacgctacgtagcctcagtgcagggatccgcccctagcccacggaaaaaaagcacaagggggttttactttgccaaactctactacgaggctaaggagtatgatcttgctaagaagtacatctgcacgtatatcaatgttagggaaatggacccgcgtgcccatcgtttcctggggctcttatacgagttagaggaaaatacagaaaaagccgttgagtgctatcggagatctgtggagttgaatcccacccagaaggatctggtcctgaaaatcgctgaactgttgtgtaaaaatgatgtcaccgacggcagggctgaatactgggtggaacgggctgccaagctgtttccaggcagtccagccatatacaaactgaaggagcagctgttagattgcgagggcgaagacgggtggaacaagttatttgacctgatccagtccgagctgtacgtgcggcctgacgacgtgcatgtgaatatacgcctggttgaattgtaccgctctacaaagagactaaaggacgcagtggctcgctgtcatgaagcggaaaggaacatcgctttgagatcatcccttgagtggaacagctgcgtggtgcaaacactcaaggagtacctggaaagccttcagtgcctggagtctgacaaatcagattggagagctacgaatactgacctgctcctggcatatgccaatctgatgcttttaacattgagtaccagagacgtccaggagtcaagagaactcctcgaatctttcgactctgccctacagagtgccaagagctctctcgggggtaatgacgagttgagtgctacattcctcgagatgaagggccacttctatatgcatgccggatcactgctgcttaaaatgggtcaacacggtaacaatgtccaatggcgcgcactgagtgagctcgccgcactctgttacctgatcgcttttcaggtacctagacccaaaattaagctgatcaagggtgaggcaggccagaatttgctggagatgatggcgtgcgatcggctctcccagagtggacatatgcttctgaacctgagcagaggcaaacaagactttctgaaagtcgtggtcgaaacctttgcaaataagagtggtcagagtgccttgtatgatgccctcttttcctctcagagccccaaggatactagcttcctgggcagcgacgacatcgggaacatcgacgtgcaggagccggagctggaggacctggctcggtacgacgtcggcgcaattagagcacataatggcagcctccagcacttgacttggttgggactgcagtggaactctttgcctgcactgccaggtattaggaagtggctgaagcaactctttcaccacctccctcaggaaacatccagattagagacaaacgctcctgaatcaatctgtatcctcgacctggaggtgttcctgctaggcgttgtatacacaagtcatctgcagttgaaggagaaatgcaacagtcaccacagctcttaccagcccttgtgtttgccattgccagtctgtaagcagctgtgcaccgaacgacagaagagctggtgggatgccgtttgtactctgatccatcggaaggccgtacctggaaatagtgctaagctccgcctcttagtgcagcatgagataaacactctacgagcccaggaaaagcatggtttgcaacctgcattacttgtgcattgggctaaatgtcttcagaagatgggatccgggcttaattcattctacgaccagcgcgaatacatcggacgcagcgtgcattactggaagaaggtgcttcccttgttaaagattatcaagaaaaagaactccataccagaacccattgatcctctctttaaacactttcacagcgtcgatatccaggccagcgaaattgttgagtacgaggaagatgcgcatgtgaccttcgcgatcctcgacgctgtcaacggtaacattgaggacgctatgactgcattcgagagtattaagagtgttgttagttattggaatctcgcccttatcttccacagaaaggccgaggacatcgctaatgacgctctgtcccccgaggagcaggaggagtgtaagaattatcttcgtaagacacgaggctacctcattaagatattggacgactcagatagcaacctatcagtcgtcaagaaattacccgtgcctctggaatcggtaaaggaaatgctgaagtccgtgatgcaagagctcgagaattacagtgagggcggacctctctacaagaacggatccctaaggaacgccgactcagagatcaagcactcaaccccttcccctacaaagtattccctgagtccttcaaaatcctacaagtatagccccaaaacacctccaagatgggccgaggaccagaattctttactgaagatgatccggcaggaggtaaaagctattaaagaagagatgcaggaactcaaacttaacagctcaaaatcagcatcccatcatcgctggccgaccgagaattatggccctgattctgtgccggacggataccagggctctcagacctttcatggggcaccactgacagttgctacgaccgggccttctgtttattatagccagtcaccagcatataacagtcagtatttgctgagacctgctgccaatgttacaccaactaaaggcagcagcaacacagagttcaaatctactaaagaggggttctctatcccagtgagcgcagacggatttaagttcgggatcagcgagcccggaaaccaggagaagaaatctgagaagccgctggagaacgacacaggactgcaggcacaggatatcagcgggagaaagaagggcaggggcgtcatcttcggacagacgtcttccacgtttactttcgctgacgttgcaaaatccactagcggcgaggggtttcagttcggaaagaaagaccttaactttaagggcttcagcggggcaggtgaaaagctctttagcagtcagtacggaaaaatggcgaataaagccaatacatccggagactttgagaaagacgatgacgcttacaagacagaggattccgacgacatccatttcgagccggtggtccaaatgccagagaaggtggagctagtgacgggtgaggaaggtgagaaggtcctatactcccagggggtcaaacttttcaggtttgatgctgaggtatcccaatggaaagaacggggtctgggaaaccttaaaattctgaaaaacgaggtaaatggcaaagttcggatgctcatgcagagagagcaggtgctcaaggtatgcgccaatcactggattacaaccacaatgaatctgaaacctttgtccggttcagatagggcctggatgtggagcgcctccgacttctcagacggagatgccaaactggagagactggccgctaaattcaagactcccgagttggccgaggaattcaagcaaaagtttgaagaatgtcagagattgctgttggacatccctttgcagacacctcataaattggtggacaccggacgagccgcaaaattgattcagagagcagaagaaatgaagtctggtctgaaggacttcaagactttcctaacgaatgaccagacaaaagtggcggaggaggagaacaagggaagcgggactggcgctgcaggcgcttctgacaccactatcaaaccaaatgccgaaaacacaggaccaacgcttgaatgggataactacgatctgagggaggacgccctcgacgattccgtgagttcatcatccgtgcatgctagccctctggcttcctctcccgttcggaagaatctgtttcacttcgacgaatccactaccggctcaaacttcagcttcaagagcgccctctccctgagtaagtcccctgccaaacttaaccagtcaggcacatcagtgggcaccgatgaggagagcgacgtgacacaggaggaagagagggatggacagtacttcgagcctgttgtcccgctccccgatcttgtagaagtgtcaagcggagaggaaaacgagcaggtggtattttcacaccgcgcagaattttaccgttacgacaaggatgtgggacagtggaaggagagaggaattggggatatcaagattctgcaaaattacgacaacaagcacgtgcgtatcctgatgcgcagggatcaggtactaaagttatgtgctaatcacagaatcacccctgatatgagcttgcaaaacatgaagggtactgaacgagtttgggtgtggacagcgtgcgacttcgcggacggcgagcgcaaagtagaacacctggctgtgcgcttcaaactccaagatgtggcagatagctttaagaagatcttcgacgaggctaagaccgcacaggaaaaggatagtctcatcactccgcatgttagcagatcgtctaccccacgagaatccccttgcggcaagattgccgtagctgtcctggaggaaaccacaagggagcgaaccgatgttatacagggggatgatgtggccgacgctgctagcgaggtcgaggtctcctcaacctcggaaaccaccaccaaggccgtcgtgagccccccaaagttcgtgtttggaagcgaatccgtcaagcggatcttctcctccgaaaaaagcaagccctttgcgtttgggaattcctctgctacggggagcctgttcggcttttctttcaatgctccattgaaaagtaacaatagcgagacctcttctgttgcacaatctggatccgagtcaaaggtagaacctaagaagtgtgagctgagcaaaaattccgacattgaacaatcatccgactccaaggtcaaaaatctttctgcgagtttcccaacagaagaatcgtccatcaattacacctttaaaaccccggagaaagagccaccattgtggtatgcagaattcactaaagaagaattggtgcagaagttaagttccacaaccaaatccgcggaccacctgaacggactcttacgggagattgaggccacaaacgctgtgctgatggaacaaatcaagctccttaagtcagagataaggagacttgaacgcaatcaagagcaggaggtttccgcagctaatgtcgaacatcttaagaacgtgttactgcagttcattttcctgaaaccaggctcggagcgtgaaaggctcctccctgtcatcaatacgatgctacagctctcactggaagagaaagggaagctggccgctgtcgctcaagcagagaggggcttcgtgttaaactccacctttta

SEQ ID NO: 237902 - DNA, 471 bp, synthetic construct
  misc_feature 1..471: note = Description of Artificial Sequence: Synthetic coding sequence
  source 1..471: mol_type = other DNA
atggacccacgtgcccatagatttttaggcctgttatatgaacttgaggagaataccgagaaagcagttgagtgctaccgaaggtctgtggagctgaaccccacacagaaggacctggtccttaaaatagcagagttgttgtgcaagaatgatgtaacagacggccgtgcggagtattgggtggaacgtgcagccaaactctttcccggatcgcccgcaatatacaaacttaaggaacagctgctggactgtgagggtgaggatggctggaataaactgtttgatctgatccagagcgaattgtacgtccgcccagacgacgtgcacgtgaacatccgcttggtagagctgtatagatctaccaaaagattaaaagacgccgtcgctagatgtcatgaggcggaaaggaacatcgcactcaggtcaagtttggagtggaactcatgcgtggtccagacccttaagttctag

SEQ ID NO: 237903 - DNA, 3378 bp, synthetic construct
  misc_feature 1..3378: note = Description of Artificial Sequence: Synthetic coding sequence
  source 1..3378: mol_type = other DNA
atgctgctgactctgagcacgcgtgacgtacaagaatcacgtgaacttctggaaagcttcgactccgccctgcagtccgccaagtcgtcattggggggaaacgacgaactgagcgcaactttcctcgaaatgaaaggccatttctatatgcatgctggctcgctgctgttgaaaatgggacaacacggtaacaacgtgcagtggcgagccctgtcagagttagcagcgctgtgttatcttattgcatttcaggtccctaggccaaaaattaagctgatcaagggagaagccggtcagaatctcctggaaatgatggcctgcgaccgcctctctcaatctggccatatgctactaaacttaagtcgcggaaagcaggactttctaaaagtggtggtcgagacattcgccaacaagtcaggccagtccgctctgtacgatgccctgttttcctcccagtcacctaaggataccagtttcctaggctccgatgatattgggaatatcgacgtacaggaaccagaacttgaggatctggctaggtatgacgtgggtgccatccgggctcacaatggctccttgcagcacttgacctggctgggacttcagtggaactcgttaccagccttacctggaatcaggaagtggctcaaacagctttttcaccatttgccccaggaaacatcacgacttgagacgaatgcaccagaaagcatatgcatcctggaccttgaggtgttccttcttggtgtggtttacactagtcatctccagcttaaggaaaagtgtaatagccatcactcatcctaccagccgttatgtctgcctctgcctgtttgcaagcagttgtgcactgagcgccagaagagctggtgggacgctgtctgtactctgattcataggaaggcagttcctggcaactccgccaagcttaggctactggtgcaacacgagatcaatacactcagagcacaggaaaaacacgggctgcagccggctctgttggtccactgggctaagtgcctgcaaaagatggggagcggccttaactccttctatgatcagagggaatatatcggtaggtcagtccattactggaagaaggtcctccctctgttgaaaatcatcaagaaaaagaatagcattcctgaaccgatcgatccacttttcaagcattttcattctgtggacattcaggcctcggaaattgtggagtacgaagaagatgctcatgtgaccttcgctatattagatgctgtcaatgggaacatcgaggatgcaatgaccgcctttgagtccattaagagcgttgtgtcctattggaacctggcccttatattccaccgaaaggcagaagacattgctaacgacgccttaagcccagaagaacaggaggagtgtaagaattacctcagaaaaacacgaggatacctgataaaaatcctcgatgactcagactcaaatctctccgtggtcaaaaaattgcctgtgcccctcgagagcgttaaagaaatgcttaagtccgtcatgcaggaacttgagaactattcagaaggagggcctctgtataagaatggaagcctgcggaatgcagatagcgaaatcaaacactctaccccaagccccactaagtattccttgtcgccaagtaagtcatacaagtatagcccaaagacccctcccagatgggctgaagatcagaattcattactgaaaatgattagacaggaagtgaaagccattaaggaagaaatgcaggagttgaagttgaactccagtaaaagtgcctcacaccatcgctggcctaccgagaattacggcccagactcggttcctgatggttatcagggtagccagacatttcacggtgcacccctgaccgtcgctacaactggcccaagtgtgtactattctcagtcgccagcctacaattcccaatacctcctccgccctgcagccaacgtaacaccaacaaaaggttctagcaacacagagttcaaatccaccaaggaggggttctctatccctgtttccgctgatgggttcaagttcggcatctctgaacctggcaatcaagaaaagaaatctgagaaacctctggagaacgatactggtctccaggctcaggatataagcgggaggaagaagggaagaggcgtgatattcggccagacctcctccacatttacatttgcggacgtggcgaaatctacctcaggcgaaggatttcagtttggaaagaaggatttgaattttaaaggcttttcaggggcaggtgaaaaactttttagcagccagtatggcaagatggcgaacaaggctaacacctctggcgacttcgagaaggatgacgatgcctataaaaccgaagacagtgacgatattcacttcgaacctgttgttcagatgccagaaaaggtggagctcgtgaccggggaggaaggcgaaaaagtcttgtatagtcagggcgtgaaactgtttcggtttgatgccgaggtcagccagtggaaagaaaggggtcttgggaatctgaagattctgaaaaacgaggtcaatggaaaggtgaggatgttgatgcagagggagcaggtattgaaagtatgtgccaatcactggatcactacgacaatgaacctcaagccactcagcgggagcgatcgagcatggatgtggtccgcctcagacttttcagatggagacgctaaactcgagaggctggcggctaagttcaagacacccgaactcgctgaggaatttaagcaaaagtttgaagagtgccaacgcctgctcctagatattccgctccaaaccccacacaagctagtggataccggcagagctgcgaaacttattcagcgggctgaggagatgaagagtggctcagagtcaaaggtggaacctaaaaagtgtgaacttagcaagaatagtgacatagaacagtccagtgattccaaagtgaaaaatttgagcgccagttttcccacagaagagagctccattaattacaccttcaagactccggagaaggagccacctctgtggtatgcggagttcactaaggaggaactggtgcaaaagctgagctccactactaaatcagccgaccacctaaatggcctgctgagagagatcgaggcaactaatgcagtcctgatggagcagattaagcttcttaagtctgaaattcggcgacttgagcgtaatcaggaacaggaagtgtccgctgcgaacgtggagcacctgaaaaatgtgctcctccagttcattttcctgaagcctgggtcggaacgggagcgactcctgccagtgataaacaccatgctgcagctgtccctggaggaaaaaggcaagttagccgctgtggcacagggcgaagagtag

SEQ ID NO: 237904 - DNA, 423 bp, synthetic construct
  misc_feature 1..423: note = Description of Artificial Sequence: Synthetic coding sequence
  source 1..423: mol_type = other DNA
accgaggaatctagtattaattatacatttaaaacacccgaaaaggagccacctctctggtatgcagagttcaccaaggaggaactcgtgcagaagcttagcagtaccactaagtcagccgatcatttgaacggtctactgagggagattgaagcaacgaatgctgtcttaatggagcaaatcaaattgctgaaatctgaaattagaagacttgagcgcaatcaagagcaggaagtgagtgctgctaatgtggagcatttgaagaacgtgctgttgcagtttatttttctcaagccaggcagcgagagagaacgcctgttgcctgttattaataccatgcttcagctgtctctggaggaaaagggtaaactggccgctgtggctcagggtctgcaggagacttctatccccaagaagaagtag

SEQ ID NO: 237905 - DNA, 5276 bp, synthetic construct
  misc_feature 1..5276: note = Description of Artificial Sequence: Synthetic coding sequence
  source 1..5276: mol_type = other DNA
atgagctgttctaaagcctatggcgagagatacgtggcctctgtccagggcagcgcaccatctcccaggaagaagtctacccgcggtttttatttcgcaaagctgtattacgaagccaaggaatacgatctggcaaagaaatatatttgtacctatattaatgtacgggagatggaccccagggctcaccggtttctggggctgctgtatgagctcgaggagaacaccgagaaagccgtggagtgctatcggcgatcagttgaactgaatcccactcagaaggaccttgtgttgaagatagcagaacttctttgtaagaatgacgtgacagatggccgagctgagtattgggtggaacgggcagctaagctcttcccgggatctcccgctatttataaacttaaagagcagttactagattgcgaaggtgaggacggctggaataagctcttcgacctgatacagagtgaactttacgtgcgacctgatgatgtccatgtgaatataaggttggtggagctctaccggtcaaccaagcgcctcaaagatgctgttgcaagatgtcacgaggccgagcggaatatcgccttgaggagctccctcgagtggaactcctgtgtcgttcagacgctcaaagaatacctggagtcactgcagtgtcttgagtcagacaaaagcgattggcgggcaaccaatactgatttgctgctagcctatgccaacctgatgctgctgacattgtcaacccgtgacgtgcaggagtcacgggagctgctggaatcctttgactcagccttgcagtcagccaaatcaagcctggggggtaatgacgagctttcagctacgttcctcgaaatgaagggccacttttacatgcacgccggtagccttctgttaaaaatgggacagcatggcaataacgtccagtggcgggctctcagtgagcttgcagcactgtgttacctaattgctttccaggtaccacgaccaaagatcaaactcattaagggggaggccggtcaaaatctgttggaaatgatggcttgtgacagacttagtcagagtggacatatgttattgaatctctccaggggtaagcaggactttttgaaggtcgtggtggagaccttcgccaataaaagcgggcagtctgccctttacgatgccctcttttcgtctcaatcacccaaggatacatcattcctggggtcggacgacatcggaaacatagatgtccaggaacctgaacttgaagacctggctaggtatgatgtcggagcaatcagggcccacaatggctccctgcaacacctgacttggctgggcctgcagtggaacagccttcccgctttgcctggaatacgtaagtggctcaaacagttattccaccacctaccacaggaaacctcccgcctggaaactaacgcccctgaaagcatttgtatattggacctcgaggtgtttctgctgggcgtagtgtatactagtcacttacaacttaaggaaaagtgtaattcacaccatagctcataccaaccattgtgcctgcccctccctgtttgcaagcaactgtgcactgaacggcagaaaagctggtgggacgccgtgtgcacgcttattcatcggaaagcagtccccggaaattctgcaaagctgcggctcttagtccagcacgagattaacacattgcgggctcaagaaaaacacggcctgcagccagcattgctcgtacattgggctaagtgcctgcaaaagatggggtctggtctgaactcgttttacgatcagagagagtatataggacgttcagtacattactggaaaaaagtcctccctcttcttaaaattatcaaaaagaaaaacagcatacccgagcccatagatccactgtttaagcacttccattcagttgatatacaggcatcagagattgtggaatacgaggaggacgcacatgttacatttgcaattctggatgcggtcaatggaaatatcgaagacgcaatgaccgccttcgagtcaatcaagtccgtggtgagttactggaatctcgctctcatcttccacaggaaagccgaggatatcgctaatgatgctttgagccccgaagagcaagaagagtgtaagaactacctgagaaagaccaggggatatctaatcaagattctggacgactctgacagcaatctgagcgttgtcaagaaacttcctgtccctcttgagtccgtcaaggagatgttgaaaagcgtgatgcaggagcttgaaaactacagcgagggcggtcccctgtataaaaatggctcactgcggaacgccgacagtgagataaaacactctaccccgagccctaccaaatacagcctatcaccgtccaaatcctataagtacagtcctaaaacccctcccagatgggctgaggatcagaattcccttctgaaaatgatcaggcaggaagtcaaggccattaaggaggagatgcaggagttaaaacttaacagctcgaagtcagcatctcaccataggtggcctactgagaactatggcccagattcagttccagacggctaccaggggtcgcaaacctttcacggtgccccattgactgtcgctaccacgggaccaagtgtttactattcacagagcccagcatataatagccaatacctgctcaggcccgcagcgaacgtgacccccactaaaggcagtagtaataccgagtttaagagcactaaagaggggttcagtattcccgtgtcagcagacggttttaaatttggaatttccgagccagggaatcaagaaaaaaaatccgaaaagccactggagaacgacactggcctgcaggctcaggatatatcaggccgaaaaaagggtcgaggcgtgatcttcggccagacctcaagtacttttacttttgccgacgttgcaaaatccacgtccggcgaaggattccagtttggtaagaaggacctgaacttcaaaggcttctctggcgcaggggaaaaattattttcttctcagtacggcaaaatggctaataaggcaaatacatccggggacttcgaaaaggacgacgacgcatacaagaccgaggattcggatgacatacactttgagcccgtggtacagatgcccgagaaagtcgagcttgtcacaggagaagagggcgagaaggtgctgtatagtcagggtgtgaagctgttccgttttgacgcagaggtttcccagtggaaggaacggggactgggtaacttaaaaatcctcaagaatgaagttaacggcaaggtgcgtatgctgatgcagagggagcaggtgctcaaggtgtgcgctaatcactggatcactactactatgaacctgaaacccttaagtggcagtgatcgcgcatggatgtggagtgcgagcgattttagcgacggcgatgcgaagttggaaaggttagcagcaaaattcaaaactcccgagttagcagaagagtttaagcagaagtttgaagagtgccagaggctcctcctggacatccctctgcagaccccacataagctggtcgacaccggcagagccgcaaaacttatccagagggccgaggaaatgaagtccgggctgaaggatttcaagacttttcttaccaatgatcagacgaaggtggccgaggaagagaataaaggaagtggaaccggggcagcaggcgcatccgacactaccattaaacctaatgccgaaaataccggaccaactcttgagtgggacaactatgacctccgagaggacgcacttgatgattccgtgagctcgtcttccgtgcatgcctctccgttggccagttctcccgtccgcaagaatctgttccactttgatgagtcaaccactggatcgaatttttcctttaagtctgctctgtccctttctaaatctcccgctaaactcaatcagagcggcacatccgttgggacagacgaagagagcgacgtcacacaggaggaggagcgcgacggacagtactttgaacctgtggtgccgcttcccgacctggttgaggttagtagtggcgaggagaacgagcaggtcgtgttctcacatcgtgccgaattttatcgctacgataaggacgtgggtcagtggaaagaacgaggcattggagacataaagatcttacagaattatgacaataaacacgttcggatacttatgaggagagaccaggtccttaagctatgcgccaaccatcgcatcaccccagacatgagcttgcaaaatatgaaaggtacggagagagtgtgggtgtggacagcgtgtgacttcgccgatggagagagaaaggtagaacatttagcagtgagattcaaattgcaagacgttgctgactccttcaaaaagatctttgatgaggcaaagaccgcacaagaaaaagatagtctgatcacacctcatgtctccaggtcctctactcccagagagtctccgtgtggtaaaatagccgttgcggtgctcgaggagactacacgtgaacgcaccgacgttatacaaggagacgacgtagcagacgctgctagcgaggttgaggtaagttcaactagtgagactaccaccaaggctgtggtctcccccccaaagttcgttttcggatctgaaagcgtaaaaaggatcttctcctccgagaagtccaaacctttcgcattcggtaactctagcgccaccgggagtctgtttggcttcagctttaatgcaccacttaagtctaacaacagcgagacctcttccgtcgcgcagtcagggagtgagtccaaagtggaacctaagaagtgcgagttatcaaaaaatagcgatattgaacaaagtagcgatagcaaagtgaagaacttgtcagcctcttttcctactgaggagagctctataaactataccttcaagacccccgaaaaggagccacccttatggtatgccgaatttaccaaagaagagctggtgcaaaagctgagttctaccacaaagagtgcagatcacttaaatgggttgcttcgcgagattgaggcaacaaacgccgtgttgatggagcaaatcaaactacttaagagcgaaataaggcgacttgaacgcaatcaggagcaggaggtatcggccgctaatgtggagcacctgaaaaacgtactattacagttcatctttcttaagccagggtcagagcgagagcggctgctacccgttataaacaccatgctgcaactatcactggaagagaagggcaagctggctgcggtagcgcagggggaagagta

SEQ ID NO: 237906 - DNA, 5300 bp, synthetic construct
  misc_feature 1..5300: note = Description of Artificial Sequence: Synthetic coding sequence
  source 1..5300: mol_type = other DNA
atgtcctgctcaaaggcatacggagagcggtacgtggccagcgtgcaaggtagcgcgcctagccctaggaagaaaagtactcgtggcttttatttcgcaaagttatactacgaggccaaagagtatgacttagccaagaaatacatctgtacgtacatcaatgtcagagaaatggacccacgcgctcaccggtttctgggtctcctttatgaactggaggagaataccgagaaggcagtggaatgctaccggagatctgtggagttaaaccctacccagaaagatctggtgctcaaaatagcagaacttctttgtaagaacgatgtgacagatggccgagctaagtactgggtggaacgggctgcaaagctgtttcccggtagtccagcaatctacaagttaaaggagcagctgctggactgcgaaggtgaagacggctggaacaaactttttgatctcattcagagcgagctctacgttcgccctgacgacgtccacgtgaacatccggcttgtggaattgtaccggtctacaaagagactcaaggatgccgtggcgcgatgtcatgaggccgagagaaatatcgccctccgtagctctctggaatggaatagctgtgtggtgcaaacgctgaaagagtacttggagtctttacaatgcctggagtctgataagagtgactggcgggcaaccaacaccgatttgcttctggcctatgccaacctaatgttgttgacgctaagcacacgcgacgtgcaggagagtcgggagctcctggagtcttttgatagcgctctgcagagcgctaagtcaagcctgggcggtaacgatgagttaagtgccaccttcttagaaatgaaaggccatttctacatgcacgccggaagccttctgctgaagatggggcagcatggaaacaacgtgcaatggagggccctgagtgaacttgcagccctatgctacctgatagcctttcaggtgcctagaccaaaaatcaagctgatcaagggggaggctggccaaaacctcttggagatgatggcttgtgacagactgtcccaaagtggccacatgcttctcaatctaagccgaggaaagcaggatttcttaaaggttgttgtcgagacctttgctaataagagtgggcagagcgccctgtatgatgcgctattttcatcccagtcccctaaggacaccagctttctgggctccgacgacatcgggaacattgatgtgcaagaacctgaactggaagatctggcaaggtacgacgtgggagctataagagctcataacgggagcctgcagcaccttacatggctgggtctccagtggaattccctgcctgccttgccaggcatcaggaaatggctgaaacagctgtttcatcaccttccacaagagacaagccgcctggaaactaatgcccctgagagcatctgcattctggacctggaggtgtttcttctcggggttgtctacacctcacacctgcagctaaaggaaaaatgcaacagtcaccattcctcctaccaacctctttgcttaccgttgcccgtttgtaagcagctgtgcacggaaagacagaagagttggtgggacgcagtttgtacacttatacaccgcaaggcagtgcctggaaactcagctaagctcaggctcttagttcaacacgagatcaacaccctcagagctcaggaaaaacatggtctacagccagctctgctggtgcattgggctaaatgccttcagaagatgggtagcgggcttaacagtttttacgaccagcgggagtacatcggaaggagcgtacactattggaagaaggtactgccgctactgaagattatcaaaaaaaaaaactctataccagagcccatcgacccactcttcaaacatttccactccgtcgatatccaagccagcgagattgttgaatacgaggaagatgcacatgttacctttgcgatcctggacgctgttaatgggaatattgaagacgccatgaccgcattcgaatcaatcaagtccgtggtttcttattggaatctcgctcttattttccacaggaaggccgaggatatcgcaaatgacgctttgtcacccgaagagcaggaagagtgcaagaactacctccgtaagacaagaggctatctgataaaaattttggatgattctgactcaaacttgtccgtggtgaagaaactgcccgttcccctagagtctgtgaaggagatgctgaagtcagtaatgcaggaactggagaactactccgagggagaccctctgtacaagaatggctcactccggaatgccgattcagagatcaagcattcaacaccgtcccccaccaaatatagcctgagcccgtctaaatcctacaagtactcaccaaagacacccccacggtgggccgaagaccagaattcactccttaaaatgattagacaagaggtaaaagccataaaagaggagatgcaggaactgaagctcaactcgtccaagagtgcctcccaccacaggtggcctacagagaactacggaccagacagtgtcccagacggttatcaggggagccagacgttccatggagctccccttacggtggctaccaccggcccatccgtctactatagccaaagccccgcttataacagtcaatacttgctgcggcctgcagctaacgtaacacccactaagggctcatcgaatacagagttcaagagcacaaaagagggcttctcgattcccgtgagtgcggatggttttaagtttggcatttcagagcctggcaatcaggaaaaggaatcagaaaagcctcttgagaacgataccggcttccaggctcaggatattagcggccagaaaaacggtcggggagttatcttcggacagacatccagcacgttcactttcgccgacgtggctaaatccacctccggggaggggttccagtttggaaaaaaggatccaaattttaagggctttagtggagccggagagaaacttttctcctcgcaatgtggtaagatggccaataaagccaatacctcgggagacttcgagaaggacgacgacgcatacaagaccgaggacagtgacgacatccattttgaaccagtggtccaaatgccagaaaaggtggagctggtgataggcgaagaaggtgagaaagttctgtactcccagggcgtaaaactttttcggttcgatgcagaggttcgccagtggaaggagcggggactaggcaatctaaagattctaaagaatgaggtgaatggcaagcctagaatgctgatgcgtcgcgagcaagtcctgaaagtgtgtgcgaatcattggataacgactacgatgaaccttaagcccctgtcaggttcagatcgcgcttggatgtggtcggcgtcggatttctcggatggcgatgccaaactggagcggctagcggcaaaattcaaaactcccgaactggcagaggaattcaagcagaaattcgaggaatgccagcagctgcttctggacatccccctgcagactccccacaaacttgtcgacaccggacgcgctgccaagcttatccagagagccgaagaaatgaaatctggattgaaggacttcaaaacgtttctgaccaatgaccaaacaaaggttacagaagaggaaaataaaggctccggaacgggagcagcaggagctagtgatactactatcaagcctaatccagaaaatacaggtcccactttggaatgggacaactgtgatctacgcgaagatgcactcgacgactccgtcagctccagtagcgtgcacgcaagccctctcgcaagcagccccgttaggaagaatctcttccatttcggtgaaagcactacaggatccaacttttctttcaagtctgccctgtcaccctcaaagagccctgctaagcttaatcagtctgggacctccgtcgggaccgacgaggagtcggacgtgacccaggaagaggagagagacggacaatactttgagcctgtagttcccctgcccgatcttgtggaggttagctccggcgaagaaaacgaaaaggtagtgtttagccatcgggcagaactttaccgatacgataaggacgtggggcagtggaaagaaaggggaatcggcgatataaaaattttacagaattacgataacaagcaggttaggattgtgatgcgcagagaccaggtcctaaaactttgcgcaaaccacacaatcaccccagacatgagcctccagaacatgaagggcaccgaacgggtgtgggtctggaccgcttgtgatttcgccgatggagaacgaaaggtcgaacatctcgctgtgcggtttaagctgcaggacgtagctgacagctttaaaaagatctttgatgaagctaagaccgcgcaggaaaaggattccctcatcacaccacatgtctccaggtcatcgactcctcgcgagtccccatgtggcaagatcgccgtcgcagtcctggaagaaactactcgagaacggaccgacgtcatccagggagatgacgtagctgacgcagcctccgaggtggaagtgagcagcactagcgagacaactacaaaggccgtggtaagtcctcctaagtttgtgttcggctctgagtctgtgaagcggatcttcagttccgagaagagcaagcccttcgcgttcggaaattctagcgctaccgggtcactctttggattctcattcaatgcatctctgaaaagcaataatagtgagacaagctccgtcgctcagagtggatctgaatctaaggtcgaacctaaaaagtgcgaactttctaagaactctgacatcgaacagagttccgacagcaaagtgaaaaacctgtctgcttccttccccatggaagagtcaagcattaactacacttttaagactcctgagaaagaacctcccctgtggcatgccgagttcaccaaggaggaactggtccagaagcttagctccaccaccaaaagcgcagaccatttgaatggactgctgcgagaagccgaggccaccagtgccgtgctgatggagcagatcaagctgttaaagagcgagattaggcgccttgaaaggaaccaggagcaagaagagtcggctgccaacgtagagcacttgaagaacgtgctccttcagttcatcttcttgaaacccggatccgagagagagagactgcttcctgtgattaataccatgctgcagctttccccggaggaaaaagggaaactggcagccgtggcccaagctgagcggggtttcgttctgaattcaacattcta

SEQ ID NO: 237907 - DNA, 3378 bp, synthetic construct
  misc_feature 1..3378: note = Description of Artificial Sequence: Synthetic coding sequence
  source 1..3378: mol_type = other DNA
atgctcttaaccctgagcaccagagacgtgcaggagtcaagggagttgctcgagtccttcgactccgccctacagagcgctaagtcctccctaggcggaaatgatgaactgtcagccacatttctggagatgaaaggccacttctatatgcacgccggatccctcctgcttaagatgggccagcatgggaataacgtgcagtggagagccctatctgaactggcggcattgtgttatttgattgcatttcaggtgccacgtccaaaaatcaaactgatcaaaggagaggcgggtcagaatcttctggaaatgatggcctgcgaccgactgtctcagagtggccatatgttactgaacttgagccgcggtaaacaggactttctgaaggtggtggtcgagacctttgccaataagtcgggacagagtgcactttatgatgctctgtttagttcacagagtcccaaagatacttcatttttggggagtgatgacatcggcaatattgatgtacaggaaccagagcttgaagaccttgcaaggtacgatgtcggcgctatcagagcgcacaacggctcgttgcaacacctgacgtggctcggtttgcaatggaactccttgcctgccctgcccggtattcgcaaatggttaaagcaactattccatcatctcccacaggaaacctctagactggagactaacgcccctgaatccatttgtatcctagacctcgaagtcttcctgttgggggtggtttacactagccacctgcagttgaaggagaagtgcaactcgcatcattccagttatcagcccctctgcttgcctctgccagtttgtaaacagttgtgcaccgaacggcagaaaagttggtgggacgcagtgtgtaccctaatacacaggaaagcggtcccagggaactccgctaaattacggctgctcgtgcagcatgagatcaatacacttcgggctcaggaaaaacatggcttgcagccagccctcctggttcactgggcaaaatgcctccagaagatggggtccggcctgaacagtttctatgaccagcgcgagtacataggcaggagcgtgcattattggaaaaaggtcctccccctgctgaaaattataaagaagaagaattccatcccggaacccatcgatcctctcttcaaacattttcacagcgtcgatattcaggcttcagaaatcgtcgagtacgaagaggacgctcacgttacttttgccattctggatgctgtcaatggtaacattgaggatgccatgaccgccttcgaaagtatcaaatcagttgtgtcctattggaacctggccctgatcttccatagaaaggccgaggacattgccaacgacgcactgtctcctgaggagcaagaggagtgtaaaaattacctgaggaagacccggggatatctaatcaaaattttggatgactctgactcaaatctcagtgtcgtgaagaagttgcccgtccctcttgagagcgtgaaggaaatgctcaagtccgttatgcaggagcttgagaactactctgaaggggatcccttgtacaaaaacggatcactgcgcaatgccgacagtgaaatcaagcactccacgccatccccaacaaaatacagcctttctccttcaaagagttacaagtactcaccaaagacgcctccacgctgggccgaagatcagaattcccttttaaagatgatcagacaggaggtgaaggccatcaaggaagagatgcaagaactgaaattgaatagctccaaaagcgcctcccatcaccgctggcctacggaaaattatggacctgatagtgtcccagatgggtaccaagggagccagacttttcatggggctcctcttaccgtggcaactactggccctagcgtctattacagccagtcccctgcttacaactcccagtatttgcttcggccagcagctaacgtgacccctaccaagggtagttctaatacggagttcaagtccaccaaggaaggattctctataccagtctcagcagacgggtttaaatttggaatttcagaacctggaaatcaggaaaaagaatctgaaaagcctttggagaacgacacgggtttccaggcccaggacattagcggacaaaagaatggaaggggcgttatcttcgggcagacttcgtccacatttaccttcgctgacgtggcaaaatcgacctctggggagggattccagtttggtaaaaaagaccccaatttcaagggcttctctggagctggggaaaagctgttttcaagccagtgtggcaagatggcaaacaaagcaaacacatctggagacttcgaaaaggacgacgacgcctataaaaccgaagattctgacgacatccactttgaaccggttgtgcagatgcccgagaaggtggaactggtgataggagaagagggcgagaaggttctgtacagccagggtgtgaagctctttaggttcgacgctgaggtgaggcagtggaaagaaagaggactcggcaatctaaaaattctgaagaatgaggtgaacggcaaacctcggatgctcatgagacgcgagcaagtgctgaaggtgtgtgccaatcactggataacaacaaccatgaatctgaaacctttatccggctcggacagagcgtggatgtggagcgcttccgatttttcagacggtgatgccaaactggagagactcgcagcgaagtttaaaacgcccgaactggcagaagaattcaagcagaagtttgaagagtgtcagcaactccttttagatatcccactccagacgccacacaagctcgtagacacgggacgggctgccaagcttatccagagagctgaggaaatgaagtccggttccgaatcgaaagttgagcccaagaagtgtgagctgtccaaaaacagcgacattgagcagtccagtgactccaaggtgaagaatctcagcgcatccttcccaatggaggaaagtagtatcaactatacctttaagacccccgagaaagagcctcctctttggcacgccgaattcaccaaagaggaactcgtgcagaaactgtcttctaccactaagagtgccgaccatctgaatggtctcctccgcgaggctgaggcgacatcggccgtattgatggagcagattaagctgctgaagagcgagattcggagattggagaggaaccaagagcaggaagagtcagccgctaatgtggaacacttaaaaaatgtgctgctccaattcattttccttaagccgggaagtgagagagagcggctcttgccggttattaacacgatgctccaactgtctccagaggagaaaggtaagctcgctgccgtggcccagggcgaggaatag

SEQ ID NO: 237908 - DNA, 471 bp, synthetic construct
  misc_feature 1..471: note = Description of Artificial Sequence: Synthetic coding sequence
  source 1..471: mol_type = other DNA
atggatcctcgcgctcaccgatttcttggccttctgtacgagctggaagagaacactgagaaggcagtagaatgctatcgccgaagtgttgagctgaatccaactcagaaggacctggtgttgaaaattgccgaactgttatgcaaaaatgatgtgacagacgggcgagccaagtactgggtagagagggccgctaagctgttcccagggtccccagctatatacaagttgaaggaacagcttctcgactgtgagggcgaagacggttggaacaaactgtttgacctgattcagagtgaactgtatgtgagacctgacgacgtacacgtgaatattcgactcgttgaactctaccgtagtactaagcggctcaaggatgcagtggccaggtgtcacgaggctgagcgcaacatcgcccttcgaagctcactagaatggaattcttgcgtggtccagactcttaaattttag

SEQ ID NO: 237909 - DNA, 5276 bp, synthetic construct
  misc_feature 1..5276: note = Description of Artificial Sequence: Synthetic coding sequence
  source 1..5276: mol_type = other DNA
atgtcctgcagcaaggcttacggagagcggtatgtcgcttcagtgcagggtagcgctccctctccgcgtaaaaagtccactagggggttttatttcgctaagttatactacgaagccaaggaatatgatctcgcgaagaagtacatctgtacctatatcaatgtgcgggaaatggatccgagggcccaccgttttttggggctgctttacgagctcgaagaaaataccgagaaggcggtggagtgctaccgcagatccgtggaactgaaccctactcaaaaggatctggtgttgaaaattgctgagttgctgtgcaaaaatgatgtcactgacggaagggctaagtattgggtcgaaagggcggctaagttgtttccagggagcccagccatctataagctaaaggagcagctgttggattgtgaaggagaggatggatggaataagttgttcgatttaattcagagcgagctctatgtgcgacccgacgatgttcacgtaaatatccgcctggtggagctctaccggtcgacaaaaagacttaaagatgcggtagccagatgtcatgaggccgagcgcaacatagctctccgttcaagcctggagtggaactcctgcgttgtgcagaccctgaaggaatacctggagagtctacagtgcctcgaatcagataaaagtgattggagagcaacgaatactgatctgctgttagcatatgccaacctgatgctgctaacgctgtcaacccgggacgtgcaggagagtcgagagctgcttgagagcttcgactcagccctacagagcgccaagtcgagtctgggagggaacgacgagctcagcgcgactttcctggaaatgaaaggccatttttatatgcacgcgggatctttactgttgaagatgggacaacacggtaataacgtgcagtggagggcactgtccgaactggccgctttgtgttatctcatcgccttccaggtgcccagaccaaaaatcaagctgattaaaggagaagcaggacaaaatctgctggagatgatggcctgcgaccgactgtcccaatcaggacatatgctgctcaacctgagccgcggtaagcaggactttctaaaggtcgtggtcgaaacgttcgcaaacaagtctggacagagcgcgctgtacgatgcactatttagctcccagagccctaaagacacgtcttttctgggaagcgacgacattggaaacatagacgttcaagagcctgagctcgaggatctcgcaagatacgacgtaggagcgatcagggcccacaacggatctttgcaacacttaacctggttaggactccagtggaattccctgccagccttgcccggaatccgcaagtggcttaagcagctgtttcatcaccttccccaggaaacttctcgcttagagaccaatgcacccgagtccatttgcatcctggatctggaagtgttcctattaggtgtcgtctataccagccaccttcagctcaaggaaaagtgtaactcccaccattcctcttatcagcccctttgcctgcctctgccggtctgtaagcagctgtgtacagagcgccagaaaagttggtgggatgctgtctgcactttgatccacaggaaggccgtcccaggcaacagtgcgaagcttcgcttgctggtgcagcacgaaatcaataccctgcgcgctcaggaaaaacacggcctccagccggctttgctggttcattgggccaaatgtctgcagaaaatggggagcggtctcaactcattctacgaccagagggaatacatcggcaggtctgttcattactggaaaaaggttctacctttgctaaagataattaaaaaaaagaattcgatccccgagcctatcgatcctctgtttaagcactttcattctgtggacatccaggcctccgagatcgtggagtacgaggaagatgcccacgtcacctttgcaatactggatgccgtgaatgggaatatcgaggatgcaatgaccgccttcgagtcaattaagtcagtggtttcctactggaacctggccctcatctttcatcgcaaggcggaggatatagccaacgatgcgttgtctccagaggagcaggaggaatgtaaaaattatcttcggaagaccagggggtacctaatcaagatcctggatgacagcgatagcaatctaagtgtggtgaagaaactgcccgtcccactggaaagtgtgaaggaaatgctgaaatcagtgatgcaagagttagaaaattacagcgagggcgatcccctttataaaaatgggagccttcggaatgcagactccgagatcaaacacagcaccccgagtccaactaaatattctctgagcccgtcaaaatcttacaagtactcgcccaaaacacctccacgatgggctgaagaccaaaatagccttttgaagatgatccgtcaggaagttaaagccataaaagaagagatgcaagagcttaaattaaatagtagtaaatctgcttcacaccaccgttggccaacggaaaattatggcccagactcggtccccgacgggtatcaggggagtcagactttccacggagcacctctgaccgtggctacaacgggaccctccgtgtactactcacagagcccggcttataatagccagtatctcctcagacctgccgcaaatgtgaccccaacgaaaggatcttcaaatactgaatttaagtcgacaaaggagggttttagcatcccagtgtctgctgatggctttaaattcggcatctccgagccaggcaaccaggaaaaggaatccgagaaacccctcgaaaacgataccggattccaagcacaggacattagcggtcagaagaatggtcgaggcgttattttcgggcaaacatctagcaccttcaccttcgcagacgtcgctaaaagcacaagcggggaggggtttcagttcggaaaaaaggaccccaattttaaggggttctctggggcaggcgagaagctgttttcatctcagtgcggcaaaatggcgaataaggccaacacatctggagactttgagaaggatgacgacgcctataaaacagaggactctgatgatattcatttcgaacccgtggttcagatgccagagaaagtggaattggtaatcggcgaggagggggagaaagtgctgtacagccaaggagttaaactgtttcgattcgacgccgaagtgcgacagtggaaggaacgcggtcttggcaacctcaagatccttaaaaatgaagtgaatgggaagccaagaatgctgatgagacgcgagcaggtgttaaaagtctgcgctaatcattggattacaaccacaatgaatctgaaacccttgtcaggaagcgacagagcgtggatgtggtccgcctcggatttttccgacggtgacgccaaactggagaggctcgcagcaaagttcaagactcccgaactcgccgaggagtttaaacaaaaattcgaggagtgccagcagctccttctggacattcctcttcagacgccccataagctggtcgacaccggtcgtgccgctaagctgattcaacgagccgaagaaatgaagtctggcctgaaagatttcaaaacattcctgactaatgaccaaaccaaggtcacggaagaggagaataagggctcaggaacgggggcagcaggggcttccgatacaacaattaagcctaacccggagaatactgggcctaccctcgagtgggacaattgcgatctcagagaagacgccttggatgattccgtgagctcgagtagcgtgcatgcaagcccactcgcatcttcccctgtcaggaagaacctttttcatttcggagaatccaccacgggttctaatttttcgttcaagtcagcccttagccctagcaaatcacccgctaagttaaatcagagcggcaccagcgtgggcactgacgaggaaagcgacgtgacccaagaggaagaaagagatggccagtacttcgagcccgtggtgcctttgcccgacctagttgaggtgagcagcggtgaggaaaacgaaaaagttgtcttctctcaccgcgcagagctgtatcgatacgacaaagacgtgggccagtggaaggaaagggggattggtgatatcaagattttacaaaattatgataacaagcaggtgcggattgtcatgagaagggaccaggtgctgaagctgtgtgccaatcacaccattacccccgacatgtccctgcagaatatgaaaggaactgaacgcgtgtgggtgtggacagcttgtgacttcgcagacggtgagaggaaagtggagcatctcgcggtccgatttaaactgcaggatgtggctgacagctttaaaaaaattttcgatgaggcaaagacagctcaagaaaaggacagcctgataaccccccacgtgtcaagatcatctactcctcgcgagtccccctgtggtaagatcgctgtggccgtgttggaagaaacaactcgggagcgcactgatgtcattcagggcgatgatgtagctgacgctgccagcgaggtggaagtgtcctctacttccgagaccacaaccaaggctgtcgtctccccccctaagtttgtgttcggcagcgagtccgtgaaaaggatcttttctagtgagaagtctaagccatttgccttcggaaacagttccgctaccggcagccttttcggtttctccttcaacgcaagcctgaagtctaataatagtgaaaccagtagcgttgcccaaagtggatcagagagcaaagtggaacctaagaaatgcgaactgagcaaaaactccgatattgagcaaagcagcgactcaaaagttaaaaatctctcagcaagcttcccaatggaagagagcagtatcaactacacatttaagacacccgagaaggaaccacccttatggcatgcggagtttacgaaggaggagctcgtgcagaaattatcttctacaactaaatctgcggaccatctgaatgggctgctcagggaagctgaggccacttcggccgttctcatggaacagattaaactgctgaagtccgagatccgcaggcttgaacgcaatcaggaacaggaagaatccgccgcaaacgttgagcatctgaaaaatgtgctgttacagttcatctttctgaaacccggttctgaaagagaaagacttctcccagtgatcaacacaatgctgcagctgagtcccgaggaaaagggtaagttggccgctgtggcacagggggaggaata

SEQ ID NO: 237910 - DNA, 5298 bp, synthetic construct
  misc_feature 1..5298: note = Description of Artificial Sequence: Synthetic coding sequence
  source 1..5298: mol_type = other DNA
atgaggagatccaaggctgatgtggaaagatatgtggcttctgtgcttgggctgacccctagtcccagacagaaaagcatgaagggattttacttcgccaagctttattacgaggctaaggagtatgacctggctaaaaagtacatctgtacttatatcaatgtgcaggagcgcgaccctaaggctcacagatttttagggctcctgtacgaactggaagaaaacaccgagaaagccgtggaatgctacaggagatctgtagagctcaaccctactcagaaagatctcgtgctcaagatagccgaactcctctgcaagaatgatgtcactgacggccgagctaagtactgggtcgagcgcgcagccaaactcttccccggttcaccagccatctataagttaaaggaacagctcctggactgcgagggggaagacgggtggaacaagttatttgatctgattcagtccgaactctatgtcaggcccgatgacgtgcacgtgaacatccggctggttgaactgtacagaagtacgaagcggctcaaagatgcagttgcacactgccacgaagcagagcggaacatcgccttgcggtccagcctagagtggaacagttgtgtggtccaaacgcttaaggaatacttagagtccctccagtgcctagagtccgacaaatcagactggcaagccactaacactgacctcctgcttgcctatgcaaatttgatgctcctgacgctgtccacacgggatgtgcaggaaaaccgggagctccttgagtcttttgacagcgctcttcagtctgcaaaaagtagtctgggaggcaatgatgaactttctgctacctttttggagatgaagggtcatttctacatgtatgctgggtcactcctcctgaagatgggccaacacgggaataatgttcagtggcgtgctctctctgagctggccgcactgtgttatttgattgcgttccaggtgcctcgacccaaaatcaagctgagggaaggcaaagccggtcagaaccttctggaaatgatggcatgtgatcggctttcgcagtccgggcatatgttgttatccttgtcccgcggaaagcaagattttctgaaggaagtggtggagacatttgccaacaagattggtcagagcgctctgtatgatgcactgttctcatctcagtcccctaaagacaccagttttttgggctccgatgacataggtaagattgatgtgcaagagcctgagttagaggatttggcacgctatgacgttggggctatcagggctcacaacgggtctctccaacacctaacctggctggggctgcaatggaattctctaccggctctgccgggaataagaaagtggttaaagcaattattccatcgcctgccccatgagaccagtcgcttggagacaaatgcgccagagtccatttgtattttggatttggaggtgtttctcttaggcgtagtgtatacctcccacctgcagctgaaagagaaatgtaactcacatcatagctcatatcagccgttatgccttccatttcctgtgtgtaagcagctgtgtaccgagcgccagaagagctggtgggacgctgtctgcaccctcatacacagaaaagccgttccagggaaccttgcaaaattgcgcttgctggtgcaacacgaaattaacacattgagagctcaggagaagcatggactgcagccagccctgctggtccactgggccaagtatttgcagaaaaccgggtcaggccttaactccttctacggccagctggaatacatcggtcgttccgtgcactactggaagaaagtgttacctcttttaaagatcatcaagaagaactcaatcccagaaccaatcgaccctctgtttaaacacttccactctgtagatattcaggcaagcgaaattgttgagtacgaggaggatgcccatattacgtttgccatgttggatgctgttaatgggaatatcgaggatgctgttactgctttcgagtccattaagtcagtggtgtcatattggaatttggcgctgatttttcaccggaaggcggaggatatcgaaaatgatgcactcagcccagaggagcaggaggagtgcaggaactatctgactaaaacccgcgactacctaataaagattatcgatgatggagacagcaatctttcagttgtaaagaaacttcctgtgcctttggaatctgtgaagcagatgttaaattcagtgatgcaggaattagaagactactccgaaggcggacccctctacaaaaatggttccctgcgcaacgccgactctgaaatcaagcattcaactcccagccctactaaatacagtctaagcccctctaagagctataagtatagccccgagacccccccacggtggaccgaagatagaaactccctgctgaacatgatctgtcagcaggtggaagcaattaaaaaggagatgcaagagcttaagctgaactcatcaaaatccgctagccgccatcggtggccaacggaaaattacggccctgattccgttcccgacggctatcagggaagccaaaccttccatggggctcctctgactgtggctacaaccggtccttccgtgtattacagccagagtcctgcctataactcacaatatttactgagacctgcggctaatgtaacgcccaccaagggaagttccaacaccgagttcaagtcaacgaaggagggattttccattcccgttagcgcagacggcttcaagttcgggatctccgagccaggaaatcaggagaagaagcgagagaagccgctggaaaatgataccggctttcaggcccaggacatttctggcaggaagaagggcagaggcgtcatcttcggccagacatcaagcaccttcactttcgctgatgtcgccaaaagcactagcggggaaggttttcagtttggtaaaaaggacctgaactttaagggcttctccggagccggagaaaagctttttagctcgaggtacggcaaaatggctaataaggctaacacatccggcgacttcgagaaggatgacgacgcttacaaaaccgaggattcggatgacatccactttgagccggttgtgcagatgcccgagaaggttgagctggtcacaggggaggaaggcgaaaaggtcctgtactctcagggtgttaagctgtttaggttcgacgccgaggtccgacagtggaaggagcggggtctgggaaatcttaaaattctcaagaacgaagttaacggcaagcttcggatgctgatgcgcagagagcaggtgcttaaggtttgcgcaaatcattggatcacaaccacgatgaacctgaaaccgctgtccggctccgatcgggcttggatgtggtccgcgagtgattttagtgacggcgatgctaagctggaaagattggccgcaaaatttaaaacgcctgaactggcggaagaattcaagcagaagttcgaggagtgtcagcggttgcttctagacataccattgcagactccccataagttggtggacaccggaagggccgcaaagctgatacagcgagctgaggagatgaaaagcggcctgaaggacttcaaaaccttcctgactaacgaccagactaaagtgactgaagaggaaaataaaggctcggggacgggggctgccggtgcctctgacacgactatcaagccaaacgccgaaaacacgggaccaacacttgaatgggacaattatgacttgcgggaagacgcactcgatgattctgtctcttcctcttctgtccacgcatcgcctttagccagttctccagtccgaaaaaacctgtttagatttgatgagagcaccactgggtcaaatttttctttcaaaagcgcgttgagcctgtcaaagagtcccgcaaaactcaaccagtccggaactagcgtagggacggatgaggaatccgtggtgacccaggaggaggagagggacgggcaatacttcgaacccgttgtccccctgccggaccttgtggaggtaagttcaggagaagagaacgaacaggtggtgtttagtcatagagccgaaatttaccggtacgataaagacgtgggccagtggaaggagaggggcatcggtgatattaaaatactgcagaactatgacaacaagcaggtgcgcatcgtgatgcgtagagaccaggtcctgaaactatgtgccaaccaccgcatcacccccgatatgtcactgcaaaacatgaaagggacagagagagtgtgggtatggaccgcttgcgatttcgccgacggcgagcgaaaggtggaacacctcgcagtgcgatttaagctgcaggatgtcgccgactctttcaagaagatatttgatgaggcaaagacagcacaggagaaagatagcctgataaccccacacgttagtagaagtagtacccccagggagtccccttgcggtaaaatcgcggtagcgattctggaggagacaacgcgggagcgtacagacgtcatacagggtgacgacgtggccgacgccgcaagcgaggtcgaggtgtctagtacaagcgagactaccacaaaagccgtcgtgtctcctccgaaatttgtcttcgtctccgaaagcgtgaagaggattttctccagcgaaaaaagcaagcccttcgttttcggcaactcttctgcaaccgggtccctcttcggcttcagctttaacgcccctctcaaaagtaacaattctgaaactagcagcgtggcacagtcagggtccgagtccaaggtggagccaaaaaaatgtgaactgtccaaaaattccgacatcgagcagtccagtgatagcaaagtgaagaacctctccgcatctttcccaacagaggagtcctccatcaactatacctttaaaacccccgaaaaagagcctcctctttggcatgctgagtttacgaaagaggagctggtgcaaaagctcagatcaaccaccaagtccgccgatcatttaaacgggttgctccgagagatcgaggcaacaaacgccgttctaatggaacagataaaattactgaagtcagagatcaggcgtctggaacgaaaccaggagcgcgaaaaaagcgccgctaacctggagtatctgaaaaatgtgttgttgcagtttatcttcctaaagccagggtcagagagagaacggcttttgcccgttatcaataccatgctacagctgtcgcctgaagaaaaggggaaactggcggctgtggctcaggacgaagaagaaaatgcctcccgctcttcaggctaa

SEQ ID NO: 237911 - DNA, 2715 bp, synthetic construct
  misc_feature 1..2715: note = Description of Artificial Sequence: Synthetic coding sequence
  source 1..2715: mol_type = other DNA
atgaggcgctccaaggccgacgtggaacggtatgttgcctccgtcctgggcctgaccccctctccaagacagaaatccatgaagggcttttactttgcgaagttatactatgaagccaaggagtacgacctcgcaaagaaatacatctgtacctatatcaacgtccaagaacgtgatcccaaagctcatcgcttcctggggctactttatgaactcgaagagaataccgaaaaagccgtcgagtgttatcgcaggtcagtcgagctgaacccaactcaaaaggatttagtccttaagattgcagaattgctctgcaaaaacgacgtgaccgacggccgagccaaatactgggttgagcgcgcagctaagctgttccctggaagtcccgctatctataagctgaaggagcagctgctggattgcgaaggagaagacggttggaataaactgtttgacttgatacagagtgagctgtacgtacgccctgacgatgtccacgtgaatatcagactggtggaactctatcggtctactaagaggctgaaagatgccgtggcacactgtcatgaggctgagcgcaatatcgctttgcgctcaagtctagagtggaatagttgcgtggtgcagaccctcaaggaatatctggaaagcctccagtgtctcgagagtgacaagtccgattggcaggccaccaataccgacctgttgttggcttatgcaaatcttatgctgcttacactatcaacgagggacgtgcaggagaaccgggagctcctggagtccttcgatagcgccctccaatccgctaagtcatcactcggcggaaacgatgagctctcagccacctttctcgagatgaagggacatttctacatgtatgctgggagcttactccttaagatggggcagcacggcaataacgttcaatggagagctctatcagaacttgccgcactatgctatttaatcgctttccaggtgcccaggccaaaaattaagctgagggaaggcaaagccggtcaaaatttactagaaatgatggcgtgtgaccggttgtcacaaagtgggcatatgctcctgagtctcagccggggaaaacaggactttctcaaagaagtggtggaaacatttgcaaataagattggacagtcagcactgtacgatgcactctttagttctcagtcacctaaagacacctccttcttgggatctgacgatatcggcaaaatcgacgtccaagagccagaactcgaggacctagcacggtatgacgtgggggcaatacgcgcacataatgggtctctgcagcaccttacttggctggggttgcagtggaattctctgcctgccctcccagggattagaaagtggcttaaacaattatttcacagattgccccacgagacatctcgcctagagacgaatgctcctgaatctatctgcatccttgatctggaggtgtttctgctcggagtggtgtacacctcacacctgcagttgaaagaaaaatgcaattcccatcactctagttatcagccactgtgtctcccgttccctgtgtgcaagcagctctgcacggaaagacaaaagagctggtgggatgctgtatgcactttaatccaccgaaaggcagtgcccggtaatctggcgaagctcaggctcttagtgcagcatgagattaacaccctccgggctcaggagaagcatggtctgcagccagccttattagtccactgggcaaagtacctgcaaaaaacaggtagcggtctgaactccttctacggacagctcgagtacattggacgcagcgtccactactggaagaaggtacttcccctcctgaaaattatcaagaagaatagcatccccgaacctattgatcccttattcaagcactttcattccgtggacatacaggcaagtgagatcgttgaatacgaagaggacgctcacattactttcgccatgctggacgctgtaaatggtaatattgaagatgcagtgaccgcatttgagtctattaagtccgtggtcagttactggaacctcgccctcattttccacagaaaagccgaggatattgaaaacgacgcactgtctcccgaagaacaagaggagtgcaggaactacctcaccaagacccgagattacctcattaaaatcatcgacgatggagacagtaatttgtccgttgtgaagaagttgccagttcctttggaatccgtaaagcagatgctgaactctgtgatgcaagagttggaggactatagcgaaggcggacccctctataagaacggaagtctgaggaatgcagattcggagatcaagcattctacaccatctcccacaaagtatagtctcagtcccagtaaatcgtataagtacagccctgaaacccccccaaggtggaccgaggaccgcaacagcctgctgaacatgatctgtcaacaggtggaggcaattaagaaagagatgcaggaacttaaacttaattcaagtaagagtgccagccgccacagatggcctacagaaaactacggccctgacagcgtgcctgatgggtatcaaggctctcaaaccttccacggcgctccattgactgaagctgcccatcggcacttcaccattgagaaacacggagattcgaaatggatcatataccggtttactaaacaattgtgtggtacagagcgggcacgggcaaaaatctcatag

SEQ ID NO: 237912 - DNA, 459 bp, synthetic construct
  misc_feature 1..459: note = Description of Artificial Sequence: Synthetic coding sequence
  source 1..459: mol_type = other DNA
atgtggtctggaacctctccaagatgctgggtctcacctcgcagattggataggtatatctgtacatatatcaatgtacaggagagagacccgaaggcacatcgcttcctggggcttctttacgaacttgaagagaacacagagaaagctgtcgagtgctaccggaggtcagtcgagctgaatcctactcagaaggacctcgtgctgaagattgccgagttgctttgcaagaacgacgttaccgacggcagagctaagtattgggtagagagagccgcaaaactctttccaggatctcccgctatctacaagctcaaggagcagctgctggattgtgagggagaggacggatggaacaagctctttgacctgatccaaagcgagctatatgtcaggcccgatgacgtccatgtcaacattcgccttgttgaactgtatcgatccactaaaagactgtag

SEQ ID NO: 237913 - DNA, 2715 bp, synthetic construct
  misc_feature 1..2715: note = Description of Artificial Sequence: Synthetic coding sequence
  source 1..2715: mol_type = other DNA
atgagacggtccaaagcggacgtggagcgttacgtggcctcagtgctgggcctcacgcctagcccgagacaaaagtcaatgaagggcttctattttgcaaagctgtattacgaagctaaggagtatgatctcgcgaagaagtacatttgtacatatatcaacgtgcaggaaagagaccccaaagcccacagattcctcggtctgctctacgaactggaagagaacacagaaaaggccgtggagtgctatagaaggagcgttgagttgaacccaacccaaaaggacttagtcctgaagattgctgagctgctgtgtaaaaacgacgtgactgacggcagggcaaaatactgggtggagagggcagcaaaactcttccccggaagccctgctatttataagctgaaggagcagctgctcgattgtgaaggggaggacggatggaacaagctctttgacctgatccaatccgaactgtatgtgagaccagatgacgttcacgtcaacatccggctggtggagttgtaccggtccacaaagaggttgaaagacgccgtggcccattgccatgaggccgagagaaatattgccttacgtagctctctagagtggaactcttgtgtcgttcagactttaaaagagtatctggagagccttcagtgtcttgagagtgataaatcagattggcaagccaccaataccgatctcttactagcttacgcaaatctcatgctgttgacactgtcgactagagatgtccaggagaaccgggaattactagaaagttttgactccgctcttcagtcagcaaagtcttctctggggggaaacgatgaattaagtgccacgtttctggaaatgaaaggtcatttttacatgtacgcaggcagccttctgctcaaaatggggcagcacggcaacaatgtacagtggcgagcgttaagtgagttggccgctctgtgctacttaatagccttccaggtgcccaggcctaaaattaagcttcgggagggtaaggccggacaaaacctgctggagatgatggcttgcgatcgtctcagccagagcggccacatgcttctatctctttcgagaggaaaacaggactttctgaaagaggtggtcgaaacgttcgctaacaagataggacaaagcgccctatacgatgccttattctcctcacagtccccgaaagacacttcgtttcttgggagcgatgatatcggcaagatcgatgtacaggaaccagagctggaggacctggccaggtatgatgtgggggcaattcgggcacacaatggctccctccagcacctcacctggctcggcctgcagtggaattcactgccagctttgcccggaattaggaaatggttgaaacaattgttccaccgactgccccatgagacctctcggctggagacaaatgcccctgaatctatctgtatcctggacctggaggtcttcctgttgggcgtggtgtatacgtctcatttgcaactaaaggagaagtgtaattcccatcacagctcttaccagccgctatgcttaccttttcccgtctgtaagcagctttgcacagagaggcaaaaaagctggtgggacgcagtgtgcactcttatacataggaaagcggttccgggaaacctcgccaagttgcggctgcttgtccaacatgaaattaacactctcagagcacaggaaaagcatggcctgcagcccgctctcctggttcactgggcgaaatatttgcagaagactggatctgggctgaattcattctatggccagctggagtatatcggcagaagtgtccattactggaaaaaagtgctgccactgctcaagataattaagaagaattccattcctgaacctattgatcctctattcaagcacttccactctgtggatattcaggccagcgaaatcgtggaatacgaagaggacgctcacattaccttcgccatgctggacgcagtgaatggtaacatcgaggacgccgtgacggccttcgagtccataaaaagcgtagtaagctactggaatctcgccttgatcttccataggaaagccgaggatatcgagaacgacgctctatctcccgaggaacaggaggaatgtaggaattacctgaccaaaacaagagattacctcattaagatcattgatgatggcgactcgaatttgagtgtggttaagaagttaccagtcccactggaaagcgtgaaacaaatgttaaattctgtgatgcaggagctcgaagattattcagaggggggacccctgtacaaaaacggaagccttagaaatgcagacagcgagatcaagcactccactccgagccccactaaatattctctgagcccctccaagagttacaaatactcccctgagactcccccacgttggactgaagacagaaattccctgctcaacatgatctgtcaacaagtcgaggctatcaagaaagaaatgcaagagctcaaacttaattcatccaaatcggctagcaggcacagatggccaaccgagaattacggcccagactcggtgccagatgggtaccaggggagtcagacctttcacggagcccctctgaccgaggccgctcaccgtcactttaccatcgaaaagcatggagactctaagtggatcatctatcggttcacaaaacagttgtgcggtaccgagagggcacgggcaaaaataagctag

SEQ ID NO: 237914 - DNA, 5297 bp, synthetic construct
  misc_feature 1..5297: note = Description of Artificial Sequence: Synthetic coding sequence
  source 1..5297: mol_type = other DNA
atgcggagaagcaaagcggatgtagaaagatatgttgcatccgtcctaggacttacaccctccccacggcagaaatctatgaaggggttttactttgctaagttgtactacgaggcaaaggaatacgatttagccaaaaaatatatctgcacatatatcaatgtccaggaacgggatccaaaagctcatcgatttctgggactcctgtacgaactggaagagaacacagaaaaggctgttgagtgctaccgaaggagcgttgagctgaatccgacccaaaaggatctggtactgaaaatcgccgaactgttgtgtaaaaacgacgtcacggatggacgggcaaagtactgggtcgagagggccgctaaactctttcccggtagtcctgctatttacaaacttaaggagcagcttcttgactgcgagggagaggacggctggaataaactttttgacttaattcagtcagagctgtacgtgagaccagacgatgtgcatgttaacataaggcttgttgagttgtatcgctcaaccaaacgactgaaggacgccgttgctcattgtcatgaggcagaaagaaacatcgctttaagaagttctctagagtggaatagctgcgtagttcagaccctgaaggaatacctggaatccctccagtgccttgagagtgataaatccgattggcaggcaaccaatacggatctccttctggcgtacgccaacctgatgttgcttactctgtccaccagggacgtccaagagaacagggaactcctggagagtttcgatagcgctctgcaatctgccaaatctagcctgggagggaacgacgaactgagtgcaactttcctcgagatgaagggccatttctacatgtatgctgggagtttacttttgaagatgggccagcacggcaacaacgtccagtggcgcgctctgtcagagctagccgctctttgctacctgatcgctttccaggtcccacgcccaaagataaagctgcgggagggcaaggcgggtcagaatctcctggagatgatggcatgtgaccggctaagtcaatcaggccacatgctcctgtctctaagcaggggtaaacaagattttctaaaggaggtggtggagaccttcgcaaataaaattggccaaagcgccctttatgacgctctgttctccagccagtcgccaaaggacacttcttttctgggctcggatgacataggaaagatagacgtgcaggagcctgaactggaagatctggctcgctacgacgtgggggctatacgcgcacacaatggttctctgcaacacctgacctggcttggattgcagtggaattcactgccagccctgcctggtatccggaaatggttaaaacagctgtttcacaggctaccacatgaaacttcaagactggagacgaacgcccctgagagcatttgtatactggacctcgaagtgttcctcttaggagtggtgtacacgagccacctccaactgaaggaaaagtgtaatagtcaccacagctcttatcagccgctgtgcctccctttccccgtgtgtaaacagttatgtactgaacgccagaaatcttggtgggatgctgtgtgtactctcattcacagaaaagccgtcccgggtaatcttgccaaactccggctgctggtacagcacgaaattaataccctgagggctcaggaaaaacacggcctgcagccagctctgctggttcactgggccaagtacctgcagaaaacggggtcaggtctaaattctttctatggacagctggagtacataggcaggtctgttcattactggaagaaagttctgccactactaaagattatcaagaaaaactctataccggaaccaatcgatcctctttttaaacacttccactctgtagacatacaagcatccgagatagttgagtacgaagaggacgcacatatcacctttgccatgctcgatgctgtgaacggaaatattgaggacgcggtcaccgcattcgagagcatcaaatctgtggtcagttactggaatttggcgctcatcttccacaggaaagctgaggatattgagaatgacgccctgagtccagaggaacaggaggaatgtagaaattacctcacgaagacccgggattatctgataaaaattatagatgatggcgactccaatctgtccgtggtcaaaaaactccccgtaccactggaaagcgtgaagcagatgctgaactccgttatgcaagagctggaagactattcagaaggcggtcccctatacaaaaacggatccctgcggaatgccgattcagagattaagcattcaaccccctctcccactaaatactccttgtctcctagcaaatcctacaagtactcaccagaaacgcccccacgctggaccgaggaccgcaacagcctgctgaatatgatctgtcagcaagttgaggccatcaagaaggagatgcaggagttgaagctgaattccagtaaaagcgctagccgtcacagatggccaacggagaattatggaccagatagcgtccccgatggataccagggcagccaaaccttccacggggctccactgactgtggcaacaaccggaccatctgtctattactcacagagcccagcctacaactcgcagtatctgctgagaccagctgctaacgtcacgccaactaaaggcagttccaacacggaattcaaatctacaaaggaagggttctcaatacctgtgagcgcggatggcttcaaattcggcatttccgagccgggaaaccaggagaaaaagagggagaagcccctggagaacgatacaggatttcaggctcaggacatatcaggtcgcaaaaaggggagaggggtgatatttggccagacatccagcactttcacattcgctgacgtagcaaagagtacatccggggagggattccagttcggcaaaaaagacctaaattttaagggcttttccggcgctggagaaaagctcttcagttctcgctacgggaagatggccaacaaagctaatacgtccggggatttcgaaaaagacgacgatgcttataagacagaggactctgacgacattcacttcgaacctgtcgtgcaaatgcctgagaaagtggagctggtaacaggagaggagggggaaaaagtgttatattctcagggagtaaagctgttccggtttgacgcggaggtacggcaatggaaagaacggggattagggaatctgaagatcctgaagaacgaagtgaatgggaaactgcggatgcttatgcgccgtgagcaggtcctgaaggtttgcgccaatcactggatcacgaccactatgaacttaaagcccttgtccgggtccgacagggcctggatgtggtccgcctcagactttagcgacggcgacgctaaactcgagcggttagctgccaagttcaaaacaccagagctggccgaggaatttaagcagaaatttgaggagtgccagagattgcttctggatattccacttcaaactccgcacaaactagttgatactggcagagctgccaagctgatacagcgggcagaggaaatgaaatctggcctgaaggacttcaagacatttctgactaacgaccagaccaaagtaactgaagaggaaaataaagggtcaggcaccggcgctgctggagcttccgacacgactattaagcccaacgccgaaaacaccgggccaaccctcgagtgggataactacgatctgcgcgaggatgcattagacgactcggttagcagtagctcggtacacgccagtcctctggcatcgagcccagtccggaaaaacctgttcagatttgatgaatccactaccggatcaaactttagtttcaaaagcgctctctctctttctaagtcaccagctaaactgaatcagagtggtacttcagttggcacagacgaggaatctgtggtgacccaggaggaggagcgcgatgggcagtactttgaacccgtggtccctctgcctgacctggtcgaagtgagcagcggggaagaaaatgaacaagtggtatttagtcatagagccgagatttacaggtacgacaaagatgtgggacagtggaaagagcgaggaatcggggatattaagatcctgcaaaattatgataacaagcaggtgagaatcgtcatgcgacgcgatcaggtgctgaagctctgcgctaaccacagaatcacgcccgatatgtctttgcagaacatgaaaggcacagagcgcgtgtgggtgtggactgcatgtgatttcgcagatggggagcgcaaggttgaacatctcgctgtgcgctttaaactacaggatgtggctgattcatttaagaagatcttcgatgaagctaagaccgcccaggaaaaggatagcttaattactccccacgtgagcagatcttctacaccgagagaatctccctgtgggaagatcgcagtggccatcctcgaggaaaccacacgcgagagaaccgacgtcatccagggagatgatgtcgctgacgccgcttcagaagtcgaagtatcctctaccagtgaaaccacgactaaggcagtggtgtccccacctaagtttgtcttcgtgagcgagtctgtcaagcggatatttagctcggagaaatctaagccttttgtctttggcaattcttccgcaaccgggagcctattcggttttagctttaatgccccactgaagagtaataattccgaaacttcgagcgttgctcaaagtggctcagaatccaaggtcgaaccgaagaagtgtgagctgagcaagaactccgacattgagcaaagttctgactccaaagtgaaaaatctgtccgcctcgttccctacagaggaatccagcattaattacactttcaagactcctgagaaggaaccccctctgtggcatgctgagtttactaaggaagagcttgtgcaaaaactgcgctcaacaactaaaagcgccgatcatctgaacggcctcctgcgcgagattgaggctacaaatgctgtgctcatggaacagatcaaacttctgaagtccgagatacgcaggctagaacgaaatcaggagagagagaagtcagcagcaaacttagaatacctcaaaaacgtactactgcaattcatatttctgaaaccaggatcggaaagggaaagactcttacctgttatcaatacgatgctccagctgtcaccagaggaaaagggaaaattggccgcagtggcccaggacgaggaagagaacgcctccagatcatcaggata

SEQ ID NO: 237915 - DNA, 2715 bp, synthetic construct
  misc_feature 1..2715: note = Description of Artificial Sequence: Synthetic coding sequence
  source 1..2715: mol_type = other DNA
atgagacgctctaaggccgatgtggaacgatatgtagcaagtgttcttggcttaaccccctcgcctagacaaaagagcatgaaaggcttttattttgccaagctatattacgaagctaaggagtatgacctggctaaaaagtacatttgtacttatataaacgtccaagagcgcgatcctaaggctcatcgcttcctgggccttctgtacgaactggaggagaatactgagaaagccgtagaatgttatcggcgatctgtcgagctgaacccaacccagaaagacctggtgttgaaaattgccgagctcctatgtaagaacgacgttaccgatggacgagcaaaatattgggtggaaagagcagcaaagctgtttcccggaagccccgcaatctataagctgaaagagcagctcctggactgcgagggagaagatggttggaacaaactgtttgacctgatccagagcgagctgtatgttagaccagacgacgtacatgtgaacattcgtctggtagagctgtataggtcgaccaaaaggctgaaagacgcggtagcacactgccacgaggccgagcgcaatatcgccttgcgaagctctctggaatggaactcctgcgtggttcagaccctcaaggaatacttggagtcattacagtgtctcgagtccgacaaatccgactggcaggccaccaataccgatctactcctcgcctatgccaacctgatgctgctgaccctgagtacccgtgacgtacaggagaatcgcgaacttttagaaagctttgacagtgcactgcaaagcgccaagtcaagcctggggggaaatgatgaattgagcgccacgtttctcgaaatgaaggggcacttctacatgtatgcaggctctctcctcctgaagatgggtcagcacggtaataacgttcagtggcgcgcactcagtgaactagccgcactgtgttatctcattgcttttcaggtgcctagacctaagatcaagttgcgcgagggcaaggcaggccaaaatcttctggagatgatggcgtgtgacagactttcccagagtgggcacatgctcctgtcgcttagccggggaaaacaagacttcttgaaagaggtggttgagaccttcgcaaacaagatcggacaatctgcactgtatgacgctcttttttcatcgcagagtcccaaggatacctcattcctcggatctgacgacataggaaagattgatgtgcaggagcctgagctggaggatctggcacgctatgatgtgggtgcgatcagggcacacaatggctctctgcaacatctaacctggcttgggctgcagtggaattccttgccagctcttccaggaatacgaaagtggctcaagcaactttttcatcgccttccacatgagaccagtcggctggagactaatgcaccggagtcaatctgtatcctggacctggaggtgtttcttctcggagtggtatacacctcccacttacagctgaaggagaagtgcaatagtcatcactcaagttatcaacccctgtgtctcccttttccagtgtgtaaacagttgtgtaccgaaaggcaaaaatcctggtgggacgccgtctgcacactgatccatagaaaggccgtgccaggaaacctggcaaagctcaggctgctggtgcagcatgagataaacacattgcgggctcaggagaagcatggcctgcaacccgctctcctcgtgcattgggcgaagtacctccagaagacgggatcgggactgaacagtttctatggccaactagagtatatcggtcgaagtgtacattattggaaaaaagtccttcctctgttaaagattattaaaaaaaacagcatcccggagcctatcgatccactctttaaacattttcattcagtggacattcaggcctcagagatcgtcgagtatgaggaggatgcgcacatcacctttgctatgttagatgccgttaacggaaacattgaggatgccgtaaccgctttcgagtcaatcaagtctgtggtctcctattggaacttggccctgatattccatcggaaagcagaagacatcgagaacgacgctctgtcacctgaagaacaggaagagtgccgcaattacctgacaaaaacccgagactacctaattaagatcatcgatgacggcgattccaacctgagcgtggtcaagaaactgcccgtgccgctcgaaagcgtgaagcagatgttgaacagtgtgatgcaggagctcgaagactactccgagggagggccattgtacaagaacgggagcctgagaaacgcagactcagagattaagcattctacaccgtcccccacaaagtattcgttgtctccctctaagtcttataagtacagcccagaaaccccccctcgatggacagaggatagaaacagcctgctcaatatgatctgtcagcaggtagaggccatcaaaaaggagatgcaggagttaaagctgaactccagcaagagcgctagccggcatcgttggcctacagagaattatggtcctgatagtgtacctgacggataccaggggagtcagacatttcacggggctcccctcacagaagcagcccacaggcatttcactattgaaaaacatggagattccaagtggattatctataggttcacgaaacagctgtgtggtacagagcgggctcgagctaaaatttcttag

SEQ ID NO: 237916 - DNA, 5297 bp, synthetic construct
  misc_feature 1..5297: note = Description of Artificial Sequence: Synthetic coding sequence
  source 1..5297: mol_type = other DNA
atgcggaggtcaaaggcagatgtggagcggtatgtagcgtctgttctcggcctgaccccgtctccacgacaaaagtcaatgaagggcttttatttcgcaaagctttattacgaggccaaggagtacgatctggctaaaaaatacatctgcacctacatcaatgtacaagagagggaccctaaagctcatagattcttggggctgctctacgaactagaagagaacactgaaaaagctgtcgagtgctatcgcaggtcagtcgaattgaatcctacccaaaaagaccttgtccttaaaattgctgaactgttgtgtaaaaatgacgtcactgacgggagagccaagtactgggttgaacgcgcagccaagttgtttcctggatctcctgccatctacaagcttaaggagcaactcctggattgcgaaggcgaggacggatggaacaagctgttcgatcttatccagtctgaattatacgtacgccctgacgatgttcatgtgaatatccgtctggtagagttatacagatcaactaaacgcctcaaggacgctgtcgcccactgtcatgaagcagagcggaacatagcactgaggtcttctctagaatggaatagttgcgtggtccaaacattgaaggagtacctcgagagtctgcagtgtctcgagtccgacaagagcgattggcgagccaccaacaccgatctgcttttggcttacgccaacctgatgctgctgacactgtccaccagggatgtgcaagagaatcgggaactcctggaaagtttcgactcagccctccaaagtgcgaagtccagcttgggcggaaacgacgagttgtcagctacctttttagaaatgaagggtcacttctacatgtacgcaggatccttgttgctgaagatgggtcagcacggaaataatgtgcaatggcgcgctttatctgaacttgctgcgttgtgctacctcatcgcttttcaggtcccacgtcccaagatcaaacttagggagggaaaagctggtcagaatctgctcgagatgatggcctgcgacaggcttagccagagcgggcacatgctgctgtccctctctaggggtaaacaggactttctcaaagaggtggttgagactttcgctaacaaaatcggccagagcgctttgtacgacgctctgttctctagtcagtctccgaaggatacttcattcctcggcagcgacgatatcgggaagatcgatgtgcaagagcccgagctggaggacctggccagatacgacgtgggcgcaatccgggctcataatggttcattacagcacctgacatggctcggactgcagtggaacagccttcccgcattacctggtatacgcaaatggctgaagcagctgtttcacagactgccacatgagaccagcaggctcgagacaaacgcgccagaaagcatttgcattctggacctggaagtgtttttattgggcgtggtctatacaagccacttgcaactgaaagaaaagtgtaattcccaccacagctcctatcagcctctgtgcttgccgtttcctgtgtgtaagcagctgtgcactgaacgccaaaagtcctggtgggacgctgtctgcaccttaatccacagaaaagccgtgcctgggaacctggccaagttaaggctgctggtgcagcatgaaatcaacacactgagagcccaggagaagcatggccttcagcctgcacttctggttcactgggcaaaatatctccagaaaaccgggagcgggctcaattcattttatggccagctggaatacattggacgcagcgtgcactactggaagaaggtgcttcccctgctaaagatcatcaagaagaactctatacccgagccgatagacccattatttaaacatttccactcagtggacatccaggctagcgaaatagttgagtacgaggaagatgcacacataacttttgctatactggatgctgtcaatggtaacatcgaagatgccgtgactgcctttgagtccatcaaaagtgtggtgtcatattggaacttggccctgattttccaccggaaggctgaagacatagaaaacgacgcccttagcccggaggagcaggaggaatgcaggaactacttgacaaagaccagagactacctgattaagatcatagacgatggagactccaatctgagtgtcgtgaagaaactccctgtgccactcgagtccgtcaagcagatgttgaactcagtgatgcaggaattggaggactatagcgaagggggaccgctgtataaaaacggatccctgagaaacgccgattcggaaatcaagcatagcactccatcgccgaccaaatactcactctcccccagcaagtcctacaaatactctccagaaaccccccctcgctggacggaagacaggaatagcctcctaaacatgatatgccagcaagtggaggctattaaaaaggaaatgcaggaactcaagctgaattcaagcaagtcagcttcaaggcacagatggccaaccgaaaactacggtccagatagcgtgccggacgggtatcaagggtctcagacttttcacggggctccgctgactgtggccacgaccgggcctagtgtgtattacagccagagtcccgcatacaacagccaatatctcctgagacccgcagccaatgtgactccaactaaaggctccagcaataccgagtttaagtccactaaggagggatttagtatcccggttagcgctgatggctttaagttcggaatatcagaacccggtaaccaagaaaaaaaaagggaaaagcccctagagaacgacactggactgcaggcacaggatataagggggaggaaaaagggaaggggcgtgatttttggacagacttcatccactttcacattcgcagatgttgcaaagtcgactagcggagaggggtttcaattcggcaagaaggatctaaacttcaaaggcttttccggagcaggggaaaagttgttcagcagccgttatggtaagatggccaataaagccaatacctccggggatttcgaaaaggacgatgacgcctacaaaacggaagactcggatgacatccacttcgaacccgtcgtgcagatgcctgagaaggtggagcttgtgactggtgaagaaggcgagaaggtcctgtactcccagggcgtgaagctgttcagatttgacgctgaagttagacagtggaaggagagaggcctgggcaaccttaagatcctgaaaaacgaggtaaatggcaaacttaggatgctgatgcgcagggaacaagtgctcaaagtgtgtgcaaatcattggattacgactactatgaacttaaagcccctttcaggcagcgatcgggcatggatgtggagcgccagcgacttctctgatggtgacgccaaattggagcgtctggccgcaaagtttaagaccccggagctcgccgaagaattcaaacaaaagttcgaggagtgtcagaggcttctcttggacatcccattgcagactcctcacaagttggtcgacacagggcgtgccgctaagctaatccaacgagcagaagagatgaagtccggactgaaggatttcaagacattccttacgaatgaccaaactaaagtcacagaggaggagaacaaagggagcggaaccggggttgcgggtgcaagtgacacaactattaagcccaatgccgaaaacaccgggccaacacttgaatgggataactacgacctacgcgaggatgccctagacgacagcgtgtcctcaagctccgtccatgcctctccattagcatccagtcccgtgaggaagaatcttttccgctttgacgagtctacaacaggatcaaacttcagttttaagagtgccctgagcctttcaaagtcccctgctaaattgaaccagagcggaacatcagtcggtaccgatgaggagagcgtggtgacacaggaagaagagagggacggtcagtacttcgagcccgttgttcctctgccagacctggttgaagtatcatctggtgaggagaatgaacaggtggtttttagccatagggcggagatttaccgatacgacaaagacgtgggacagtggaaagagagaggaatcggggatataaagatccttcaaaactacgacaataagcaggtgagaatcgtgatgaggcgagaccaggtacttaagctgtgtgcaaaccaccgaattaccccagacatgtccttgcagaacatgaagggtactgaacgggtctgggtttggacagcctgcgattttgcggacggagagcggaaggttgagcacctcgctgtacgctttaagctgcaagatgtggccgacagctttaagaaaatattcgacgaggctaaaactgcgcaggagaaggacagccttatcactccacacgtgagcagaagcagcactcccagggagagcccctgcggcaaaatcgccgttgccgtgcttgaagaaatcacgagagaacgcaccgacgtcattcagggggacgatgttgccgatgccgcatccgaggtagaagtgagcagcacgagtgaaaccaccacaaaggcagtcgtgtctccacccaagttcgtctttgtctccgaatcagtgaagcgtatatttagctctgaaaaaagtaaaccattcgcctttggcaactcatcagctacaggatctctgttcgggtttagttttaacgcacctcttaagagcaataatagtgagacctcttctgtggcgcagtcgggttctgaaagcaaggttgaacccaagaaatgtgaactctcaaaaaactccgacatcgagcagtcgagcgatagcaaggtgaagaacctgagcgccagcttcccgacggaggaaagctcaatcaattacaccttcaaaacacccgaaaaagaacctcctctgtggcatgcagagtttactaaggaggagctggtgcagaaactgagatcaacaaccaaatccgcagaccacctcaacggtttgttaagggaaatagaggctacaaacgccgtattaatggaacagatcaagttactcaaaagtgagatacgcagattggagcgaaaccaagagcgggaaaagagcgccgctaatctggaatatctgaagaacgtgctgttgcaattcatttttctgaaacctggtagcgagagagaacggctcttgccggtaatcaacacaatgctgcagttgagtcctgaagagaaaggcaagctcgccgctgtcgcccaggatgaggaggaaaatccttctagatcaagtggtta

SEQ ID NO: 237917 - DNA, 1407 bp, synthetic construct
  misc_feature 1..1407: note = Description of Artificial Sequence: Synthetic coding sequence
  source 1..1407: mol_type = other DNA
atggggacagccactcctgacggcagagaggatcaagagcgtctgtgggtttcagtggaggatgctcagatgcatacagtgacaatctggctcaccgttcgccctgacatgacagtggcctccctgaaggacatggtgtttctggactatggatttcccccagtccttcagcagtgggttattggtcagcgacttgctcgcgaccaggagacccttcattcccatggagtgcgacagaatggcgactctgcttatctgtatcttctgtctgctcgtaatacaagcttgaatccacaggagctgcagcgggagcggcagctgcgtatgctggaagatttaggctttaaggacctgactctccaacccaggggccctcttgagccagggcctcctaagcccggtgttcctcaggaaccaggcaggggccagcctgacgctgtgcctgagcccccacctgtggggtggcagtgccctggctgtaccttcattaataagcccacaagacccggttgcgaaatgtgttgtcgcgctcgaccggaagcgtatcaagtccccgcatcttaccaaccagatgaggaggaacgagccagattggccggagaagaggaagcgctaagacagtaccaacagagaaagcagcagcaacaggagggaaactatctccaacacgtccagctcgaccaacgttctctcgtactaaatactgagccagcagagtgtccagtgtgctactccgtgctggcgcctggcgaagcggtggtcctgagagagtgtcttcacaccttttgtagggagtgtctgcaagggacaattcgcaatagccaggaagcggaggtctcttgcccgtttattgacaacacctactcatgcagtggaaagctcctagagagggagatcaaagctctgctcacccccgaagattaccagcgctttctggatttgggtatttcgattgccgaaaacagatctgcgtttagctaccactgtaagacacctgattgtaaaggctggtgttttttcgaagatgacgtgaatgagtttacatgcccggtgtgtttccatgtgaactgtctgctctgtaaggcaattcacgaacagatgaattgtaaggagtaccaggaagatctagcgctccgcgcacagaacgatgtggcagccagacaaacaaccgagatgctcaaagtgatgctgcagcagggagaggcgatgcggtgccctcaatgccagattgtggtccagaaaaaagatgggtgtgactggatccgttgcacagtgtgccacaccgagatctgctgggtgactaaggggccaagatggggcccaggcggtcctggtgacacatctggcggttgtcggtgtcgggtgaatggcattccgtgtcatccaagctgccagaattgccactag

SEQ ID NO: 237918 - DNA, 1533 bp, synthetic construct
  misc_feature 1..1533: note = Description of Artificial Sequence: Synthetic coding sequence
  source 1..1533: mol_type = other DNA
atggacgagaaaacaaaaaaagctgaagagatggccctgtcactgacccgcgctgtggcaggcggagatgaacaggttgctatgaagtgcgcaatatggcttgcggagcagcgagtccccctgtcggtgcagctgaaacctgaggtatcgccgacacaggacattaggctgtgggtgtcagtggaagatgcccagatgcataccgttaccatatggctcacggtgcgtccggacatgactgtcgccagcctgaaagatatggtgttcttggactacgggtttcccccagtcctgcaacagtgggtgataggccaacggttagctagagatcaagaaaccctgcactctcatggagtgcgccaaaatggagactctgcatacctatacttattatctgctcggaatacttccttaaatccccaggagctccagcgtgagcggcagcttcggatgctggaggatctgggtttcaaggaccttactctgcagccaagagggcctcttgagcccggacccccaaaacccggagtgcctcaggagcccggaagagggcagccagacgcagtcccggaaccccctccggtgggatggcagtgtcctggatgtacattcatcaacaaacctactcgacccggatgtgaaatgtgttgccgggcacggccagaagcctaccaggtgcctgcttcctaccagcccgatgaagaagaaagggcacgcttggctggagaagaagaggcacttagacagtatcaacagcgtaagcagcaacagcaggaaggcaattatcttcagcacgttcagcttgaccagcgttctctcgttctgaacactgaaccagcagaatgcccagtttgctattccgttctggcgccaggagaggccgtggttttgcgcgagtgcttgcacacattttgccgggaatgcctccagggtacaattcggaattctcaagaagccgaagtaagctgccctttcatcgataatacctatagctgcagcggtaagctcttagaacgcgaaataaaggccctgctcactcccgaggattaccaacgattcctcgatctaggcattagtattgccgagaaccgatcagcctttagctaccattgtaagacccctgattgtaaggggtggtgcttcttcgaggatgatgtgaacgagtttacctgtccagtgtgtttccacgtcaactgtctgctatgcaaagcaatccatgagcagatgaactgtaaagagtaccaagaggacttagcgctcagggcgcaaaacgacgtggcggctcggcagaccaccgagatgctgaaggtaatgctccaacagggcgaggccatgagatgtcctcagtgccaaatagtggtgcagaagaaagatggttgcgactggattcgatgcacggtgtgtcacacagaaatctgttgggtgaccaagggcccacgttggggcccagggggacccggtgacacctccggtggctgtaggtgtcgcgtcaacgggataccgtgtcatcccagctgccagaattgtcactag

SEQ ID NO: 237919 - DNA, 1011 bp, synthetic construct
  misc_feature 1..1011: note = Description of Artificial Sequence: Synthetic coding sequence
  source 1..1011: mol_type = other DNA
atggatgaaaagacaaaaaaggccgaggaaatggcgctgagtctcacccgggcagttgctggaggtgacgagcaggtggccatgaaatgcgcaatttggctggcggagcagagggtccccctgtctgtccaattgaaacctgaagtaagtcccactcaggatatcagattatgggtttcggtagaggacgctcagatgcacaccgtcactatttggcttaccgtaagacccgatatgaccgtggcaagcctgaaggacatggtcttcttagactacggcttccctcctgtcctgcagcaatgggtcattggccagcgcctcgcccgagaccaggaaaccctccatagtcacggcgtgcggcaaaatggggactccgcttatctgtacctgttatcagcccgaaatacctcccttaacccacaggagttacagagagagaggcaacttagaatgctggaggatctcggctttaaggatctgaccctgcaaccacgagggcctctggagccaggcccacccaaacccggagtccctcaggagcccggtcggggtcagccagacgcagtgcctgagccgcctcccgtggggtggcagtgtcctggctgtaccttcatcaacaagccaacgcgaccgggatgtgaaatgtgctgccgggctagaccagaggcctaccaggtaccagcttcataccagcctgacgaggaagagagggccagattagccggtgaggaagaggccctgcgccagtaccagcaaagaaaacagcaacagcaggaaggcaactatttgcagcacgtacaattggatcagcgcagtctcgttctcaatacagaacctgccgagtgcccagtctgttacagtgttctggcgccaggtgaggcagttgtgttgcgctctgcctgcagggctccgtccgccaccgccaggcgccgacggtcacccgctccaagcctgaccactccaacccgggctagggccagctgttggcgcggaaggtccaggagaagctag

SEQ ID NO: 237920 - DNA, 792 bp, synthetic construct
  misc_feature 1..792: note = Description of Artificial Sequence: Synthetic coding sequence
  source 1..792: mol_type = other DNA
atggatgagaagaccaagaaggcagaggagatggcactcagcctgaccagagccgtggccggaggagacgaacaggtggctatgaagtgcgctatctggttggcggagcagcgcgtcccgttaagtgtacaactgaagcctgaagtttcacctacgcaggacattcgctcaaggggggagaagactgaagaggtcggggaagttagggaggtacccgaccacggtgggccacgcgttctacctagagtggatagtaagtctagcgtggagcctctcgaaggcccaaattggttgtgggtctccgtggaagacgcgcagatgcacacggtcactatttggctcactgttaggcccgatatgacagtcgcctcactgaaggacatggtcttcctggactatggattccccccagttctccagcaatgggtgataggacagcgcctggcaagggaccaggaaactcttcattcacatggagtgcgtcaaaacggtgattctgcatatttgtacctgctgtccgcaaggaacacttcactgaatcctcaggaactccaacgagagagacagctgagaatgctagaggaccttgggttcaaggacctgaccctgcaaccaagaggcccactggagcccggtcccccaaagccgggtgtaccacaggagccaggccgaggccagccagacgcagttcctgaaccacccccagtgggctggcagtgtcctggttgcacgttcattaataagccgacacgaccagggtgtgagatgtgctgtcgggctcgacctgaatag

SEQ ID NO: 237921 - DNA, 819 bp, synthetic construct
  misc_feature 1..819: note = Description of Artificial Sequence: Synthetic coding sequence
  source 1..819: mol_type = other DNA
atggacgagaagacaaaaaaggccgaggagatggccctttctcttactcgcgctgtggcgggaggagatgaacaagtggccatgaagtgtgccatttggttggcagaacaacgggtgcccctttcagtgcaattgaagccggaggtctctccaactcaagatattaggctgtgggttagcgtcgaagacgcccagatgcacaccgtcactatctggctgaccgtgcgacccgacatgaccgtcgccagcttgaaggatatggtgtttctcgattatggtttcccccctgtccttcaacagtgggtgataggtcagcggcttgcgagggatcaggagacactgcatagccacggagtgaggcagaatggggatagtgcgtacctctaccttctttctgcacggaatacatctctaaaccctcaggagttgcaacgagaaaggcagttgagaatgctggaagatctgggatttaaggacttaaccctgcagcctaggggtcctctggaacctggaccacctaaacccggagttccacaggagccaggcagaggacaacctgacgcagtgcccgagccaccccctgtgggttggcagtgtcctggctgcaccttcattaacaagcctacgaggccaggctgtgagatgtgttgtcgggcacgcccagaagcctatcaggtgcctgcttcctaccagcctgatgaagaggagcgagcgcgactggcaggcgaagaggaagccttgaggcagtaccagcagggggtgccagcgggacaccatccccagcagcccggtggcggtggcttgctccctctgcactag

SEQ ID NO: 237922 - DNA, 354 bp, synthetic construct
  misc_feature 1..354: note = Description of Artificial Sequence: Synthetic coding sequence
  source 1..354: mol_type = other DNA
atggacgagaagaccaaaaaagctgaagagatggccctgagtctcacaagagcggtggcgggtggcgatgaacaggtggccatgaagtgcgctatctggctggccgagcagagagtgccactgtccgttcagttaaagccagaggtctctccaactcaggatatccgcctgtgggttagcgttgaggatgcacagatgcatacagtgactatctggcttacagtgcgcccagatatgacagtggcctctctgaaggatatggtgttcctcgattacggattcccccctgttcttcagcagtgggtaatcggacagagactggctagagaccaggagacattgcactctcattag

SEQ ID NO: 237923 - DNA, 768 bp, synthetic construct
  misc_feature 1..768: note = Description of Artificial Sequence: Synthetic coding sequence
  source 1..768: mol_type = other DNA
taagagatggcactgagcctgacgagggccgtagcgggtggtgacgaacaagtggcaatgaagtgcgcgatatggctggccgagcaacgcgtccccttatctgtgcagctaaagccagaggtgagtcctacccaggatattcgaagccggggagaaaagactgaagaagtcggcgaggtgagggaggtccctgaccatggaggtcctcgggtgctgccgagggtggattccaaatcatccgtagagcccctcgaaggtccgaattggctgtgggtgagcgtggaagatgcccaaatgcacaccgtcactatatggttgactgttcgaccggacatgaccgtggcttcgctgaaagacatggtcttcctcgactatggcttccccccagtactgcagcagtgggtgatcggacagcgcttggctagggaccaggaaaccctgcactcccacggagtccgccagaatggagattccgcatacctgtatctcctgagcgctagaaacacttctctaaacccacaggagttacagagagaacggcagctccggatgctagaagacctgggttttaaggacctcacgcttcagcccagggggcctctcgaacccggaccacctaaacctggggtgccccaagagcccggacgtgggcagcccgatgctgtgcccgagcccccaccggtcggatggcagtgcccaggctgcacctttatcaacaagcctactcggcctgggtgtgaaatgtgttgtagagcaaggccggagtag

SEQ ID NO: 237924 - DNA, 819 bp, synthetic construct
  misc_feature 1..819: note = Description of Artificial Sequence: Synthetic coding sequence
  source 1..819: mol_type = other DNA
atggatgagaaaaccaagaaggccgaggaaatggctctctcccttaccagggccgtggcagggggagatgaacaagtggcaatgaagtgtgccatttggcttgctgagcagcgagtgcccctttcagtgcagttgaaacccgaggtttcccctacgcaggacattaggctgtgggtaagcgtggaagatgctcagatgcataccgtcaccatttggcttaccgtgcgcccagacatgacagttgccagcctgaaggatatggtgtttctggattacgggttcccgcctgtgctacagcagtgggttattgggcaaaggctggccagggaccaagaaactctgcacagccacggtgttagacagaatggcgactccgcctatctttatttgctgagcgctcggaacaccagtctgaatcctcaggagctccagcgcgaacgacagctccgcatgctggaagaccttggctttaaggaccttacgctgcagcccaggggtcccttggagccaggccctcctaaacccggtgtgccacaggagccaggcaggggtcagcccgacgctgtaccagaacctccgcctgtgggctggcagtgtcccggatgcaccttcattaataaaccaaccagacccggttgtgagatgtgctgtcgagcgaggccagaagcgtaccaggtccctgcctcttaccagccggacgaggaggaaagggccaggctggccggtgaggaggaagcactccggcagtaccagcaaggcgttcctgccggacatcacccacaacagccaggagggggtggcctgctgcctctccattag

SEQ ID NO: 237925 - DNA, 4830 bp, synthetic construct
  misc_feature 1..4830: note = Description of Artificial Sequence: Synthetic coding sequence
  source 1..4830: mol_type = other DNA
atgaatagtccggtggatcccggtgctagacaggccctacggaaaaaacccccagaaaggactccagaggatctcaatacaatttatagctatctgcatggcatggaaatcctgtctaacctacgagagcatcagctccgtctgatgtcagctcgggctcggtacgaaaggtatagtgggaaccaggtgttgttttgctccgagacaatcgcacgatgctggtacatactgctgtcaggctctgtactagttaagggcagcatggtcctgcctccctgtagttttggcaaacaatttggcggaaagcgcggttgcgactgtctcgtcctggaaccttccgaaatgatcgtggtcgagaatgctaaagataacgaggattccattctccagagggagataccggcacgacagtctcgccgtaggttccgcaagattaactacaaaggcgaaagacaaacgattacagacgacgtggaagttaacagctacctgtcattacccgctgatctgaccaaaatgcaccttaccgaaaaccctcatcctcaggtgacccacgtttctagttctcaaagtgggtgctctatagcttcggatagtggctcttctagtctctctgacatttatcaggctacagagtccgaagtaggtgacgtggatctgacacgcctccctgaggggcctgtagattcggaggacgatgaagaggaagacgaagaaatagataggaccgacccactgcagggtagagatcttgtcagagaatgcctggaaaaagagcccgctgacaagacagacgacgatatcgaacaactgctcgagttcatgcaccagctgcccgctttcgccaatatgaccatgagcgtgagacgggagctgtgctcagttatgatctttgaggtcgttgaacaggcaggagctattattctcgaagacggacaggaattagactcatggtacgtcatccttaacgggactgtcgaaatctcccaccctgatgggaaagtggagaatttatttatggggaatagcttcggcatcaccccgacattagataagcagtacatgcacgggattgtgcgaacaaaggtcgacgactgtcagttcgtgtgcatcgcacagcaggattattggcgcatcttgaaccatgtcgaaaaaaatacccataaggtggaggaagagggcgagatcgttatggtccacgaacaccgcgagctggatcgaagtggcaccaggaagggccacatcgtgattaaggcaacgccggaacgcctgattatgcatctgattgaagagcacagcatagtggatcctacttacatcgaggacttcctgcttacctatcggacattcttggaaagtccgctggatgtcggtatcaaacttctcgaatggttcaagatcgattccctccgggacaaggtaaccaggatagtactcttatgggtaaacaaccactttaatgattttgagggagacccggcaatgacccgctttcttgaggagtttgagaagaatctcgaggataccaaaatgaatggacatcttaggttgctgaatatcgcgtgcgccgcaaaggcgaagtggcggcaggttgtcctccagaaggcatctcgcgaaagcccactgcagtttagcctgaatggcggtagtgagaaaggattcggtatcttcgtggaaggggttgaacctgggtctaaggccgctgactcaggactcaagcgaggggatcaaatcatggaagttaatggccagaattttgaaaatattacattcatgaaggccgtggaaattttgagaaacaacacccatcttgccctgactgtcaagacaaatatatttgtgttcaaggaactcctgttccggacagaacaggagaagagcggtgttccgcacattcccaagattgccgagaagaaatccaataggcacagtattcagcatgtcccaggggatatcgaacagaccagtcaggagaagggttctaaaaaagtaaaggccaatacagtatccggcggaagaaacaaaattaggaagatccttgataagacacgtttctcaattctgccacccaagttattctccgacggcggtctcagccagagccaggacgacagtatcgtcggaactcggcactgtcggcatagcctggccattatgcctataccaggtactctttcctcttcctcgccagaccttctgcagcctacaacaagcatgctcgatttcagcaaccccagtgacattcccgatcaggttattagagtcttcaaagttgatcagcaatcctgttatataataatttcaaaagacaccactgccaaggaggtcgtttttcatgccgtgcatgagttcggcctaaccggtgcttctgacacatactccctctgtgaagttagtgtgaccccagaaggggtgattaaacaaagaagattgcctgaccagttctccaagctggccgacagaatacaactgaacggcagatattatctcaagaataatatggaaactgaaaccctgtgcagcgatgaagacgctcaggaattggtcaaggagtctcagttaagtatgctgcagttatccaccattgaagtggccacacagttatctatgagggactttgatttgttccgaaacatcgaaccgacagagtatatcgacgatctgttcaaactgaatagcaaaacggggaatacacatctcaagagatttgaagacatcgttaatcaagagacgttttgggttgccagtgaaatcttgaccgaggctaatcagttgaagaggatgaaaattattaagcatttcatcaaaattgcactccattgcagagagtgtaagaatttcaattctatgtttgccattatctctggcctaaacctggcgtcagtcgcccgattgaggggtacctgggaaaagcttccatccaagtacgaaaaacatctgcaggacctgcaggatatattcgaccccagccgcaatatggccaagtacaggaacatcctgtcctcccagtcaatgcaaccccctataatcccactgttccccgtcgtaaaaaaagatatgaccttcctgcacgaaggaaatgacagcaaggtggacggtttggtgaacttcgagaaacttaggatgatctccaaggaaattcggcaggtggtgcgcatgacttctgccaacatggaccccgctatgatgtttcgacagaggaaaaagcggtggcgaagtttagggtccctgtcgcaaggctcaacgaattcaaatatgctggacgtgcagggaggcgcacacaagaagagggcacgccgaagttcactgctgaatgccaagaaactatacgaggatgcccaaatggctcggaaagtgaagcagtatctgtcctctttagacgtggagacagatgaggaaaaattccaaatgatgagcctgcagtgggagccggcatatggaactcttactaagaatctgtctgagaaacggagcgccaagagctctgagatgtctccggtgcccatgcggagcgcgggtcaaactacaaaggcacatctgcaccagccccatcgggtgtcacaggtgttacaagtccctgctgtcaatctgcatcctatccgaaaaaaggggcaaacaaaggaccctgccctgaatacgtctctgcctcaaaaggtccttggtactacagaagaaatctccggaaaaaagcacacagaagacacaatctcagtggccagctctctgcatagcagtcccccagccagcccacaaggctctcctcacaaaggatacacattaatcccttccgccaagagcgataacctgtctgacagctcccactcagaaatctccagtaggtcatcaatagttagcaactgttctgtggattctatgtcagccgctctgcaggacgaacggtgcagcagccaggccctggcggtacccgagagcacaggcgctctggaaaagaccgagcacgcctctgggatcggggaccactcgcagcatgggcctggctggaccctcctcaagccgtcactcattaaatgcctggctgtaagctcctccgtgagtaatgaggagatttcccaggagcatattattattgaggccgcagatagcggcaggggaagctggacgagctgtagcagctcctctcatgataatttccagagcttgccaaatcctaaatcttgggactttctgaattcctatcggcatacccatcttgacgaccctatagctgaagtagagcccacagattctgagccctactcctgttctaaatcttgcagcagaacatgcggccagtgcaagggaagtctggaaaggaaaagttggacctcttctagcagtctgtcagatacctacgagcccaactatggcaccgtgaaacagcgcgtcctcgagagcacccccgcagagagtagcgaaggcctggatcctaaagacgctacggacccagtttacaaaacagtgacatctagcaccgagaaaggtcttatagtgtactgcgtgacctctccaaagaaagatgataggtacagagaaccccctcctactccccctggatatctggggataagtttggcagacctaaaggaaggacctcacactcacctcaaacctcctgattactcagtcgccgtgcagcgtagcaagatgatgcacaattctctctcccgcctgcccccagcgtcattgtcctctaatctggtggcttgtgtgccatcaaagatcgtgactcagccgcagaggcacaacctccagccgtttcatccaaaactgggggacgttacagacgctgattccgaagcggacgagaatgagcaagtgtctgcagtatag

SEQ ID NO: 237926 - DNA, 4530 bp, synthetic construct
  misc_feature 1..4530: note = Description of Artificial Sequence: Synthetic coding sequence
  source 1..4530: mol_type = other DNA
atgaactctcccgtggatccaggagctcgccaagcccttcgcaagaagccgccagagcgaacccccgaggacctgaataccatctactcatatctccatggaatggaaatattaagcaacttaagggagcaccagctcaggctgatgagtgcgcgtgctcggtatgagcgctattctggcaatcaggtcttgttttgctcagagacaatcgccaggtgctggtacattcttctgagtggttcagtgttggtcaaagggagtatggtacttcccccatgctcattcggaaagcagtttgggggtaagcggggttgtgattgtttggtactggaacccagcgaaatgatcgtggtagagaatgctaaggacaatgaggattcaatcttacagagggagattcccgcaaggcagagcaggcggagatttcgtaaaataaattacaaaggagaacgacagactataactgacgatgtggaagtgaactcctacctgtccttgcccgctgatctgacgaagatgcacctcaccgagaacccccaccctcaggtgacacatgtgagctccagtcagtctggttgcagcatagccagcgatagtgggtcatccagcctgagcgacatatatcaggctactgaatccgaagtcggggacgtggacctcacaaggcttcccgaagggcctgtggatagcgaggatgacgaggaagaagatgaggagattgacagaacagatcccttgcaaggcagggacctggtccgggaatgcctggagaaggagccagcagacaagaccgatgacgacattgagcagttgctggagttcatgcatcagctgcccgcattcgctaatatgaccatgagcgtgcgtcgtgagctctgctctgtcatgatctttgaggtagtagagcaggctggcgctatcattttagaggacggacaagagctggattcatggtacgtcatccttaacggaaccgtggagatcagccatcccgatggcaaggtcgagaatctgttcatgggcaactccttcggcataacacccacgttggacaagcagtacatgcacgggatcgtccgcacaaaggttgacgactgtcagttcgtctgcatcgcccaacaggactactggaggatcctcaaccatgtcgagaaaaacacccacaaagtcgaggaggaaggggaaattgttatggtgcacgagcatcgagagctggaccgcagtggtactcggaaagggcatattgtcattaaggctaccccagagcgccttattatgcatctgattgaggaacattctatcgtggaccctacatacatcgaagactttcttctgacttacaggacattcctagaaagccccttagacgtgggcatcaaactcctggaatggtttaagattgactcactccgcgacaaggtcacccggatcgttcttctatgggtgaacaaccatttcaacgatttcgaaggagatcctgctatgacgcgcttcctcgaggaatttgaaaagaatctagaagacactaagatgaatgggcacttgagactgctgaacattgcctgcgctgccaaggccaaatggcggcaggttgtattgcaaaaagcaagcagagagtcccccctgcagttcagccttaatggcggaagcgagaaagggttcggcattttcgtggagggagtagagcccggtagcaaggcggcagacagtggtctgaaaagaggcgaccaaattatggaagtcaacgggcagaactttgagaacatcaccttcatgaaagctgtcgagattcttaggaacaatacacatctggcgctcaccgttaaaaccaacatcttcgtgttcaaggagcttctttttcgtactgagcaagagaaaagcggggtgccccacataccaaagatcgctgaaaaaaagagtaaccggcattccatccaacatgtccctggcgacatcgaacagaccagtcaggaaaaaggatctaagaaagtgaaagccaatactgtctccgggggaagaaacaaaatacggaagatccttgacaagaccaggttctcgatcttgcccccaaagctgttctcggatggaggcctgagccagagccaagacgattccatcgtcggtactagacactgtcgacactcgcttgccatcatgcctatccctggcacactgagctcatccagccctgacctgttacaacccaccacctccatgttagatttttccaacccctcagccgtcggcttctactatattcccgaccaggtgatccgcgtgtttaaagtggaccaacaatcatgttacatcataattagcaaagataccaccgctaaggaagtcgtgtttcatgctgtccatgaatttggactgacgggggcatctgacacttatagcttatgtgaggtctcagtgacacccgagggcgtgattaagcagcggcgattaccagatcaattcagtaaactagcagatcggatccagcttaacggtcggtactacttaaaaaacaatatggagactgagaccctctgtagcgatgaggatgcacaggagctggttaaggagtcacagctgtctatgctgcagctgtccacaattgaggtagcaacccagctgtctatgagggattttgacctgtttagaaacatagagcctaccgagtatatcgacgatctttttaagttgaacagtaaaacgggcaacactcatctaaaacgttttgaggatatcgtgaatcaggagacattttgggtggcttctgagatcttaactgaggctaaccagcttaaaaggatgaagattattaaacacttcattaagatcgctcttcattgccgggagtgtaagaacttcaatagtatgtttgcaataatctccggcctgaacttagcatctgtggcaagactacgagggacatgggagaagttaccttccaagtacgagaagcacctccaagacctccaggatatttttgaccccagccgtaatatggccaagtaccgaaatatcctgagctcacagtcaatgcagcccccaattatcccgctttttcctgtggtcaagaaagatatgacgtttctccatgaaggtaacgactctaaggtagatggactcgtcaattttgagaagctgagaatgatttctaaagaaatccgccaggtagtgcgtatgaccagcgcaaatatggatcccgcaatgatgttcaggcagaggaaaaaaagatggaggtccctcgggagcctcagtcagggcagcaccaattcgaatatgctcgacgtgcagggcggagcccacaagaagcgcgctcggaggagtagtctgctgaacgctaaaaagctgtacgaagacgctcagatggccagaaaggtgaaacagtatctttcatcactagatgtggaaacggacgaagaaaaatttcagatgatgtcacttcagtgggaacccgcatacgggactcttaccaagaacctgagcgagaaacggtctgctaaaagcagcgaaatgagtcccgtccctatgcggtccgctggtcagacgacgaaagctcaccttcaccaaccacacagagtgtcccaggtgctgcaggtccctgccgtcaatctgcacccaattcgaaagaagggtcagacaaaagatcccgctctcaacacttctctgcctcagaaagtgctgggcactacggaggagatcagtgggaaaaagcacactgaggacaccatttccgttgccagctcactgcatagcagtcctcccgcatcgccccagggctcaccccacaagggttatacccttatcccttccgccaaaagcgacaatctctcagactcttcccactctgaaatctcgagtagatcttccattgtgtctaattgctcagtggactccatgagcgccgctttgcaggacgagagatgcagttcgcaggccctcgctgtgcctgaaagtactggcgcattggagaaaacagagcacgcttcagggatcggggatcacagtcaacacggcccaggatggactctactcaaaccaagccttatcaagtgcctggccgtatcctcatctgtaagcaatgaggagattagtcaggagcacatcatcatcgaggcagccgattccggccgagggtcctggacaagctgttcctccagctctcatgacaactttcagtccttaccgaatccaaagagctgggactttctaaattcctataggcacacacacctggacgaccccatcgccgaagtggagccaactgactctgaaccctacagttgtagtaagagctgctcccgcacctgcggccagtgtaaaggtagcctcgagcgcaaaagctggacatcatcgtcgtctctgagcgacacatatgaacccaattacggtaccgtgaaacagcgcgttctggagtctacaccagcagagagctccgaagggctggacccgaaagacgcaaccgatccggtctacaaaacagtgaccagctctaccgaaaagggccttattgaaaatgagcaagtatccgctgtgtag

SEQ ID NO: 237927 - DNA, 4530 bp, synthetic construct
  misc_feature 1..4530: note = Description of Artificial Sequence: Synthetic coding sequence
  source 1..4530: mol_type = other DNA
atgaacagccccgtggaccctggggctaggcaagccctcagaaagaaaccccctgaacggacccctgaagacctcaatacaatctattcctatttgcacggaatggaaatcttgtctaacctgagggagcaccaactgcgactgatgagcgcacgggcacggtacgagaggtattcagggaaccaggtgcttttttgctctgagacaatcgccaggtgctggtacatcctgttatcggggagtgttctcgtgaaggggtccatggtcctccctccttgctccttcgggaagcagtttggtggcaaaagaggctgtgactgcctggtgctcgagcccagcgaaatgatcgtggtagagaacgcaaaggataatgaagattcaatactccaacgcgagatcccggctcgccagagccgcagacgattccgcaagatcaactataaaggagagcggcagaccattactgacgacgtcgaagtgaattcctacctgagtctgcctgcagatctgactaagatgcacctcaccgagaatccccaccctcaagtgacacatgtttcaagctctcagagcgggtgttctattgctagcgactctggttcgagctctctctccgacatctaccaagccaccgagagcgaggtgggagatgtagacctaaccagactcccagagggtcctgtcgactctgaagacgacgaggaagaagacgaggagatagacaggactgatcctctacagggcagagacctggtgcgtgaatgtctcgaaaaggaaccagcggacaagactgacgatgatattgaacagcttctggaattcatgcatcagctgccagccttcgcaaacatgacgatgtcagttcggagagagctgtgcagcgtcatgatttttgaggtggtggagcaggccggagctatcatcctggaggacggtcaagaattggatagctggtatgtgattctcaacggaactgtagaaatctctcaccccgacgggaaggtggagaacctctttatgggtaactctttcggcatcacacctactctggataagcagtacatgcacggaatcgtaagaaccaaggtagacgattgtcagtttgtatgcattgcccagcaggattactggcgcatccttaatcacgtggagaagaatactcacaaggttgaagaagaaggagaaatagttatggtgcacgaacaccgcgagctcgacagaagtggaacgcgaaaaggccatattgttattaaagctacccccgagcgcttgattatgcacctcatcgaggagcactctattgtcgatcctacatacattgaagatttcctgttaacttacagaaccttccttgagagccccctcgatgttggcataaaactcctagagtggttcaagatcgactcccttagggataaggtcacccggatcgttttgctttgggtgaacaatcattttaacgatttcgaaggtgatccggcaatgactcgctttctggaagaatttgaaaaaaacctagaagacaccaagatgaacggacatttgcgactgcttaatatagcatgtgctgctaaagctaagtggcggcaggtggtcctgcagaaagcttcaagggaaagtcccctgcagttttctctaaatggcggatccgaaaaggggttcggcatatttgttgaaggggtcgaacctggttcgaaggctgcagacagtgggcttaagcggggagaccagatcatggaggtcaatggccagaattttgagaatatcacatttatgaaagctgtggaaatcttgaggaataacactcacctcgcactgactgtgaagaccaatatcttcgtcttcaaagagctactgtttagaactgagcaggagaaaagcggggtaccccacatacctaaaatagccgaaaagaagtcaaatcggcatagcatccagcatgtgcctggggatatcgaacagacctcccaggaaaagggctctaaaaaggtgaaggcgaacactgtcagtggcggacgtaataagatcaggaagatcctggataaaacgagattctcgatcctaccaccaaaactgttctcggatggaggactgtcgcagagtcaagatgattcgatagtcggcaccaggcattgtaggcacagtctcgccattatgcccatccccggaactctgtcctcaagcagcccagacctgttgcaacctacgaccagcatgcttgatttttccaatccaagcgccaagggtttcaaaaatatacctgatcaggtaatcagggtgtttaaagtggaccagcagtcatgttacataattattagtaaggatactacagcgaaagaggtggtcttccatgcagtgcacgagttcgggctgaccggcgcttctgacacatactcactttgtgaggtctcggtgacacctgagggcgtgatcaagcagcgcaggttgcctgaccagttcagtaagctggccgatcggattcaactgaacggacgctattacctgaaaaacaatatggaaacagagactttatgttccgacgaggacgctcaggagcttgttaaagaaagtcagctcagcatgttgcagctgtcgacaattgaagttgcaacccagctgagcatgagagattttgatttgttcaggaatatcgaaccaaccgaatatattgatgatctatttaagcttaacagtaagacaggcaacacacatctaaaacgctttgaagacatagtgaatcaggagaccttctgggtagctagcgaaattctcaccgaggccaaccagcttaagcggatgaaaattattaagcacttcatcaagattgcccttcactgccgggaatgtaagaatttcaattccatgttcgctattattagcggcctgaatcttgcctccgtagccaggctacggggaacctgggaaaagttaccatccaaatatgagaagcatttgcaggatctgcaggacattttcgatccttcccgcaacatggctaaatacagaaatattctgagcagccagtcaatgcagcccccaatcatccctctctttcctgtggtgaaaaaggatatgacattcctgcatgagggaaatgattcaaaagtggacggactggtgaactttgagaagctgagaatgatctcaaaagaaattagacaggtggtacggatgacttccgccaatatggatcccgctatgatgtttcgacaacgcaaaaaacgctggcggtccctgggttctctcagccaggggtcaacaaatagtaacatgcttgacgtgcagggaggtgcgcataaaaaaagggctagacggtcttccttgctgaacgccaagaaactgtatgaagatgcccagatggcgaggaaggtgaagcagtatttgtcttcactcgatgtggaaacggatgaagaaaaattccagatgatgtccctccaatgggagcctgcctatggtacattgaccaagaatttgtctgaaaaaagatcagctaagtcatcagagatgtcacctgttcccatgcggtccgccggacagactaccaaggctcatctgcaccaaccacacagggtgtcacaggtccttcaggtaccagccgtcaacctccatcctataagaaagaaagggcaaactaaggatccagcgctcaatacctctctcccccaaaaagtccttgggacaacagaggagattagtggcaagaagcataccgaggatacaatctccgtcgcctcttctctacactcctcgccgccagcttcgccccaaggttcccctcataaaggatatactcttattccaagcgctaagtccgacaatctttccgactccagccactccgaaattagttcccggtcatccatcgttagcaactgttctgtggacagcatgtccgcagccttgcaggatgaacgatgtagtagccaggcacttgccgttccggagagcaccggagccctggagaagacagaacacgccagtggaatcggagatcacagccagcacgggccaggctggaccttgctgaagccttcactaataaaatgtctcgccgtgtcctctagcgtaagcaatgaagagatatcccaggagcacatcataatagaagcagccgattcaggcaggggttcttggacctcctgcagctcgagcagccacgacaactttcagtcgctaccaaaccccaagtcctgggactttctgaattcttaccggcatacgcacctcgacgatcctattgctgaagtcgagcccaccgattccgagccatatagctgcagcaagtcttgttctaggacatgtggacagtgtaaagggtcgctggaaagaaaatcctggaccagtagttcttcactgtccgacacatatgaaccaaattacggaaccgtgaagcagcgtgtactcgagtcaacacccgcagagtccagtgagggtctcgatccaaaagacgctactgatcccgtgtacaaaacagttacctctagtaccgagaaaggcttaatcggcaagaagcagaccagctatttctag

SEQ ID NO: 237928 - DNA, 4515 bp, synthetic construct
  misc_feature 1..4515: note = Description of Artificial Sequence: Synthetic coding sequence
  source 1..4515: mol_type = other DNA
atgaatagccccgtcgaccccggagcaagacaagctcttcggaagaaaccacctgagaggacccccgaagatctgaatacgatctactcctaccttcatggcatggaaatcttaagtaatctccgagagcaccagctgcggttgatgagtgcccgagctagatacgaacggtactcggggaatcaggtcctcttctgctccgaaactatcgccagatgttggtatattcttttaagcgggtcagtactggtaaaagggagtatggttctgcccccatgttcttttgggaagcaattcgggggaaagagggggtgcgattgcctggttttggagccgagtgaaatgattgttgtggagaacgctaaggataacgaagactccatcctgcaaagagaaatccccgcaagacaaagccgaaggaggttccgtaagatcaattacaaaggagagcgtcaaacaataaccgatgatgtagaagtcaattcgtatctgagtctgcccgcagacctgaccaaaatgcacctcacagaaaaccctcacccccaggtgacacacgtttccagcagtcagtccgggtgctccatcgcttccgattctggatcctctagtttatccgacatttatcaggccaccgagagtgaagtaggcgatgtggatttaacacggctgcctgagggacccgtggattccgaggatgacgaggaggaggacgaagaaatagatcgcactgacccgcttcagggccgagacctggtgagagaatgcctcgaaaaagaaccggcagacaaaacagacgacgatattgagcagctgctcgagttcatgcaccagctcccagccttcgccaatatgaccatgagcgtgcgcagagaactctgcagtgtgatgatatttgaagtcgtagagcaggcgggtgccatcatcctggaagatggccaggagctcgatagctggtatgtcattctgaacggtactgtggaaattagtcaccctgacggcaaggttgagaacctattcatggggaatagtttcgggattacaccgacactggataaacagtacatgcacggcatcgtgagaaccaaggtggacgactgtcaatttgtttgcatcgcacagcaagattattggagaattttgaatcatgttgaaaaaaacacacacaaagtggaagaagagggggaaatagtgatggtacatgaacaccgcgaactagataggtcaggcacacggaagggtcacattgtcattaaggcaactcccgagcgtctcatcatgcatttgattgaggagcatagtatcgttgatccaacttatatagaggatttcttgttgacatatagaacattcttagaaagccctctcgacgtgggcataaagttgctggaatggttcaaaatcgattcattgcgggacaaggttacccgcatcgttcttctgtgggtgaataaccattttaacgattttgagggcgatccagcaatgactcgattcctggaagagtttgagaagaatttggaggacacaaagatgaatggccatctgaggctgctgaacatagcttgcgccgcaaaagcaaagtggagacaagtagttttgcagaaagcgtcgcgtgaatcacctctgcagttctccctgaacggtgggtctgagaagggcttcgggatattcgtcgagggtgtcgaacctggcagtaaggccgctgacagcggcctcaaaaggggcgaccagatcatggaagtgaatggccagaacttcgagaacattacatttatgaaagccgtagagattctgagaaataacactcatctcgcccttactgtaaagaccaatatttttgtcttcaaagaactcctgttcagaacagagcaggagaagagcggagtgccccatatcccgaagattgccgagaaaaagagtaaccggcattccatccagcatgtgcctggggacatcgaacagacctcccaggagaaggggagcaagaaggtaaaagcaaacaccgtttccggcggacgcaacaagattcgcaagattctggacaaaacgagattttcgatactcccaccaaagctgttctcagatggtgggttgtcccagtcccaggatgactccatagtggggaccagacactgccgccatagtctcgctatcatgcctatcccgggaaccctctcttcatcatccccagatctgcttcagcccactacctcgatgctggatttctcaaacccaagcgatattcccgaccaggtaatccgagttttcaaagtagaccagcagtcttgctacataattatctctaaagatacaacagcaaaagaagtggtgtttcacgctgtgcatgagttcgggctgactggcgcaagcgacacgtatagcctttgcgaggtctccgtaacgccagaaggcgtaataaagcaacggagactaccagatcagttcagcaagttagctgacaggatccaactgaatgggcgttactatctgaaaaacaacatggagacggagacactgtgctccgacgaagatgcccaggaactcgtgaaggagagccagctgtctatgttgcagctgtccaccatcgaggttgctacacagctttccatgcgcgatttcgatctgttcagaaatattgagccaaccgagtatattgacgacctgttcaagctcaattctaaaacaggcaacacccacctgaagagattcgaggacattgtgaatcaggaaacgttctgggtggcatccgaaattttaactgaggcgaaccaacttaagagaatgaaaatcataaagcacttcatcaagatcgcgttacactgtcgggaatgcaagaacttcaactcaatgtttgcgataatctcaggcctgaacctcgcctcagtcgctagacttaggggcacttgggaaaaactgcctagcaagtacgaaaaacatctccaggacctccaggatattttcgatccatcaaggaacatggctaaataccgaaacattctgagcagccagagcatgcaacccccaattatcccactttttccagtagtgaagaaagacatgacatttctgcacgagggaaatgattccaaggtggacggattggtcaacttcgaaaaactgcggatgatctctaaagagatccgccaggtggtcaggatgaccagcgccaacatggaccccgcaatgatgttccgccagaggaaaaagcgttggcggtcactggggtcattgagtcagggatccacgaattctaatatgctggatgtgcaaggcggtgctcataagaagagagcaagacgctctagcctgttaaatgccaagaagctctacgaagacgcccagatggcaagaaaggttaagcaatacttgagtagccttgatgtggaaaccgatgaagaaaagtttcagatgatgagtttgcaatgggaacccgcatatggcactctcactaaaaatctgagtgaaaagcggtcggccaagagttcagaaatgagcccggtgccaatgcggtctgcaggtcagaccacgaaggctcatttgcaccagcctcatagggtgtcacaagtattgcaggtgccagccgtgaacctgcatcccatccggaagaagggccagactaaagatcccgcactgaacactagcctgccccaaaaggttctgggcacaacagaggaaattagcggtaaaaagcatacagaggacactatcagtgtagccagttcacttcactctagcccacccgcaagccctcagggctccccacataaggggtacacgctcatcccctcagcaaagagcgacaacctgtccgactcatcccacagtgaaatcagcagccggagcagcattgtatccaattgttcagtagactccatgagcgcggcattgcaggatgagaggtgcagcagccaggctctggcagtgcccgaatcaacaggcgctcttgaaaagacagaacacgcaagcggcattggcgaccattcacagcatggaccaggatggaccttattgaaaccctcactaatcaagtgcctcgctgtgtcaagtagtgtcagtaatgaagaaattagtcaggagcatatcatcatcgaggctgctgactccgggaggggaagttggacctcctgcagttccagcagtcatgataattttcaatccttgcccaaccccaaatcatgggacttccttaattcctataggcacacccatctggacgatcccattgccgaggtggaaccgaccgattctgagccttatagctgctctaagtcatgttctcgcacgtgcggtcagtgtaagggatccctcgagaggaaatcatggaccagcagctcctctctgtcagatacatacgaacccaactacggcactgtaaagcaacgcgtgcttgaaagcacccccgctgagtcgtctgagggtctggatccaaaagatgcaactgatccagtgtataaaacggtgactagcagcactgaaaagggactgattgaaaacgaacaggtgagcgccgtttag

SEQ ID NO: 237929 - DNA, 4805 bp, synthetic construct
  misc_feature 1..4805: note = Description of Artificial Sequence: Synthetic coding sequence
  source 1..4805: mol_type = other DNA
atgaattctcccgtggatcctggtgctcgacaggccttgcgcaagaagcctccagaaagaacccccgaagacctgaataccatttactcctacctacacggtatggaaattctctccaacctcagagagcaccagcttcgactgatgtctgccagagcaaggtatgagcggtactctggaaaccaagttctattctgtagcgagaccattgcacgatgctggtatatcctcttgtccggaagcgtactggtcaaagggtccatggtgctgcctccctgcagtttcggcaagcaattcggcggaaagcggggatgtgactgtctggttctggagccctctgaaatgatcgtcgttgagaacgccaaggacaatgaagatagcatcctgcagcgagaaatccccgctcgccagagcaggaggaggttccgtaaaatcaactacaagggagagcgccaaacgatcaccgatgacgtcgaagttaattcttatttgtctttacctgccgacttgaccaagatgcaccttaccgagaaccctcacccacaagtgactcatgtttccagctcacaatcgggttgtagtattgcgtccgattccggatcatcctcactgagtgatatctatcaggcaactgagtctgaggtgggcgacgtggacctgacacggctgccagagggcccagtggattctgaggatgatgaggaggaagacgaggagatcgatcgaacggatccattacagggcagggatctggtacgggagtgcctggagaaagaacctgccgacaaaacagacgacgatatagaacagttgctggaattcatgcatcagctgcctgctttcgccaacatgacaatgagtgttcggagagagctctgctcagtgatgattttcgaagtagtggaacaggccggtgccatcatactggaggacggacaggagctggactcttggtatgtcattctcaatggtacggtagagatctcccatcctgacgggaaagtcgagaatctcttcatgggtaattcattcggaatcacccccaccttggataaacagtatatgcacggcatagtccgcaccaaagtagacgattgtcaatttgtatgtatcgctcagcaggattactggcgcatcctgaatcacgtcgagaagaacacccacaaggtggaagaggagggagaaatagtgatggtccacgaacatcgggagctggaccggagtgggaccaggaaaggtcacattgtgatcaaagcaaccccagaaaggttgattatgcaccttatcgaggagcatagtatcgtcgatccaacatatatcgaggacttcttgcttacctaccgaaccttcctcgaatcccctctggatgtgggtattaaactccttgaatggttcaaaatcgactcactcagagataaggtaactaggatcgtgcttctatgggtaaacaaccactttaacgatttcgagggcgacccggcaatgacccgattcctcgaggagtttgaaaaaaatctagaagacaccaagatgaacggtcaccttcggctgcttaacatcgcatgcgcggctaaagctaagtggcgccaagtcgtgcttcaaaaggcctcacgagagtcacccctgcagttctcactgaatggtggatccgagaaaggtttcggaatttttgtggagggtgtggaacccggttcgaaagctgctgatagcggcctgaagcgaggagatcagattatggaggtgaatggccaaaattttgagaacataacctttatgaaagcagttgagattttgcgcaacaatacgcacctggctctgaccgtgaaaacaaatatattcgtctttaaggaattgctgttcaggaccgagcaagaaaaatccggagtgccccatatacctaagattgctgagaaaaagtccaatagacactcaattcagcatgtgcctggtgacattgagcagaccagccaggagaaagggtctaagaaggtaaaagcaaacactgtgtcggggggaaggaacaagatccgtaagatcttggacaaaacaagattcagtatcttgcctccaaagctgtttagcgatggtggtctgtcccagagccaggatgattcaattgtaggcacgagacattgccggcatagtctagcgattatgcctattcccggtacgcttagttcgtcgagtcctgatctactgcagcccacgacctccatgctggacttctctaacccctccgacattcccgatcaggtgattcgcgtgtttaaagtcgatcagcagtcttgttacatcattattagcaaagataccaccgctaaggaggttgtttttcatgccgtccacgaattcggcctgacgggcgcatccgatacctactccctgtgtgaggtcagcgtgacgcctgagggggtaatcaagcagcgcaggttgcctgaccaattttccaagctcgctgatcggattcaactcaacggacgttattacctgaagaacaatatggagacggaaaccttgtgctctgacgaggacgctcaggaactggtcaaagaatcccaactatcaatgctgcagctgagtaccatcgaggtcgcgacccagctgtcgatgcgggatttcgacctgtttagaaatattgaacctaccgagtatatcgacgacctatttaaacttaactccaagaccggcaacacacacctaaaaagatttgaggatattgtgaatcaggaaactttttgggtcgcttcggaaatcttaaccgaagcaaatcaactgaaacgcatgaaaataattaagcattttattaaaatcgctctgcattgccgggaatgcaagaactttaattcgatgtttgctataattagcggattgaatttggcatctgtagctagactgcgcggaacctgggaaaagctgccaagcaaatatgagaagcatctgcaagacctacaggatatcttcgacccatcccgcaatatggcaaagtaccgaaacatcctgtcatcgcaaagcatgcagccacccattatccccctgtttccggtcgtcaagaaggacatgactttcttgcacgaaggtaatgactccaaggtggatggtctcgtgaacttcgagaaacttcgtatgatctccaaggagattaggcaggtggtccgaatgacaagcgcaaatatggaccctgcaatgatgtttcggcaaagatcgctgagccagggctctacaaattcgaacatgctggacgtgcaggggggagcccataaaaaacgagcgcgacgcagttccctccttaacgctaaaaagctgtatgaagacgcccagatggctcgcaaggtgaagcagtacttatcctcccttgatgtcgagaccgatgaggaaaagtttcagatgatgtctctccagtgggagcctgcgtacgggaccctgaccaagaacttgtccgaaaaaagaagcgcaaagtcgtctgagatgtcaccagttccaatgcggtctgcagggcagaccacaaaagcacacctacaccagccccatagggtatcacaggtactccaggtgcccgctgtgaatctgcacccgattagaaaaaagggacaaactaaagaccctgctctgaacacatctttgcctcagaaggttctgggcacaactgaagaaatctcgggcaagaaacacactgaggatacgatttctgtggcatctagccttcactctagtcctcccgctagcccacagggaagcccccacaaaggctacacattgatcccttccgcaaagtccgataatctgagcgacagttcgcactccgaaatttccagcagatccagtattgtgtccaattgtagtgtggactctatgtccgctgcacttcaggacgaacgctgttccagccaggcactcgccgttcccgaatctaccggtgccctggaaaaaactgagcatgccagcggcattggcgatcactcccagcatggccctggctggacattgctcaagcccagccttattaagtgtctggccgtgtcatcgtctgtgagcaatgaggaaattagtcaagagcatattataatagaggccgctgatagcgggcgtgggagctggacctcctgctcatcttcttcacatgacaacttccagtcactccccaaccctaaaagttgggatttcctaaatagctatcgacacacccatttggacgacccgattgccgaagtagagcctactgactctgaaccatatagttgctccaaatcttgctctcgtacttgcggacagtgtaaaggatcgctggagaggaaatcttggacatctagctcctctctgtctgacacgtacgaaccgaactatggtaccgtgaaacagagagtcttagaatctactcccgcagaatcttctgaaggcctggacccaaaagacgctaccgaccctgtatacaagacagttaccagctccacagagaagggactcatcgtatactgtgtcacctccccgaagaaggacgatcgctacagagaacccccaccaacacctcccggttacctaggcataagcctggcagacctgaaagagggcccacatacacacctcaagccaccagattacagcgtggcagtgcagcggtctaaaatgatgcataattcgctcagccgtttacccccagcctccctgagcagcaatctggtagcgtgtgtcccttccaaaattgtaacacagcctcaacgacataacctgcagccatttcatccaaagctgggagacgtgaccgacgcagacagcgaggcagatgagaacgagcaggtttcagcagttta

SEQ ID NO: 237930 - DNA, 3615 bp, synthetic construct
  misc_feature 1..3615: note = Description of Artificial Sequence: Synthetic coding sequence
  source 1..3615: mol_type = other DNA
atgaatagccctgttgaccccggagccagacaggccctgaggaagaagccaccagagcggacccccgaggacctgaacacgatctatagctacctgcacgggatggagatcctgagtaatttgcgcgaacaccagctaaggctgatgtcagcccgtgcgagatacgagcggtactcagggaaccaggtgctgttttgcagcgaaactatcgctcggtgctggtacatcctgctgtctggttccgtactggtaaaaggatccatggtgctgcccccatgttccttcggaaaacagttcggagggaaacgaggctgtgactgtctggtgctggagccctccgagatgatcgttgtagagaatgccaaagataacgaagatagcatcctccaacgagaaatcccagccaggcagagccggagaaggtttagaaaaatcaattataaaggggagcggcaaacaattactgatgatgtggaggtgaattcatacctgtcccttcctgccgacctgaccaagatgcatttgacggaaaatccacatccccaggtaacgcatgtgagttccagccaatccggctgtagtattgcctccgattcaggctcctcgagtctgtcagacatctatcaggctactgagtctgaggtaggcgatgtcgaccttaccagactgcctgaaggccctgtggatagcgaagacgacgaagaagaagacgaggaaatcgataggacagatccacttcaaggccgagacctggtgcgggagtgtctggaaaaagaacctgcagataagaccgacgatgacattgagcaactactggagtttatgcaccagcttccagcctttgccaacatgacaatgagcgtacgtcgagagctctgctccgtcatgatctttgaagttgtggagcaagcaggagccataatattagaagacggacaggaattagatagctggtatgttatcctgaatggcacagttgagatttcccaccctgatggaaaagtggagaacttgtttatgggaaatagtttcggcattactcccacattggataagcagtatatgcacggcatagtgcgaactaaggtagatgactgccagtttgtgtgcatcgctcagcaggactactggagaatcctgaatcatgtggaaaaaaatacccataaggtcgaggaggagggtgagatcgtaatggtacatgagcaccgagagctggaccggagtggcactcgcaaggggcacatcgtgatcaaggccacaccagagagactgatcatgcacttgatcgaggaacattctattgttgaccccacctatatcgaagatttcttgctgacatacaggacctttttggagtctcccctggacgtggggatcaagctgcttgagtggttcaagatcgattctctgcgggacaaggtgacccgcatcgtgctgttatgggtaaacaaccactttaatgacttcgaaggcgacccggctatgacacgattcctcgaggaattcgagaaaaacctcgaagatactaagatgaatggacacttgagactgctaaacatcgcatgcgctgcaaaagctaaatggagacaggtcgtgctgcagaaagcctcaagagagtcgccactccagttttctctgaatgggggaagcgagaaaggcttcggcatttttgttgagggggtcgaacccggaagcaaggccgctgattctggactgaagcggggtgatcagatcatggaggtcaatggacagaattttgaaaacataactttcatgaaggcagtggaaatcctacgaaataatactcatctggctttgacggtcaaaactaatattttcgtttttaaggaactactttttagaacagaacaagagaaaagcggagtgccccacatccccaaaatcgccgaaaagaaaagcaacaggcattcgatccaacacgtccctggggacattgagcagacaagccaggaaaaggggtcaaagaaggtgaaagccaacactgtgtctggaggccgaaacaagatccggaagatcctggacaagacaagatttagtatcctgcccccaaagttgttcagcgacggtggcttgagtcagtcccaagatgactcaattgtgggaaccagacattgtcgccatagtctcgccatcatgcccatcccgggtactctgtccagcagctccccagatttgttgcagcctacaacgtccatgctggatttcagcaacccctctgacatccctgaccaagtgatcagagtgttcaaggtggaccagcagagctgctatatcatcattagtaaagatacaactgcaaaggaagtagtgttccatgcagtccacgagtttggattaactggtgcctctgatacctatagcctgtgtgaagtgtctgtgacccccgagggggtgataaagcagaggaggcttcctgaccagtttagtaaactggccgaccggattcagcttaacggcagatattatctcaagaataacatggagactgagaccctctgtagtgatgaggatgcccaggaattagtgaaagagtcacagctgtcaatgctgcagctgtccacaattgaggttgcaactcaactgtcaatgagagacttcgatctgttccggaatatagaacccaccgaatacattgatgacctgtttaagcttaactccaaaacggggaacacacacttgaagcgcttcgaggatatcgtgaaccaggagacgttctgggtggcttccgagattctcactgaggctaaccagctaaaaaggatgaaaatcattaaacattttatcaaaatagctctgcactgtagggaatgtaagaacttcaacagcatgttcgcgataatctccggcttgaacctagctagtgtggctaggctgagaggaacatgggagaagctcccttctaaatacgaaaagcacttgcaggacctacaggatatcttcgacccatctagaaatatggcaaagtacaggaacattctgtccagccaatccatgcagccgccaatcatacctcttttcccagttgtgaagaaggacatgacctttctccatgagggtaatgactcaaaggttgacgggctcgtgaactttgaaaaattgcgcatgatcagtaaggagatccggcaggtggtacgaatgacatcggccaacatggatccagcgatgatgtttcgacaacggagtctctcgcagggctcaacgaactctaacatgttggatgtgcagggaggcgcacacaagaaaagggcccgaaggagtagcctgctcaatgcgaagaagctgtacgaggacgcccagatggctcggaaggtgaagcagtacctcagtagcctggatgtggaaacagacgaggagaagttccagatgatgtcattgcagtgggagcctgcgtacggcaccctgaccaagaatctgtcagagaaaaggtcagcaaaaagcagcgaaatgtcacccgtaccgatgagatcagctggtcagacaactaaggcccatctgcatcagccccatagagtttcccaagtcctgcaagtgcctgcagttaatctccaccctataaggaaaaagggccaaacaaaggatcccgctctgatgtag

SEQ ID NO: 237931 - DNA, 4176 bp, synthetic construct
  misc_feature 1..4176: note = Description of Artificial Sequence: Synthetic coding sequence
  source 1..4176: mol_type = other DNA
atgaactcacccgtggaccccggagctaggcaagccctcaggaagaagcctccagagaggactcctgaggaccttaacactatttactcctacttgcatggcatggaaattctgtctaatctgagagagcaccaactgagactgatgtccgccagagcgcgttatgaaagatatagcggaaatcaggtcctgttttgtagcgaaacaatcgcacgatgctggtacattctactgtccggatccgtgttggtaaagggcagtatggtccttcccccatgttctttcggcaaacagttcggaggcaagcgcggatgtgattgtttagtgttggagccctctgaaatgatcgtggtggaaaatgctaaggacaacgaggactcaattctgcagcgggagattcctgcacgacagtcccggaggcggtttcggaaaatcaactataaaggtgaaaggcagactattacggacgatgtcgaagtcaactcttatctcagtctgcctgcggatttgactaagatgcacctgacagagaatccccatccgcaggtgacgcatgtgtcgtccagtcagtccgggtgtagtattgcatccgacagtggttcctcatccctttctgacatctaccaagccacagaaagcgaggtgggtgacgtggatctcacacggttgcccgaaggacctgtcgactctgaggacgacgaagaggaggatgaggaaattgatcgtacggatcccctgcagggaagagacctcgtgcgcgaatgcctcgagaaagaacccgctgacaagaccgacgacgacattgaacagcttcttgagtttatgcaccagctcccagcctttgctaacatgacgatgagtgtccgacgagagctgtgctccgtcatgatattcgaggtcgtagagcaggccggagcgataatcttggaagacggccaggagctggacagctggtatgttatccttaacggcacagttgagattagccaccctgatggaaaagtggaaaacctctttatgggcaactcctttggtatcacacctacactggacaaacaatacatgcatgggatcgttagaacaaaggttgacgattgtcagttcgtgtgcatcgcccagcaagactactggcgcatcctgaaccatgtcgagaagaacactcataaggtggaagaggagggggaaattgtcatggtccacgaacaccgcgagctggacaggtcgggaaccagaaaaggccacatagttattaaagctactcccgagcgcctaatcatgcacctgatcgaggaacatagcatcgttgatccaacttacatcgaagatttcctgctgacttaccgaactttccttgagtccccattggatgtaggtatcaagctgctggagtggttcaagattgattccttgcgagacaaggtgaccagaattgtgctgctatgggtgaataatcatttcaacgactttgagggtgaccccgctatgacccgcttcctggaagagttcgagaagaacctggaagatactaaaatgaacggccacctgcgcctgctaaatatcgcctgcgcagctaaggctaaatggcggcaagtcgtcctccagaaggcttctagagagtcacctttgcagttttccctcaacggtgggagtgagaaggggtttggaatatttgttgagggtgtggagccaggctcaaaagcagccgactccgggctcaaacgaggagatcagataatggaagttaatggacagaattttgagaacataacgtttatgaaagcagtagaaatcctgagaaacaatacccatctggctctgaccgtgaagactaatatattcgtattcaaggaattgcttttccgtaccgagcaggaaaagagcggggtccctcatatcccaaagatcgcagagaaaaaatcaaaccggcacagtatccagcatgtgcccggagacatcgagcagacctctcaggaaaagggctccaagaaagtcaaggccaatactgtttccggcggaaggaacaagatccgcaaaatcctggataaaactcgtttcagcattcttccacccaagctgttttctgatggtgggttaagccagtctcaagacgactccattgtcggtaccaggcattgtcggcactcactggcaatcatgccgatacccggaactcttagctctagttccccagacctcctgcagcctactactagcatgctcgacttcagtaatccttctgatattccggaccaggtcatcagagtttttaaagtggatcagcagagctgttacatcatcatttcaaaggacaccaccgccaaggaagttgtctttcatgccgtgcatgaattcggactcaccggtgcatccgatacatattctctgtgcgaggtgagtgtgacccccgagggtgttatcaagcagcgtagactcccggaccagtttagcaagttagctgataggatccagctgaacggtaggtattatctcaagaacaacatggaaacggagactctgtgttctgatgaagacgcccaggagttggtgaaagagagtcagcttagtatgttgcagttgtccacaatcgaggtcgctactcagctgtcaatgagagattttgacctttttagaaatatagagcccactgagtatatcgacgacctctttaaactaaacagcaagactggcaacacccatcttaaaagatttgaggacattgtcaaccaggagactttttgggtggcatctgaaattctgaccgaagccaaccagctgaaaagaatgaagatcatcaagcacttcatcaagattgcattacactgccgggagtgcaagaattttaatagcatgttcgctatcatctccggactcaatctggcttctgttgctagactgcgcggtacttgggaaaaacttccctccaagtatgagaaacatttgcaagacctccaagacattttcgacccctctcggaatatggccaaataccgcaacatcctgtcatctcagtccatgcagccacccattatccctctcttccctgttgtgaaaaaggatatgacttttcttcatgaaggaaatgactctaaagtggacggcctcgtgaactttgaaaagctgagaatgatctccaaggagatccggcaagtggtgcgaatgacctctgctaacatggacccggcaatgatgttcagacagcgctcacttagccagggctctaccaactccaacatgctggatgtgcagggcggtgcgcacaaaaaacgggcaagaagatccagtctactgaatgctaaaaagctgtatgaggatgcacaaatggctcggaaagtgaagcaatatctgtcatcactagatgtggagacggacgaggagaaatttcagatgatgtccttacagtgggagccagcctatggcacactgaccaagaacctgtctgagaagaggtctgcaaaatcttctgagatgagtcctgttcccatgcgatccgccggtcaaacaactaaagcccacctccaccagccacacagagtgtcacaggttctgcaggtgcctgccgttaacctacaccccatcaggaagaagggacagacaaaggacccggctctgaacacatcgctaccacagaaggtgctcgggaccacagaggaaatctcaggaaaaaagcacacggaggacaccattagtgtcgctagttctttgcactcaagcccccctgctagcccacagggatccccccataaagtagggtcaattattagtgaccacagctcaaagatttcgggccagagttgcccaggaatcggcggtgcctatctccagaagaaaattctccaaatcactcgcagtaccgccaagcggaccgattccaccgaaaaagccactgaagagaaccgcgaccgcacaagttgtgagaacacaacccgcaagcgaatgaccagccccttccggagactcagagaaaggatgctttcccgggagcggctggtgaacagccagaaggaggataccgatcacaaccaggcaacagagtcttgcgagaaggtgaaagacgtcggatctaacattaaggacgagaaaggatcagcaatcttcaatagtaattcccaggggaatagcaacacccttaattgtttttatacacgcttcaagagtaaaagacgcaagactttgtag

SEQ ID NO: 237932 - DNA, 2484 bp, synthetic construct
  misc_feature 1..2484: note = Description of Artificial Sequence: Synthetic coding sequence
  source 1..2484: mol_type = other DNA
atgaacagtccagtggacccaggcgctagacaggcactgaggaaaaagcctccggaaagaactcccgaggacctgaataccatctactcatatctgcacgggatggaaatcctgtcaaacctgcgagaacatcagctgcggctgatgtccgccagagcccgatacgaaagatacagcgggaatcaagtgcttttctgctccgagaccattgctaggtgttggtacatcctgctgagcggctctgtgttagtgaagggttctatggtgctccctccttgtagtttcggcaagcagtttggcggaaaacggggttgtgactgcttggttctggagcctagcgaaatgatcgtggttgagaacgctaaagacaacgaggacagcatactccaaagagagatccccgcacgccagtccaggagacggtttcgcaagattaactataagggtgaacggcaaaccattactgatgacgtggaggttaattcctacctgagcctgccagcagacctgactaagatgcacctgactgagaaccctcacccgcaggtgacgcatgtgtcttcctcccagagcggatgttccatcgccagcgactccggctccagctctctgtccgacatctatcaggctacagagtctgaggtgggcgacgttgacttgaccagactccctgagggccctgtagacagcgaagacgacgaggaagaggatgaggaaatcgaccgcacagatcctctgcagggaagggatttggtgcgggaatgcctcgagaaggagcccgctgataagacggatgacgacatcgagcagcttctcgagtttatgcaccagttaccagcctttgctaatatgactatgtcggttcgcagggagttgtgcagcgtgatgatcttcgaggtcgttgaacaggcaggtgccatcattctggaggacggacaggaactcgatagttggtacgtcatactaaatggcacggtagagataagccatcccgatgggaaggtggaaaatctgttcatgggcaattctttcggcatcacgcctactttagacaaacaatacatgcacggcattgtgcggaccaaggtggacgattgtcagtttgtctgtattgcccagcaagattactggaggattcttaatcacgtggaaaaaaacacccataaagtcgaagaggaaggtgagattgttatggtgcacgagcaccgcgagctggaccgctcaggcactagaaagggccacatagtgatcaaagccaccccagagaggcttattatgcacttgatagaagagcatagtatcgtagatccgacctatatcgaagatttcttgctgacgtacagaacttttttggaatctcctctggacgtgggaatcaaattgctggaatggtttaaaatcgacagcctacgagacaaagtgacaaggatagtcctactctgggttaataatcacttcaacgacttcgaaggcgacccagccatgacacgcttcttggaagaattcgagaagaacctcgaggacactaaaatgaatggccacctacgcttactcaatattgcatgtgctgcgaaagccaagtggaggcaggttgttcttcaaaaagcctccagggaatcccccctgcaattctctctgaacggcggaagcgaaaagggatttggtatttttgtggagggagtcgagccgggtagcaaggccgcagattctggcctcaagagaggggaccaaataatggaggtgaacggccagaattttgagaacatcacattcatgaaagcagtagaaatcctgcgtaataacacacatctggctctgactgttaagaccaatatcttcgtatttaaggaactcctgtttagaactgagcaggaaaagtccggcgtaccacatatccccaaaattgctgaaaagaagtcaaaccggcacagcatccaacatgtgcccggtgacattgagcagacatctcaagagaaagggagtaaaaaagttaaggccaacactgtgtccggaggcagaaacaagatcagaaagatccttgataaaactaggttctccattctacctccaaagctgttctctgacgggggactgagccaaagccaagatgattccattgttggaacccgacattgccgccactccctagcaattatgccaatccctggaactctgtctagtagcagcccagacctgcttcagcctactacttccatgttggacttctccaacccaagcgacatccccgaccaggtgatccgggtcttcaaagtcgaccagcagtcttgctacattattatcagcaaggatacgactgcaaaagaggtagtgttccacgccgtccatgaatttggccttacaggggctagcgacacctactcattgtgcgaagtctcagttacaccagagggcgtgattaaacagcgcagattgccagaccagttcagcaagcttgctgaccgcatacagctcaacggtagatag

SEQ ID NO: 237933 - DNA, 1551 bp, synthetic construct
  misc_feature 1..1551: note = Description of Artificial Sequence: Synthetic coding sequence
  source 1..1551: mol_type = other DNA
atggcagataacctcagcgacaccctgaaaaaattgaagattaccgcagtcgataagactgaggactccctggagggatgcctcgactgtcttttacaggctctggcgcagaataatacggagacctctgagaaaattcaggcgtcaggaatcctgcaattatttgcatccctgctcaccccccaaagctcctgtaaggcaaaggttgccaacatcatcgccgaagttgctaagaatgaatttatgagaatcccatgtgttgacgctgggctgatcagcccccttgtgcagcttttgaacagtaaggaccaagaagttctgctgcagactggcagggccttgggaaacatatgctatgactcacagtccagtaaggagcagtttgcatccactaacatcgccgaggaactcgtgaaactctttaagaaacaaatcgagcatgacaaacgagagatgatattcgaggtcttggccccactggccgagaacgatgccataaagctgcagctggtggaggcaggcctagttgaatgtttgctcgaaatcgtccagcagaaggtagactctgataaggaggatgacattacggagttgaagaccggaagcgacctaatggtcctgctgctactcggcgacgagagtatgcagaaactgttcgaaggaggcaaaggaagtgttttccagcgggtactgtcgtggatccctagcaacaaccaccagctccagctcgcaggagccctggccatagccaatttcgctagaaatgatgcgaactgtattcatatggttgataacggaatcgtggaaaagctgatggatctccttgaccgccatgtcgaggatggcaacgtgacagtccagcacgcagcgctgagcgcactccgcaacttggcgatcccagtgatcaacaaggcgaaaatgctcagcgcgggtgttacagaggctgtgctgaagtttctaaaaagcgaaatgccacccgtgcaatttaagctgttgggtactttacgcatgctcattgatgcacaggccgaggctgcggaacaattgggaaagaacgtgaaactagtggaacgcctggttgagtggtgcgaggctaaggaccacgctggtgtcatgggtgaatccaaccgcctgttgtcagctctcatcaggcacagcaagtcaaaagacgtgattaagactatcgttcagtcgggaggtattaagcacctcgtcactatggcgacaagtgaacatgtaattatgcagaatgaggcactggtggccttggccctgattgccgctctggagctgggtaccgcagagaaagatctggaaagcgctaagctcgttcaaatcctgcaccggcttctcgccgacgagcgctcagccccagaaattaagtacaattctatggttctcatttgtgccctgatgggctcagaatgtctgcacaaagaggtccaggatctagcctttctggacgttgtgtctaagctccggtctcatgagaataagagcgtggcccaacaggcatccctaaccgagcagcgcctgactgtcgagtcttag

SEQ ID NO: 237934 - DNA, 1827 bp, synthetic construct
  misc_feature 1..1827: note = Description of Artificial Sequence: Synthetic coding sequence
  source 1..1827: mol_type = other DNA
atggcagacaatctgtccgatactcttaagaaactgaaaatcactgcagttgacaagacggaggactctcttgaaggatgcctcgactgccttcttcaggcactagcacagaataatacggaaactagcgaaaagattcaggcctctggtattctgcagctgttcgctagcctgctgacgcctcagtcatcttgtaaggcaaaggtggcaaatatcattgcagaagtggcgaaaaatgaatttatgcggatcccctgcgtcgatgccggattgatttccccactggtacagctgcttaactccaaagaccaggaggtgctgctccagacaggtagagccctgggaaacatatgttatgacagccacgaaggacgtagcgcagtcgaccaggccggaggggctcagatcgtgatagaccacctgagatctctctgttcgatcacagatcccgctaatgaaaagctgctgaccgtgttctgtgggatgttaatgaattacagcaatgaaaatgacagcttacaggcccagctcatcaacatgggtgtgatccctacccttgtgaaactactgggaatacattgtcaaaatgcagccctgactgagatgtgcctggtagctttcggaaacttggccgaactcgagagcagtaaggagcagtttgcctccactaatatcgccgaggagttagttaagctgtttaagaaacagatcgaacacgacaaacgcgagatgatctttgaagtgctcgctcccctggctgagaatgatgctatcaagctgcagttggtggaagctggactcgtagagtgcttattggagatcgtgcagcagaaggttgattccgacaaggaggacgacattactgaattgaaaacaggctcggatttgatggttttgttgctcctcggagacgaaagcatgcagaagttgtttgagggcggaaagggcagcgttttccagagggtgctctcttggatcccatccaacaaccaccagctgcaactggccggagccctggcaatagcaaacttcgcacgcaatgatgcaaattgtattcacatggtggataatggtatagtggaaaaactgatggatctactcgatcgccacgtagaggatggaaatgttactgtgcagcacgccgcactgtcagcattgagaaacctcgctattcccgtcatcaacaaggccaaaatgctcagtgctggagtaactgaggccgtactgaagttcctgaagtccgaaatgcctcctgtccaattcaagctcttaggaaccctgcgaatgttaatcgacgctcaggctgaagcagcagagcaattgggaaaaaatgtgaagttagtggagcggctggtggagtggtgtgaggctaaggatcacgcaggagttatgggggagagtaatcggttacttagcgcccttatccgccactccaaatccaaggatgtgataaaaaccatagtgcagtccggaggcattaaacatctcgtcactatggctacatcagaacatgtcattatgcaaaacgaggctctggtcgcactggcacttattgctgctttagaactgggcactgcggaaaaggatctcgagtcggccaagttggtgcagatacttcatcgcctcttagccgatgagaggtccgctccggaaattaaatacaattctatggttctaatctgtgcccttatggggtccgagtgtctgcacaaggaagtgcaggatctggccttccttgatgtggtgagtaagttaagatcacatgaaaacaagtctgtcgctcagcaggcatcattaacggagcagcggctgacggtggaatcatag

SEQ ID NO: 237935 - DNA, 1680 bp, synthetic construct
  misc_feature 1..1680: note = Description of Artificial Sequence: Synthetic coding sequence
  source 1..1680: mol_type = other DNA
atggcagacaatctctcagataccttaaagaagttgaagatcacagccgtggataagactgaggattcattggagggctgcctggattgtctgctgcaggctctggcccaaaataacaccgaaacatctgagaaaattcaagctagcggaatcctccagttgttcgcgtcgctgctgacgcctcaaagtagttgcaaagcgaaggttgccaacatcatagcagaagtcgcaaagaatgagtttatgagaataccatgcgtcgacgcgggactgatctcacctctggtccagctgctgaatagtaaggatcaggaggttctccttcagactggccgtgccttaggaaatatatgctacgattcccactcactccaggcacagctgattaacatgggcgtgatccccactctggttaagcttcttggaattcattgccaaaacgctgcccttaccgagatgtgccttgttgctttcggaaacctagccgaactggaatcctccaaagaacagtttgcctctacgaatatcgcagaagaattagtgaaattgtttaagaaacagatcgagcatgataaacgtgagatgattttcgaggttctggctccgctggcggagaacgatgcaattaagctacagctcgtggaagctgggctcgtagaatgtctgctcgaaattgtccagcagaaagtcgactcagataaagaggatgatatcactgagctgaagacagggagcgatctgatggtcctgctgctccttggggatgagagtatgcagaaactcttcgagggcggtaagggatcggtttttcagcgggtgctttcctggatcccctcaaataaccatcagttgcagctggctggcgcactggccatcgcaaacttcgctcggaatgatgccaactgcatccatatggtggacaacggcatcgtggaaaagctcatggatctgctggatcgtcacgtcgaagacggtaacgtgaccgttcaacacgctgccctgagtgctctccggaatcttgctatcccggtgattaataaggctaaaatgcttagcgctggtgttacagaagcagttttgaaattcctaaagtctgagatgcctcccgtccagttcaagctgctgggtacactacgcatgttgattgacgcacaggcagaggctgctgagcaactgggaaaaaatgttaagctggtggaacgcctggtggagtggtgcgaggcgaaagatcacgcaggtgtgatgggcgagtcgaataggctgctgtcagcacttattcggcacagcaagagtaaagatgtaattaagactatcgttcagtccggtggcattaagcacctcgtgacaatggccacaagcgagcacgtgatcatgcaaaatgaggcactggtagcgttggcattaatcgctgcccttgaactggggaccgcggagaaagaccttgagagtgctaagctggtacagattttgcatagactattggcagatgaacgctccgctccagagattaaatacaactctatggtcctaatctgtgccctcatggggtccgaatgcctccataaggaggtgcaggacttggcattcttggacgtagtctccaaactccgcagccatgaaaataagtctgtggctcagcaagcctcactcacagagcagagactgacggtggagtcttag

SEQ ID NO: 237936 - DNA, 1677 bp, synthetic construct
  misc_feature 1..1677: note = Description of Artificial Sequence: Synthetic coding sequence
  source 1..1677: mol_type = other DNA
atggataacttatctgataccctaaagaagcttaaaattacagccgtggataaaacagaggactccttggagggttgcctcgattgcttgctgcaggctttggctcagaacaatacagaaacctcagaaaagattcaggcatcaggaattttacaattattcgcctctctgctaaccccccaaagctcatgcaaggctaaagtcgctaatatcatcgctgaagtggctaaaaacgagttcatgcgcattccatgtgtcgatgcaggactgatttctccactggtgcagttgctgaactcaaaagaccaagaggtcctgctgcagacgggtcgggctctgggtaacatctgttacgattcgcattccctacaggcccagttaataaacatgggagtgattcccacactggtcaagctactagggatacactgtcagaacgcagctctgacagagatgtgcctcgtcgccttcgggaatctcgctgagctcgaaagttctaaggagcagtttgccagtaccaacattgcagaagagctggtgaagctgtttaaaaagcagatcgaacacgacaaacgggaaatgattttcgaggtgttggccccactggccgagaacgatgccatcaagctgcaattggtggaagccggtttagttgagtgtttgctcgagatcgtgcagcagaaagtggattccgacaaggaggacgacatcaccgaacttaagaccggaagcgatttgatggtgctgctacttctcggtgacgagtctatgcagaaactattcgagggtggcaagggttcggtgttccagagggtactatcctggatcccctctaacaaccaccagttgcagttggctggcgctctggctatcgctaacttcgctcggaatgatgcaaattgcattcatatggtcgacaacggaatcgttgagaagctgatggacctccttgaccgtcacgttgaggatggaaatgtgacggtccagcatgctgcattaagcgccttgcggaacttggcaattccagtgataaataaggccaaaatgctcagcgcgggagttacagaggccgtgttaaaattcctgaagtctgagatgcccccagtgcagtttaaactgctagggacactgcggatgttgatcgacgcccaagccgaggcagctgagcagctgggaaaaaacgttaagctggtggagcgactggtggaatggtgtgaggcgaaggaccacgccggtgtgatgggtgaaagcaataggctcctttcagccctaattaggcactctaagtcaaaggacgtcatcaaaaccatagtgcaaagtggagggatcaagcatctcgtcaccatggcgacttctgagcatgttatcatgcagaatgaagctctggttgcactggctctcatcgccgcactggaactgggaactgccgaaaaggacctcgagtccgctaagctggtgcagattctgcatcggctactggccgatgagcgcagtgcccctgaaatcaaatacaattctatggtcttaatttgcgccctcatgggaagtgagtgtttacataaagaagtgcaggacctggctttcttggacgtggtgtccaagctcaggagccatgaaaataagtctgttgcccagcaggcgagcctgactgagcagcgtctgactgtagaaagctag

SEQ ID NO: 237937 - DNA, 1824 bp, synthetic construct
  misc_feature 1..1824: note = Description of Artificial Sequence: Synthetic coding sequence
  source 1..1824: mol_type = other DNA
atggataacctaagcgatactctcaagaagctcaaaatcaccgcagttgataagacagaggattcgttggagggatgtcttgattgcctgctgcaggcactggcacagaacaatacggagacaagcgagaaaatccaggcatccggaattctccaactatttgccagcctgctcacgcctcagtcttcttgcaaagccaaagtggccaatatcattgccgaggtggctaaaaacgaatttatgagaatcccttgcgtcgacgcaggcctcatctcacctctggtgcaactacttaattcaaaagaccaggaggtcctgttgcagaccggccgagccctgggcaacatctgttacgattctcacgaagggaggtccgccgtcgaccaagcgggtggggcacaaatcgtcatcgaccatctgagatcactgtgcagtatcaccgaccccgcaaatgaaaagcttctcaccgttttctgcggaatgttaatgaattactccaacgagaacgactctctgcaggctcagctcatcaatatgggtgttatacctacactggtaaagttactgggaatacactgtcagaatgctgccctgactgagatgtgcctggttgcattcggcaacctggctgagctggaatcttctaaggaacagtttgcatccacgaacattgccgaagagctcgttaagctgttcaaaaagcagattgagcacgacaaaagggaaatgattttcgaggtgctcgcacccctggcggaaaatgacgcaatcaaactgcagctagttgaggctgggctggtggaatgtttactggagattgtgcagcagaaggtcgactccgataaggaagacgacattaccgagcttaaaaccggtagcgacttaatggtgttactccttttgggcgatgagtctatgcaaaagctttttgagggcggaaaaggatccgtgtttcagagagtactgagctggatcccttcaaacaaccatcagctgcagctggctggagcacttgccatagcaaattttgcacgcaatgacgcgaattgtatccacatggtcgacaacgggatcgtagagaaactcatggaccttctggatcggcacgtggaggacggtaatgtgacggtgcaacatgctgccctttcagccctccggaaccttgcaatacccgtcataaataaagccaaaatgttgtcggccggagtcaccgaagccgtgctgaaattcctgaagtctgagatgccccctgtgcagtttaaactactcggaacgcttcgtatgctcatcgacgctcaagcggaagcagcggaacagctcggaaaaaatgtgaagttagtggagcggctcgtagagtggtgcgaagctaaagaccatgctggagtcatgggagaatccaataggttgttatccgctctcatccggcactcaaagtctaaagacgtaatcaagacgatcgttcagtctggtggaataaagcacctcgtgacaatggcgacaagcgagcatgtcatcatgcagaacgaagcgcttgtcgcacttgcgttaatcgcggctctggagttgggaactgctgagaaagacttggagagtgccaaactcgtccagatcttgcatcggctgctggctgacgagagatctgctcccgagatcaaatataacagtatggtgcttatctgcgcgctcatgggcagcgagtgcctccacaaagaggttcaagatctggcattcctcgacgtcgtgagcaagcttcgctcacatgaaaacaaatccgttgcgcagcaagcaagcctgaccgaacagagactgactgtggagagctag

SEQ ID NO: 237938 - DNA, 1824 bp, synthetic construct
  misc_feature 1..1824: note = Description of Artificial Sequence: Synthetic coding sequence
  source 1..1824: mol_type = other DNA
atggcagataatctcagtgacactttaaaaaagctcaaaatcaccgcggtcgacaagactgaggacagtctggagggatgcttagattgccttctacaggccctggctcagaataacaccgaaacttctgagaagattcaagcatcaggaatcttacagctcttcgccagtctgctgacgccccagagttcctgcaaggcaaaggttgccaatattattgcagaggtggccaaaaacgagttcatgcgaatcccatgcgtggatgctgggctgatttcacccctcgtgcagttgcttaacagtaaggaccaggaagttcttttgcagactggccgagctctggggaatatatgctacgattcacatgagggcagatcggccgtggaccaggcaggcggagcccagattgtaatcgaccacctgcgttcactgtgtagcatcactgatccggctaacgaaaagctgttgacagtgttctgtgggatgctgatgaactattccaacgaaaacgattcactgcaggctcagctcattaatatgggcgtgatccccaccttggtgaaactccttggaattcactgtcagaacgctgccctcaccgaaatgtgtcttgtggccttcggcaatcttgccgagttggaaagctctaaggagcagttcgcttctacaaacatcgctgaagagctggtgaaactgtttaaaaagcagatcgaacatgataagcgggaaatgatttttgaggtattggcgccacttgccgaaaatgacgccatcaagcttcagctggtagaagcaggcctcgtggaatgccttctggaaattgttcaacagaaggtcgacagcgataaggaggacgatattacagagctcaagactggcagtgatcttatggtactcctgttactcggggatgagtccatgcagaaactctttgaaggtggcaagggatccgtgtttcaaagggttctgagttggattccctctaataaccaccagctgcaattggctggcgctctcgccatagccaactttgctcgtaacgatgccaactgtatccacatggtcgacaatggcattgtggaaaaactgatggatctactggaccggcacgtcgaagacggaaatgttaccgtgcaacacgccgcactttctgccctgcgcaatttggccatcccagtgatcaacaaggctaaaatgctgtcagcaggtgttacagaagctgtgctgaaattcctgaagtctgagatgcccccagtgcagtttaaactcctgggaactctgagaatgctaatagatgcccaggaggctgcagagcagttaggaaaaaacgttaagctggtggagcggctcgtggagtggtgcgaggccaaggatcacgctggggtgatgggggagtccaataggctactgagcgctctcattcggcacagtaagtctaaagacgttattaagaccatcgttcaatctggcggaattaaacacttggtcacgatggccacatcagaacatgtgatcatgcagaatgaagctcttgtggccctggccctcattgctgctttagagttagggaccgctgagaaagacctggaaagtgcgaagctggtccagatcctacatagactgctcgcagacgaacggtccgcgcctgaaatcaaatataattcaatggtacttatatgtgcccttatggggtccgaatgcttgcacaaggaggtgcaggatctggcgtttctggacgtggtctctaaactgcgtagccatgaaaacaaaagcgtggcccagcaggccagcctgaccgagcagagactgacagtagagagctag

SEQ ID NO: 237939 - DNA, 555 bp, synthetic construct
  misc_feature 1..555: note = Description of Artificial Sequence: Synthetic coding sequence
  source 1..555: mol_type = other DNA
atgcgagaatataaactggtcgtgttaggaagcgggggagttggcaagagtgccctgaccgtgcagtttgtgcagggcattttcgtggaaaagtatgatcctacaatagaggactcttacagaaaacaggtggaggtggatgcgcagcagtgcatgctagagatcctggatactgctgggactgagcagtttacagccatgcgtgatctgtacatgaaaaacggtcagggattcgccttggtatactcaatcacagctcagtccacgtttaacgacctccaggacttgcgggaacagattcttcgtgtcaaagacacagatgacgtgcctatgatactggtggggaacaagtgcgatttggaggacgaacgggttgtcggtaaggagcaaggacaaaatctggcccgacaatggaataactgcgcatttttggagtcctctgcgaaatctaaaatcaatgtgaatgaaatcttctatgacctcgtgcggcagattaacaggaagactcctgttcctggcaaagctaggaagaagtcctcatgccagctgctgtag

SEQ ID NO: 237940 - DNA, 555 bp, synthetic construct
  misc_feature 1..555: note = Description of Artificial Sequence: Synthetic coding sequence
  source 1..555: mol_type = other DNA
atgcgtgaatataagctcgtggtcttagggtcagggggagtgggcaaaagcgccctgacggtgcaattcgttcagggaatattcgttgaaaagtatgatcccactatagaggacagctaccgaaagcaggtcgaggttgatgctcaacagtgcatgctggagattctcgacactgcaggtactgaacagtttaccgcaatgagagacttatacatgaagaacggacagggcttcgcccttgtctacagcataaccgctcaaagcaccttcaacgacctacaggacttaagggagcaaattttgcgtgtcaaagataccgacgacgtacctatgatcctggtgggcaataaatgtgatctggaagacgagcgcgttgtgggaaaagaacagggccaaaacttagctcgccagtggaacaactgcgccttcctagaatcgtccgctaagtcaaagattaacgtcaatgaaattttctacgaccttgtcagacagataaacaggaagacacccgtcccaggcaaagccagaaaaaaaagctcatgtcaattgctatag

SEQ ID NO: 237941 - DNA, 357 bp, synthetic construct
  misc_feature 1..357: note = Description of Artificial Sequence: Synthetic coding sequence
  source 1..357: mol_type = other DNA
atgagggatctctacatgaaaaacggacagggatttgccctggtgtactccatcacagcccagagcacattcaatgacttacaggacctgagggaacagattctgcgcgtcaaagatacggatgatgtccccatgatcttagtgggaaacaaatgcgaccttgaggacgagagggttgttggtaaggaacagggccagaatcttgcgagacagtggaacaactgtgcctttttggaatcatcagcaaagtcaaaaattaatgtcaacgagatcttttatgatctcgtccgccagatcaacaggaagacccctgtccccggaaaggcacgtaaaaaaagctcttgccagcttttatag

SEQ ID NO: 237942 - DNA, 555 bp, synthetic construct
  misc_feature 1..555: note = Description of Artificial Sequence: Synthetic coding sequence
  source 1..555: mol_type = other DNA
atgcgagagtacaagctggtagttcttgggtccggcggagttgggaagtctgcattgaccgttcaattcgttcaaggcatattcgttgaaaagtatgaccccactatcgaagactcttatcgcaaacaggtggaggtggacgcgcagcaatgtatgctcgaaatcctcgacactgctggaaccgagcagttcacagctatgagggacctgtacatgaagaatggtcaggggtttgccctggtctactcgatcaccgcccagtctacttttaacgatttgcaggacctgagagagcaaattctgcgggtcaaggacactgatgacgttcccatgatcctggtcgggaacaagtgcgatctggaggatgaacgagtagtgggcaaagaacagggacaaaatcttgctcggcaatggaacaactgtgcttttctggaaagttccgctaagagcaaaattaatgtgaatgagatattttatgatctggtgaggcagatcaatcggaagacacccgtccccggtaaagcgcgaaagaagagttcttgtcagctcctctag

SEQ ID NO: 237943 - DNA, 99 bp, synthetic construct
  misc_feature 1..99: note = Description of Artificial Sequence: Synthetic coding sequence
  source 1..99: mol_type = other DNA
atgagggaatacaaacttgtggttttaggctctggcggtgtgggaaagtccgccctgacagtgcaattcgtacaggggatcttcgtcgaaaagtactag

SEQ ID NO: 237944 - DNA, 429 bp, synthetic construct
  misc_feature 1..429: note = Description of Artificial Sequence: Synthetic coding sequence
  source 1..429: mol_type = other DNA
atgcgggaatacaagctggtggtgctcggctctgggggagtcggtaaatcagcactggaacagttcaccgctatgagagacctgtatatgaagaacggtcaagggtttgctttggtatacagcatcaccgcccagtcaactttcaacgacctgcaggatctgagggagcaaatactgcgcgtgaaagacaccgacgacgtacctatgatcctcgtggggaacaagtgcgacctcgaggatgagagagtggtcggcaaggaacagggccagaatctcgcccgtcagtggaataactgtgcctttctggaaagctctgccaagagcaagatcaacgttaacgagatcttctacgaccttgttagacagattaatagaaagactcctgtgcctgggaaggctcgcaaaaagagttcctgtcaattattgtag

SEQ ID NO: 237945 - DNA, 384 bp, synthetic construct
  misc_feature 1..384: note = Description of Artificial Sequence: Synthetic coding sequence
  source 1..384: mol_type = other DNA
atgagggaatataagctggtggtactgggcagcgggggagtaggaaagtcagcactgaccgttcagttcgttcaagggatctttgtagaaaaatacgaccctacaatcgaggacagctaccggaagcaagtggaagttgacgctcagcagtgcatgctggaaattcttgatacagctgggacggagcagttcacagcaatgcgcgatctttacatgaaaaacggacaggggttcgccctagtatactctattaccgcacagagcacattcaacgatttacaggatctgcgcgaacagatcctgagagtcaaagacactgatgatgtccccatgattctcgtaggaaataaatgtgatctagaggatgaaagggttgttggctag

SEQ ID NO: 237946 - DNA, 429 bp, synthetic construct
  misc_feature 1..429: note = Description of Artificial Sequence: Synthetic coding sequence
  source 1..429: mol_type = other DNA
atgagagagtacaaactggtggtgttagggagcggtggcgtgggcaaaagcgctctgactgtacaattcgtacaggggatctttgtggagaaatacgaccccacaatcgaggactcgtaccggaagcaagtggaagtggatgcccagcagtgtatgctggaaatccttgacaccgccggtaccgagcaattcactgctatgagagatctctatatgaagaacgggcagggattcgctttggtgtactctatcacagcacagtcaacttttaatgatctgcaggatctacgagagcagattttgcgggttaaagatacagacgacgttccgatgattctggttggcaacaaatgtgaccttgaggacgaacgtgttgttggcaaggaacagggccagaacttggataatggtaccaccgttcattcctag

SEQ ID NO: 237947 - DNA, 147 bp, synthetic construct
  misc_feature 1..147: note = Description of Artificial Sequence: Synthetic coding sequence
  source 1..147: mol_type = other DNA
atgcgagagtataagctcgtggtcttgggaagtggaggggtgggcaaatccgctctgaccgtgcagttcgtgcaggggatcttcgtcgagaagtatgatccaacaatagaagatagctaccgaaagcaggtcgaggtggacgcttag

SEQ ID NO: 237948 - DNA, 36 bp, synthetic construct
  misc_feature 1..36: note = Description of Artificial Sequence: Synthetic coding sequence
  source 1..36: mol_type = other DNA
atgcgtgagtataagttggtggtattgggatcctag

SEQ ID NO: 237949 - DNA, 264 bp, synthetic construct
  misc_feature 1..264: note = Description of Artificial Sequence: Synthetic coding sequence
  source 1..264: mol_type = other DNA
atgcgggaatacaagctggtagtgcttggctccgggggagttgggaagtcggccctgaccgtacaatttgtgcagggtatttttgtcgaaaagtatgatcctacaatagaagactcttaccgaaaacaagtggaagtcgacgcccagcagtgcatgcttgagatcctggacacggctggcaccgagcagttcaccgccatgcgcgacctgtacatgaagaatggccaagggtttgcattggtgtactcgatcaccgcgcaatag

SEQ ID NO: 237950 - DNA, 555 bp, synthetic construct
  misc_feature 1..555: note = Description of Artificial Sequence: Synthetic coding sequence
  source 1..555: mol_type = other DNA
atgagagaatataaactcgttgtactgggctctggaggagtcggaaagtccgccctgacagttcagtttgtccaggggatctttgtggaaaaatacgatccgaccatagaggacagctacaggaagcaggttgaggttgacgctcagcagtgcatgcttgaaatcctcgacaccgcaggcactgagcagtttaccgccatgagagatctgtatatgaagaacggacagggcttcgcccttgtgtatagcattacagcgcagagtaccttcaacgatctgcaggaccttagggaacagatcttgagagtgaaagacacagatgatgtgccaatgattctagttgggaataaatgtgaccttgaagacgagagggtggtcggtaaagagcagggtcagaacctcgcgcgtcaatggaacaattgcgcttttctggagtcctcagccaagagcaagataaacgtaaatgagattttctacgatctggtgaggcagattaaccggaagacacccgtgccaggcaaagcaagaaaaaaaagttcctgtcagctgctgtag

SEQ ID NO: 237951 - DNA, 306 bp, synthetic construct
  misc_feature 1..306: note = Description of Artificial Sequence: Synthetic coding sequence
  source 1..306: mol_type = other DNA
atgcgcgaatacaaacttgttgtccttggtagcggcggagtgggaaagagcgcattgacagtacaatttgtgcaggggattttcgtcgagaaatatgatcctacaatcgaagattcctatagaaaacaagtcgaagtcgatgcacaacagtgcatgttagagatcctggacaccgccggaacggagcagttcactgctatgcgggatctatatatgaaaaacggccagggctttgccctggtatattccattacagcccagtccacgttcaacgacctccaggatctccgggaacagatactgtag

SEQ ID NO: 237952 - DNA, 162 bp, synthetic construct
  misc_feature 1..162: note = Description of Artificial Sequence: Synthetic coding sequence
  source 1..162: mol_type = other DNA
atgagagagtacaaacttgtggtactgggaagcggcggtgtggggaagtctgcactcaccgtgcagtttgtccagggcatctttgtggagaagtacgacccaactattgaggactcttaccggaaacaggtggaggtcgatgcacaacagtgtatgctctag

SEQ ID NO: 237953 - DNA, 429 bp, synthetic construct
  misc_feature 1..429: note = Description of Artificial Sequence: Synthetic coding sequence
  source 1..429: mol_type = other DNA
atgcgggaatacaaactcgttgtccttggctctgggggtgtcgggaagtcagccttggagcagttcacagccatgcgggacctgtatatgaagaacgggcagggcttcgcactggtctattccatcactgctcagtcaacattcaatgacctgcaggacctgcgggagcagattttacgggtgaaagacaccgacgatgtgcccatgattcttgtcggcaacaaatgcgacctggaagacgagcgggtggtcggcaaagagcagggccagaatttggctcgtcagtggaacaattgtgctttcctcgaatcttcagcaaaaagtaagatcaacgttaatgagattttctacgaccttgtaagacagataaaccggaaaacacctgtcccaggcaaggccaggaagaaatcatcatgtcagctgctgtag

SEQ ID NO: 237954 - DNA, 498 bp, synthetic construct
  misc_feature 1..498: note = Description of Artificial Sequence: Synthetic coding sequence
  source 1..498: mol_type = other DNA
atgagggagtataagctagtggtactcggctccggtggagtgggaaaatcagccctgaccgtgcagttcgttcaggggatcttcgttgagaagtatgatccgactattgaagattcctaccgaaaggaacagtttaccgctatgcgcgatctgtatatgaagaacgggcagggctttgcccttgtctatagcattaccgcacagagcacattcaacgatctgcaggatctaagggaacagatcctccgtgttaaggacaccgacgatgtgcccatgattctggttggaaataagtgcgatctcgaagatgagagagtggtagggaaagagcagggacagaacttggctcgacagtggaataattgtgcttttctggagtcatcagctaaatctaagattaatgtcaacgaaatattctatgatctggttcgtcaaatcaaccgcaagacaccggtgcctggtaaggctcggaaaaagtcttcctgtcaactactctag

SEQ ID NO: 237955 - DNA, 420 bp, synthetic construct
  misc_feature 1..420: note = Description of Artificial Sequence: Synthetic coding sequence
  source 1..420: mol_type = other DNA
atgcgggagtataagctggtggtgcttgggtccggcggagtggggaagagcgcactgacggtgcaattcgtccagggcattttcgtggagaaatatgatccgaccatcgaagattcatatagaaaacaggtggaggttgatgcgcagcaatgcatgcttgagatcctggataccgctgggaccgaacaatttactgctatgagggacctttatatgaagaatggacagggattcgcgttagtgtatagtatcacagcccagagtacattcaatgacctccaagatcttcgcgagcaaatcctgcgggtaaaggacactgacgatgtcccaatgatcctcgtaggaaataagtgcgacttagaggacgaaagggttgtaggcaaagagcagggtcagaatcttgctaggcagtggaattag

SEQ ID NO: 237956 - DNA, 282 bp, synthetic construct
  misc_feature 1..282: note = Description of Artificial Sequence: Synthetic coding sequence
  source 1..282: mol_type = other DNA
atgcgagagtacaaactggtcgtgttgggttctggcggagtcgggaagtctgctctgactgtgcagttcgtgcaaggcatatttgtcgaaaagtatgatcctaccatcgaagattcataccgtaagcaggtggaagtcgatgcacagcagtgcatgctggaaatactcgatacagccggaactgagcagttcactgccatgcgcgatctgtatatgaagaacggccaggggttcgctttggtttactccattacagcccagagcacttttaatgatctttag

SEQ ID NO: 237957 - DNA, 36 bp, synthetic construct
  misc_feature 1..36: note = Description of Artificial Sequence: Synthetic coding sequence
  source 1..36: mol_type = other DNA
atgagagagtacaaacttgtagtgcttggttcttag

SEQ ID NO: 237958 - DNA, 297 bp, synthetic construct
  misc_feature 1..297: note = Description of Artificial Sequence: Synthetic coding sequence
  source 1..297: mol_type = other DNA
atgcgcgagtacaaactcgttgtcctgggcagtggcggtgttggcaagtctgccctcaccgtgcaatttgtgcaggggatttttgtggagaagtatgatcccacgatcgaggatagttaccggaaacaggttgaagtggatgcacagcaatgcatgctggaaatcctggataccgccggaaccgaacagttcaccgcaatgagagatctttacatgaaaaatgggcagggcttcgctctcgtttatagcatcacagcccagtcgacctttaacgacctccaggatcttagagaatag

SEQ ID NO: 237959 - DNA, 414 bp, synthetic construct
  misc_feature 1..414: note = Description of Artificial Sequence: Synthetic coding sequence
  source 1..414: mol_type = other DNA
atgcgcgagtacaaactcgttgttcttgggtctggcggagttgggaagtcagctcttacagtgcaatttgtgcagggtatttttgtggaaaagtacgaccctactattgaggattcctaccgcaaacaggttgaggtagatgcacagcagtgtatgctggagattctcgacaccgcaggcactgtgcccatgatcttggtggggaacaagtgcgacctggaggacgagagggtggtgggaaaagaacagggtcaaaacctcgcacgtcagtggaataactgtgcttttttggagtcatctgccaaatcaaaaattaacgtgaacgagatcttctacgaccttgtgcggcaaatcaataggaagacacctgttcccggtaaggccaggaaaaaaagctcatgccagctgctctag

SEQ ID NO: 237960 - DNA, 357 bp, synthetic construct
  misc_feature 1..357: note = Description of Artificial Sequence: Synthetic coding sequence
  source 1..357: mol_type = other DNA
atgagggacctgtatatgaagaatggccaaggcttcgccctggtctattcaatcacagcccagtccactttcaacgacctgcaggatctgcgagagcaaattcttcgtgttaaggacacggatgacgtccctatgatcttagtgggtaataagtgcgacctcgaagatgagcgtgtggtggggaaggaacaaggccaaaatctggcgcgacaatggaataactgtgcgtttctggagagtagcgctaagagcaagatcaacgtgaacgagatattttacgacctggtgcgccaaatcaaccgcaagacaccggtcccaggaaaggccaggaaaaagtcctcctgccagctgctttag

SEQ ID NO: 237961 - DNA, 369 bp, synthetic construct
  misc_feature 1..369: note = Description of Artificial Sequence: Synthetic coding sequence
  source 1..369: mol_type = other DNA
atgagggagtataagctcgtggttcttggatctggtggcgtgggaaaatcagcactgactgtccagtttgtgcaaggtatcttcgttgaaaagtatgaccctaccatagaagatagctatagaaagcaggttgaagtcgacgctcagcagtgtatgttagaaattttggacactgcaggtacagaacagtttaccgccatgcgagacctctatatgaaaaatggacagggctttgctttggtgtatagtatcaccgctcagtccaccttcaacgacctgcaggatctacgagaacagatcctgagagttaaggacacggatgacgttccaatgatccttgttggaaacaagtgcgacctcgaagactag

SEQ ID NO: 237962 - DNA, 258 bp, synthetic construct
  misc_feature 1..258: note = Description of Artificial Sequence: Synthetic coding sequence
  source 1..258: mol_type = other DNA
atgcgagaatacaaattggtcgtgttaggttccgggggtgtcggtaagagtgctctcactgtccaattcgtccaaggtatcttcgtggaaaagtacgacccgacaattgaggattcttatagaaaacaggtcgaggtagacgcccagcaatgcatgctggaaatcctggacacggctggcacagaacagtttacggccatgagggacctgtacatgaaaaacggtcaggggttcgcattagtctattctatcacttag

SEQ ID NO: 237963 - DNA, 552 bp, synthetic construct
  misc_feature 1..552: note = Description of Artificial Sequence: Synthetic coding sequence
  source 1..552: mol_type = other DNA
atgagggagtataaggtcgtggtcctgggatccggcggtgtgggcaagtccgcgctgactgtgcagttcgtcacaggaacttttatagagaagtacgaccccaccatcgaggacttttaccgtaaggagattgaagtggactcctctccctccgtgttagaaatactggataccgccggaacagagcagttcgccagtatgagggacttgtacatcaaaaacggccaggggtttattctcgtttatagccttgtcaaccaacagagctttcaggatattaaacctatgcgagaccagataattagggtcaaacgatacgagaaagtcccggtgattctggtggggaacaaggttgacttagaatctgaacgcgaagtatcctctagcgaaggcagggctctcgccgaggagtggggctgcccatttatggagacgagtgcaaagagtaaaactatggtagatgagctcttcgccgagatagtgcgccagatgaactatgctgcacagccagataaggatgatccatgttgctctgcttgcaacatccagtag

SEQ ID NO: 237964 - DNA, 1671 bp, synthetic construct
  misc_feature 1..1671: note = Description of Artificial Sequence: Synthetic coding sequence
  source 1..1671: mol_type = other DNA
atgaatgagggagcacccggagactccgatctggagacggaagccagagtgccctggagtatcatggggcactgcctgcggacgggccaggccagaatgagcgctaccccaactccagcgggagaaggcgcacgcagagatgagctgttcggcatcctccagattctgcatcagtgcatacttagctctggggatgcttttgtgctgacgggggtctgctgtagctggcggcagaacggcaagccaccatactctcagaaagaggataaggaagtccaaacaggatatatgaatgcacagattgaaatcatcccctgtaagatttgcggagataagagctccggcatacactacggcgtaattacctgcgagggttgcaagggctttttccggaggtcacagcaatcaaacgccacctattcctgccctagacagaaaaactgtctcatagacaggacgtccaggaatcggtgtcagcactgtcggcttcagaagtgtctagcggtaggcatgtcgcgagatgccgtcaagttcggacggatgagtaaaaagcagagggacagcctgtatgcagaagtccagaagcaccggatgcaacagcaacagcgagaccaccagcaacagcctggagaggccgaacccttgacccctacttacaatatttcggctaatgggcttacagaactgcatgatgacctgtcaaattacattgacggacacactccagagggctctaaggccgacagcgccgtgtccagcttttatctggatatccagccctcccccgatcagtccggactggatattaacggcatcaaacccgagccaatatgcgactatacaccggcaagtgggtttttcccatactgtagttttacaaacggcgagacgtctcccacggtctcgatggccgaactggagcatttggcccagaatattagcaagtcccacctggagacctgtcaatacctgagagaggaactccaacagattacttggcagaccttcctccaagaggaaatcgaaaactatcagaataagcaacgggaagtcatgtggcagctgtgcgccattaagattaccgaggcaatccaatatgtggtggaatttgctaagcgtatcgatgggttcatggagctttgtcaaaatgatcagatagttctcttgaaagccggttccttggaagtggtctttatccgcatgtgccgagcttttgattctcaaaacaatacagtatacttcgacggaaaatacgcatctcccgacgtgtttaagagcctcggctgcgaagacttcatttcattcgtctttgagttcggcaaaagcctgtgcagtatgcatctgaccgaggatgagatagccctgttcagtgcattcgtcctgatgtccgccgacagatcatggttgcaggagaaggtgaaaattgaaaagctacagcagaaaatacagctagctctgcagcacgtgctgcagaaaaatcatcgcgaagacggcattctgactaaattaatctgtaaggtctcgacactgcgagccctttgcggtaggcacactgaaaagttgatggcattcaaggccatctaccctgacatcgtgagactgcacttcccccctctgtataaagaattgttcacatctgagttcgagccagccatgcagattgacggatag

SEQ ID NO: 237965 - DNA, 1647 bp, synthetic construct
  misc_feature 1..1647: note = Description of Artificial Sequence: Synthetic coding sequence
  source 1..1647: mol_type = other DNA
atgaacgaaggagctccaggtgactcagacttggagaccgaggctagagttccctggtcgatcatgggtcactgtctccggaccggccaggctcggatgagtgccaccccaaccccagcaggcgagggcgcaagaagctcctccacctgttccagcctgagccgtttgttctggtcacagctagagcacatcaactgggacggcgctactgctaagaacttcattaatttgcgcgaatttttcagtttcctgcttccggcacttagaaaggctcaaatcgaaatcatcccgtgtaaaatctgcggcgacaagtcttctggcatccactacggagttattacatgtgagggatgcaaaggattcttcagaaggtctcaacagtctaacgctacgtactcctgtcctagacagaagaactgcttaattgatcggacatcacggaatcgttgccagcattgcaggctccagaagtgcctcgcggtgggtatgagccgcgacgccgtgaaattcggacggatgtctaaaaagcagagagacagtctgtatgcggaggtgcagaaacatcgcatgcaacagcaacagcgggatcaccagcagcagcccggtgaagctgaaccacttaccccaacctacaatattagcgcaaatggcctcacggagctgcacgatgacctctctaattacattgacgggcacacccccgagggctccaaggccgacagcgccgtgtctagtttttacctcgacattcagccctcccctgatcagtcaggactggacataaacggcattaagcccgaacccatctgcgattatactcctgcctcaggcttcttcccttattgcagttttactaacggtgaaacttctcccacggtttccatggcggagctcgagcacctggctcagaatataagcaagtcacatcttgagacttgtcaatacttgcgcgaggagctgcagcagattacctggcaaacctttctccaggaggagatcgagaactatcagaacaaacagagggaagtgatgtggcagctttgcgctataaaaataactgaagccatccaatatgtggtggagtttgctaagaggatcgacggattcatggagctgtgtcagaatgaccaaatagtccttctgaaggctggttctctggaggttgtattcatacgaatgtgtagagctttcgactcacagaataataccgtttacttcgacgggaaatacgctagccctgatgtgtttaaaagcctaggctgcgaggatttcatcagttttgtttttgagttcggcaagtcactatgcagcatgcacctgaccgaggacgagatcgcgctcttcagtgcctttgtactcatgtcagccgaccgctcgtggttgcaagagaaggtaaaaattgagaagctgcagcagaagatccaactggcattacaacatgtcctgcagaagaatcaccgagaagatggcatactgacaaagttaatttgtaaggtcagcacattaagagcactgtgtggcagacacacggagaagctgatggccttcaaggccatttaccccgacatcgtgcggctgcactttccgccactatacaaggagctctttacctcagagttcgagcctgccatgcagattgatggctag

SEQ ID NO: 237966 - DNA, 1572 bp, synthetic construct
  misc_feature 1..1572: note = Description of Artificial Sequence: Synthetic coding sequence
  source 1..1572: mol_type = other DNA
atggagagcgcgccagcagctccggacccagccgcatctgagccaggctcctccggagccgacgccgctgccggatccagggagaccccgttgaatcaggaatctgcccgaaagtcagagccaccggcaccagtccgcagacaatcctattcaagtacatcccgtggtatttccgttactaagaaaacccataccagccagattgaaatcatcccatgcaaaatctgtggcgacaaatcttccggaatccactatggtgtaatcacctgcgaaggttgtaagggattctttcgacggagccagcagagcaatgccacctacagctgtccaagacaaaaaaattgcctcatagacagaacttcccgcaaccggtgtcagcactgtcggctgcagaagtgcctggctgtgggcatgtctagggacgcagtaaagtttgggcgaatgtcgaaaaagcaaagagactctctctatgccgaggtccagaagcatagaatgcaacagcagcaacgggaccatcagcagcaaccaggagaggcagaaccactaactcctacctacaatatctcagcaaatggcctcaccgagctgcacgacgacctgtctaactacattgatggtcacactcccgaaggctccaaggctgacagtgctgtcagcagtttttacctggacatccaaccttcccccgatcaaagtggcctggacatcaacggcatcaaaccagagccaatttgtgactataccccagccagcggtttcttcccttattgctcattcactaacggcgagacttctcccaccgtgtctatggccgagctcgagcacctggcgcagaacatcagcaaatcacacctagagacgtgccagtatctgcgggaggaactgcagcagattacatggcagacgttcctgcaggaggagattgagaattaccagaacaaacagagggaagtaatgtggcagttgtgcgcaataaagatcactgaggcgatacaatacgtcgtggagtttgccaagagaattgacgggtttatggagctgtgccagaatgatcagattgtcttgctcaaggcaggctcgctggaggtcgtatttattcgaatgtgcagagcctttgacagtcagaataataccgtgtattttgacggcaaatacgccagtcctgacgtcttcaaatcccttggttgcgaagacttcatctcttttgtatttgaattcggcaagagtttgtgttccatgcatctgaccgaagatgaaatcgcactgttcagcgcttttgtgctgatgtctgcagatcgctcatggctccaagagaaagtcaagatcgaaaagttacagcagaaaatccaactggctttgcagcatgtgctacaaaagaaccatcgggaagatggcatcttgaccaaactgatctgtaaggtctctaccctacgtgctctgtgcggacgtcataccgaaaagctgatggcttttaaggcaatctaccccgatatcgtgcgattgcacttccccccactgtacaaggagctgttcaccagcgagtttgaaccagctatgcagatcgatggttag

SEQ ID NO: 237967 - DNA, 1407 bp, synthetic construct
  misc_feature 1..1407: note = Description of Artificial Sequence: Synthetic coding sequence
  source 1..1407: mol_type = other DNA
atgatgtatttcgtaatcgccgcaatgaaggctcagattgagattattccatgcaaaatctgtggcgacaagtctagcggaatccactacggggtcattacctgcgaaggctgtaaagggtttttcagaaggtcccagcagagtaatgcgacctatagctgtcccagacaaaagaactgcctcatcgaccggacctcacgaaaccgatgccagcactgtcggttgcaaaaatgtcttgccgtagggatgtcacgcgatgcggtgaaattcggccgtatgagcaaaaaacagcgggattctctgtacgctgaggttcagaagcataggatgcagcagcagcagagggatcatcagcagcagcctggggaggccgagcccttaacccctacgtacaacatatctgctaacggactgaccgaactgcatgacgacctgagtaattacattgacgggcacaccccagaagggtctaaggcagattccgcagtttctagtttctatttggacatccagccttcccccgaccagtctgggctggacatcaatgggattaagcccgaaccaatctgcgattatacacctgcaagtggctttttcccctattgcagtttcaccaatggagaaaccagcccaacagttagtatggccgagcttgaacacttggcacaaaacatttcgaagagtcacctggagacgtgccagtacttacgtgaagagctgcaacagataacttggcagacctttctgcaagaggagattgagaactatcaaaacaaacagagagaggtcatgtggcagctgtgcgcaattaaaatcacagaggccattcagtatgtagttgagtttgctaagcggattgacggcttcatggagctttgtcaaaatgaccagattgttctgctaaaggcgggatctcttgaagtggtgtttatccgaatgtgccgagccttcgattcccagaataatacggtgtattttgatggtaagtacgcctctccagatgttttcaaaagtttggggtgtgaagactttataagcttcgtgttcgagttcggaaaatctctatgctctatgcacctcacagaggacgaaattgccctcttctctgcatttgtcctcatgtctgccgatcgcagctggcttcaggaaaaagtgaagatcgagaagctgcaacagaaaatccagctagctctgcagcacgtcttacaaaagaaccatagggaggacggaatcctgacaaagctaatctgtaaggtgtccacactgagggccctgtgcggtagacacacggaaaaactgatggcctttaaggctatataccccgacattgtgcgactccacttcccacctctgtacaaggagctgttcacctcagaattcgaacccgctatgcagatagatggatag

SEQ ID NO: 237968 - DNA, 1557 bp, synthetic construct
  misc_feature 1..1557: note = Description of Artificial Sequence: Synthetic coding sequence
  source 1..1557: mol_type = other DNA
atggatcgcgcaccgcagaggcagcaccgcgcttcccgcgaactccttgctgcaaagaaaacacatacgagtcagattgaggtcatcccctgcaagatctgcggcgataagtcttccgggatacactatggtgttatcacatgcgagggctgcaagggcttcttccgcagaagtcaaagatgcaacgcggcttactcttgcaccaggcagcagaattgccctatagatcgaacaagcagaaacagatgccaacattgtcgcctacagaagtgcctcgcgctaggtatgagcagagatgctgtgaagttcggaagaatgagtaaaaagcagagagactccctgcacgcggaagtacagaaacagctgcagcagcggcagcagcagcagcaagagcctgtggtgaagacaccaccagctggtgcacaaggcgcagatacgctcacgtacactctgggattgcccgatggccagctgccattgggtagtagtccggatctgcctgaggccagcgcttgccctcctggcctcctgaaggcatcgggctccggcccaagctacagcaataacctggctaaggctggcttaaacggagccagttgtcacctggagtacagcccagaaagaggaaaggctgaaggtcgggagagtttttattctactggtagccagctcaccccagacagatgcggtctgaggttcgaagaacaccgccaccctggcctaggcgagttgggtcagggacctgatagttacggctcccccagctttagatccactcctgaggccccatacgctagccttaccgagatagagcacctggttcagagcgtgtgtaagtcctatcgagagacatgccagctgcggctggaggatctgttacgccagaggtctaatatcttttcacgggaagaagttactggttatcagcggaaatccatgtgggagatgtgggagaggtgcgcccaccacctgaccgaagctattcagtacgtcgtggaatttgcaaagcgattgtccggattcatggaactgtgccagaacgaccagattgtgctgctcaaggccggtgccatggaggtagttcttgtccggatgtgtagggcttataacgccgataacagaacagtcttctttgagggaaaatatggagggatggagctgttccgggctctgggctgcagcgagctgatctcaagcatcttcgatttcagccattccctgtctgccctgcacttctctgaagacgagattgccctgtacactgcgcttgtgctgattaacgcccatagacctgggctgcaggagaagagaaaggtggagcagcttcaatataatctggagttggcttttcaccatcatctatgcaagactcaccgccagtcgatcctcgctaagctccctcccaaggggaagctgcgtagcttgtgctctcaacacgttgagcgtctgcagatcttccaacacctccacccaatcgttgttcaggccgcttttcccccactctataaagagctgttttcaaccgaaaccgagtccccggtgggactgtccaagtag

SEQ ID NO: 237969 - DNA, 1494 bp, synthetic construct
  misc_feature 1..1494: note = Description of Artificial Sequence: Synthetic coding sequence
  source 1..1494: mol_type = other DNA
atgcgaacccagattgaggttataccgtgcaagatatgtggagataagtccagcggaatccattacggtgtgatcacatgcgaaggttgtaaagggttctttcgcagaagccagcggtgcaatgctgcttattcatgtactcgtcagcaaaattgcccaatcgatagaacctccagaaataggtgtcagcactgccgtctgcagaagtgtctggccctggggatgtcgagggacgcggtgaaattcggacgcatgagcaagaaacagagggacagcctgcacgccgaagtccagaaacagctgcagcagcgccaacagcagcagcaagagccagtagtcaagacacccccagccggagctcagggggcagatacactcacctataccctcgggctccccgacgggcaactcccactgggttcctctccggacctgcctgaagcttcggcttgtcccccaggcctgttgaaggcttccgggtccgggccttcctacagcaacaaccttgccaaggcaggcctcaacggagcttcatgccatctagagtacagtcccgagagaggcaaggctgaagggcgagagagcttctatagcactgggagccagctgaccccagatagatgtggtcttcgattcgaggagcaccgccaccctggattaggagagctgggccaaggcccagatagctatggctctcccagcttccgctccacaccagaagccccatatgcgtcactgacagaaatcgaacacctggttcaatctgtgtgtaaatcctatagagagacatgccaactgaggctggaagacctgttgcgtcagagatccaacattttctcccgggaggaagtgacgggatatcagaggaaatcgatgtgggagatgtgggaaaggtgcgcacatcatctgaccgaggccatccagtatgtcgtggagtttgcgaaacggttgtctggtttcatggaactatgtcagaacgaccagatcgtgctcctgaaggctggagctatggaggtggttctggtgcggatgtgccgggcatataacgccgacaacagaactgtcttcttcgaggggaaatatggtggcatggaactgttccgcgcacttggttgctccgagctcattagctccatcttcgacttttcccacagcctgagcgctctacacttcagtgaggatgagatcgccctctataccgccctggtcctgattaatgcccatcgccctgggttgcaggaaaagcggaaagtggagcagcttcagtacaacctggagcttgcttttcatcatcacctgtgtaagacacatcgacaatctattttagctaagctccccccaaagggtaagcttcgttctctttgtagtcaacatgtagagcgtttacagatttttcagcacctccacccaattgtcgtgcaggcagcctttccaccgctgtacaaagagctgttcagtacagagaccgaaagtcctgtgggtctctccaagtag

SEQ ID NO: 237970 - DNA, 1719 bp, synthetic construct
  misc_feature 1..1719: note = Description of Artificial Sequence: Synthetic coding sequence
  source 1..1719: mol_type = other DNA
atgtggggaacaggaccttccgcaggcaaggaccgcatgtcaggtcgcccatggccacacccttggagcaagtctgggacccccagtgaacaggatcgtcgggcaacggggctggtctcatgcgagcacggcggtggaaagttcgagggccagtctcaccaggctcccggacccccagggggtggaagaactgggtgtttggagctgctggctgccaaaaaaactcatactagtcagattgaggtgatcccctgcaaaatttgtggggacaagtctagtggaatccactacggcgtgattacctgtgagggatgtaaaggcttcttccgtcgctctcagcgttgcaacgccgcatactcctgcactcgccagcaaaactgtccgattgatcgcacctcaaggaatagatgtcagcattgcaggctgcagaagtgcctggctcttggcatgtctagagacgcggtgaagtttgggaggatgagcaaaaaacaaagggattcattgcatgctgaggttcagaagcaactgcagcagcgtcagcagcagcagcaggagccagtcgtgaagaccccgcctgccggtgcacagggcgctgacaccttaacatacaccctgggcctacccgacgggcagctccccttaggtagctccccagatctcccggaagcctctgcatgcccgcctggcctgctgaaagctagtggaagtggacccagctactcaaacaatctagcgaaggcagggctcaatggggcttcttgccacctggagtactcacctgagagaggcaaagcggaagggagggaatccttctattctactggcagccagttaactccggacagatgtgggctgcgcttcgaggagcatcgacaccctgggttgggagagcttggacagggacccgatagttatggatctccaagcttccggagcacccctgaggcaccatatgcttcactgacagagattgaacatctggtccagtccgtgtgcaagtcctaccgcgaaacctgccagctgcgcctggaagatctgctgcgccaaagatcaaacattttcagcagagaggaggtcacagggtaccagcgcaagagcatgtgggagatgtgggaacggtgtgcccaccacctgacagaggctatacagtatgtggtggaattcgccaaacgtctgtctggattcatggagctctgccagaacgatcagattgttttgctgaaagcaggagccatggaagtggtgctggtcagaatgtgtcgcgcatacaacgctgacaatagaactgtgttctttgagggcaagtatggcggaatggaactgttcagagccttaggatgctctgagttaattagttcaatcttcgatttttctcactcactgtcagctctgcatttcagtgaagacgagatcgcgctgtacaccgcgctagtattgatcaatgcacaccgcccaggccttcaggagaagagaaaggtcgagcagctacagtataatctggaactggcgtttcaccaccacctgtgcaagacacacagacaaagcatccttgctaagctgccacctaaaggaaagttacgcagtttgtgctcacagcatgttgagaggctccagatttttcagcatttgcaccctattgtggtgcaggccgcattccctcctctgtacaaggagctgttcagcacagagaccgaatcgcccgtaggcttgtccaaatag

SEQ ID NO: 237971 - DNA, 2835 bp, synthetic construct
  misc_feature 1..2835: note = Description of Artificial Sequence: Synthetic coding sequence
  source 1..2835: mol_type = other DNA
atgcttgattccttcagtcaggagtccaccctgccctttcgggaggccagaaaaagaacaagctttcagccagtgcaggtgtggcgaaattttacagcctctcaaacaactgagagccctgcttgtagcggggcaagcctgggcgagatgacagcttggactatgggcgcacggggactggacaaaagaggcagcttctttaagttaattgatactatagcctccgagatcggggagctgaagcaggaaatggtgcgtacagatgtgaatcttgagaatggtctggaacctgcagaaactcactctatggttcgccacaaagatggcggatactctgaggaagaagacgtgaagacttgcgctagagactccgggtacgactccctttcgaatcgtctgtccatactggaccgtttgctgcatacgcaccccatttggctgcagctgtctctaagcgaagaggaggccgctgaggttctgcaggcccagccccctggaattttcctggtccacaagtcaacaaagatgcagaaaaaagtcctgagtctgcgtctgccgtgcgaatttggagctccattaaaagagttcgccattaaagaatctacctacacattctcattggaaggaagcggcatcagcttcgctgacctgttccggctgatcgctttttactgcattagccgcgatgtgctgcccttcactttaaaactaccctatgcgattagtacagctaagtcagaagcacagcttgaagagctcgctcagatggggctgaatttctggtcctctcctgctgactctaaacccccaaatctgcctccaccacaccgacctttgtcttctgacggagtgtgtccggctagtctcaggcagctgtgcctcatcaacggtgtccactcaatcaaaacaagaacacctagcgagctcgaatgctcccagacaaatggcgcactctgttttatcaatcctcttttccttaaagtgcactcacaggacctctctggaggactgaagcgacctagcactcgcacaccaaatgcaaacggtactgaacggacccgcagccctccccctcgaccgcctccgcctgcaataaattctctgcataccagtcctagattggccagaactgagacccagacatccatgcctgagactgttaatcacaataaacacggcaacgtcgccctgcccggtacaaagcctacccctatacccccacccaggctgaaaaaacaggcttcattcctggaagctgagggcggagccaagaccctgtcaggtggccgacccggtgcgggtcccgaactggaactgggcactgccggaagcccaggaggagcacctcccgaagctgctccgggagactgcacacgggcaccccctccatcttccgaatcaagacctccttgccatggaggccgtcagcgattgtcagatatgtcaatcagcacgtcatcgagcgactctttggagttcgatcggtccatgccactgttcgggtatgaagccgacactaactcgtcccttgaggactatgaaggggagtctgatcaggaaactatggcccctcctatcaagagcaagaagaagaggagttcatcatttgtccttcctaagttggttaaaagccagttgcaaaaggtttccggcgtattctcctcgttcatgacccccgagaaacgaatggttaggaggatcgctgagctcagcagggacaagtgtacatattttggctgcctcgtgcaggactacgtgtctttcttacaggaaaacaaagaatgtcatgtgagctccaccgatatgctgcagaccattagacagttcatgactcaggttaagaattacctctcacaaagctccgagctcgatcccccaatcgaatcgctgatacctgaggaccagatcgacgtggtactggaaaaggccatgcacaagtgtatactaaaaccattgaaagggcacgtggaagcgatgcttaaagatttccacatggctgacggttcatggaagcagctcaaagagaatctccagctggtgaggcaacgtaatcctcaagagctgggcgtctttgcccctaccccagacttcgtggacgtggagaaaatcaaggtgaaattcatgaccatgcagaaaatgtatagtccagagaagaaagtgatgctgttgttaagagtgtgcaagctcatatacaccgtcatggagaacaacagcggcagaatgtatggagcagatgattttctgcccgtcctgacgtacgtgatagcccagtgcgacatgctggagttggacacagaaatcgaatacatgatggagctcctggatccatctcttttgcatggggaagggggatactatctaacaagcgcttacggagccctatcactcatcaaaaactttcaggaagagcaggcagcaaggctattgagctccgagactagagacacattgaggcagtggcacaagcggcgtaccacaaacagaaccattcctagtgttgatgatttccagaactacctgcgagtggcttttcaggaagtgaattccggctgcacaggcaaaaccctacttgttcggccttacatcacaaccgaggatgtgtgtcagatctgtgctgaaaagtttaaggttggagacccggaggaatattctctcttcttatttgtcgacgaaacctggcagcaattggccgaggatacttatccgcagaaaattaaagctgagcttcatagtcgcccacagccacatatttttcacttcgtctacaagaggattaagaatgacccctacggaataatattccaaaacggcgaagaagacctaacaacatcctag

SEQ ID NO: 237972 - DNA, 1389 bp, synthetic construct
  misc_feature 1..1389: note = Description of Artificial Sequence: Synthetic coding sequence
  source 1..1389: mol_type = other DNA
atgacagcctggactatgggcgcacgcggattggataaacggggatctttcttcaaattgatcgacaccattgcatccgaaattggagagctgaagcaggaaatggttcggaccgacgtgaacttagagaacggtctggagccggctgagacccactcgatggtcaggcacaaggacggtgggtattccgaggaagaggacgtaaaaacatgcgcgagggatagcggttacgatagcctctcaaataggttgagcatcttagatagactgctgcatacacacccaatctggctgcagttatcactgagcgaggaagaggccgctgaggtcctccaggcacaacccccaggaatttttctcgtgcataaatccaccaagatgcagaaaaaggttctcagtctgcggttgccatgcgaattcggtgcaccgctgaaggagttcgccatcaaggaatctacatacaacgtagtgctggaaaaggctatgcataaatgcatcctcaagccacttaagggacatgtggaggctatgctgaaagattttcacatggcagacggttcatggaagcagctgaaagagaatttgcagttggtaaggcagcgcaatccacaggagctcggcgtgtttgcaccaactcccgacttcgtggacgtggagaagatcaaagttaagttcatgacaatgcaaaagatgtatagcccagagaaaaaggtcatgctactgcttcgggtatgcaagctgatctatactgttatggaaaataattccggcaggatgtacggcgctgatgactttctgcctgtccttacttatgtgatcgcccagtgtgatatgctagaattagataccgaaatcgaatatatgatggagctgctggatccctccttactgcacggcgaagggggatactatctgaccagtgcctacggcgctctcagcctcattaagaatttccaggaagagcaggccgcaagactgctttcttctgagacaagagacacacttcggcagtggcataagcgtaggactaccaatcgaacgatcccttccgtagatgatttccaaaactatctaagagtggccttccaggaagtgaactccggatgtacaggcaagaccttgttggtccgtccctatattaccaccgaggacgtgtgtcaaatctgtgccgaaaaatttaaggttggcgaccccgaagaatacagtttatttctgttcgttgacgagacctggcagcaattagcggaggatacctacccacagaaaattaaggctgaactgcacagcaggccccagccgcacattttccattttgtgtacaagagaataaagaacgatccctacggcatcatctttcaaaacggggaggaggacctcacaacaagctag

SEQ ID NO: 237973 - DNA, 717 bp, synthetic construct
  misc_feature 1..717: note = Description of Artificial Sequence: Synthetic coding sequence
  source 1..717: mol_type = other DNA
atgtcctccgggtattcttctcttgaggaagacgccgaagattttttcttcaccgctagaacctcattctttcgcagagcaccacagggaaaacccagatcgggacaacaagatgttgagaaggagaaggaaacacatagctatctgagcaaagaggagattaaggaaaaggttcacaaatataatctagccgttactgataagctgaagatgacactcaactcgaatggcatttacaccgggtttatcaaggtgcaaatggaactatgtaagccccctcaaacttccccaaattctggcaagttgtccccttcctctaacggatgtatgaatacactgcatatcagctctactaacacggtcggggaagttatcgaggccctgctgaaaaaattccttgtaaccgaatcccctgcaaagttcgccctctacaaacggtgccaccgtgaggatcaggtgtacgcctgtaaactctcagacagggaacatcccctgtatctgcgtttagtggccggaccaaggacagataccttgtcgttcgtgttgagagaacacgagatcggagagtgggaagcctttagcttaccagagctgcaaaactttttgcgtatcctggacaaggaggaagatgagcagctgcaaaacttgaagagacgatacacagcctacaggcagaagctcgaggaggccctgcgcgaggtgtggaagccagattag

SEQ ID NO: 237974 - DNA, 507 bp, synthetic construct
  misc_feature 1..507: note = Description of Artificial Sequence: Synthetic coding sequence
  source 1..507: mol_type = other DNA
atgaccttgaatagtaacgggatttacaccggcttcattaaagtacagatggagttgtgcaagcctccccagacaagtcccaatagcgggaaactatcaccatcctctaacggttgcatgaacacactgcatatttcttccactaataccgtgggggaagttatcgaggcacttttgaagaagttcctcgtcacagaaagtccagccaagttcgcattatacaagcgatgccatcgggaggaccaagtttacgcctgcaaacttagcgatagggagcaccctctgtatttgcggctcgtggcagggccacggacagacactctctctttcgtgctcagggaacatgagataggtgaatgggaagccttcagccttcctgagttgcagaactttctgcgaatcttagataaggaagaggacgaacaactgcagaatctaaaaagaaggtacacagcttatagacagaagcttgaggaggccctgcgagaggtatggaaacctgactag

SEQ ID NO: 237975 - DNA, 717 bp, synthetic construct
  misc_feature 1..717: note = Description of Artificial Sequence: Synthetic coding sequence
  source 1..717: mol_type = other DNA
atgagcagcgggtattcgtccctcgaagaggatgctgaggacttctttttcactgcacgcacctcttttttccggagagccccacagggtaagccacggtccggccagcaggatgtcgagaaggaaaaagaaacccatagttacttgtcgaaggaggagattaaggagaaagtacacaagtacaatctcgcggttacggataagctgaaaatgactctcaattctaatggtatctacacaggctttattaaggtccaaatggaactgtgtaagccccctcagaccagtccaaattccgggaagctcagtccctcatctaacggatgcatgaacacattacatatttccagcactaatactgtgggagaagtgatagaagccctgcttaaaaagttcttggttacagaatcccctgcaaagtttgcactgtataaacgctgccacagggaagaccaggtgtacgcctgcaagctgtccgacagggagcatccgttgtacctgaggctcgtggccggacctaggaccgataccctttccttcgtcctgcgggagcacgagattggcgagtgggaagcttttagcctccccgagctgcagaattttctgagaattttagataaggaggaagacgagcagctgcagaacctcaagcgtcggtatacagcctacagacagaagcttgaggaagcgctccgggaggtttggaagccggattag

SEQ ID NO: 237976 - DNA, 1014 bp, synthetic construct
  misc_feature 1..1014: note = Description of Artificial Sequence: Synthetic coding sequence
  source 1..1014: mol_type = other DNA
atgacaatgatggcgcaccaatacccttcatggatcttcattaatgaaaaaacttttataaccagagaacagttgaattcactgttgaaaacctacaatatattttatgagaatcagaaaaacctccatatcctatacggggagaccgaagacggaaagctgatagttgagggtatgctcgatatcttctggggggttaagagaccgattcagctcaaaatccaagacgaaaaacccttcagctccttcacctcaatgaaatcgtccgacgtgttcagcagcaaagggatgacaaggtggggggaatttgatgacctgtacagaatctccgagctggatcgcactcagatcccaatgtcggagaaaagaaactcacaggaagactacctatcctaccattccaacaccctcaagccacacgcaaaggacgagccagatagcccagtcttgtatcgtaccatgagtgaagccgcactggttaggaagagaatgaaaccgttgatgatggacaggaaggaacggcagaagaatcgtgcctcaatcaacgggcacttttataatcatgaaacgtcaatttttattcctgcattcgaaagcgagactaaggtcagagttaacagcaatatgcgcactgaagaggtcatcaaacagctcctgcagaagtttaaaattgaaaatagcccacaggacttcgcgctccacattatttttgctacgggggagcaaagacggctcaagaagaccgacattccgctcctgcaacgtctcctgcagggaccttcggaaaaaaacgctcgcatctttttaatggacaaggatgctgaagagatttcgtccgacgtggctcagtatatcaattttcacttttctctccttgagtcaatcctacaacgcttgaatgaagaagagaaacgcgaaattcagaggattgtgaccaaatttaacaaggagaaggctatcatactgaagtgcctgcagaacaaactggtcataaagacggaaacaacggtgtag

SEQ ID NO: 237977 - DNA, 978 bp, synthetic construct
  misc_feature 1..978: note = Description of Artificial Sequence: Synthetic coding sequence
  source 1..978: mol_type = other DNA
atgctgtgggaggaaaccggtgccgctcccgctcctgcacgagcttcagatcttccctaccgcattcactttttaagcagcggtctgatcctcgtgaccaggcagctcactgaggatgggaagctgatcgtggaaggcatgctcgacattttttggggggtaaagcgccctatccagctaaagattcaggatgagaagcctttcagctcctttacgtcaatgaagagctctgacgtcttcagctccaaaggaatgacccgctggggggagttcgacgatctctaccggattagcgagctagaccgcacgcaaatcccaatgtcggaaaagaggaactcacaggaggactaccttagttatcacagcaacacactgaagccccacgccaaagacgagccagatagcccggtactgtacaggaccatgtcagaagccgctttggttcgaaaacgaatgaagccattgatgatggatagaaaggaacgtcagaagaacagggcctccattaacggccacttctataaccacgaaacatcaatttttataccagcctttgagagcgagactaaggtacgggtgaattctaacatgcggacagaagaggtcattaagcagctgttgcagaagttcaagatcgaaaattctccacaagacttcgcgcttcatatcatttttgctaccggcgagcaacgccgtctcaaaaaaaccgacatcccattactgcagcggttactacagggcccatcggaaaaaaacgcgcgtatcttcctcatggataaagacgctgaggagattagttcagacgtggcacagtacatcaactttcattttagtctcctggagtctatcttgcagcggctcaacgaagaggagaagcgggagatccagcggattgtcacaaagtttaacaaggagaaagccattatccttaaatgtctacaaaataagttggttatcaagacagagaccacagtgtag

SEQ ID NO: 237978 - DNA, 1110 bp, synthetic construct
  misc_feature 1..1110: note = Description of Artificial Sequence: Synthetic coding sequence
  source 1..1110: mol_type = other DNA
atgctctgggaggagactggtgcagccccagcacccgctagggccagtgatctcccttaccggatctcttccgatcatctcaaaaaagaggagaagatgaccatgatggctcatcagtatcccagctggatttttatcaatgagaagaccttcatcacaagagagcagttgaactccctgctgaagacctataacatcttttatgagaatcaaaaaaacctgcatatcctctacggtgagacggaggacggcaaactgattgtggaaggaatgctagacatcttctggggtgtaaagcggcctatccagctgaaaatccaggacgagaagcccttctccagtttcaccagtatgaaaagctcggatgtgttctctagcaagggcatgacaagatggggggagttcgatgatctgtatagaatatcagagctcgatagaacgcagattccaatgtctgaaaagagaaactcacaggaggactacttgtcctaccattctaatacactgaaaccgcatgcaaaagatgaaccagatagcccagtgctttaccggacgatgagcgaagctgctctagtgcgcaaaaggatgaagcccctgatgatggaccgcaaggaaagacagaaaaacagagccagtatcaacggacatttttacaatcacgaaacgtcaattttcatccctgcattcgaaagtgagactaaagtgcgggtgaactctaacatgaggacagaggaggtgatcaagcagctgcttcagaagttcaaaattgaaaactcccctcaggatttcgcactccacatcatcttcgcaacaggagaacaacgacgactgaagaaaacagatataccgctgctgcagagattgctgcaaggaccatccgagaagaacgcaaggattttcttgatggacaaagatgctgaagaaatttctagcgacgtggcacagtatatcaactttcactttagcctgttggagtctatccttcaacgactcaatgaggaggaaaagagggaaatacaacggatcgtaacaaaatttaacaaggagaaagcaatcatattgaagtgcctgcagaacaaactggtaattaagactgaaactacggtatag

SEQ ID NO: 237979 - DNA, 912 bp, synthetic construct
  misc_feature 1..912: note = Description of Artificial Sequence: Synthetic coding sequence
  source 1..912: mol_type = other DNA
atgaccatgatggctcaccaatatcccagctggattttcatcaatgagaagacttttatcacccgggaacagctgaactcactgctgaagacctacaatatattctacgagaaccagaagaacctgcacatcttatacggtgagacagaagatgggaagctgatagtcgaaggaatgttagatatcttctggggagtcaaacgcccaatacagcttaaaatccaagacgaaaagcctttctcttcttttacgtcgatgaaatccagcgacgtgtttagttccaaaggtatgactaggtggggcgagtttgatgatttgtaccgaatctcggagctggatcgtactcaaatccccatgtcggagaaacgtaatagccaggaagactatctgagctatcactccaacacacttaagccgcacgctaaagatgagccagattcccccgtcctttatcgcaccatgagcgaggcagcattagtgaggaagcggatgaaacccctgatgatggataggaaggaaaggcagaagaatcgcgcttccataaacgggcacttttacaaccatgaaattgagaattctccccaggattttgccctacacatcatttttgccactggggagcagagacggctgaagaaaacagacatacctttgttacagcgcttgttgcagggaccctccgaaaagaacgcacgcatttttctcatggataaggacgctgaagagatttcttccgacgttgcacagtatatcaactttcacttctccctgctggaaagcatactgcaaagacttaatgaggaagagaaacgtgagattcagcgtatcgtcactaaatttaataaggagaaggctatcattctcaagtgccttcaaaacaaactggttatcaagacagaaacaacagtgtag

SEQ ID NO: 237980 - DNA, 3141 bp, synthetic construct
  misc_feature 1..3141: note = Description of Artificial Sequence: Synthetic coding sequence
  source 1..3141: mol_type = other DNA
atgctgtccaggaccctgtcttacaagtatcgtgatctggactctacattttcctccctcggagcctcggacgatcccgctgaattatcaacccagctgagtgcacctggcgtcttaaaggtgttcggcgactctgtgtgtaccggaacccattacaagagcgttctggctaccggaacatccagcgctagggagctggttaaggaagctctggaaagatacgctctcgacccgaggcaagctggccagtatgtcctgtgtgacgtggtcggccaggccggagatgccggacagaggtggcaagcaaggtgttttcgcgtattcggggactccgaaaagcctttgctcatccaagaactgtggaagcccagagagggtctgtcccgccgatttgaacttagaaaacgtagcgatgtcgaagagctggctgcaaaagaggtggacacgatcacagctggcatcaatgcccaggcacggaggttacagcgcagtagagccaaaggaacgcctacgcctgcccttggtgacgccagaagcagccccccaccaaggcttagacgtacagttagcgaaaccagcctttctcctgtaaacgctctgccggctgccgcacaggggcctgaggaacccggacccgacgcaatgaggtacagtctttaccagtcccctcacctgctgttattgcaaggctattcgcagcagcatccaggcgtctgcgctcagcccggtccggctcatgggggacccgctgatccaagcaaacctagcattagcctgagcgctcctgacattctgcctctccattgtacaattcgacgccagcccctgcctgactcaggccaagccgctgggaggcttgtgctcgagccgatcccaggggctcatatttcggtgaacttctcagaggtaggccataggactgtggtgctccatcacggtgatctgctgagcttgggtctttactatctattgttgtttaaagatcccgctcaggctcagccattgcctgccagagcactcgctaggttaagagcagtgcctcagagttgtcggttatgtggtgccgcactgggagctcgtggagcagcctcccccacccaggcagcgcttccgcgacgccagcaactcctgctggaatttgagccgcacctggaggatactctgctccaacgtatcatgaccctgattgagccaggcggagacgaccacaagttgacccccgcttttttactctgcttgtgcatccaacactcggccacccatttccagcccggaacctttggacagctcttgttaaaaatcgccaggctgatacgcgagactgtctgggaaaagactaaggaactcgccgaaaagcaggcccaacttcaggagcctatatcgctcgccagctgtgccatggccgacctagtacctgaccttcagccgattctgttttggatgtccaacagtatcgagcttctgtacttcattcagcagaaatgcccgctctacatgcagagcatggaagaacagctcgacatcaccggatccaaggagagcctcttcagttgcactcttaccgcatctgaggaggctatggcggtgcttgaagaagtggttctgtacgcttttcagcagtgcgtttattatgtgtcaaagagcctgtacatatgtcttcccgcattgcttgaatgtccaccgtttcagaccgaaaggcgagagtcatggagcagcgccccagaactgcccgaggagttaaggagagtagtgtctgtgtatcaggccgctctggacttgctgcgtcagctgcaggtacaccccgaagtagcttctcaaatgttggcatacctgtttttcttctctggaacgctactcctcaatcagttgctggataggggcccatcactaagctgcttccattggcctaggggtgtccaggcttgcgctagattacagcaactcctggagtggatgcgttcagccggttttggagctgccggtgagcacttcttccagaaactgtcctgcaccctaaacttactcgctacgcctcgagctcagttgatacagatgagctggaccgcacttagagccgcattccccgctctcagcccagctcaactgcacaggttactgactcactaccagctggcttcagccatggggccaatgagtacttgggagcctggagcgcaggactccccggaagcttttcgctcagaagacgtactggaaagctatgagaacccaccccctatcgtcctgcccagcgacggcttccaggtggacctcgaggccaactgtctagacgattcgatatatcaacacttgctatacgtcagacactttctgtggggcctcaggagcagggcctcccctggatctcccggaaggccagggagcggggcttcacaacccgtttgccccgagggaatgcatcacgtggttctcgatggtcatctggaggcccctagctgcccactcgcacccagggaccccggacccgcagcacgcgaagtcgcaccagagaggactctgccactgagaggtgcgccttgggctcaagctccgccaggtcggcagccatctcgcggaggctcccaggcaggcccacctcacaccgacagttcttgccttctgactcctccatcaacgcctctcggcccagaacctggcgatcctgattggcctgagtctggtgggccttgtggcaaggccctgcctgaaagacagcgcaatggcctatctggcttacggggtgccgcaccagagggggattcagcagccctggcggaggaatcccccccagccccatcatcacggagctcctccaccgaagatttctgctatgtgtttaccgtggagctggagagaggtccatcggggctagggatggggctgattgacggaatgcatactcacctgggtgccccaggcttatacatccagaccctcttgcctggctcccccgctgctgccgacggcaggttgtccctcggagacaggatcctggaagtgaacggctcctcgttgctgggcttaggctatctgcgggcagttgatcttatccggcatggcggaaagaagatgcgtttcctggtcgcaaaaagtgacgtggagaccgctaagaagatccactttcgcactcccccactctag

SEQ ID NO: 237981 - DNA, 3228 bp, synthetic construct
  misc_feature 1..3228: note = Description of Artificial Sequence: Synthetic coding sequence
  source 1..3228: mol_type = other DNA
atgttctacggaacccactttatcatgagtcctcctaccaagtcaaaactcaagcgccagtctcaactgctctcaagcatgctaagccgaacactgtcatacaaatatcgcgatttggactctacattcagttccctcggagccagcgatgaccctgccgagctctctacccaattatccgcacctggcgtgctgaaggtcttcggagatagcgtttgtacaggtacccactacaagagcgtacttgctacagggactagtagcgcgagggagctggtgaaggaagctctcgagcgttacgccttggatccaagacaggcaggccagtacgttctgtgcgatgtagtgggccaggcaggagatgctggccagaggtggcaggcacgctgctttcgggtctttggcgattccgaaaagcccctgctgatccaggagctttggaagccaagagagggccttagccggagatttgagctgcggaaaaggagcgatgtggaagaactggcagctaaggaggtagacacaataactgctgggatcaacgcccaggccagacgtctgcagaggagcagggccaagggcacccctactcctgcactgggagatgcacgttcctcccccccacccagattgcgaagaaccgtatcagagacctcgctgagtcccgtgaacgccttaccggcagccgctcagggccctgaggagccaggacctgacgccatgcggtactccctttaccaatccccacatttgctgttactgcagggatactcccagcagcatgacagcttggtgtatgtactgaacagagatcggcacacagtggggcagcgaactcctagcagtaagccgagtattagtctgagcgcaccggacattttacccctacattgcacaatacggcgacagccgctgcctgatagtggacaggctgccggtcggctcgtgcttgaaccaatcccgggagctcatatcagcgttaacttcagcgaggtggggcacagaacggttgttctgcaccacggagacctcctgtccttgggcctgtactacctgctgctcttcaaggaccccgctcaagctcaacccctgcctgcacgtgcgctggctaggttgcgagccgtgcctcagtcttgtaggctttgcggggcagccctgggcgctcggggtgccgcaagcccgacgcaggcagccctaccgaggcgtcaacagctgcttcttgagttcgaaccacacctcgaagatacgctcctacaacgaattatgacacttatagaacctggcggagatgaccataaactgacacctgcattcctgttgtgcctgtgtatccaacattccgccacacatttccaaccgggaacgtttggccaattactgcttaagatcgctcggctcattagagagaccgtgtgggagaaaaccaaggaactggctgagaaacaagcccagctccaggagccgattagcctcgcttcgtgcgctatggcagatctggtcccggacctccagcctatcctgttctggatgtcaaacagcatcgaactgctctactttattcagcagaaatgccccctctacatgcagagcatggaggagcagctcgatatcacgggcagcaaggagtctcttttctcttgtacactgaccgccagtgaggaggcgatggctgtcctcgaggaagttgtactctacgctttccaacaatgcgtgtattacgtgtctaagtccttgtacatctgtttgccagcgctgctggaatgcccaccatttcagaccgagagaagagagagttggtcctcagcccctgagttgcctgaggagctcaggcgggtggtgagcgtctaccaggccgctcttgacctgctccggcagctccaggtccatccggaggtggcttcccagatgttggcttacctgtttttttttagtggcaccctgctgctcaatcaacttttggaccgcggaccttctctctcttgtttccactggcctaggggagtgcaggcctgcgcgcgacttcagcagctgctggagtggatgagatcagcaggcttcggggctgcaggggagcactttttccagaaacttagctgtaccctaaacttattggcgactccaagggcacagcttattcaaatgagctggaccgcactccgggctgcgtttcctgcactttctcctgcacagctgcaccgactgctgactcactaccaactagcctccgcgatgggcccaatgtccacttgggagccaggcgctcaggattctcctgaagctttccgctcagaggacgtactcgagtcctatgagaacccgccacccatcgtactccctagtgatggtttccaggtcgacctcgaagctaattgtctggacgactctatctatcaacatcttctctatgtccggcattttttatggggccttaggtctagggcttccccaggatcgcctgggagacctgggtccggcgctagtcagccagtatgccctgaggggatgcatcacgtagtcctggatggccatctggaagcacccagttgccctctggccccacgggatcctgggcctgcagctcgggaagtggcccctgaacgaacactccctctcagaggggctccctgggcccaggctccccctgggaggcaaccgtctaggggcggtagccaggccggaccgcctcataccgactcctcctgcctgctcacaccaccctccacgcccctcgggccagaacccggagatcccgactggcctgagtccgggggaccttgcggcaaagcactgcctgaacgacagagaaacgggctgtctggattgagaggagccgctcctgagggggattcagccgcactcgcagaagagtcccctccagctccctctagtcggtcttcttctacagaagacttttgctacgtgtttaccgttgagctcgaacgcggaccatcaggactgggaatgggcctgattgatgggatgcatactcacctcggcgcacccggtctatatatccagacattattacccggatcccccgcagccgctgacggaagactgtcattgggggacagaatactggaagttaatggctcttctttactgggactcggatacctgagagcagtggatctcattcgccacggaggaaagaagatgcgttttctggtcgctaaatccgacgtggaaacggccaagaagatccactttaggacccctcctctgtag

SEQ ID NO: 237982 - DNA, 405 bp, synthetic construct
  misc_feature 1..405: note = Description of Artificial Sequence: Synthetic coding sequence
  source 1..405: mol_type = other DNA
atgttttacggcacccacttcataatgagcccacccacaaagtccaaactgaaacgccaatcccagttgctcagctccatgctttctcgtaccctgagttacaagtatagggacttagatagcaccttcagctcactaggcgcaagtgacgaccccgctgaacttagcacccagcttagtgcccctggtgtcttaaaggtgttcggagactccgtttgtactggcacacactacaagagtgtcttggccactggaacttcatcagcaagagaattggtaaaagaggccttagaacgctatgcgttggatccgagacaggctggacagtacgtcctgtgtgacgtggtggggcaggctggtgatgccggacagcgctggcaggccagatgcttccgggttttctag

SEQ ID NO: 237983 - DNA, 1629 bp, synthetic construct
  misc_feature 1..1629: note = Description of Artificial Sequence: Synthetic coding sequence
  source 1..1629: mol_type = other DNA
atgttctacggaacgcatttcataatgtcgccgccaacgaaatccaagctgaagcgccagtcacagctgctgagttcaatgctaagtcgcactctgtcctataagtatcgggatctggactctacctttagttcgttaggcgctagtgatgaccccgcagagctctctactcaattatctgccccaggcgttctaaaagtcttcggtgacagcgtgtgtactggcactcactataagtccgttctcgcgaccggtacttctagtgcgagggagcttgtgaaagaggccctagagcgatacgccctcgatcctcgacaggccggacagtacgtcctctgtgatgtggtaggacaggctggagatgctggacagaggtggcaggcccgatgtttccgagtgttcggcgacagtgaaaaacctttgctcatacaagagctctggaaacccagggagggactgagcaggaggtttgagctccgcaaaaggagtgatgtggaagaacttgcggctaaggaggtcgataccattactgcaggcattaatgcgcaggccaggaggcttcaaaggagcagggctaagggaacaccgactcccgcattgggggacgcgagatcatcccccccaccgaggctgcggcgaacagtaagcgaaactagcctgagtcccgtcaacgctttgccagcagccgcacagggcccagaggagccaggaccagatgctatgcgctatagcctgtatcagtccccccacctgctgctgttacagggctactcccaacagcacgactctctggtgtatgttctcaatcgcgatcgtcacacagtgggccagagaacaccatccagtaaaccatccatctcactgagcgcgccagacatactgcccctccactgtacaatcaggcgtcagccgctgccggattccggacaggccgcaggacgattggtgctggagcctattcctggggctcatatttccgtgaatttttcagaggtgggtcacaggacagttgtactgcaccacggcgatctgctaagccttgggctctactatctcttgttgttcaaggatcccgctcaagctcaacccttgccagctcgagcattggctcggctgcgagccgtaccacagtcttgccggctgtgcggcgctgcattgggcgcaaggggcgctgcctctccaacacaggctgccttgccacgacggcagcagctcctcctggaattcgaacctcatctggaggacactctcctccagcggattatgaccctgatagagccaggcggagatgatcacaagctcaccccagcctttctgctctgtctctgcattcagcatagcgcgacgcactttcaacccggaacattcggtcagctgctgttaaaaatagcaaggctgataagggagaccgtatgggaaaaaactaaagagctggccgaaaagcaggctcaacttttggagggaatcgcggtgctgctccacgccgatgggcaacgtgggggtcatggaggggctggtgggggaggagccgttagattgcctgccgtgcggctgctatgtcttcaggtgcccgtgcacctgccgccaggaacacctggcgtgcctgccatacccgatggcgctccgtag

SEQ ID NO: 237984 - DNA, 2508 bp, synthetic construct
  misc_feature 1..2508: note = Description of Artificial Sequence: Synthetic coding sequence
  source 1..2508: mol_type = other DNA
atgcggtatagcctgtaccaatcacctcatcttctgttattacaagggtactcccagcagcatgattcactggtctatgtgctcaacagagacagacatacagtcggccagcgcactccaagctctaaaccgtcaatttcgctgagtgcccctgacatcctgcccttacactgtactataagacggcagccgctgcccgatagcggacaagccgcaggcagactcgtattagagcccatccccggagcccacataagtgtgaatttcagcgaggtgggtcataggacagtagttctgcaccatggggatctgctaagtctgggactctattatctgcttctcttcaaggatcctgcacaggctcagcctttgcctgctagggccctggccagacttagggccgtcccccagagctgtagactctgtggagcggctctgggtgctcgtggagcagccagtcctacccaggccgctctccccagaaggcagcagctccttctggagttcgaaccgcatcttgaggataccctcctgcagcggatcatgactttgatcgagcccggaggggatgatcataaacttaccccggcatttctcctctgcttatgtatccaacatagtgcaacgcattttcaacccggtacattcggccagttgctgctgaagattgctcggctgatcagagagaccgtctgggagaagaccaaggagctggccgaaaaacaggctcagcttcaggagccaataagtctcgctagctgtgcaatggcagatctggtacctgacctccagcccatactgttctggatgagcaatagtattgagctcctgtacttcattcagcagaagtgccctctttatatgcagtcaatggaagaacagttggatatcaccggatcaaaggagagtctgttttcttgtacactcaccgcctctgaggaagccatggcagtgttagaggaggtggttctttatgcttttcagcagtgcgtatattacgttagtaagtccctgtatatatgtttacctgcacttctggagtgccccccatttcagacggagaggcgggagagctggagctctgcacccgagctaccagaggagctacgcagagtggtgtcagtgtatcaggcagccttggaccttctccggcagctgcaagtccacccggaggtagcttcccagatgctggcctacctttttttcttcagcggcacgctgctgttgaaccagctcctggaccgagggccaagcctgtcctgttttcattggcccaggggtgttcaggcttgcgcccgtctccagcaattgctcgaatggatgagatctgcgggttttggggctgccggtgagcattttttccagaagctctcctgtactctaaatttgctggctacccctcgggctcaactgatccaaatgtcctggacagccttgcgggcagccttccctgcactgtcacctgcacagcttcatagattgctgacacactaccagcttgccagcgcgatgggaccaatgtccacctgggaaccgggagcgcaagattccccagaggctttcagaagtgaagacgtgctggaatcctacgaaaatccgcctcccattgtgcttccatcagacggatttcaggtggatctcgaagcaaactgcttagatgactccatctaccagcatctgctgtatgtgagacactttttatggggactgcggagcagagcttctcccggaagtcctggcagacccggatcgggcgcttctcagccagtctgccctgagggaatgcatcatgtagtgctggacggtcatctggaagctccgtcatgccccctggcgccaagggatcccggtcctgctgctcgcgaggtagcccctgaaaggactctgccactgagaggggcaccttgggcacaggccccacctggcagacagccctcgagggggggaagtcaagccggaccaccccatacggatagctcgtgtttgttaacccccccttctactcctcttggacccgaacctggagatcccgattggccagagtcggggggtccatgcggcaaagctctgcccgaacgccagaggaacggactgtccgggctgaggggggcagccccagagggtgacagcgcagcactggcagaggagagcccgccagccccatccagcagatcctccagcacagaggacttctgttatgtattcaccgtcgaactcgagcgcggtccctccggcctgggaatggggttgatcgacgggatgcacacacatttgggagcaccaggactatacattcagacacttcttcccggttcccctgcagctgccgacggcagactgagtctgggagaccgcatccttgaggtgaacgggtcatccctgctggggttgggttatctgcgggctgtcgacctgatcaggcacggcggaaagaaaatgaggtttctcgttgccaagagcgatgtggagaccgcgaagaaaatccacttcagaacacctcccctatag

SEQ ID NO: 237985 - DNA, 2085 bp, synthetic construct
  misc_feature 1..2085: note = Description of Artificial Sequence: Synthetic coding sequence
  source 1..2085: mol_type = other DNA
atgtgctccacagggaccgggactcggtgggcaagtgggccacccccagcatctccagcctctgcaagtcagcccccaaccagctgcctgtacaccgctccatccgccggtaatcgttcacgaacagccgctcggcctagaggcggttggttagagccgatccccggtgctcatatcagcgtgaacttctcagaagtcgggcaccggactgttgttctccaccacggcgatcttctttctctgggactttattacctgcttctttttaaggaccccgcacaggctcagcccttacctgccagggccttggccaggctgagggccgtgccacagagctgccggctgtgcggggcagctctgggtgcccgaggggcagccagcccgacacaggcggcactgccccgacggcagcagctcctgttggaatttgaaccccatctcgaagacacattgctacagagaatcatgacacttattgaacccggtggcgacgatcacaagctgacaccagccttcttactgtgtttatgcatccagcactctgccacacattttcagcctggaaccttcggccaactcttactcaagattgcacgcctgatccgcgagactgtgtgggaaaaaacaaaagaactggctgaaaaacaggcccaactccaggaaccaattagtctggcatcgtgtgccatggccgatctggtccctgatctccagccgatcctcttctggatgagcaacagcatcgaattactctatttcattcaacagaaatgccccctgtatatgcagtccatggaggaacaactggatatcacaggaagtaaagagtcccttttttcttgcactttaactgcctccgaggaggcaatggccgttctggaggaagtcgtgctatatgcctttcaacagtgtgtgtactatgtcagcaaaagcttgtatatctgtctgcccgctctgctggagtgtccgcctttccagactgaaaggcgggagagttggagtagcgccccagagctgcctgaagaattgcgcagggtcgtgtctgtttaccaagctgcgctggacctcctcaggcagcttcaagtccacccagaggtggccagccagatgttggcttatcttttcttcttctctggcactttgctgctgaatcagttgttagaccggggaccttcgttatcatgttttcactggcctcggggagtccaggcgtgcgctcgtctccagcagttgctggagtggatgcgttcggcaggatttggagccgcaggcgaacatttcttccagaagttgagctgcactctcaaccttctggcaacacccagagctcaacttatacaaatgagctggaccgccctccgggctgcattccctgccctctccccagcccagctccataggctcctcactcattaccaattggctagcgccatgggacctatgtcaacatgggagcccggtgcccaggatagccccgaggcattccgcagtgaagatgtattagaatcgtacgaaaatcccccacccatagtgctcccatccgatggctttcaggtagatctggaggcaaattgcctggacgatagcatataccagcatctactctacgtccggcatttcctgtggggcctgcgatcccgggcttcaccgggttcaccaggcaggccaggcagtggagcttcacagcctgtgtgcccagaaggcatgcaccatgtcgtcctcgatggccaccttgaggccccaagctgtcctttagcccctcgcgatcccggacctgcagcacgggaggtagcacccgagcggactctgcctttgcggggagctccgtgggcacaggctcccccagggcgacagccccctggcctatatatacaaaccctcctgcctggatcacccgctgccgctgacggtaggctatccctgggagacagaatactcgaagtgaatggaagcagcctcctaggcctggggtatctcagagccgtggacctaataaggcacggcggtaagaagatgagatttcttgtggccaagtcagatgtagagacagccaaaaaaattcattttcggactcctccgttgtag

SEQ ID NO: 237986 - DNA, 369 bp, synthetic construct
  misc_feature 1..369: note = Description of Artificial Sequence: Synthetic coding sequence
  source 1..369: mol_type = other DNA
atgaaattggcagctatgatcaagaaaatgtgcccgtctgattcagaactgtccatccctgctaaaaactgttatcggatggtgattctgggtagttcaaaagtgggaaagaccgcgatcgttagtagatttcttactggacgctttgaagatgcttacaccccaacaattgaggactttcatcgcaagttttactccattagaggtgaggtataccagctggatatcctcgacacaagcggcaatcatccttttcccgcaatgagacgtctttcaatccttacagatcctcgtcaccaggtgctgccccaagaacagaaccagggcgagcgcggtagggctccaggccatctcagacagcaggggtag

SEQ ID NO: 237987 - DNA, 2394 bp, synthetic construct
  misc_feature 1..2394: note = Description of Artificial Sequence: Synthetic coding sequence
  source 1..2394: mol_type = other DNA
atgggtaccctggggaaggcccgagaagcaccacgaaaaccatcacacggttgtcgcgctgccagtaaagcccgattagaggccaagcctgctaattctccctttcctagtcatcctagcctagcccacattacgcagttcagaatgatggtgagcctgggacacctggccaagggtgcgtctctggacgacctgattgatagttgcatccagagttttgatgcggacgggaatctttgtcggtccaatcagctgttgcaggtaatgctgacaatgcaccgcatcgtgatctcatcggcagagttgctgcagaaggttatcaccctgtataaagacgctctagccaaaaattcccctggcttgtgccttaaaatctgctattttgtacggtactggatcaccgaattctgggtgatgttcaaaatggacgcgtcgctcaccgataccatggaggagtttcaggaattggtgaaagctaaaggcgaagagctgcactgtaggttaatcgatacaacacaaataaatgccagagactggtcaaggaagctcacccagcggatcaagagtaacactagcaagaagaggaaagtgagcttgctctttgaccaccttgagcccgaggaactttctgagcacctcacatatctcgagttcaagtcctttaggcgtatctctttctctgattatcagaattaccttgtgaactcctgcgtgaaggagaatccgactatggaacgctccatcgcgctgtgcaacggaatctctcagtgggttcagctgatggtgcttagcaggcctacaccccagctgagggcagaagtttttatcaaatttatccaggtggcacaaaagctccatcaactgcagaactttaataccttgatggcagttatcggcggactttgccatagctctatttctcgattaaaggaaaccagcagccacgtccctcacgagattaacaaggtattgggcgagatgacagagctgctgtccagttcccggaactatgataattacaggcgggcttacggcgaatgtactgatttcaaaatcccaatactgggcgtacatttgaaagaccttattagcctttatgaagcaatgccggactatctggaagatgggaaagtgaacgtacacaagcttctggctctgtataaccacattagtgagctagtacagcttcaggaggtggccccacctctcgaggctaacaaggaccttgtccacctcctgacgctttctctggatctgtattacaccgaggacgagatatatgagctgagttacgctagagaacccagaaatcacagggctccccctcttacacctagcaagcctccagtcgtggttgattgggcaagcggagtcagccccaaacctgatccaaaaaccattagcaaacatgttcagagaatggtcgattccgttttcaaaaactacgaccatgatcaagatggctacatatcccaggaggagttcgaaaagattgccgcatcatttcccttctcattttgcgtgatggataaggaccgcgagggtctcatttctagagatgagatcaccgcttatttcatgcgggcaagcagcatctatagtaaactggggttaggctttcctcataactttcaggagactacctacctgaagccgactttttgtgacaactgcgccggtttcctatggggagttattaagcagggttataggtgcaaagattgcggcatgaactgtcataaacagtgtaaagacctggtcgtattcgaatgtaagaagcgggctaagaacccagttgcacctactgaaaacaatacctctgtcgggccagtgagtaatctgtgttcgcttggagccaaagatttgttacacgcacccgaggagggcccattcacttttccaaatggagaagccgttgagcatggggaggagtcaaaggatcggaccattatgcttatgggggtaagctcccagaaaattagcctgagactgaagcgcgcagtcgcccacaaggccacgcagacagaatcccaaccctggatcggctccgaagggcctagcggcccattcgtgctgtcatctcccagaaagaccgctcaggacacactgtacgtgctcccttcccctacctcaccgtgtcccagccccgtgcttgtgcgaaaacgtgcgtttgtgaaatgggagaacaaagacagtctaataaagagcaaggaggagctgaggcacctgcgcctgccaacctatcaggaattagagcaggagataaatactcttaaagccgataatgatgctcttaagatccagttgaagtacgcacagaaaaagattgagagtctccaattggagaagtccaatcacgtcctggcacagatggagcagggtgactgctcctag

SEQ ID NO: 237988 - DNA, 1794 bp, synthetic construct
  misc_feature 1..1794: note = Description of Artificial Sequence: Synthetic coding sequence
  source 1..1794: mol_type = other DNA
atgggcactctgggcaaagccagagaggcgcctaggaaaccgagtcatggctgtcgagctgcctccaaagccagactcgaggcaaaacctgccaacagtccctttccttcccaccctagcctcgcacacatcactcagttccgcatgatggtgtctttagggcaccttgctaagggagcctctctggatgacttgattgacagctgtattcagtcttttgatgcagacggcaatttgtgcaggagcaatcagctcctgcaggtgatgctgaccatgcataggatcgtaatctcttcagctgagctgctgcagaaagtgatcactctatatcccgatgccctcgctaaaaattctcctggcctgtgtctgaaaatttgttactttgttaggtactggatcacagagttttgggtgatgtttaagatggatgcctcactcacagataccatggaagagtttcaggaacttgttaaagctaagggcgaggaactccattgtaggctgatcgacacgacccagatcaacgccagggattggagtcgtaagttgacacagcgcataaaatctaatacatctaagaagagaaaagtgtccctgctttttgaccatctcgagcctgaggagctctcagaacatcttacctatttagaattcaagtcatttcggagaatctcctttagcgattatcagaactacctggtgaatagctgcgtcaaggagaaccccacgatggagcgctcaatcgccttgtgcaacggaatcagccagtgggttcaactgatggttctctctcggccaacacctcaactacgcgctgaagtgttcatcaaattcattcaagttgcccagaaattgcaccaattgcagaactttaatacactgatggcagtgattggagggctctgccatagctctatcagccgcttaaaggagacctcaagtcacgtgccccacgagataaataaggtactgggagagatgaccgagttactcagctcctctcggaattacgataactaccggagggcatacggggaatgcactgacttcaagattcccattctgggggttcatctaaaagacttgatttccctgtatgaggcaatgcccgactacctggaagatggcaaagtcaatgtgcacaagcttctggcgctctataaccatatcagtgaactggtacagctgcaggaggtggctccacctctagaagccaataaagacttggtgcatttgctcacactatcactggatctatactacaccgaggacgagatatatgagctgtcctacgcccgagagcctaggaatcatcgggcacctagcgttttcaaaaattacgatcatgatcaggacggttatatttcccaggaggaatttgaaaagatcgctgcaagttttcccttctcattttgtgttatggataaagatagagaaggactcatcagccgcgacgagatcacggcctattttatgagggcttctagtatatacagcaaactgggtctgggttttcctcataattttcaagaaaccacgtatcttaagcccactttttgcgataactgtgctggcttcttgtggggtgtgattaagcagggctacagatgtaaggactgcggcatgaactgccataagcagtgcaaggatctggttgtatttgaatgcaagaagagagctaagaatccagtggccccaaccgagaacaacactagcgtggggcctgtgtccaacttgtgcagcctcggtgccaaggacctactgcacggcaacaaatactctgaaagcagatag

SEQ ID NO: 237989 - DNA, 1641 bp, synthetic construct
  misc_feature 1..1641: note = Description of Artificial Sequence: Synthetic coding sequence
  source 1..1641: mol_type = other DNA
atggggactttgggcaaggcaagggaagcacctcggaagcccagccatggatgtagagcagcttctaaagcccgactcgaagctaaaccagccaactcaccgttccccagccacccaagcctggctcacatcactcagttccggatgatggtgtctctgggccacctcgccaaaggggcttcattagacgatctgattgattcttgcattcagtcctttgatgccgatggcaacctctgccggagcaatcagttgctccaggtgatgctgaccatgcataggatcgtcatctcctccgctgaactgctccagaaggtcattacactataccccgacgccttggcaaaaaattctccaggcttgtgcctaaaaatctgttatttcgtacggtattggattactgagttttgggtcatgttcaaaatggatgcttctttaacagataccatggaagagtttcaggagctggtcaaagccaaaggcgaagagctgcattgtagactgatcgatacaacccaaatcaacgctcgagactggtctagaaagttgacccagcggattaagtccaacacctctaaaaagcgcaaagtcagtctgctcttcgaccacctcgaaccagaagagctttccgagcatctcacttacctggagtttaaaagcttccgcagaattagctttagcgactatcaaaattatcttgtgaacagttgtgtaaaagaaaatcctacgatggaaagatccattgcactttgtaatggtatttctcagtgggttcagctcatggtactgagcaggccaacccctcaacttcgtgcggaggtgtttattaagttcatccaggtggcccagaagctgcatcaactgcagaattttaatacgctcatggcagtgatcggtggtttgtgtcatagcagcatatctaggctcaaagaaaccagctcacacgtgccacatgagataaacaaagtcctcggcgagatgacagagctcctgagcagttccaggaactacgacaattaccgtagggcgtacggagagtgtacagactttaaaatcccgattctcggagtgcatctgaaggacctgatttccttgtacgaggcaatgcctgactacctggaggacgggaaggtgaacgtgcacaaattgttagctctctataatcatataagtgaactcgtgcaactgcaagaagtggctcctcctctcgaggctaacaaagacctggtgcatctgctgacgctcagcctagacctctactacacagaagacgagatttatgagctttcttatgccagagaaccaaggaatcaccgggctccctctgttttcaagaattacgatcacgatcaggatggttatattagccaggaagaattcgagaagatagctgccagctttccgttttccttttgtgtgatggacaaagatcgtgaaggcctgatttcacgagatgaaattactgcatacttcatgcgtgccagcagtatctactctaaattaggactgggcttcccccataattttcaggaaaccacttacctcaagcccactttctgcgataactgtgccggtttcctgtggggggtgataaagcagggatatagatgcaagggcaataagtactcagaatcccgctag

SEQ ID NO: 237990 - DNA, 2289 bp, synthetic construct
  misc_feature 1..2289: note = Description of Artificial Sequence: Synthetic coding sequence
  source 1..2289: mol_type = other DNA
atgggaacacttggcaaggcgagagaggcgccaagaaagccttcccacgggtgccgggcagcgagtaaagcaaggttggaggccaagccagcgaattccccctttccgtcccatccttcactagcccatataacacaattccgcatgatggtcagcttgggccacctggccaagggcgcttctctggacgatcttatcgattcctgcatccaatctttcgacgccgatggcaatctgtgtcgctcaaatcaactccttcaggtgatgctcacaatgcatcggatagttatcagcagtgccgaactactccaaaaggtgataacattgtacaaggacgccctcgcaaagaacagtcccggtctatgtcttaagatctgctactttgtccgctactggatcaccgagttctgggtcatgtttaagatggacgcatctctcactgacactatggaagaattccaggaactggttaaagcgaagggggaagagctgcactgtcgtttaattgatactacccagatcaatgctcgagattggagtcgcaaactgacgcaaagaataaagtcaaatacgagcaagaaaagaaaagtgtccctgcttttcgatcatttagagccggaagaattgtccgaacacctgacatacttagaattcaagagtttccgtaggatctcatttagcgactaccagaattacctcgtcaatagctgtgtgaaagaaaacccaactatggagaggagcattgccctgtgtaacggtatctctcagtgggtgcagttaatggtactgtccagaccaactccccagttgcgcgctgaggtcttcatcaaattcattcaagttgctcagaaactacaccagctccaaaactttaacacactgatggctgtgattggaggcctatgtcacagttcaatctcaagacttaaggagaccagcagccatgtgccacacgaaatcaataaggtgctgggagagatgaccgaactcctgtcgagctccaggaattacgacaactatcgtagggcctatggggagtgcactgacttcaagatccccattctcggcgttcatctgaaggaccttatcagcctttacgaggccatgccggactacctggaagacgggaaagtgaatgtgcacaaattgctggcactgtacaatcacatatctgaattggtgcaattacaagaggttgctccacccctggaagcgaataaagatctagttcacttgcttactctgagtcttgacctatattataccgaggacgagatttatgagctaagttatgctagggagccccgtaaccacagagctccgtccgtttttaagaattacgatcacgatcaagacggatatatcagtcaagaggaatttgagaagattgccgcttcatttcctttcagcttttgtgtcatggataaagatcgcgaggggttaatcagccgggatgagattactgcctatttcatgcgtgcctcttcaatatactcgaagctgggcttgggctttccccataatttccaggagactacttacttgaaaccaacattttgtgacaactgtgctggtttcctgtggggagtcattaaacagggttaccggtgtaaggactgcgggatgaactgtcataaacaatgtaaggatttagttgtgttcgagtgtaaaaagcgggcaaaaaatcccgtggcacccacggagaacaatacatctgtcggacccgtttcaaacctgtgctctctcggagcaaaagatctgttgcatgcccctgaagaagggccttttacttttccaaacggggaagccgtggagcacggggaagaatcaaaagacagaacaataatgctgatgggggtgtcttctcaaaaaattagcctgagacttaaacgcgctgtggcacacaaagcaactcagactgaatctcagccttggatcgggtccgaaggaccttctgggccattcgtcctgagctctccaaggaaaaccgctcaggacaccttatatgtgttgccaagccccaccagtccatgtccttccccagtgttggtgagaaaacgtgcctttgtcaagtgggaaaacaaggactcactgattaagagcaaagaggagctgaggcatttgcggctccccacatatcaggagctagagcaagagattaatacccttaaggccgataacgatgccctgaaaatacagctgaagtacgcgcagaaaaagattgagagccttcagctggagaagtctaaccacgtcctggcccaaatggagcagggtgactgtagctag

SEQ ID NO: 237991 - DNA, 2250 bp, synthetic construct
  misc_feature 1..2250: note = Description of Artificial Sequence: Synthetic coding sequence
  source 1..2250: mol_type = other DNA
atgatggtgtctctaggtcatcttgctaagggtgcttcattggatgatctgattgatagctgtatccaatcatttgatgccgacgggaatctctgtcggagcaaccaactcttacaggttatgttgaccatgcatcgtatcgtaatttcctcagccgaactactccaaaaggtgatcaccctgtacaaggacgcactggcaaaaaattcaccaggcctctgtttaaaaatctgctatttcgtaaggtactggatcacagagttctgggttatgttcaaaatggacgcatctcttactgacaccatggaagagtttcaggagctggtgaaggcaaagggggaagaattacactgtcgactaattgacacaacccagattaatgcacgcgactggtcccgtaagcttactcagcggatcaaaagcaacacatcaaagaaaaggaaggtgtctcttttgtttgaccacctggaaccagaggaactgtccgaacacctgacttacctggagtttaagtcctttaggcggatctcttttagcgactatcagaactacctggtgaatagctgtgtaaaagaaaaccccacgatggagagaagcatcgctctttgcaacggtatcagccaatgggttcagttgatggtgctgagcagacccacacctcagctacgcgctgaagtattcatcaaattcatccaggtcgctcagaaactgcatcagctccaaaatttcaacacactaatggccgtgatcgggggtctctgtcacagttcgatctctagattaaaggaaacctcttctcatgtgccacatgaaattaacaaggtgctaggtgagatgacggaactgctgtcctcctctaggaactatgacaattaccgccgtgcatatggcgagtgcactgactttaagattcccatactgggagtgcatctcaaagatttgataagtctttacgaagctatgcctgactacctggaagatggtaaagtcaatgttcacaagctcttggccctttacaaccacatcagcgaactggtccagctacaggaagtggctcccccactagaggccaacaaggacctggtgcatttgctcacactctcactcgatctgtattataccgaagacgagatttatgaactctcatacgcccgtgagcctcgaaatcacagagcccctccccttactccaagcaaacccccagttgtggtggattgggcgagcggagtgagtcccaaaccggatcctaagacaattagcaaacatgtgcagaggatggtggattccgtgttcaagaactatgatcatgaccaggatggatacatatcacaggaagaatttgaaaaaatcgccgctagcttccctttttctttttgcgtgatggataaggacagagaggggcttatctcaagggacgaaattaccgcctacttcatgagagcatcctcaatctactccaaactggggctgggattccctcacaacttccaagagacaacatacttgaagccaacgttctgtgataattgtgccggttttctgtggggtgttatcaaacaggggtatcgttgtaaagactgtggtatgaattgtcacaaacagtgcaaggacctagtagtgttcgagtgtaagaagcgggcaaagaaccctgtcgccccaaccgagaataatacctcagtgggacctgtgtcaaacctctgcagcttgggtgctaaagacctcttgcatgctcccgaagaggggcctttcacctttcctaacggcgaggcagtggagcatggagaggagagcaaggaccgaacaattatgctaatgggcgtttcaagccaaaagatttccctgagactgaaacgcgctgttgcacacaaggcaactcaaaccgaaagccagccgtggataggaagcgaggggcctagtggtccatttgtgctatcttccccacgaaagactgcacaagatacgctgtatgtgctgccctccccaaccagcccctgcccaagccctgtgttagtgcggaagcgggcatttgtgaagtgggagaacaaagattccctgatcaaatctaaggaggaacttcgccatctacgattgcctacataccaggaactcgaacaggagattaataccctcaaagccgataatgatgctcttaagatccagctaaagtatgcccagaagaaaattgagtctttgcagttagagaagtcaaaccacgtgttagctcagatggagcaaggcgactgctcttag

SEQ ID NO: 237992 - DNA, 1446 bp, synthetic construct
  misc_feature 1..1446: note = Description of Artificial Sequence: Synthetic coding sequence
  source 1..1446: mol_type = other DNA
atgggcactctggggaaagctcgggaggcaccgagaaagccctcgcatgggtgccgtgcagcatccaaggcaagactcgaagccaaacccgcaaattctccattcccttctcacccgagtctagcccacattactcagtttagaatgatggtaagtcttggtcacctggctaaaggagcctctctagacgacctgattgacagttgcattcagagtttcgacgctgatggcaacctgtgtaggagtaaccagctcttgcaggtgatgctgactatgcatcgaattgttatctcatccgccgaactgctacagaaagtgattacgctctatccagatgctctggcaaagaattcccccggactctgcctgaaaatttgttactttgttagatattggattaccgaattttgggtcatgttcaagatggacgcatctttgaccgatacaatggaggagttccaggagctagttaaggctaagggcgaggagctacattgccgcctcatcgacacaacccaaataaatgctcgagactggagccgtaagcttacccagagaattaaaagtaacacaagcaaaaagcggaaggtcagcctcctgtttgatcatttggagccagaggagctctcagagcacctcacatatttagagttcaagagctttcgaaggatttctttttccgactaccagaattatctggtgaactcttgtgtaaaggaaaaccccaccatggagaggtctattgcactgtgcaacggtataagtcaatgggtgcagttgatggtgctttcccggccaactcctcaattgcgagctgaggtgtttatcaagttcatccaggttgcacagaaattacatcaattacagaattttaacaccttgatggctgtcattggcggtttgtgtcatagctcaatatcacggctaaaagaaaccagcagtcacgtgccacatgagatcaataaagttttgggggaaatgaccgaactcctctcttcgagcagaaattacgacaattaccggagagcctatggtgagtgtacagatttcaagattcccatcctcggggttcatctgaaggatttgatttccctgtacgaggctatgcctgactacttagaggacggaaaagtgaacgtgcacaagctccttgcactatacaaccatatatctgagctggtccaacttcaagaggttgcaccccctctggaagcgaacaaagacctagtgcacttacttacacttagcctcgacctgtattacaccgaagacgagatctacgagctttcctacgcgcgagagccccgaaaccatcgcgcaccttctgtgtttaagaactacgatcacgaccaagatgggtatatttctcaagaggaattcgagaaaatcgcagccagttttccgttctcattttgcgtcatggataaggatcggagcggcgcatag

SEQ ID NO: 237993 - DNA, 1641 bp, synthetic construct
  misc_feature 1..1641: note = Description of Artificial Sequence: Synthetic coding sequence
  source 1..1641: mol_type = other DNA
atgggaaccctgggaaaggcccgtgaggcccctcggaaacccagccatggctgtcgcgcagccagcaaagcacggttggaagcgaagccagcgaacagtccgtttccctctcatccctcccttgcccatatcacccaattcagaatgatggtgagcctgggccacctcgcaaagggcgctagtctggatgatctcatcgactcgtgtatccaaagttttgacgctgacggcaatctctgtaggtcaaatcagctgttgcaggtcatgctgactatgcaccgaatcgttatctcatccgccgagcttctgcagaaggtgattacactgtacaaagacgctctggccaagaatagcccaggtttgtgtctcaagatctgttatttcgttcgatactggattaccgaattctgggttatgttcaagatggacgcctctcttactgacactatggaggagttccaagagcttgtgaaagccaagggcgaagaattgcactgcaggctgattgacaccactcagattaatgctagggactggagtagaaagctgacccagaggatcaagtcaaatacctccaaaaagcggaaggtctctctgctcttcgatcacctggaacccgaggagctgagtgaacatctgacctacttggaattcaaaagctttagaagaatttccttcagcgattatcagaactacctggtcaattcttgcgtgaaggagaacccaacaatggaaaggtccatcgctctgtgtaacggcatctcccagtgggtgcaacttatggtgttgagccggccaacaccccagttacgcgctgaggtgtttatcaaattcatacaggtggcccagaagctacatcagttacagaatttcaataccctgatggctgtgattggcggtttgtgtcactcctctatatccaggcttaaagagaccagttctcatgtcccccatgagattaacaaggtgctgggtgagatgacagagttactgtcctcctctcggaactacgacaactatcgaagggcctacggagagtgcaccgacttcaagattcctattttaggggtccaccttaaagatctcattagtctctacgaggctatgccagactacctggaagatggtaaggtgaacgtgcacaagttgctcgccctgtacaaccacatctccgagctggttcagctgcaggaggtggccccacccctggaggctaacaaagatctcgtgcaccttcttaccttgtcgctcgacctttactataccgaggatgagatctacgaactgagctatgcaagggagccccgaaaccacagagccccaagcgtgtttaaaaactacgatcatgaccaagatgggtacatctcccaggaggagtttgaaaagatcgccgctagcttcccattcagcttttgtgtaatggacaaagatcgggaaggactcattagcagggatgagattaccgcatatttcatgcgtgcgagcagcatctactctaaactgggcttggggtttccccacaatttccaggaaactacttatctcaaaccgaccttctgtgataattgtgcaggctttctctggggagttatcaagcaggggtaccggtgtaagggcaataagtattcggaatccaggtag

SEQ ID NO: 237994 - DNA, 1794 bp, synthetic construct
  misc_feature 1..1794: note = Description of Artificial Sequence: Synthetic coding sequence
  source 1..1794: mol_type = other DNA
atgggcacacttggcaaggcacgcgaggcacctcggaagccgtcccatggctgtagggcagcatctaaggccaggttggaagcaaagcccgcaaacagcccttttccaagccatccatccttggcacatatcacccagtttagaatgatggtttccctgggtcacctggcaaagggcgctagtttggatgacctcatcgacagttgtatccaatcctttgacgcagatgggaacctgtgccggagcaaccagctgctacaggttatgcttactatgcacagaatcgtgatttcttccgccgaactgctccagaaggttatcacactctacaaggatgcccttgctaagaactctcctgggttgtgcctcaaaatatgttacttcgtgcgctactggattacagagttctgggtgatgtttaaaatggacgcttccctaaccgataccatggaagaattccaagagctcgtcaaagccaagggcgaagaactgcactgcaggttaattgacacaacccaaattaatgcacgggattggtcccggaagctcacgcagaggatcaagtccaacacctccaagaagcggaaggtgtcccttctcttcgatcatctggaaccggaagaattgagcgaacacctaacctacttggagttcaagagcttccgaaggatatctttttcagactaccagaactacctggtgaactcctgcgtgaaagaaaatccaactatggagcgtagtatagcattgtgcaacgggattagccaatgggtgcagttaatggtactcagcagaccaactccgcaacttcgcgcagaggtcttcatcaaatttatccaagtcgcacaaaaattgcaccagctccagaactttaataccctcatggccgtgatcggtggcctctgtcactccagcatatctcgactgaaggagacgagctcccatgtgccccatgaaattaataaggtcttgggcgagatgactgagctgttgtcctccagcaggaattatgacaactacaggcgcgcttacggcgaatgtactgatttcaaaattccaatccttggcgtacatcttaaagatctcatatcattgtatgaagcaatgcctgattatttagaggacggtaaagttaatgtgcataaactattggctctctataatcacatttccgagctcgtccagctgcaagaagtcgcacctccccttgaagctaacaaagatctggtccatctcctgacgctctcactggacctatactacacggaggacgagatctacgaactgtcctacgccagagagccacggaaccacagggccccttccgtgttcaagaactacgaccacgatcaggacgggtacattagccaagaagagttcgagaaaatcgctgcctctttcccattttctttctgcgtaatggacaaagatagggagggcctgatctcacgggatgagatcaccgcttacttcatgagagctagctctatttactctaaattggggttaggtttcccccacaatttccaggaaactacctacctaaagcccactttttgcgataattgcgccggattcttgtggggggtaattaaacagggatataggtgtaaggattgcggtatgaactgtcacaagcagtgcaaggatctagttgtgtttgaatgcaagaaacgagcaaagaaccctgtggcgccaacagaaaataacactagcgttggtcctgtatctaatctgtgttcgctcggagccaaggacctcctgcacggcaataagtactctgagagtagatag

SEQ ID NO: 237995 - DNA, 1830 bp, synthetic construct
  misc_feature 1..1830: note = Description of Artificial Sequence: Synthetic coding sequence
  source 1..1830: mol_type = other DNA
atggctggtacattagatttggataaaggatgcacagttgaagagctacttagagggtgcatcgaagccttcgacgattcaggtaaagttcgagacccccagctagtgagaatgtttctgatgatgcacccctggtacatacccagctctcagcttgcagctaagcttctgcacatttatcaacaatcaagaaaagacaatagtaattccttgcaggtcaagacctgccacctcgtgaggtattggatctccgccttccccgctgagtttgatcttaatcctgagctcgcggagcagatcaaggaactgaaggcgttactcgatcaggaagggaacagaagacacagcagcctcattgacatcgatagcgtgccgacttacaaatggaaacgtcaggtcacccagagaaaccctgtgggccagaagaagcgaaaaatgtcgctgctgtttgatcacctcgaaccgatggaactggcagagcacctgacctacctagagtaccgttccttctgcaagatcctctttcaggactaccattcattcgtgacccatgggtgcactgtggacaatccagtgttggagagatttatttccctcttcaattccgtctcccagtgggtgcagttgatgatcctgtcaaagcccactgctccccaaagggccctggtgatcacacactttgtccacgttgcggagaaattactccaattgcagaacttcaacaccttaatggccgtggtcggtgggctgtctcacagtagcataagtcgactgaaggagacgcattctcatgtgtctcctgaaacaataaagttgtgggaaggcttgacagaacttgtgactgctactgggaattacggcaactacagacgcaggctcgcagcatgtgtcgggttccggttccccatcctgggcgtgcacctcaaggatcttgtggctctgcaactggcccttcccgactggcttgatcccgctcgcaccagacttaacggcgcaaagatgaagcagctttttagcattcttgaagagctggccatggttacctcattgaggcccccagtccaggcgaatcccgacttgctgtccctactgactgtgagtctggaccaatatcagacggaggatgagctgtatcagctgagcctccagcgcgagcctcgctcaaaatccagtcccacctctcctacatcctgtacccctccaccgcgtcccccagtattagaggaatggaccagtgcagcaaaaccaaaactcgaccaggcactggtggttgaacacatcgagaagatggtggaatccgtgtttcgcaacttcgatgtagatggcgatggacacatctcacaggaagaattccagatcatacgagggaacttcccttatttgtctgctttcggagaccttgaccaaaaccaggacgggtgtataagtagggaagagatggtgtcttatttcttacgtagcagttcagtgctcggaggacggatgggatttgtccacaacttccaagaatccaattcactgcggccagtagcatgccgacattgtaaagcgttgatactgggtatctataagcaggggctgaagtgtcgcgcatgtggcgtgaactgccacaagcagtgtaaggacaggctctccgtggaatgccgacggagagcacagtccgtcagcttggaagggtccgcaccctcacctagccctatgcactcccaccatcacagagctttttccttctccctgccgagacctggcaggaggggatcccgtccacctgaaatccgggaggaggaagtgcagacagtggaggacggtgttttcgatattcacctgtag

SEQ ID NO: 237996 - DNA, 1833 bp, synthetic construct
  misc_feature 1..1833: note = Description of Artificial Sequence: Synthetic coding sequence
  source 1..1833: mol_type = other DNA
atggctggaaccctggacctggacaaaggctgcaccgtagaagaacttctaaggggctgcatcgaagcctttgacgacagtggcaaggtccgagatcctcagttggtacggatgttcctcatgatgcatccttggtatattccatcatcgcaattggccgctaaactgctgcacatttatcaacagtcgaggaaggacaactcgaatagcctccaggtgaagacttgtcatctggtccgatattggatatcagcattcccagcggagtttgatctcaatccagagttggccgagcagattaaagagctaaaagccctccttgatcaggagggtaatcgtagacactccagtttaatagacattgacagtgttcccacctacaagtggaaaagacaggtgacccagcggaatccggtgggacagaaaaagcgtaaaatgagtcttctgttcgaccacctagaacccatggagctcgcggagcatctcacttatctggagtaccggtctttctgtaagattctctttcaagattaccatagtttcgtcacacatggctgcacagtcgataatcctgtgcttgaacgcttcatcagcctgtttaactcagtgtcgcagtgggtccaactgatgatcctgtccaagcctacggcccctcaacgagccctggttatcacccactttgtgcatgttgccgagaagcttctccagctgcagaattttaacaccttgatggccgtggtcggaggtctcagccattcatcgataagtagactgaaggagacacactcccacgtttccccggaaaccattaaactgtgggaaggactcactgagctggttaccgccactgggaattacggaaattatcggaggagactggcagcttgtgtgggtttccgttttccaattctcggggtgcatctgaaagatcttgtagcattgcagctcgcgttgcctgattggctggaccctgctcggacccgcctgaatggtgcaaagatgaagcaattattcagcatccttgaggagctagccatggtaacctcgctccgcccacccgtccaagcaaatcccgacctcctgtcccttctgaccgtgagccttgatcaataccagacggaggacgaactataccaactctcccttcagagggagcccaggtcaaaatcctcacctacatcaccaacaagctgtaccccccctccccgtccacccgtgctggaggaatggacaagcgcagcgaaacccaaattggaccaagctctcgtggtggaacacattgagaagatggtagagagtgtgttccgtaatttcgatgtggatggggacggccacatctcacaggaagaatttcagattatccgcggtaactttccgtacctctcagcgtttggcgatctagaccaaaatcaggacggctgtatttctcgagaagaaatggtgtcctactttctccgatcctccagtgttctcggtggtagaatgggtttcgtgcataatttccaagaatccaattctcttaggcctgtcgcctgtcggcactgtaaagctttgattctgggtatctacaagcagggacttaaatgtagagcctgcggtgtgaactgtcacaaacagtgtaaggaccgactctcagtcgagtgccggagacgtgcacagagcgtttcccttgaaggttcagctcctagcccgtcgccaatgcactcccaccaccaccgggctttttcgttctctctgccaagacctggtcggaggggcagccggccacccgctgagattagagaagaggaagtccaaaccgttgaggacggcgtattcgatatccacttgtag

SEQ ID NO: 237997 - DNA, 1830 bp, synthetic construct
  misc_feature 1..1830: note = Description of Artificial Sequence: Synthetic coding sequence
  source 1..1830: mol_type = other DNA
atggcaggtaccctggacctcgacaaaggttgcacagtggaagaactgctgcggggatgtatcgaggcattcgacgatagcgggaaggtccgggatccgcagcttgtgcgcatgtttctcatgatgcacccgtggtatatcccaagctctcagttggctgctaagctgttgcatatctatcagcagagccgcaaagataattcaaacagcctgcaggtgaagacatgccatctggttcggtattggatctctgctttccctgccgaattcgatctgaacccagaactggccgaacaaattaaggagctcaaggcactactggatcaagagggcaatagaagacactcttctctgatagacattgacagcgtccccacatacaaatggaaaaggcaggtcacccaaaggaaccctgtgggccagaagaagagaaagatgtctctactgttcgatcatttggagcccatggaactggcagaacacttgacttatctcgaataccggagcttctgtaaaatcctgttccaagattatcactctttcgtgactcacggatgtaccgttgataacccagtcctggagaggtttatcagtctctttaattctgtaagccagtgggtgcaactgatgattctgagcaagcctaccgctccccagcgggctcttgtcatcacccacttcgtccacgtggcagaaaaattactgcaactgcagaactttaatacgctcatggcagtggtgggcggactatcgcactcatcaatttcacgtctcaaggagacccatagtcacgtatcccccgaaaccattaaattgtgggagggtctcactgaattggtcactgctactggtaactacgggaactatcgtagacgacttgcggcatgcgttggcttccgctttccaatcctcggcgtgcatcttaaagatttagtcgcccttcaacttgctctgccagactggctcgacccagctcgtaccaggctcaacggcgctaagatgaagcagctgtttagtattcttgaagaactagcaatggtgacctccctccgcccaccggtgcaggccaaccccgatctgctttcattgttgaccgttagcttagatcagtaccaaaccgaggatgagctgtaccaactgagcttgcaaagggagccaagatctaagagctccccaacaagccctacaagttgcaccccacctccccgaccccctgtattggaagaatggacttccgccgcaaagcccaaactggaccaggctctcgtcgtcgagcacatcgaaaaaatggttgagagtgtgttcagaaattttgacgtagacggtgacgggcacataagtcaggaggagttccagattattcgtggcaactttccttacctctcggcattcggcgaccttgatcagaatcaggacggttgcatttcaagagaagaaatggtgtcttacttccttcggagtagctctgtgcttggcggtagaatgggcttcgttcataactttcaggagtcaaactcactgcggccagtggcatgcaggcactgtaaggctctgatcctgggaatttacaagcaagggctcaagtgccgggcttgtggcgtaaactgccacaaacagtgcaaagatcggctaagcgtggagtgcagacggagagcacagtctgtctctttggagggctctgctccttcaccaagccccatgcactcccatcatcaccgagccttctcgttctctctccctagacctggtaggagggggtctagaccaccggaaatacgagaggaggaagtacagacagttgaggatggtgtgtttgacattcacttgtag

SEQ ID NO: 237998 - DNA, 1830 bp, synthetic construct
  misc_feature 1..1830: note = Description of Artificial Sequence: Synthetic coding sequence
  source 1..1830: mol_type = other DNA
atggccggtactcttgacctggacaaaggctgcactgtcgaggagctactaagaggatgtattgaggcttttgacgattctggcaaagtgagagatcctcagctagtgagaatgttcctgatgatgcacccatggtatataccctcctctcagctggccgctaagttgcttcatatttaccagcaatccaggaaggacaactctaacagcctgcaggtgaagacttgtcacctcgtcaggtactggatctccgcctttcctgccgagttcgatctgaaccctgagctcgccgagcagataaaggaactaaaggccctgctggaccaggaagggaaccgccgacactccagcctgattgatatcgattccgtcccaacctataaatggaaaaggcaggtgacccaacggaatccggtcggccagaagaagaggaaaatgtcccttttatttgatcatctggaacctatggaactggcggaacatctgacatatctggagtatagaagcttctgtaagattctgttccaagattatcactctttcgtaacccatggctgtacagtggacaaccccgtgcttgaaagatttatcagcctctttaattcagtttcccaatgggttcagctcatgatcctatccaaacctaccgccccacagcgcgcattggtcataacccacttcgttcatgtggctgagaaattgttgcagctacagaactttaatactctgatggctgttgtgggcggacttagtcacagctcaatctcaaggctcaaagaaacccactctcatgtctccccagagaccattaaactgtgggagggtctgacagagctggtgaccgctacaggtaactacggtaattatcgcagacgcttggcagcttgcgtcgggttccggtttcccatcctgggggtgcatctgaaagacttggttgcgttacagttggccctgccagactggctcgacccagctagaacacggttaaatggagccaagatgaagcagctttttagcatcctggaggaattggctatggtgaccagtctccgccctcctgtgcaagccaacccagatttactgtctcttctgaccgtcagtctggaccagtatcagacagaagatgagctgtatcagctgtccctgcaacgtgagcccaggtccaagtcctctcctaccagccccacctcatgcacaccacctccacgccctcctgtcctggaggaatggaccagcgccgctaagcccaaactagaccaagctctcgtagtggaacacatcgagaagatggttgagagtgtgtttcgcaatttcgacgtggatggagacggacatattagtcaagaagaattccagatcatacggggaaacttcccttacctttccgctttcggagacctcgatcagaaccaggatggctgtatctccagggaagagatggtgtcgtatttcttgcgcagctcttccgtactcggtggcaggatgggttttgtgcataattttcaggaatcaaactcactgcgaccagttgcctgtcggcattgcaaggcactgattctagggatctacaagcagggccttaagtgtcgcgcttgcggggttaactgtcataagcagtgtaaggacaggctctcagtcgaatgcagacgaagggcgcagtcagtgtctctggagggtagtgccccatccccctcccctatgcacagccatcaccatagggccttctcattctctcttccccgtcccggacgcagaggcagtcgccctcccgagatccgagaggaggaagtccaaacagtcgaggatggggtgttcgacatccacctgtag

SEQ ID NO: 237999 - DNA, 432 bp, synthetic construct
  misc_feature 1..432: note = Description of Artificial Sequence: Synthetic coding sequence
  source 1..432: mol_type = other DNA
atggcaggcacgttagatttggataaaggctgtaccgtggaggagctgctgcgagggtgcatagaggcttttgatgattccggaaaagtgcgtgacccccagcttgtgcgcatgtttttaatgatgcacccatggtatattcctagcagccagctcgctgccaagctgctgcacatctatcagcaaagccgaaaggacaactccaattccctacaggttaagacctgccatctcgtacgctattggatcagcgcctttcctgccgagttcgacttgaaccctgaactcgcggagcagatcaaagaactgaaggcgctattagaccaagaggggaaccgacgccactcatctctcattgatattgattccgtgtgtgtgggggaacatagaggcctggggggacactcggttagttacacgatctgtgcgtag

SEQ ID NO: 238000 - DNA, 1731 bp, synthetic construct
  misc_feature 1..1731: note = Description of Artificial Sequence: Synthetic coding sequence
  source 1..1731: mol_type = other DNA
atgaaccgcaaggacagtaagaggaagtcacaccaggaatgtactggcaagattggcggacgtggacgcccacgccaggttcgacgacacaaaacgtgtccctcccccagagaaatatcaaaagtcatggcctctatgaatttgggcttactgagcgaggggggttgcagtgaggacgaactgctggaaaagtgcatccagtcctttgacagtgcgggttctctatgtcacgaagatcacatgctaaacatggtgctcgctatgcactcctgggtactccccagcgcggacctggcggcaaggcttttgaccagctaccagaaggccacaggcgacacccaggaactcaggcgactgcagatttgccatctcgttagatactggttaatgcgacatccagaagtgatgcaccaggatccacagctcgaggaggtgatcgggaggttctgggcgacagtggcgcgagagggcaattcggcgcaacggcgtctcggcgactccagcgacctcctttcaccgggtggtcctggtccaccactgcctatgtccagtcccggactggggaaaaaacggaaggtatctctcttgtttgatcatctcgagaccggagaactagcacagcacctcacgtacctcgagtttaggtcattccaggccatcacagccctgctggaactgacagagctactggcatctcacaacaactacgctaggtacaggcggacctgggcaggctgcgccggattcaggttaccagttcttggggttcatttgaaagacttagtgagtctccacgaagcccaacctgatcggctccccgatgggaggctgcacctgccgaaactcaataatctgtacctgcgtctgcaggagcttgtcgccctgcaaggacagcaccctccatgctcagcaaatgaggatcttctgcacctgctcactttgagcctggatctgttttacactgaggatgagatttacgaactcagctacgctcgcgagccccgatgccccaaatcattgcccccttctccatttaatgcacccctcgttgtggagtgggcgccaggagtgacaccaaagcccgatcgcgtaactttgggcaggcatgtggagcagctggttgaatcagtattcaagaactacgacccagaggggcgaggtaccatttctcaggaggacttcgagcggttgtctggtaatttcccctttgcctgtcatgggctacatcctccaccgcgtcaaggacgagggagtttcagtagagaggagcttactggctatttgctacgcgcttccgccatatgttcaaaattgggcctggcatttttgcacaccttccacgaggttacattccggaaacccacattctgcgactcttgctcggggttcttatggggggtgaccaaacagggttacagatgccgggagtgtggactttgttgccacaaacactgtcgcgaccaggtgaaggtggagtgcaaaaaaagacctggagccaagggtgatgctgggcctccaggcgctcctgtgccatccacccctgcccctcatgccagctgcggatccgaagagaaccattcatacacactgagcctcgaacccgagaccggatgccaattgcgtcacgcctggacccagaccgagtccccccatccctcctgggagactgatacggttccatgtcctgtcatggaccctccatcaacggcctcctctaagctcgatagctag

SEQ ID NO: 238001 - DNA, 1854 bp, synthetic construct
  misc_feature 1..1854: note = Description of Artificial Sequence: Synthetic coding sequence
  source 1..1854: mol_type = other DNA
atgaacaggaaggatagtaagcggaaaagccaccaggagtgtaccgggaaaatcggcggtagaggacgaccacggcaggtaaggaggcacaagacatgcccttccccgagagaaatttctaaggttatggctagtatgaatctgggtctgctctctgagggcggatgtagcgaggacgagctgctggagaaatgtatacagtcttttgattctgccggaagcctgtgtcacgaagaccatatgctgaatatggttctagcaatgcacagctgggtgttaccaagcgctgaccttgcagctaggctcctgactagctaccagaaggcaaccggagacacccaggaattgcggcgacttcaaatctgccatcttgtgcgttactggctcatgaggcacccagaagttatgcatcaggatcctcagctggaggaggtcataggccgtttctgggcgacagtcgctagggaagggaattcagctcagaggaggctaggagatagctctgatttgctcagcccgggagggcctggacctcctcttcctatgtcctctccaggtttaggcaaaaaacgtaaagtctccctgctgttcgaccatctcgagacaggagaattggcccaacaccttacctacctcgaatttcgaagcttccaggcgattacaccccaggatctgaggagttacgtactacaaggatctgttagggggtgtcctgctttggagggaagtgtcgggctatcaaacagcgtgtcacgctgggtgcaagtgatggttctctcccgcccaggccctttacagcgcgctcaggttttagataaattcatacacgtggcacaacgtttgcaccagctacagaactttaacacactaatggctgttactggaggcctctgtcacagtgccatcagccgtctgaaggatagccacgcccacctgagcccagattctactaaagcccttctggaacttaccgaactcctcgcatcacacaataactacgctcgataccgcaggacatgggcgggttgtgcgggtttccgcctccctgtactgggcgtacatttgaaagatctggttagcctgcatgaggcgcagcccgacagactcccagatgggaggctacacctgccaaagctgaataatctgtatctgagactccaagagctcgtggcccttcagggccagcaccccccatgttctgccaatgaggatctcttacatctcctaaccctctcactggacctgttttatacagaagacgaaatctacgagctctcctacgcgagagagccgagatgcccaaaaagcctaccacccagcccttttaatgctccactggtagtcgagtgggccccaggcgtcactcccaaaccggaccgcgtgacacttggcaggcacgtggagcagctggtggagtctgtgttcaagaattacgaccccgagggacggggaaccatttctcaggaagacttcgaacgcctttctgggaactttccgtttgcttgccacggactgcacccccctccgcgacagggcaggggctccttttccagggaggagctgaccgggtacctgctgcgggcaagcgccatttgtagtaagctgggcttggccttcctccacacgtttcatgaggtcaccttccggaagcccacattctgcgactcatgtagcggctttctgtggggggtcacgaagcaaggataccggtgtagaggtgagtggggcgtctccgaatgggagggaagtctgggtccccaggccggaaggatggatgacactgaccgcacaccagccgctgccttcccccaatccgccggatgcgtggctactaatacagccgaaacgcgttag

SEQ ID NO: 238002 - DNA, 1455 bp, synthetic construct
  misc_feature 1..1455: note = Description of Artificial Sequence: Synthetic coding sequence
  source 1..1455: mol_type = other DNA
atgaatcgcaaggatagcaagcggaagagtcatcaggaatgtaccggcaaaattgggggacggggacgaccgagacaggtgaggagacataaaacctgcccaagcccccgagagatatctaaggtgatggcttcaatgaatctgggccttttgagcgaggggggatgctcggaagatgaactgttggaaaaatgtatacaatcctttgattccgctggatctctgtgccacgaggaccacatgttgaacatggtgctggccatgcacagctgggttctacccagtgctgacctggcagcgcgtctgctgaccagttaccagaaggcaaccggcgatacgcaggaactccggagactccagatatgccacttagtccgctattggctcatgcgccatccggaggtgatgcaccaggatccccagttagaagaggtgataggaaggttttgggcgaccgtggctcgcgaggggaacagcgctcaacgcaggctaggagactcatccgatctcctgtcacccggaggccctggtcctccgctgccgatgagctccccaggcctcggtaagaaacgaaaggtgagccttctgttcgaccatcttgaaactggggagctcgcacagcacctgacttatctggagtttagaagcttccaggcaattactctgagccttgacttgttctacacagaggatgaaatttacgaattgtcctacgcgcgagaacctagatgtcctaagtccttgccccctagtcctttcaacgccccactcgtggtggaatgggctcctggagttacccccaaacctgatcgcgtgacgcttggacgtcatgttgagcaactggtggagagcgtcttcaagaactacgatcctgagggcaggggcaccatatcccaagaagacttcgagagactgtcaggaaattttccctttgcgtgccatgggcttcatcccccaccacggcagggcagaggctcttttagccgggaagaactgaccgggtatctgctgcgcgcttcagctatatgtagcaaactcgggctggctttcttgcatacattccatgaagtaacgtttcggaaacctacgttttgtgattcttgttctggctttttgtggggggtgaccaaacaggggtataggtgtagagagtgcgggctatgctgccacaagcactgcagagatcaagtgaaggttgaatgcaagaaaaggccaggggctaagggcgatgccggtcccccaggcgcaccggtgccttctactccagcgccacacgccagctgtggttcagaggaaaatcactcttacaccctctccctggagccagagactggttgtcagctgaggcatgcatggacacagacagaaagtccccatccctcttgggagaccgataccgtcccttgcccagtgatggatcctcctagcaccgcttcgtctaaactcgactcatag

SEQ ID NO: 238003 - DNA, 1746 bp, synthetic construct
  misc_feature 1..1746: note = Description of Artificial Sequence: Synthetic coding sequence
  source 1..1746: mol_type = other DNA
atgaatcgtaaagattcaaaaagaaagtcgcatcaggagtgcactggcaagatcggaggacgcggtcgccctcgtcaagtgaggcggcataaaacatgcccatcacccagggagatctctaaggtcatggcttccatgaacctgggcctactctctgaggggggatgctccgaggacgagctgttggagaagtgcatccaatcctttgactcagcgggaagtctttgccacgaagaccatatgctcaatatggtgcttgccatgcactcgtgggtgttaccttctgctgacctggccgctagattactgacgagttaccagaaggcaaccggagatacccaagaactacggaggctgcaaatctgtcacctagtccgatactggctgatgagacaccctgaggtaatgcaccaagacccccagttggaggaggtgatcgggcgtttctgggccacggtggctcgggagggaaatagcgctcagaggaggctgggggactctagtgacctgctgagccccggaggacccggtccacccctacccatgtcctctcccggtttagggaagaagcgcaaagtatctctgctctttgatcacttggagacgggcgaactggcccagcatctgacatatctcgagttcaggtcattccaggctataacaccccaggatctaagatcatacgtgctccagggaagcgtgcgcggatgtcctgctttagaaggctcagtaggactctcaaactccgtatccaggtgggtgcaagttatggttctttcccgtcctggtccactccagagagcacaggtgctggacaagttcattcacgtggcacagcggctacaccagctccagaacttcaatacactgatggcagtgaccggcggactgtgtcactctgccattagcaggctgaaagatagccatgcacatttgtcccccgacagcactaagctgtctctggacctgttctacaccgaggatgagatctatgagctgtcttacgcaagagaacccagatgccctaaatcactgccacccagccctttcaacgccccactggtggttgagtgggcccctggggtgacccccaagcccgatagggtcacccttggtcgccacgttgaacagctcgtggagtcagttttcaaaaattacgacccagagggtagaggcacaatcagtcaggaagactttgaacgtctgtccggaaacttcccctttgcctgccatggactgcatcccccaccacgccaggggagaggatctttctctcgagaggagctgacaggatacctgctacgcgcttccgcaatttgttctaagttagggttggcttttctgcatacctttcatgaggtaacatttcggaaaccaactttttgtgactcctgttctggcttcctgtggggagttactaagcagggctatcggtgcagagagtgtggtctttgctgccacaaacactgtcgagaccaggtcaaggtcgaatgtaaaaagcgaccaggggctaagggggacgcaggcccacccggagcccctgtcccttctacacccgctcctcatgcctcatgcgggagtgaggaaaatcactcctacacactttccttagagcctgagacgggctgccagcttcggcatgcatggactcagactgaaagccctcacccgagttgggaaaccgacactgtcccctgtcccgttatggacccccctagcactgcttcaagcaagcttgactcgtag

SEQ ID NO: 238004 - DNA, 2022 bp, synthetic construct
  misc_feature 1..2022: note = Description of Artificial Sequence: Synthetic coding sequence
  source 1..2022: mol_type = other DNA
atgaaccggaaggactcaaagcgcaaatcccaccaggaatgtactggcaaaatcggcggaagaggcagacctcgccaggtccgacggcacaagacatgcccatcccccagagaaatctcaaaagtgatggcaagtatgaacctcggtctgttatccgaggggggatgcagtgaggacgagttgctggaaaagtgtatccagtcatttgactctgccggttccctttgtcatgaggaccacatgctcaacatggtcttagctatgcacagttgggtcctaccctccgcagacctggccgctagactcctaacgtcctatcagaaggcaactggggacacacaggaactgaggcgcctgcagatctgccacttggttcggtactggcttatgcgccatcccgaggtcatgcaccaggatccacagctcgaagaggttatcggacggttttgggcaaccgtagcccgagagggcaattcagcccagaggagactgggggattctagcgatttgctgagtcccggaggcccaggcccacctttgcccatgtctagcccgggtctcggcaagaagagaaaagtcagcctcctttttgatcatttggagactggcgagctggcccagcacctgacctacctggagtttcggagcttccaagccatcacccctcaagatctgaggagttacgtgctccagggtagtgtgcgaggctgccccgctctggaaggttcagtgggattgtccaacagcgtcagccgatgggttcaggtgatggttctctccagacccggacccctccagagggcacaggtactcgacaaattcatccacgtggcccagcgcttgcaccagctgcagaatttcaacaccctcatggccgttaccggaggactgtgtcattcagccataagtcgtctaaaggatagtcatgcccatctgtctccagatagtacaaaagctctgctggaactgacagagctccttgcttctcataacaattatgcacgctaccgtcgaacttgggccggatgtgccggtttccgcctacctgttctgggcgtacacttgaaggatctggtctcgctccacgaggcacagcctgaccggctccctgacgggcgattgcatctgcccaaactgaacaatttgtacctacggctgcaagagctggttgccctgcagggtcagcaccccccatgtagcgccaacgaagacttacttcacctgctcactctgagccttgatctgttctacaccgaggacgaaatatacgagctctcgtatgcgagagaacccagatgccctaagtctctgccaccaagtccattcaatgctccattggtcgttgagtgggcaccgggtgtgaccccaaaacccgatagagtgactctcggcaggcacgtggaacagctggtggagagtgtgtttaagaattacgatcctgaggggaggggaaccatatcccaagaagattttgaacggctgagcgggaactttccatttgcctgccacggattgcacccccctccccgacagggacgaggaagtttcagcagggaggagcttactggctacctcctccgcgctagcgccatttgcagcaagctgggccttgcgtttttgcacacgtttcacgaggtgactttcaggaagccgacattctgcgactcgtgctcgggtttcctatggggagtgactaagcagggatacagatgcagagagtgtggtctgtgctgtcacaaacattgcagagaccaagtgaaggtggagtgtaagaaacgtcccggagctaaaggcgacgccggaccgccaggcgctccagtgcccagcactcctgctcctcatgctagctgtggaagtgaagaaaaccactcatacactttgagcctcgagcccgaaactggatgtcaactgcgccacgcctggacacagacagaatcaccccatcccagctgggagactgacactgtgccctgtcccgtaatggacccgccatccaccgcgagcagcaaactcgattcgtag

SEQ ID NO: 238005 - DNA, 1980 bp, synthetic construct
  misc_feature 1..1980: note = Description of Artificial Sequence: Synthetic coding sequence
  source 1..1980: mol_type = other DNA
atgaatcggaaggattccaagagaaaaagtcatcaggaatgcacaggaaaaattggcggacgcggtcggcctcgccaggtgcgtcgccacaagacttgtccgtctcccagggaaatatctaaggtcatggcctctatgaacctgggcctgctctcagaaggaggctgctccgaggacgagcttctggagaaatgtattcaaagttttgacagtgccggtagcctatgccacgaagatcatatgctgaatatggttctggccatgcacagctgggtcctgccatccgcagatctagccgctaggctcttaacatcctatcaaaaggctaccggtgatactcaagagttgaggaggctccagatctgccatctggtgaggtattggttgatgcgacaccctgaggtgatgcaccaggacccccagctggaagaagtgattgggagattttgggctactgtggcccgtgaagggaacagcgcccaacggcgactgggagactcatctgatctgccaggtttgggaaaaaagagaaaagtgagtctgctctttgatcatctggagacaggcgaattggcccagcatctgacatatttagagttccgctcctttcaagccatcaccccccaggatctccgcagctatgtactccagggtagcgtgcgaggctgtccagccctggagggcagtgtggggctctcaaacagcgtctctaggtgggtccaggtgatggttctgtcgagaccaggtcccttacagcgcgctcaggtcctggacaaattcatccacgtggcgcagcgtttgcaccagcttcagaacttcaacaccctgatggctgttacaggaggcctctgtcactcggctatctctcggcttaaggactctcatgctcacctgtcccccgattctaccaaagccctgctggagttaaccgaactgcttgcatcacacaacaactatgcacggtatcgtcgcacctgggccggatgtgccggatttcgacttcctgttttgggggtccaccttaaagacctcgtcagcttgcacgaggcccagccagacagactgccggacgggaggctgcatctgcccaaactgaataatctgtaccttaggcttcaggagctcgtggccctacagggacagcaccccccttgttcggcaaacgaagacctgctgcaccttttgacccttagcctggatctgttctatacagaggatgaaatttatgaactctcctacgccagagagcctcgctgccccaagagtctgccacccagtccatttaacgcgccactggtcgtggaatgggctcccggtgtgactcctaagccagacagggttactctggggcgtcatgtagagcaactggttgagagcgtgtttaagaattatgatcctgaaggtcggggaactatctcccaggaggactttgagagactgtccggcaatttccccttcgcttgccatggattgcacccccctccccgtcaaggaagaggatctttctctcgagaggagctgactgggtatcttctgagagcgagtgcgatatgttccaaattgggactagcatttctgcatacatttcatgaagtcactttcagaaaacccactttctgcgattcctgttcaggtttcctgtggggagttaccaaacagggatacagatgtcgagagtgcggactgtgctgccataaacactgccgcgaccaagtgaaagtggaatgtaagaaaagacccggagccaagggcgatgctggccctcccggtgctccagtcccctctactcccgcaccacatgctagttgcggatctgaagagaatcatagctacacactttctctggaacccgagacggggtgccagctgaggcatgcatggactcagactgaatcccctcaccccagttgggagactgataccgtgccttgcccggtgatggatcccccatctacagcttctagtaagctcgatagctag

SEQ ID NO: 238006 - DNA, 1815 bp, synthetic construct
  misc_feature 1..1815: note = Description of Artificial Sequence: Synthetic coding sequence
  source 1..1815: mol_type = other DNA
atgaatcgaaaggactccaagcgaaagagccaccaggaatgtactggcaaaatcggtgggaggggtcggcctagacaggttcgtagacacaagacttgtccctcaccgagggaaattagtaaggtcatggccagtatgaaccttgggctcctatccgagggaggctgcagtgaagatgagctgctggagaaatgtatccaatcctttgacagtgccggaagcctatgtcatgaagaccacatgctgaatatggtgctggccatgcactcttgggttctgccttctgccgatctggcagcacgtctgttaacgtcttaccagaaagctacaggcgatacccaagagctgcgccgtcttcagatctgtcacctggtgcggtattggcttatgcgacatcctgaggtaatgcaccaggacccccaacttgaggaggtcattggcagattttgggcgaccgtcgccagggagggcaacagtgcccaacggcgattaggcgacagcagcgacctattgtcaccgggagggcctggtcccccactgcccatgtcctcacccggattggggaagaaaagaaaagtcagcctacttttcgaccacctagagaccggcgagctggcccagcatctcacgtacttagaatttcggagcttccaggccatcacccctcaagacctccgatcctacgtcctgcagggctccgtgcgagggtgcccagccttggaaggttcagtggggctgtctaatagtgttagcaggtgggtccaggtgatggttttgtccaggccaggaccgctgcagcgcgcacaggtgctggataaattcatccacgtcgcccagcgcttacaccagttgcagaacttcaatacattgatggccgtgactggcggtctctgtcactccgctatatcacggctgaaggactcccacgcacatttgtcgcctgactcaacgaaggaactggtggctttgcaaggccaacaccccccatgcagcgctaatgaagatctgctccatctgttaacactctcgctagatctgttttacactgaggatgaaatctacgaattgtcctatgctcgggaaccgaggtgtcctaagagcctccctccaagtcctttcaatgcacctttggtggtggagtgggcccctggcgttacacccaagcccgaccgcgtgacactcggcaggcatgtagagcagttggtcgaaagtgtgtttaagaactacgatcccgagggaagaggcactatatcccaggaagacttcgagcgactttccgggaattttcccttcgcctgtcatgggttacaccccccaccccgacagggcagagggagctttagccgtgaggagctcactgggtatcttttgcgggctagcgctatctgttccaaactcggcctggctttcttacatactttccatgaagttacgtttcgaaagcccaccttctgtgattcctgcagcggtttcctgtggggagtgaccaagcaggggtatagatgtcgcgagtgtggactttgttgtcacaaacactgtcgcgaccaagttaaggtggaatgcaagaaacgccctggggctaagggcgacgctgggcctccgggtgctccagtgccaagcacgcctgcccctcacgcctcttgcggatccgaagaaaaccactcgtataccctcagtctggagcctgaaaccggatgccagttacggcatgcatggactcagacagagtccccccatcctagctgggaaacggataccgtgccttgccctgtcatggacccacctagcactgcatcttctaaactggattcttag

SEQ ID NO: 238007 - DNA, 1857 bp, synthetic construct
  misc_feature 1..1857: note = Description of Artificial Sequence: Synthetic coding sequence
  source 1..1857: mol_type = other DNA
atgaagaaggacgttcgtattctgcttgtcggcgagccccgtgttgggaagaccagcctcatcatgagcttagtgtccgaggagttccccgaagaggtgccacccagagcagaggaaatcacgatcccagccgatgtgacacccgaacgggtccctacccacatagttgactattccgaagcagagcagagtgacgagcagctgcaccaagaaatctctcaggcaaatgttatctgtattgtctacgctgtgaataataaacacagcattgataaggtcactagcagatggattccgctgatcaatgaacgtaccgataaggacagtagactccccctgattctcgtcgggaataagagcgatctcgtggagtatagctctatggagacaatcctaccaataatgaaccagtacacagagatcgaaacatgcgtggagtgcagcgccaaaaatcttaagaatatttctgagcttttctactacgctcagaaagccgtgctgcatccaacgggacccctatactgccccgaagagaaggagatgaagcctgcttgtatcaaagcacttacgagaatctttaagatcagcgatcaggacaacgatgggaccctgaatgatgccgaactcaacttttttcagcgcatctgctttaacacacctcttgctcctcaggctttagaagatgtgaagaatgtcgtcaggaagcatatctctgacggggtggctgattctgggctgacgctgaagggctttctgtttttgcatacattattcatccagcgaggcagacacgagacgacctggacagtacttcggaggttcggttacgatgatgaccttgatctcacacccgaatacctttttccgctgcttaaaatcccacccgattgcactacagagctcaatcatcacgcttatctatttctccaatcaacctttgataagcacgacttagatagagattgtgcactgtccccggacgaactgaaagacttgttcaaggtgtttccttatataccatggggcccagatgttaataacactgtgtgtacaaacgaacgtggttggattacctaccaggggttccttagccagtggacattaactacctacctggacgttcaacgctgcctggagtatctcgggtatttgggctactctatcctgaccgagcaggagtcccaggcctctgccgtgacggtaacccgggacaaaaaaatagatttgcaaaagaagcagacacagaggaatgtgttcaggtgtaacgtcattggagtgaagaactgcgggaagtcaggcgtgctgcaggcgctgctcggcagaaatctgatgcgccagaagaaaattcgagaagatcataagtcatattatgccattaacaccgtgtacgtctacggacaggagaagtacctccttcttcacgacatctccgaatccgaattcctgacagaagccgaaattatatgtgacgtagtatgtttggtgtacgacgttagtaaccctaaaagcttcgaatattgcgccagaatctttaagcaacacttcatggattcacggattccttgcctgattgtggcagcaaaaagcgatctgcacgaggtgaagcaggagtatagtatttcacccactgacttttgcaggaagcataagatgccaccaccacaggcctttacctgtaacacagccgacgcgccaagtaaagatatctttgtgaagcttaccacaatggcaatgtatcctcacgtcacgcaggccgaccttaaaagcagtaccttctggctccgggcttcttttggtgccactgtttttgctgtactgggcttcgctatgtataaggccctgctgaaacagcgatag

SEQ ID NO: 238008 - DNA, 1980 bp, synthetic construct
  misc_feature 1..1980: note = Description of Artificial Sequence: Synthetic coding sequence
  source 1..1980: mol_type = other DNA
atgaaaaaagatgtacgaattttgctggtgggagagccaagagtggggaaaacctccctaattatgtcgcttgtatccgaggaattccctgaggaagtccctccgcgtgccgaagagattacaattccagctgatgttacccccgagcgcgtgccaacccatattgtcgattattcagaagcggaacaaagcgatgagcagcttcaccaggaaatctctcaggctaatgttatatgtattgtgtacgctgtgaacaataagcactctattgacaaggtaacgtcccgctggattcctctcataaacgaacgcactgataaggatagcaggctgcctttaatcctggtgggaaacaagagcgacctcgtcgagtatagttcaatggagacaattctgcccattatgaatcaatacacggagattgagacctgcgtggagtgctccgcaaaaaatttgaaaaacatttctgaattgttttattacgcccagaaggctgtgctgcaccctactggacccctctactgccctgaggagaaggagatgaagcctgcatgtattaaagctctgacaaggatttttaaaatttcagatcaggataacgatggtactcttaatgacgcagagctaaacttttttcagaggatttgcttcaacacaccactggcccctcaggccctcgaggacgttaagaatgttgtgaggaagcatatatccgacggcgtggccgattccggtctgacattaaaaggatttttatttctccatacgctgtttatccagcggggacggcatgaaacaacatggacagttctgcgccgtttcgggtacgatgacgacctcgatctgacccctgaatacctcttcccactgctgaaaatcccacctgactgtactactgagctcaatcatcacgcctatttattcctccagtctacatttgacaagcacgacctggatcgcgattgcgcattgtcgcccgatgagctgaaggatctctttaaggtttttccttatattccctggggccctgatgtgaacaacactgtgtgtacaaatgaaagggggtggattacatatcagggttttctgtcccaatggacacttacaacatacttggatgtccagaggtgcctagagtatctgggctacctcggatattctatcctgactgagcaggagtcccaagcctccgccgtaacagtcacaagagacaaaaagatcgatctgcagaaaaagcagacgcagagaaatgtctttagatgcaacgtgattggtgtcaagaattgtggcaagagtggggtgctgcaggcgcttttaggccgaaatctgatgcggcaaaagaaaataagagaagaccacaagagttactatgctatcaacactgtttacgtatacgggcaagagaaatacctgctactgcatgatatttcagagagcgagtttctgaccgaggcggagattatttgcgacgttgtctgtctcgtatacgatgtgtctaatcccaaaagctttgagtactgcgccaggatcttcaagcaacatttcatggattccagaatcccttgtctgattgtcgccgctaagagcgatctgcatgaggtgaaacaggaatattcaatatctcctacagatttctgtaggaagcataagatgcctccccctcaggccttcacttgcaatacagccgatgcaccatccaaagatattttcgtgaagctaaccactatggctatgtatccccatgcacgcctgagatgcatgtgcacctgcaaccgatgcacgttttgtatttgccagaattttcttaatagcgacctgctgcaatctgtaaagaacaagattttcactgcagtcctcaacaggcacgtgacccaggccgacctgaagtcgagtaccttttggcttagagccagcttcggtgccacagtctttgcagtactggggtttgcgatgtacaaggctctgctgaagcaacgctag

SEQ ID NO: 238009 - DNA, 2076 bp, synthetic construct
  misc_feature 1..2076: note = Description of Artificial Sequence: Synthetic coding sequence
  source 1..2076: mol_type = other DNA
atgaagaaagacgtgaggatcctcctggttggagaacctcgggtgggcaaaacctcactcattatgtcactggtttcggaggaattcccggaagaagtcccgcctagagccgaagagataaccatccctgccgacgtgacacccgagcgcgttccaacccacatcgtggattactccgaagcagaacagagcgacgaacaattacaccaggagatttcccaggctaacgtcatctgtattgtatacgccgtcaacaataagcactctatcgataaagtcacttccaggtggatacccttgattaatgagaggaccgataaggattccaggctccccctgatcctggtgggaaataaatccgatcttgtggaatactcatcaatggagaccatcctgccaattatgaaccaatacacagagatcgaaacatgtgtcgaatgttctgctaaaaacctgaagaacatctcagaactgttctactatgcccaaaaggcggtgcttcatcccaccggtcctctgtattgtcccgaagagaaagaaatgaagccagcctgcataaaagctttgacccggatcttcaagatctctgaccaggataatgacggcacgctgaacgacgcagaacttaacttcttccaacgcatttgttttaacacgcccctcgcccctcaggccctcgaagacgtgaaaaatgtcgttcgaaaacatatttctgacggagttgccgactcaggtttgactctcaaggggttcttgtttctgcataccttattcatccagcggggacgacatgaaacaacatggaccgtgctgaggagatttggctacgacgatgacctggatttgacacccgagtacctgtttccgctgctgaagatccctccagactgtacaactgagttgaaccatcacgcctacttatttctgcaatccacattcgataagcatgacctggatagagactgcgctctgtcaccagacgaactcaaggatctattcaaggtgttcccctacatcccctggggtccagatgtcaacaacacagtctgcaccaatgagcgcggttggatcacgtatcaggggttcttaagccaatggactctcaccacttacctagatgttcaacgctgcctggagtatctggggtacttaggttactccatcttgactgagcaggagtctcaggcttctgcagtgacagtcacgcgggacaagaagatcgacctgcagaagaaacagactcagcggaatgtgttccggtgcaatgttattggtgtgaagaactgcggcaagagtggcgtgctccaggcattgctgggcaggaacttgatgcgtcagaagaagatccgtgaagaccataagagctattatgcaattaacacagtttacgtctatgggcaggagaaataccttctgctccatgatatatcagagagtgagttcctaacagaggccgagattatctgtgatgtcgtatgcctcgtgtatgacgtctctaatccaaaaagttttgagtactgcgcccgaatttttaagcagcacttcatggactccagaattccttgtctgatcgtggcagcaaaaagcgacctccacgaagtaaagcaggaatattccatcagccctaccgacttttgccgcaaacacaagatgccgccaccccaagccttcacgtgtaacaccgctgatgcaccatcaaaggatatctttgtgaagttgacaactatggctatgtatccagaagaccactaccgcgatagattgagtcgagacatgggccataccgataggatagagaatcttcgtaagatctgggtgttcctgaagaccgccttccatgccaggttacggtgcatgtgtacatgtaatcggtgtaccttttgtatttgccagaattttttaaactccgatttgctgcaatctgtgaagaacaaaatcttcactgccgtcctgaatcggcatgtgacccaggccgaccttaaatccagtaccttctggcttcgagcatcattcggggctactgtgttcgctgtgctagggtttgcaatgtataaggccctgctcaaacagagatag

SEQ ID NO: 238010 - DNA, 1953 bp, synthetic construct
  misc_feature 1..1953: note = Description of Artificial Sequence: Synthetic coding sequence
  source 1..1953: mol_type = other DNA
atgaaaaaagatgtccgcatcctgctcgttggcgagcccagggtgggcaagacctctctcataatgtccttagtgtctgaggaattccccgaggaggtgccacccagagcagaggagatcactattcctgctgacgtcactcctgaacgcgtccctacccatattgtcgattacagcgaggcagagcagagcgacgaacagctgcaccaggagatttcccaggctaacgtcatctgtatcgtctacgctgtcaacaacaagcactccatcgataaagtgacctcacgctggatcccgcttatcaacgagagaactgataaggattctagattgcccctgattctggtgggaaacaaaagcgaccttgtcgagtattcaagtatggagacaatcctgccaatcatgaaccagtatactgaaattgagacatgtgtcgagtgctcggccaagaacctcaaaaatatctccgagcttttctactacgcccagaaagccgtgttgcatccgactgggcctctttactgtccagaggaaaaggaaatgaagccagcatgtattaaagcactcactcgcattttcaagatttcggatcaggataatgacggtacattaaatgatgccgaactcaacttttttcagaggatatgtttcaacactccattagccccacaggccctggaggacgtgaagaacgtggtgaggaagcacatctctgatggtgtcgcagatagtggtctgacactgaaaggatttctgttccttcacaccttatttatacagcgcggtcgacacgaaacaacctggaccgtattacggcgtttcgggtacgatgacgatcttgatctgactccggaatatctgtttcctctcctgaagatccccccagattgcacaacagagcttaatcaccacgcctatctctttctacaaagcaccttcgacaaacatgacctagacagagactgcgccttgtcacccgacgagttgaaggacctgttcaaggttttcccctacataccatgggggccagacgtaaataataccgtatgtaccaatgagcggggatggattacatatcagggattcctgagccagtggaccctcaccacctacctggacgtgcagaggtgccttgagtaccttgggtatctgggatatagcattctcactgagcaggagtcccaggcctcagctgtgactgtgacaagggataagaaaattgacctacagaagaagcaaacacagcgaaatgtgtttcggtgtaatgtgattggggtaaaaaattgcggtaagagcggagtgcttcaagccctgctggggagaaatcttatgcgccaaaaaaagatcagagaagatcacaaatcctattatgcaataaacaccgtgtacgtttacggccaggaaaaatatctgcttctccatgacatctccgaatcagagtttctcaccgaggcagaaattatttgcgacgttgtttgcttagtgtatgacgtgtcgaaccccaaatcttttgagtattgtgccaggatttttaagcaacattttatggattcacgcatcccgtgcctgatcgtcgctgctaaatccgatttacacgaggtgaagcaggaatacagcatttcacctacagacttctgccgcaaacataagatgcctccaccccaagcttttacttgtaacacagccgatgccccttctaaagatatctttgtcaagctgactaccatggccatgtaccctgaggatcactaccgggaccgcctctctcgagatatgggccacaccgaccgtattgagaacttacggaaaatctgggtctttctgaaaactgctctccatgtcacgcaggccgatctgaaaagcagcactttctggttgagggcctcttttggagccacagtgtttgccgtgctgggctttgcaatgtacaaggcgcttctgaagcaacggtag

SEQ ID NO: 238011 - DNA, 744 bp, synthetic construct
  misc_feature 1..744: note = Description of Artificial Sequence: Synthetic coding sequence
  source 1..744: mol_type = other DNA
atgaaaaaggacgtcaggatcctattagtgggtgagccgagagtgggaaagacaagtctgataatgtcacttgtctctgaggaatttccagaggaggtgccaccccgagccgaggaaataaccattcccgcagacgtgaccccagaacgggtgcccacacatatcgttgactatagcgaggccgagcagagcgatgagcagctgcaccaagaaattagccaggccaatgttatatgcattgtgtacgcagtgaacaataaacactccatcgataaggtgacatcgcggtggatacccctgataaacgaaaggacggataaggactcacgcctccctctcatcttagtggggaacaagagcgatctcgtcgagtactctagcatggaaaccatcttaccgattatgaaccaatacaccgagatcgagacctgcgtcgagtgttccgccaagaatctgaagaacatttcagagcttttttattatgcccagaaagccgttcttcaccccacaggacccttgtactgccctgaggaaaaagagatgaaacccgcatgcatcaaagcccttaccagaatctttaagatctcagatcaagacaatgacggtacgctgaacgacgcagagctgaactttttccaaaggatctgttttaacacaccactggcccctcgtttcggctttgaacaggtgttagtgctgctctttttgcagttctgggctctgctgtgcaccaagcattattag

SEQ ID NO: 238012 - DNA, 1857 bp, synthetic construct
  misc_feature 1..1857: note = Description of Artificial Sequence: Synthetic coding sequence
  source 1..1857: mol_type = other DNA
atgcggcgtgacgtgcgtatcctgctgttaggtgaggcacaggtgggcaagactagcctgatcttatctttagtgggtgaggagttccctgaagaggtcccccctagggctgaagagattacaatacccgctgatgtgactccagaaaaagtacccacacacatcgtagattactccgaggcagagcagacggacgaggagttgagagaagagattcacaaggcaaatgtcgtctgtgttgtatatgatgtatcagaagaggccacaattgagaagatccgcacaaagtggattccacttgtgaatggcggaactactcagggccctagggtccctattatacttgtgggcaataagagtgatttgagaagcggctcctccatggaggccgtgctcccgattatgagccagtttcccgagatagagacctgtgtcgaatgttccgccaaaaatctcaggaatatctctgaattgttttattacgctcagaaggcagtgctccaccccaccgcacctctgtacgatcccgaagccaaacagctgcggcctgcgtgtgctcaggcccttaccagaattttcaggctgagtgatcaggacttagatcaggcattgtcagacgaggaattaaatgcatttcaaaaatcttgcttcggccaccctctggctccgcaggctctggaggatgtgaagactgtagtttgccgaaacgtcgcaggtggggtcagggaggatagactgacactggacggatttctgttccttaacactctttttatccagaggggccgacacgagaccacttggaccatcttgcgcagattcggctattcggatgcactcgaactgaccgcagactacctctcccctctgatccatgtaccccctggatgcagtacagagctcaatcacctcggatatcagttcgttcagcgggtgtttgagaagcatgatcaggacagggatggagcgttatcacccgtagagctccagtcactgtttagcgtttttccagctgctccttggggtcctgagctgccaagaaccgtcagaacggaggccggtcggctgccgttacacgggtatctttgtcagtggactcttgtaacatatttggacgtccggtcatgccttggccacctgggctatctggggtacccaactctttgtgaacaagaccaagcacacgccatcacagtaacccgagaaaaaaggctcgatcaggagaaggggcagactcaacgctctgtgcttttatgtaaggtggttggcgcacggggagtggggaagtcagcttttttgcaggctttcttgggccgaggacttggacaccaagatacaagggagcagcccccaggctacgccatcgacacggtccaggtgaatggtcaagaaaaatacctgatactttgcgaagtcgggacagatggactccttgcgaccagcctagacgctacatgcgatgttgcctgtttgatgttcgatggcagcgatccaaagagcttcgcccattgtgctagcgtttataagcaccattacatggacggccagacaccgtgtctatttgttagcagtaaagccgatcttccagagggggtagccgtgtccggccctagccctgccgagttttgccggaagcacaggctgcctgccccagtccccttctcgtgtgccggtccagccgaacccagcactacaattttcactcagctcgccacaatggctgctttcccccacctcgtgcacgccgagttgcacccgagtagcttctggctgcgaggcctgctgggggtggttggtgcagccgttgcagccgtactctccttctctctctaccgcgtgctggtgaagagccagtag

SEQ ID NO: 238013 - DNA, 777 bp, synthetic construct
  misc_feature 1..777: note = Description of Artificial Sequence: Synthetic coding sequence
  source 1..777: mol_type = other DNA
atgccacctcaacagggggatcctgcgtttcctgatagatgcgaagcccctccagtaccgccacgacgggaaaggggaggacggggtgggaggggaccaggcgagccaggaggccgagggcgagccggaggagccgaagggcgaggcgtcaagtgtgtcctcgtcggcgacggcgctgtgggtaagacaagcctggtagttagctataccaccaatggctatccaacagaatacatccccacggccttcgacaatttcagtgcagtggtgtccgtggatggcagaccggtgaggttacagctttgcgatactgcgggtcaggatgaattcgacaaactcagaccattgtgttacactaatactgacatcttcctcttgtgcttcagtgtggtgtccccttcgtctttccagaatgtctccgagaaatgggtgccggaaatacggtgtcactgtccaaaggcaccaataatcctggtgggtacacagtcagatctcagggaagatgttaaggtcctcatagaactggacaaatgcaaagaaaaacctgtgccagaggaggccgctaagctgtgcgccgaagaaatcaaggccgctagttatatcgagtgttccgctctaacccagaaaaaccttaaggaagtgttcgatgcggctattgtggcgggaatccaatactcagatacacagcagcagcccaaaaaaagcaagagcagaacaccggataagatgaaaaatttgagtaaatcttggtggaaaaagtattgttgctttgtgtag

SEQ ID NO: 238014 - DNA, 1527 bp, synthetic construct
  misc_feature 1..1527: note = Description of Artificial Sequence: Synthetic coding sequence
  source 1..1527: mol_type = other DNA
atggatcatctgggagcgtctctgtggcctcaagtaggctccctgtgtctgctgctcgccggtgcggcttgggccccaccccctaacctgccagaccccaagtttgaaagtaaagctgcccttcttgctgcaagaggtcctgaggaactcttatgcttcactgagaggctggaagatttagtctgcttttgggaagaagcagcctcggcgggagtcgggcctggaaactactccttcagctaccagctggaggatgagccatggaagctatgtaggctgcatcaggccccaaccgccaggggcgcagtcagattttggtgttcattgccaaccgccgatacctcgtcatttgtaccactggaactgcgagtgactgctgcctccggcgcaccaaggtatcatcgcgtgatccacattaacgaagtagttctgctggatgctcctgtgggcctggtcgccaggctggctgatgagtctggccacgtggtgttgcgttggctgcctccgccagaaactcccatgacatcccatatccgatacgaggtggacgtttccgcgggtaacggtgcaggatctgtacagcgggtggaaattctcgagggtagaaccgagtgtgttctgtctaatttacggggtagaacccgctatacattcgctgtgcgggctcgtatggccgaaccaagctttggagggttctggtcagcctggtcggaaccagtatctctgctgacaccatcagacctggatcctcttatcttgacactcagcctgatacttgtcgttatactcgtgctcctgactgttttagcgctacttagtcatagaagggccctcaagcagaagatatggcccggtatccctagtcccgagtcagagttcgaagggctcttcaccacacataagggtaactttcaactatggttataccagaacgacggttgcttgtggtggtctccgtgcacacctttcacggaggatccgcctgctagccttgaagtgctctccgaacggtgttgggggacgatgcaggctgtcgagccaggcaccgacgatgagggtcccttgctggagcctgttgggagcgaacacgcccaagatacctacctagtgttagataaatggctccttcctcgaaatcccccaagtgaggacttgccgggtcctggcggaagcgtggatattgtggctatggatgagggatcagaggcttcctcatgttcatcagcactcgcctcaaaaccctcccccgagggcgcttcagccgctagtttcgagtacacaatcctggacccttctagccagctattacgcccttggactctttgtccagaactgcctcccacccctccccacttgaagtacctgtacctggtggtctcggatagcgggatatcaacggactattctagtggcgactcccagggcgctcaaggaggtctctcagacggaccatactcaaatccctacgagaattccctcattcctgcggcagagccattgccgccatcttacgttgcgtgttcatag

SEQ ID NO: 238015 - DNA, 2550 bp, synthetic construct
  misc_feature 1..2550: note = Description of Artificial Sequence: Synthetic coding sequence
  source 1..2550: mol_type = other DNA
atggccgcagctgccccagccgcagcagccgctagctcggaagcccctgcggctagcgcaactgctgagcccgaggccggtgaccaagattcacgcgaagtccgggtgctccagtccctgcggggtaagatctgcgaagccaagaacctgctcccttatctcggcccacataagatgagagactgtttctgcactattaacctcgatcaagaagaggtgtacagaacacaggtggttgaaaagagtctgtcaccttttttctctgaggagttttacttcgagatccccaggacgtttcagtacctgagcttttatgtgtacgataagaatgtgcttcagcgcgatctccggattggcaaggtcgcaatcaagaaagaggacctttgtaatcactcgggaaaggaaacctggttctctctgcagccagttgattcaaactccgaggtgcagggcaaggttcacctcgaactgaagctcaatgagctcatcacggagaatggcacggtgtgccaacagctggtagtacacatcaaagcctgtcatggcctcccacttataaatgggcagagctgtgacccgtatgccaccgtgagcttagtgggcccttctcgaaatgaccagaagaaaaccaaagtgaagaaaaaaactagcaacccacagttcaacgagattttttattttgaggtgacacggtcatctagctacaccagaaagagccagttccaagtggaggaggaagacatcgaaaaactggagattcgcattgacctgtggaacaacggaaacctcgtgcaggacgtgttcctgggtgaaatcaaggttcccgtgaatgtgttacgaacagattcctcacatcaggcgtggtacctgctgcaaccgagggacaacggaaacaaatcctcaaagaccgacgacctgggctccctgcgactgaacatatgttatactgaagattacgtcttgccaagcgagtattatggccctctaaagacccttctacttaagtctcctgatgtgcaaccaatttccgcatcggcagcttacatcctgtcggaaatttgtagggacaagaacgacgccgtgctgccacttgtgcgtctgctgctccatcacgataaactagtaccatttgctacagccgtcgcggagctggacttgaaagacactcaggacgccaatacaatcttccggggaaattcactggcgacacgttgtctggacgaaatgatgaagattgtgggtgggcactacctgaaggttaccctaaagcccatcctggatgaaatctgtgattcctcaaagagttgtgaaatcgaccccattaaacttaaagagggggacaacgtggaaaataataaggaaaacttgcgttactacgtggataagctgtttaacactattgttaaaagtagcatgagttgccccaccgtcatgtgcgacattttttatagtttgcggcagatggccacccagcgcttccccaatgatcctcacgtccagtacagcgctgtcagttcctttgtgttccttaggttttttgccgttgcagtggtcagtccccacacattccacctcaggccacatcatcccgatgctcagacgattcggacccttaccctgatatccaaaactattcagaccttgggtagctggggctctctgtccaaaagcaagtcttcatttaaggaaactttcatgtgtgaattcttcaaaatgttccaggaggagggctatatcatcgcagtgaaaaaattcttagacgagatctcttcaaccgagaccaaggaaagctccggaacctccgagccggttcatttaaaggagggcgaaatgtataaacgggctcagggaaggacgcgaattggaaagaagaatttcaagaaaaggtggttctgtttaaccagtagggaactgacgtaccacaagcagccaggcaaggatgcaatttatactattcccgtcaagaatattttagccgtcgagaaattggaggaatcctcttttaacaaaaaaaacatgttccaagttatccatacagagaagcctctgtacgtccaagcgaacaattgcgtagaggccaacgagtggattgacgtgttatgtcgtgtgtccaggtgtaaccagaaccggctttctttttaccacccatcagtataccttaatggtaactggttgtgttgccaggaaacaggagaaaatacattgggttgcaaaccctgtacagcaggcgtccctgccgatatccagattgacatagatgaagacagggagaccgagagaatttacagtctgttcactctgtcactgctgaagttgcaaaagatggaggaggcctgcggaacaattgccgtctaccaggggccacaaaaagagcccgatgattacagcaacttcgtgattgaagatagcgtaaccacatttaaaactatacagcagattaaaagcatcattgagaagctggatgaacctcatgaaaaatatagaaaaaagcggagcagcagtgcgaagtatgggtccaaagaaaaccctatcgtaggtaaagcctcctag

SEQ ID NO: 238016 - DNA, 834 bp, synthetic construct
  misc_feature 1..834: note = Description of Artificial Sequence: Synthetic coding sequence
  source 1..834: mol_type = other DNA
atgatgaaaatcgtcggagggcactacctgaaggtcacattgaaaccaatcttggatgagatatgcgactcttccaagtcttgtgagatcgatcccattaaactgaaagagggtgataacgtcgaaaataacaaagaaaacttgcgttactacgtggataagcttttcaacacgatcgtgaagagcagcatgagctgcccgaccgtcatgtgtgacattttctattctttaagacagatggccacacagcgcttcccaaacgatcctcacgtccaatacagtgctgtgtcttcattcgtctttctgcgcttcttcgccgtcgccgtcgtgtcgccacacacgtttcatctgagaccacatcatccagacgcacagactatccgaactctcactctgatttctaaaaccattcagaccctaggcagctggggtagcctgtcaaaatcaaagtcgtcgtttaaagaaaccttcatgtgcgaattttttaagatgtttcaggaagagggctacatcatcgccgtcaagaaatttctcgatgagatttccagcactgaaaccaaagaaagctctgggacatctgagccagtccacctaaaagaaggggagatgtacaagagggcacaagggagaaccaggatcggaaagaaaaacttcaaaaagcgctggttttgcctgacgtcgcgggagctcacctaccacaaacaaccagggagctgtgtatacgcattgctgtggggcttttcgtggttttccgtgaaggtttccttacctctgatcgtcaccttggtgaacccatttagcaacattaccgtcgtgtacggcttcagccactag

SEQ ID NO: 238017 - DNA, 2553 bp, synthetic construct
  misc_feature 1..2553: note = Description of Artificial Sequence: Synthetic coding sequence
  source 1..2553: mol_type = other DNA
atggcagccgctgccccagctgccgcagcagcaagcagtgaggcaccagctgcctccgcgacggccgagcccgaggccggagaccaggacagcagggaagtccgcgtcctgcagtccctgcggggaaagatctgtgaggctaaaaacttgttgccatacttggggcctcacaaaatgcgcgactgcttctgtacaataaacctggaccaagaagaagtgtatcgtacccaggtcgtggagaagagcctgtcaccctttttttctgaggagttctactttgaaatacctcggacgtttcagtatctgtctttctacgtgtatgacaaaaacgttctccagagagatctcagaatcggaaaggtggccattaaaaaggaggacctctgcaatcattccggaaaagagacttggtttagcctgcagcccgttgattctaattccgaagtgcaaggtaaggtacatttggagttgaagctgaatgagctaattactgagaatggaacagtgtgtcagcaacttgtggtgcatataaaagcctgccacggactacccctcattaacggccagagctgtgatccttatgcaactgtgagcctcgttggcccttccagaaacgaccagaaaaaaaccaaggttaagaaaaagacctctaatccccagtttaatgagattttttatttcgaagtcaccagatcttcgtcgtatacacgaaagtcacaattccaggtcgaagaagaggatattgaaaagctcgagatcaggattgatttgtggaataatggcaatctggtgcaggatgtcttcctgggtgagattaaggtgcccgtcaatgttctgagaaccgattcttctcatcaggcctggtacctgctacagccacgagacaatggtaacaagtctagcaaaacagatgacctgggaagtcttcgcctaaatatttgttataccgaagattacgtacttccgtctgagtactatggtccacttaagacacttcttttaaagagcccagacgtgcagcctatcagcgcctcagccgcttacatcctgtcagagatttgcagagacaaaaacgacgcggtgttacctctcgttaggctcttgttgcaccacgacaagctggttcctttcgccactgccgtcgcagagctggatctgaaggacacccaggacgctaatactattttccgaggcaactctctggccaccaggtgtctcgacgaaatgatgaagatcgttggcggtcattaccttaaagtgacgcttaagccgatccttgatgaaatatgcgattcttcgaagagttgtgagatcgaccccatcaaattgaaagagggtgataatgtagaaaataacaaggaaaacctacgctattacgttgataagctattcaacacaatagttaaaagcagtatgtcctgtcctaccgtcatgtgtgacattttctacagtcttagacagatggccacccagcgattccccaacgatccacacgtacagtactctgcggtatcctcttttgtctttcttaggttcttcgcagtggcagtggtcagtccccacacctttcatctccggccacatcacccagatgcgcagaccattaggactctgactttaatctccaagaccatccagacactaggctcctggggctcactgtctaagagtaagtccagttttaaagaaaccttcatgtgtgaattttttaagatgttccaggaggaagggtatatcatcgccgtcaagaagtttttagatgaaattagtagtactgaaactaaggagtctagcggcacctccgaaccggtccatctgaaggagggcgaaatgtacaagcgtgcccagggtagaactagaatcggcaagaagaacttcaaaaagagatggttctgcctgacgtctcgcgagttgacttatcacaagcaaccgggttctaaagacgccatctacaccatacccgtaaagaacatcctggccgtggagaaactcgaggaatcatcctttaacaagaagaacatgttccaggtgattcacaccgaaaaaccgttgtacgtgcaggcaaacaattgcgtcgaggccaacgaatggattgatgtgttgtgtagggtctctagatgcaatcaaaaccggttatcgttttatcacccctccgtgtatctgaatggcaactggctgtgctgccaagagaccggtgagaatacactcgggtgcaaaccctgcaccgccggagtgcccgctgacattcagatcgatatagatgaggaccgagaaaccgagcgcatctacagtctgtttactctgtccctcttgaagctccagaagatggaggaggcatgcggaacaattgccgtttaccaggggccacagaaagagcctgatgactattcaaacttcgtcattgaggattcagtgaccacatttaagaccatacaacagatcaagtccatcatcgaaaagctggatgaacctcacgaaaagtatcgaaaaaaaaggtcttcgtcagctaagtatggatccaaggaaaaccccatcgtgggcaaagctagctag

SEQ ID NO: 238018 - DNA, 2505 bp, synthetic construct
  misc_feature 1..2505: note = Description of Artificial Sequence: Synthetic coding sequence
  source 1..2505: mol_type = other DNA
atggccgtggaagacgaaggactgcgagtgtttcagagcgtcaagattaagataggggaagccaagaatctgccttcttatcccggaccaagtaaaatgcgggactgctattgtactgttaatctggaccaggaagaagtctttcggacaaaaatcgtggaaaagtccttatgtcccttctacggggaagacttttattgcgagatccctaggagcttccggcatctcagtttctatatcttcgatagagatgtgtttcgacgtgattcaattatcggaaaagtggccatccaaaaagaggacttacagaaatatcacaatcgagacacttggttccagttacaacacgtggatgccgacagcgaagtacaaggtaaggtgcacctcgaactgaggctgtcggaggttattactgacaccggcgtcgtttgccacaaacttgccactcgcatagttgagtgtcaaggtttacccattgtgaacggtcagtgcgatccgtatgcaaccgtgacgctggctggcccattccgtagcgaggccaagaagacgaaggtgaaacggaagactaacaatccacagttcgatgaagtgttctactttgaggtgacgaggccatgttcctactcaaagaagtcacactttgactttgaggaggaagacgtcgacaaactggagattagggtagacctctggaatgccagcaatctgaaattcggagatgaatttctaggggagctcagaattcccctgaaagtgctgagacagagcagctcctatgaagcctggtacttcttacaacctagggataacggctctaagtcgctcaagcccgacgaccttggctccctgcgacttaacgtcgtttacacagaggatcacgtgttttccagcgactactactctcctttgcgggacttgctgttaaagagtgcagacgttgaaccggtaagtgcttccgccgcacacatattgggagaagtttgtagggagaaacaagaggccgctgtgcccctggtgcgtctcttcttgcattatgggagggttgtgccttttatatccgcgattgcatccgcagaagtcaagcgtacacaggatcctaatactatcttcaggggaaattccctggccagcaaatgcattgatgagactatgaagttggcaggtatgcactatctccacgtgacactaaagcctgctattgaagagatctgccagtcacataagccttgtgagatcgaccctgtgaaactgaaggacggagagaaccttgagaataacatggagaacctgcgacagtatgtggatcgtgtgttccacgccattactgagagcggagtgtcgtgtccaaccgttatgtgcgatattttctttagtttgcgtgaggcagcagctaagcgctttcaagacgatcccgatgtgagatacaccgcagtaagctcttttatattcttacgtttcttcgcccctgctattttatcacctaatctgtttcagctgaccccccatcacaccgatccccaaactagccggaccctgacgctgatatcaaaaacagtgcagactctgggatctttgtctaaatcaaaatcggcaagtttcaaggagtcctatatggcaaccttttatgagttctttaatgaacagaagtatgccgatgccgtcaaaaacttcttagacctcatcagcagctcagggaggagggaccccaagtctgtggagcagccaatcgtgttgaaagagggctttatgataaagagagctcaaggacgtaaaaggttcgggatgaagaactttaagaaacgatggttccggctaacaaaccatgaattcacgtatcacaaatctaaaggcgaccagcccctgtatagtataccaatcgaaaatatactagccgtcgaaaagttagaggaggagtcattcaaaatgaagaatatgttccaggtgatccaaccagaaagggcactgtacatccaggccaacaattgtgtagaggcgaaagactggatcgatatcctcactaaagtgtcccagtgcaaccaaaaacgcctgaccgtgtaccacccttccgcatatctctccggccactggctttgctgcagggcccctagcgacagcgcacctggctgtagcccgtgcacagggggtctccctgccaatatccagttggacattgatggagatcgcgagacagaaaggatctatagcctgttcaatttgtacatgagtaagctggagaagatgcaggaggcctgtggtagtaaatcagtgtacgatggacccgagcaggaagaatactctactttcgtgattgacgacccccaggagacctacaaaacacttaagcaagtgattgcaggtgtcggcgctcttgaacaggaacacgcccagtacaaacgcgacaaattcaaaaaaaccaaatacggctcccaggagcaccctatcggggacaaatcattccagaactatatcagacagcaatcagagaccagcacacattccatttag

SEQ ID NO: 238019 - DNA, 2409 bp, synthetic construct
  misc_feature 1..2409: note = Description of Artificial Sequence: Synthetic coding sequence
  source 1..2409: mol_type = other DNA
atgagggattgttattgcacagttaatctagatcaggaggaggtgttccgaactaagattgtggagaaatctttatgccccttctatggcgaggacttttattgcgagattcctcgatctttcagacacttaagtttttatatcttcgatagggatgtcttcaggagagacagcatcatcggtaaggtggccattcagaaggaggacctccaaaagtatcacaacagagacacatggttccaacttcagcatgtcgatgccgatagtgaggtccaaggtaaggttcacctagaattgcgcctgtccgaggtcatcacagacactggcgtggtgtgccataagctcgctacgaggattgtagagtgtcagggcctgcctatcgtgaacgggcagtgtgacccatacgcaacagtcaccttggcaggtcctttccgtagcgaggccaagaagaccaaggttaagcgtaaaacaaataatcctcaatttgatgaagtgttctattttgaagtgacgcgtccctgtagttatagcaagaaaagtcattttgactttgaggaggaggacgtggataagctcgagatcagggtggatctgtggaacgcctccaacctcaagttcggggatgaatttctgggcgagctgcgaatcccactgaaggtcctgagacagagcagttcttacgaggcctggtatttcctccagcctagggataatgggagtaaatccttaaaacccgatgatctcggcagtctgaggctgaacgtggtctacacagaagatcatgtgttttctagcgattattactcccctctgcgcgatctactgctgaaatcagccgacgtcgagccagtctcagcaagcgcagctcacatcctgggagaggtctgtagggaaaagcaggaggccgcagtgccccttgttcgcttgtttcttcactacggcagagttgtgccattcatttccgccattgcatccgcagaagttaagcggactcaagaccctaacacaatattcagaggtaatagcttagcatccaagtgtatcgacgagactatgaagctggccggtatgcattacctgcacgtcactctcaagcccgcaatcgaggagatctgccaaagtcacaagccctgtgaaatcgatcctgtcaaactcaaggatggcgagaacctggaaaacaatatggaaaacctgaggcagtacgtagatcgggtcttccatgctataacggaatccggcgtatcttgcccaacagttatgtgcgacatcttcttttcactgcgagaggcagctgccaaacgctttcaggacgatccagacgtgaggtacacagctgttagctcttttatatttctgaggttttttgcccctgccatccttagcccaaacttgttccagctgacccctcatcatacagaccctcagacaagccgcacactgaccttgatctcaaaaactgtccagacactggggagcctgtctaaaagtaaatcagcctcctttaaagagagctatatggccaccttttacgaattcttcaacgagcaaaagtatgcggatgccgtgaagaattttctcgatctgatctcatcttctggacggagggatcccaaaagcgtggagcaaccaatcgttcttaaggaaggatttatgattaagcgggctcaaggacggaagcgtttcgggatgaaaaacttcaagaaacgttggttcaggctcactaaccacgagttcacctaccacaaaagcaagggggaccagcccctatattcgataccgatcgagaacatcttggccgttgagaagctggaagaggaaagcttcaagatgaaaaatatgtttcaagtgatacagcctgagcgggcactgtatatccaggccaataactgcgtggaggcaaaagactggatcgatattctcaccaaagtatcccagtgcaatcagaagagactaacggtttaccatccttctgcatatttgtccggtcattggctctgctgtcgggcaccttctgactccgcaccaggctgtagcccttgtacaggcggactccccgctaatatccagctagatatcgacggggaccgagaaactgaaagaatatatagcttatttaacctttatatgagcaagctggaaaaaatgcaggaggcctgcgggagcaagtcagtgtatgatggtccggaacaggaggagtactccacattcgttatcgacgatccccaagagacatataagacattgaaacaagtgattgcgggagtcggagcgctcgagcaagaacatgcccaatataaacgggataaattcaaaaagactaaatacgggtcgcaggagcacccaattggtgacaaatcttttcagaattacattaggcaacagagcgaaacaagtacacacagcatctag

SEQ ID NO: 238020 - DNA, 399 bp, synthetic construct
  misc_feature 1..399: note = Description of Artificial Sequence: Synthetic coding sequence
  source 1..399: mol_type = other DNA
atggccgtggaggacgagggcttgcgtgtgtttcaatccgtcaagatcaaaatcggagaggctaagaacctgccgtcatacccgggtccatctaagatgcgggactgctactgcacagtcaacctagaccaggaggaagttttccgcacaaagattgtggagaagtccctgtgccctttttacggcgaggacttttactgtgagattcctagatcttttagacatctgagcttttatatcttcgatagggacgtgttcagacgtgatagtatcatcggccagtccgctcccggtgccgcagctgagcgcggtcatcatcgtcactggggccgtctaccccaagctcggcacacgcaccgacgggtgcccggacccccacacagggaatgggctatgtag

SEQ ID NO: 238021 - DNA, 2412 bp, synthetic construct
  misc_feature 1..2412: note = Description of Artificial Sequence: Synthetic coding sequence
  source 1..2412: mol_type = other DNA
atggctaaaaggagttccctgtacattagaatcgtggaaggaaaaaacctgcccgcaaaggacattacaggcagctccgacccctactgcattgtgaaggtcgataacgaacccattatcaggaccgccacggtgtggaagacgttatgccctttctggggagaagagtaccaggtgcatcttcctcctactttccatgctgtcgccttctacgtgatggacgaagacgctctgtcccgtgatgatgtgatcggtaaggtttgtttaactcgcgatacaatcgcctctcacccaaagggattttccggctgggcacacctaacggaggtcgatcctgatgaagaagtacaaggagagatacacctgcggctggaggtttggcctggtgcccgtgcttgcagattacgttgctcagtgctcgaggccagggatctcgccccaaaggaccgcaacggaacctccgatccattcgtaagagtcaggtacaaagggaggacccgcgaaacctctatcgttaagaagtcctgctatcctaggtggaacgagaccttcgagtttgagctgcaggagggagccatggaggccctgtgtgtcgaggcctgggattgggatttagtgtcacgtaacgattttctcggcaaagtggttattgatgtgcagaggctgcgggtggtacagcaggaggagggctggtttaggttacagcccgaccaaagcaagtcccgaaggcatgacgaaggcaacctgggaagcctccagctggaggttagactgcgcgatgagaccgtgttgcccagtagctactatcagccactggtgcatctgctgtgccacgaggtgaagttgggtatgcaagggcctggtcagttaatccctctcatcgaggaaacaacgtcaaccgaatgccgacaggacgtggccaccaacctgcttaagctcttcctcggacaagggttagccaaagattttctggatctgctttttcagctggagttgtcgagaacgagcgaaacgaataccctgtttaggtccaacagtttggcttccaaaagcatggagagctttctcaaagtggccggaatgcaatatctccacggcgtccttggcccaatcataaataaagtgtttgaggaaaagaagtatgtggagctggatccatctaaggtcgaagtgaaagatgtcggctgctcggggttgcacagacctcaaacagaagcagaggttcttgaacaaagtgcccagactcttcgggcacatctaggagccctcctctctgccctgagccgcagcgtcagagcttgcccagccgtggtaagagcgacattccggcagctgtttagacgggttagggaaaggtttcctggggcacaacacgaaaacgtgccatttatcgcagttacctcctttctgtgtctccggttcttttcacccgcaatcatgtcgcctaagctgttccacctacgtgaaaggcatgctgatgctcgcacctcacggaccctgctccttctggccaaggctgtgcagaacgtgggtaacatggataccccggctagtcgagccaaggaggcttggatggaaccactgcagccgacagtccgacaaggtgtcgctcagctcaaggattttattaccaagctcgtcgacatagaagagaaggacgagctggatctccagagaaccttatctttgcaggcccctcccgtgaaagagggtccacttttcattcacagaacaaagggtaaaggcccactaatgtcctcttcgtttaagaagctctatttctcattaaccaccgaggccttgtctttcgccaagactccaagctctaaaaagagtgccttgatcaaattggctaacatcagggccgctgaaaaagtggaagagaagtcattcggcggttcccatgtgatgcaggtgatctacacagatgacgctgggagacctcaaaccgcctatctgcagtgcaagtgtgttaatgaactgaatcagtggttatcagcactgagaaaagtatccattaacaacacaggtctgcttggatcataccaccccggagtcttcagaggcgacaagtggtcctgctgtcatcagaaggaaaagacaggacaagggtgcgataagacacggagcagggtcaccctgcaggagtggaacgacccactagatcacgacctagaggctcagctcatttatcggcatctgctgggagttgaagcaatgctgtgggagaggcatcgcgagctgtctggaggcgctgaagcaggcacagtgccaacctctccaggcaaggtgccagaggacagcttagctcgattactgcgggtgctgcaggatctccgcgaggcccactccagctcgcctgccggttcaccgccatctgagcctaattgcctgttggaattacagacctag

SEQ ID NO: 238022 - DNA, 2274 bp, synthetic construct
  misc_feature 1..2274: note = Description of Artificial Sequence: Synthetic coding sequence
  source 1..2274: mol_type = other DNA
atggctaagcggagtagtttatatatccggatagtcgaaggcaaaaaccttcctgcaaaggatattactgggtcctcagacccatactgcatcgtcaaagtggataacgagccaatcattcgtactgccacggtgtggaaaaccctgtgccctttttggggagaggaataccaggtgcacctgcctcccactttccatgctgtggcattttatgtcatggacgaggatgccttaagcagagacgatgtaattggaaaagtttgcctgactcgcgatacaatagcctctcaccccaaagggttctctgggtgggcccatctgaccgaggtagatccagatgaggaagtgcagggtgaaatccacctcaggctggaagtgtggcccggagctcgggcatgccggctgcgctgctcagtgttagaggcacgcgacctcgcccctaaagaccgtaacggcaccagcgatccgttcgtgcgggtgcggtacaaagggcgtacgcgcgagacgtcaattgttaagaaatcctgttatcctcgctggaacgaaacctttgaatttgagttacaggaaggcgctatggaagccctctgtgtcgaggcttgggactgggacttagtctcaagaaatgattttctcggcaaggtcgtcatagatgtccaaagactgagggtggtgcagcaagaggaaggttggttccgattacagccagatcagtcgaagtcacgcaggcatgacgaaggcaacctgggcagcctgcagctggaggttcgattaagagacgagacagtcctcccgtcatcttactaccaacccctggtccacctgctctgccatgaggtgaagttgggtatgcaggggcctgggcagctcattcctctgatagaagagactacgtctaccgaatgcaggcaggacgttgccaccaatcttttgaagctgtttctcgggcagggtttagccaaagacttcctggaccttttgtttcaactagaactctccaggacgagtgagaccaatacattgtttcggagcaactctctcgcctcaaagagcatggagtctttcctcaaggtcgccggaatgcaatacttacatggagtgttgggtccaatcatcaataaggtattcgaggagaagaagtatgtcgagctcgacccaagtaaggtcgaagtcaaagacgtggggtgctccggcctgcatagacctcagacggaggcggaagtgctggagcagagcgcccagaccctgcgggctcatcttggggcactgctttctgcactctctcgatctgtacgagcgtgccctgctgtagtgagagctactttccggcagctattccgcagggttcgagagcgcttcccaggggcacagcacgaaaatgtgccctttatcgcagttacctcattcctctgtctgcggttcttctcgcctgccattatgtcgcccaagctttttcatctacgcgaacggcatgcagacgcaagaacttcccgcacactcttactgctcgccaaggccgtgcagaatgtgggcaatatggacaccccggcttctcgtgctaaagaggcttggatggagccactgcaacctactgtcaggcagggagtcgcacaattaaaggattttattacaaaattagtagatattgaagaaaaggatgagctcgatctccagcgcaccctgagcctccaggccccacccgttaaagaggggcctctgttcatacacaggactaaaggcaaagggccactgatgtcatcttctttcaaaaaactttacttctcccttacgaccgaggcgctctcattcgccaagacaccgagctctaagtgtgtgaacgagctgaaccaatggctaagcgccttgcgtaaagtaagtatcaacaataccggacttcttggcagctaccaccctggtgtatttaggggggataaatggagttgttgccaccagaaggagaagaccggccaggggtgcgataagaccagatccagggtaacacttcaagagtggaatgaccctttagatcatgatctcgaagctcagctcatctacagacatctcctgggcgtcgaggccatgctctgggagaggcaccgtgagctgtctgggggtgcggaggctggcactgttccaacatccccgggtaaagtaccagaagatagtctcgccagacttctgcgcgtgctgcaagaccttagggaggcccactcctctagcccagcagggtcgccacccagcgaacccaactgcctcctcgagctgcaaacctag

SEQ ID NO: 238023 - DNA, 2196 bp, synthetic construct
  misc_feature 1..2196: note = Description of Artificial Sequence: Synthetic coding sequence
  source 1..2196: mol_type = other DNA
atggacgaagatgctctgagcagagacgacgtcatcggcaaggtatgcctaacacgggataccatcgcctcccatcccaagggttttagtgggtgggctcatttaaccgaggttgaccctgacgaggaggttcagggcgagattcacctgagactggaagtgtggcccggagctagagcttgccggctgcggtgctccgtcctggaggccagagacctggccccaaaagaccgcaatggaacctctgatcccttcgtaagagtaagatacaagggccgtacacgagagacatccatcgtgaagaagtcctgttatcccagatggaatgagacgttcgaattcgagttgcaagagggagctatggaagctctgtgcgtggaggcttgggactgggatttagtctcaaggaacgacttcctcggcaaggtggtgattgacgttcagcgcttgagggttgtccaacaggaagaggggtggttccgcctccaaccagatcagagtaagagccggagacacgacgaaggcaatctgggcagcctgcaactagaagttcggcttagggacgagaccgtgctgccctcttcttactatcagccccttgtacatctcttatgtcacgaagtaaagctgggaatgcaaggaccaggccaactcatcccgttaatagaggagacgacatcaacagaatgtcgccaggatgtggccacaaatcttctcaagttgttcctggggcaagggttagccaaggatttccttgacctgctgtttcaactggaactgtctaggacatccgagacgaacacgttgttccgttccaacagcttggctagcaaaagcatggagtccttcctcaaggttgcaggaatgcagtacctgcatggtgtgctaggaccaatcatcaacaaggtgttcgaggaaaagaaatatgtcgagctcgaccctagtaaagtcgaggtgaaggatgttggctgttcagggcttcataggccacagaccgaggcagaagtcctagagcagagcgcacaaacactccgggcacatcttggagcactgttgtccgcactttcaagatctgtaagagcctgccctgctgttgttcgggcaacctttagacagttgttcagacgagtgagggagcgttttcctggtgctcagcatgagaatgtaccctttattgctgtgacctccttcctctgcctccgcttctttagtcctgcaattatgtcccccaaactcttccacctcagagaaagacacgccgacgctcgtacatctagaactctgcttcttctggcaaaggccgtccagaatgttggaaacatggacacgcccgcttctagagccaaggaggcctggatggagcccctccagcctaccgtcaggcagggcgtggcgcagctgaaggacttcataaccaaactggtcgacattgaggagaaggatgaacttgacctgcaacggaccctcagcttgcaagcccctccagtcaaggagggcccattgttcattcaccggaccaaggggaagggcccactgatgtccagctcattcaagaagctatacttctcactgaccaccgaagcactttcattcgcaaagacaccgtcatctaagaaatctgccctgatcaaactggccaatatccgagcggcagagaaggtggaagagaaatccttcggtggtagccacgtcatgcaagtcatttacacagacgacgcaggcaggccccagaccgcctaccttcagtgcaaatgcgttaatgaacttaaccagtggctcagtgccttgcgcaaggtgtcaattaacaacactggcttgttggggagctaccaccctggcgtgtttcgcggagacaagtggtcttgctgccaccagaaggagaagaccggacaagggtgcgacaagactcggagccgggtgactttgcaggagtggaatgatccgttggatcacgacctggaggcgcagctgatctaccggcatctgctgggtgtcgaagcaatgctgtgggagagacatcgcgagctatccggtggcgctgaggctgggaccgtgccaaccagccccggaaaggtaccagaagactctctggctcgcttgctgcgagtgttgcaagacctgagagaagcacatagcagcagcccagcaggctccccccctagtgagccgaactgtcttcttgagctgcagacctag

SEQ ID NO: 238024 - DNA, 2415 bp, synthetic construct
  misc_feature 1..2415: note = Description of Artificial Sequence: Synthetic coding sequence
  source 1..2415: mol_type = other DNA
atggccaagtcctcctcgcttaatgtgagggtggttgaaggcagagctctgccggctaaagacgttagcggctcaagcgatccatactgcttggttaaagtggatgatgaggttgtcgcacgcaccgccaccgtctggagatcactcggccctttttggggggaagagtataccgtccacctgcctcttgacttccaccagctggccttctacgttttagacgaggacactgtaggacacgacgacatcattgggaagatttccctgagtcgggaagcgatcactgcagatcctagaggcatcgactcttggataaacctgtctcgagtggaccccgatgcggaggtgcagggagagatatgcctctctgtgcaaatgctggaggatggccagggtcgttgcctgcggtgccatgtcctccaggcccgtgacctcgcacccagagatatttccggaaccagcgacccctttgcgcgagttttttgggggtcccagtctttggaaacatcgactatcaaaaaaactagatttccccactgggacgaagtgctcgaactccgggaaatgcctggcgctccaagccccctccgggtggaattatgggactgggacatggtgggcaagaacgacttcctgggcatggttgagttttccccaaaaaccctgcagcaaaagccgcctaagggctggttcaggctactgcccttcccacgagctgaggaggactctggtgggaatctcggagccctgagggtgaaagtgagactcatcgaagatcgcgtcctcccctcgcagtgttatcagccattgatggaactgctaatggagtccgtgcagggacccgctgaagaagataccgcctcccctttggctctcctcgaggagttgacactaggtgactgcagacaagacctagcaaccaaactggtgaaactgtttcttggacggggactggctggcaggttcttggactacctgacccggagagaggtggccagaaccatggatccaaacaccctgttccgaagtaacagtctggcctccaaatcgatggagcaattcatgaagcttgtgggtatgccatacctccatgaggtgttgaagccagttataagtcgcgtttttgaggagaaaaagtatatggagttagacccctgcaagatggaccttggcaggactagacgcatttcatttaaaggggcactgtcagaggagcagatgcgggaaacttcactcggactgctgacgggctatctcggaccgattgttgacgcaatcgtgggatccgtcggcagatgcccgcctgccatgcgactggcatttaaacaacttcataggcgggtggaagaacggttcccccaagccgagcatcaggacgtcaaatatctggctataagtggatttttgtttctgcggtttttcgcaccagcaatcctgacacctaaactgttcgatctacgggaccaacacgctgaccctcaaacaagcaggagcctcctcctgctggctaaggctgtgcaaagcatcgggaacctcgggcaacagttgggacagggaaaggagctgtggatggcacccttacaccctttcctcctacagtgtgtatcgcgtgtaagagatttcctggacaggcttgtggacgtggacggagacgaagccggagtgccagctcgcgctctctttccaccttcagcgatcgtccgcgagggctacctgctgaaacgcaaggaggaacccgctggcctcgccacccggtttgcttttaagaagcgttacgtgtggctcagcggcgagactctaagtttttctaagagtcctgaatggcagatgtgccacagcattcccgtgtcccacatcagggctgtggagagggtggacgagggcgcttttcaactcccgcacgtgatgcaggtggtcacccaggacggcacaggagcgcttcacactacatacttacagtgcaagaatgtgaatgagttaaatcagtggctttccgccttgaggaaagcgagcgcccctaatcccaacaagcttgcagcatgtcatcctggcgcttttcggtctgccaggtggacatgctgtctgcaagcagaaagatccgctgctggttgttctcggacacactcagccgtgaccttgggagactggtcagatcccctcgacccggacgcagaggcccagacggtttacaggcagctcttgctcgggcgagatcagctgcgccttaagcttctcgaagattccaacatggacactactttggaggccgacactggagcctgtcctgaggttctggctagacagcgggcagcaacggctagacttctggaggtcctggcggaccttgatcgggctcacgaagagtttcagcaacaggagagggggaaagccgctctaggacccctcggtccgtag

SEQ ID NO: 238025 - DNA, 2331 bp, synthetic construct
  misc_feature 1..2331: note = Description of Artificial Sequence: Synthetic coding sequence
  source 1..2331: mol_type = other DNA
atggccaagagctcgtcgctcaacgtccgggttgtggaagggcgagcactcccagcaaaggacgtatcaggttcctcggacccttactgtctggtcaaagtggacgatgaggtggtggccagaaccgccactgtttggcgaagcctgggccctttctggggggaagagtacacagttcatctccctctagacttccatcagctcgctttttacgtcctcgacgaagacactgtgggacacgacgatatcatagggaagatttccctgtcccgagaggcaatcactgccgacccacggggaatcgattcttggattaacctgtcaagagtcgaccctgatgccgaagtccagggggaaatttgtctgtcagttcagatgctggaggacggccaggggcgatgtctgcggtgtcatgtgctgcaggccagagacctcgccccacgcgatatctccggcacgtcggacccattcgccagggtgttttggggttcacagtcactggagacctcaaccattaaaaaaacgcgatttccccactgggacgaggtgcttgaactcagggagatgccgggagccccaagccccctacgagtggagctctgggactgggatatggtgggaaaaaacgacttcctcgggatggtggaattcagccctaaaacgctgcagcaaaaacctcccaaagggtggttccgcctcttgccctttccccgtgctgaggaggactccggtggaaatctgggcgcactaagggttaaggttaggctgatcgaggatcgggtgctaccttctcagtgctaccagccattgatggaactattgatggaaagtgttcagggccctgcagaagaggataccgcatcacctttagcgctgcttgaggagttgacgcttggtgactgtcgacaagatctcgctaccaaactagtgaaattattcctgggcagggggctggccggacgtttcctggattatttaacaagacgcgaagttgctagaaccatggatccaaacacactgttcaggtccaattccctggcatcaaagagcatggaacaattcatgaaactagtgggaatgccgtatctgcatgaggtgctgaagcctgtcatcagccgagtgtttgaagaaaagaagtatatggagttggatccttgtaaaatggacctggggagaaccaggcggatctcattcaaaggtgctttgagcgaagaacagatgcgagagacctccctggggctcttgaccggatacctgggccctattgtggacgcaatcgtaggctctgtgggcaggtgcccgccagcaatgcggttagctttcaagcagctgcatcggagagtcgaagagaggtttccccaggctgagcaccaagatgtcaaataccttgccatctccggtttcctttttctcagatttttcgctccggcaatcctgactccaaagctcttcgatctcagagatcagcatgccgaccctcagacgtcacggtcccttctgcttctggcaaaggcggttcagtcaatcggaaatctcggccagcagctgggccagggcaaagaactatggatggcccctcttcacccatttctgctgcagtgcgtgtctcgtgtgagagacttcttagataggctggtggacgttgatggcgatgaggctggggttccagcacgggctctcttcccaccctcggccatcgtgcgcgagggctatctgctgaagcgcaaagaggaaccggctggcttagccacccgctttgcttttaaaaagcgatacgtttggctgtctggagaaacgttgagctttagcaagagtccagagtggcaggtcgtcacccaggatggaaccggcgctctacacacaacttacctacagtgtaagaatgtcaacgagcttaatcagtggctgtccgcactgcggaaggccagcgcccctaaccccaataagctagccgcttgtcaccccggtgcttttaggtcggctcgctggacttgttgtctgcaggcagagcggtccgctgcgggttgctcccgcacccatagcgccgtaactctgggtgactggagcgatccgctcgatccagatgcagaggcacagacagtctaccggcagctcttactcggtagagaccagctgcgtctcaaacttttggaagactcaaatatggacaccacgctggaggcagataccggggcttgtcccgaggtgctcgctagacaacgagcagctaccgccagattgctcgaggtcttagcggatctcgaccgcgcacacgaagagttccagcagcaagagagaggcaaagcagccttgggtccgcttgggccatag

SEQ ID NO: 238026 - DNA, 2421 bp, synthetic construct
  misc_feature 1..2421: note = Description of Artificial Sequence: Synthetic coding sequence
  source 1..2421: mol_type = other DNA
atggcaaagagtagcagcctgaatgtaagggtagtggaggggagagccttacctgccaaagacgtgagtggttctagcgacccatactgcctcgtgaaggtagatgatgaagtggtggccagaacggccaccgtgtggagatccctgggccctttctggggcgaggaatataccgtgcaccttccactcgatttccaccagttggccttttacgtgttagacgaggacacagtcgggcacgatgatatcatcggcaagatttctttgagcagagaggcaattacagctgaccccaggggcatagactcatggatcaacttaagccgcgtagatccggacgccgaggtccagggggagatctgtctgtctgttcagatgttagaggacgggcaaggacgttgtctccgctgtcatgtcctgcaggcccgagacctagccccaagggatatcagcggaaccagtgacccatttgctcgagtcttctgggggtctcaatcactcgagactagtactatcaaaaagactcgtttccctcattgggatgaggttctagaactacgggaaatgccgggagctcctagtccactcagagtggaactctgggactgggacatggtgggtaagaatgatttcctgggaatggtggagttttcacccaaaactcttcagcagaaaccgcctaagggatggttcagattgctgccattcccacgcgcagaggaggattcagggggaaatttaggagccctgcgggtgaaggttcggctgatcgaggacagggtgctgccaagccaatgctaccagccactgatggagctcttaatggagtccgtgcagggacccgctgaagaagatacagctagcccactggcgttacttgaggagctgactctgggggactgtagacaagatctggccacaaagttggtgaaattgttcttgggaagaggcctagcgggtcgtttcctggattacctgacccggagagaggttgccagaaccatggacccgaataccctgttcagatccaatagtctggcatctaagtctatggaacaatttatgaagctggtgggcatgccctacctgcatgaggtactgaagcctgtaatttctagagtatttgaggaaaagaagtacatggagctggatccctgtaagatggatctcggacgcacccggagaatttccttcaaaggggcattaagcgaagaacagatgcgcgagacaagcctcggattactcaccggctatttgggacccatcgtcgacgccatagtagggtctgttggtcgatgcccccctgccatgcgcctggcatttaagcagcttcaccggagagtggaggagcgcttcccacaggcagagcatcagcaggacgtgaagtacctggctatctcagggttcctgtttcttcgcttttttgcccctgcaattctgacacctaaactttttgacctacgggatcagcacgccgacccccagacctcccggtcgctactgctcttggctaaggcagtccagagcatcggtaatctggggcaacagctggggcagggcaaagaactctggatggcacctctgcaccctttcctgctgcagtgtgtttcacgagttcgcgacttcctggacaggctagttgacgtggacggggacgaagaggccggagttccggctcgtgctctgttcccacctagcgctatcgtgagggagggttacctgctgaagaggaaagaggaaccagccggactggctacaagattcgcctttaaaaagagatacgtgtggctgtctggagagacactctcatttagcaaatccccagagtggcagatgtgccattctatcccagtgagccacatccgcgcagtggaaagggtggatgagggggctttccagctgccccacgtcatgcaggtggttacccaagacggcacaggcgcactgcacaccacctatctgcagtgcaagaacgtcaatgagttaaaccagtggctgtcagccttaagaaaggcatcggcacccaatccaaacaagttggcggcatgccaccccggagcattccggagtgccaggtggacctgctgcctgcaggctgaacgcagtgcggctggctgctctaggactcacagtgctgtcacactcggcgactggagtgatcctctcgacccagatgccgaagctcagacggtctatagacagctgctgcttggtcgtgatcagttgcgcctgaagctgttagaggattccaatatggataccacactggaggcagatacaggggcatgccctgaggtactggccagacagagggccgctacagccaggctgttagaggttctggcagacttggacagagcccacgaagagtttcagcagcaagagcgaggcaaggctgcactgggccctcttggtccctag

SEQ ID NO: 238027 - DNA, 3714 bp, synthetic construct
  misc_feature 1..3714: note = Description of Artificial Sequence: Synthetic coding sequence
  source 1..3714: mol_type = other DNA
atgcagaagtcggtgcgttataatgagggccacgccctgtacttagcattccttgccagaaaagagggaactaagagagggttcctcagcaagaagaccgccgaggcctctaggtggcatgagaaatggttcgccctgtatcagaatgtgttgttctattttgagggtgagcagtcctgccgccctgctggaatgtacctgttggaaggatgtagttgcgaacgcacccctgctccaccacgggcaggcgctggccagggtggcgtcagagacgccctagacaagcaatattatttcactgtgctcttcggccatgaaggccagaaacctttggagctcagatgcgaggaggagcaagacggaaaggaatggatggaagcgatccatcaggccagctatgccgatatcctgatcgaaagagaagtcctgatgcagaaatacattcacttggtgcagatcgtagagactgagaaaatagccgctaaccaacttcgacatcagttggaagaccaagacaccgaaatcgagcgtttgaagtctgaaattatagccctcaataagactaaagagcggatgaggccctaccagagtaaccaagaggatgaagacccagacataaaaaaaattaagaaagtccagagcttcatgagaggatggctctgccggcgtaaatggaagacaatagtgcaggattatatttgcagcccccacgctgagagcatgaggaaaagaaaccagatagtgtttacaatggtggaagcagaatctgagtatgtgcaccagctctatatcctggtaaacgggtttcttcgtcctcttagaatggctgctagtagtaagaaacctccaatttcccacgatgatgtgtcttccatctttttaaacagcgagaccatcatgtttctgcatgagatcttccaccagggtctgaaagcacgaatcgcgaattggccaaccctaatcctggctgatctatttgacatcctgctccctatgttgaatatctaccaggaatttgtgagaaatcatcagtactctctccaggtgctcgcgaactgcaaacagaatagggatttcgacaaactgctgaaacagtatgaagccaatcccgcatgtgagggacgcatgctagaaacctttctgacatatcccatgttccagataccacggtacataatcaccctgcacgagcttctggcacataccccacacgagcacgtcgaaaggaagtcactcgagttcgccaagtcgaaactcgaagagctttcacgggttatgcacgacgaggtatccgacactgagaatattcgaaagaatctcgctatcgaaagaatgatcgtcgaagggtgtgatatcctcctggatacctcccagacatttatcagacaggggagtctgatccaggtccccagcgtggaaaggggcaagttgagcaaggttcgtcttgggagcctgtctttgaagaaagagggagagcgacagtgcttcctgttcaccaagcacttcttgatttgtactcggagttccggagggaaactgcacttgcttaagacaggtggcgtcttgtctctaattgactgtacacttatcgaagagcctgacgcttctgatgatgacagcaagggcagcgggcaggtgttcgggcatctggacttcaagatcgttgtcgagccacccgatgcggcagctttcactgttgtgttactggccccaagccggcaagagaaagctgcctggatgtctgatatttcccagtgcgtggacaacatcaggtgcaacgggctaatgacaattgttttcgaggagaattccaaagtgaccgttcctcacatgattaaatcagacgctcgcctgcacaaggatgatactgatatctgcttttccaaaacactgaattcgtgcaaggtgccccagattcgctatgcttcagtggagcgcctgcttgagagactaacggatttacgttttctgtctatcgattttcttaacacatttttgcatacatacaggatattcacaaccgctgccgtggtgctgggcaagctgtccgatatttacaaacggccatttacatccatccctgtgagatccctggagttgttctttgctacgagccaaaataatcgtggcgaacaccttgttgatgggaagtctccgcgactttgcaggaagtttagctctccgcctccattggctgtatctcgcacttcttcccccgtgagggccaggaaattgtcattgacctcacctcttaattctaaaatcggggcactcgatctgaccacctcatcttcacctaccaccacaacgcagagtccagctgcgtcaccccctcctcataccgggcagatccccctggacctgtctcgagggctgtcttccccagagcagtcaccaggcactgtggaggagaatgttgacaatcccagagtcgacttatgtaacaaactgaaacggagcattcaaaaggccgtgcttgaaagtgctccagctgaccgggcaggagtagaatcttcacctgctgccgatacaactgagctatcaccctgtcgcagcccctcgacgcctcgtcacctacggtacagacagcctgggggacagactgctgacaacgcacactgctctgtgagccctgcatccgcctttgcgatagctacagctgcagctggtcatggttctccccctgggtttaataacacagagcgcacatgtgataaggaattcattatcagacgtacagctactaatcgcgtcttgaatgtgctgagacactgggtctctaagcatgctcaggacttcgaactgaacaatgagctgaaaatgaacgtcctaaatctcctggaggaggtcctccgcgaccccgaccttctgccccaggagagaaaggccgctgccaatatcctccgcgctctcagtcaggatgaccaggatgacatccacctcaagctcgaggacatcatccagatgacagattgtatgaaggctgagtgcttcgagagtctgtccgctatggaactggctgagcagatcaccttgctcgatcacgtgatcttccgctcaatcccatatgaggagttcctgggacaagggtggatgaagctggacaagaacgagcgcactccttatattatgaagacgtcacagcacttcaatgacatgtccaatctcgtggcatcccagattatgaactatgcggatgtcagcagtcgcgcaaacgctatagaaaaatgggtcgcggtggctgatatctgccgttgcctgcacaactataatggggtgctggaaattacctccgccctgaatagatcagcaatttaccggctgaagaaaacctgggccaaagtcagcaaacagacgaaagcattgatggacaaacttcagaaaactgtgtcttctgagggcaggttcaagaacctgcgggaaactctgaaaaactgtaacccgccagccgtcccatacttgggtatgtacctcaccgaccttgcgtttattgaggagggaactcccaacttcacagaagaaggactggtcaacttttcgaagatgcggatgatctcacatatcattcgtgaaatccggcaatttcagcaaacaagttaccgaatagatcaccagccaaaagttgcccagtatttgttagataaggacctgataattgacgaggacactctatacgagctgtccctgaaaattgaaccgagactaccggcttag

SEQ ID NO: 238028 - DNA, 4431 bp, synthetic construct
  misc_feature 1..4431: note = Description of Artificial Sequence: Synthetic coding sequence
  source 1..4431: mol_type = other DNA
atgacaagcagtagccctgccggtctcgaagggagcgatttgtctagcatcaatactatgatgtccgccgtgatgtcagtaggtaaagtcaccgaaaacggtggatccccacagggcatcaagtcccccagtaaaccccctggccctaatcgcatcggcaggcgcaatcaagagactaaagaagagaagagtagctataattgcccactatgtgagaaaatttgcacgacgcagcaccagcttactatgcacattagacagcataacactgacacaggtggagccgatcactcgtgtagcatctgcgggaaatcactgtcctccgcctctagccttgaccggcatatgcttgttcattccggcgagagaccctacaaatgcaccgtgtgtggtcagtctttcactaccaatggtaacatgcacagacacatgaaaatccacgaaaaagacccgaactctgccacagcaacggccccaccttctcctctcaaaagacgaaggctttcttctaagagaaaactgagccatgatgctgaaagtgagagagaggatccagcaccagcaaaaaagatggtagaggacggtcagtctggtgatctcgagaagaaggcagacgaggtcttccactgccctgtgtgcttcaaggagttcgtgtgtaagtacggactggagactcacatggagacacactcggacaatcccttgcgctgtgacatatgctgcgttaccttccggacacaccgcggactgctgcggcacaatgctctggtgcataagcagctgccacgagacgctatgggacgtcccttcatccagaataatccatcaataccagctgggtttcatgatctgggatttaccgacttttcatgcaggaagtttcctaggatcagtcaggcatggtgtgaaaccaaccttagaaggtgtatcagcgagcaacacaggttcgtgtgcgatacatgcgacaaggcctttcctatgctgtgcagcctggccctgcacaagcaaacccacgttgctgctgaccaggggcaagaaaagccccaggctacccccttacctggcgatgccctggatcaaaaaggcttcctggccctcctgggcctgcagcacacaaaagacgtgcgcccagctccagctgaagagcctctgcctgatgataaccaggcgattcagctgcaaactctgaaatgtcagttaccacaggacccagggtgtacaaacttgctgtccttatctcccttcgaggccgcttccttaggcggatctctgaccgtcctccccgctacaaaggactccattaaacacctcagcctccagccgtttcagaagggcttcatcatccagcccgattcatccatcgtagtgaagcccatctcaggcgaatccgctatcgagctggctgacatccagcaaatcctaaaaatggcagccagtgcgcctcctcagatctccctgccacctttttctaaggcacctgctgccccactacaagcgatcttcaagcacatgcctcctctgaagcctaaacccctggtcactccacgtactgtcgtcgctacctccacccctccacctttgattaacgctcaacaggcttcccccggttgtatatcccctagtttgccacctccccctctgaagctgctcaagggtagtgtggaggccgcaagcaatgcccacctcctgcagtcaaagtccggaacccaacctcacgcggctaccagactgagtctacaacagccccgtgcagagcttccgggtcagccggaaatgaaaactcagctggaacaggactctattatcgaggcgctactgcccctcagcatggaggcaaagattaagcaagaaattacagaaggggaactgaaggcattcatgactgcccctgggggtaagaaaacgccagccatgagaaaggtcctctatccctgtcgcttttgcaaccaagtgtttgccttctctggagtgctcagggctcatgtgagatcacacctcggaatctcaccgtatcagtgcaatatttgtgattatatcgccgctgacaaggccgctttgattaggcaccttcgaacacattcaggagagcggccatatatctgcaaaatttgccattaccccttcaccgtgaaagcaaattgcgagcgacacctgcgcaagaagcacctgaaggcgactagaaaagacattgaaaagaatatcgagtatgtttcttctagtgccgctgagctggttgacgcattttgtgctccggataccgtgtgtcggctgtgcggcgaggatctgaaacattacagggcactccgcattcacatgagaacccactgtggccgtggtctgggcggtggccacaagggcaggaagcctttcgagtgtaaggagtgttcagctgcattcgctgctaaaagaaattgcattcatcatatcttgaagcaacatctgcacgtgcccgagcaggatatagagtcctacgttttggcggcagacggcctaggaccggctgaagccccagccgcagaggcctccgggcgaggggaggacagtggatgtgccgctcttggagactgcaagcccctgacagctttcctggaaccacagaacggttttttgcatagagggccaacacagcccccaccccctcatgtgagcattaagctagagcctgctagcagtttcgccgtggacttcaacgagccactagatttctcccagaagggtttagccctggtccaagtcaagcaggagaacatcagtttcctatctcctagcagcctcgtgccctatgactgttcaatggagcctatagacttgagcataccaaagaattttcggaagggggataaagacctggccacaccttcggaggctaagaagccagaggaggaagctggtagcagcgaacaacctagtccttgcccagcgcctgggccttctcttccagtgacattaggtccttccggtatcctagagtccccgatggctcccgcacctgctgccacaccggaacctccagcgcaaccacttcagggacctgtgcagctcgctgtgcctatttacagctccgctctcgtgtcttcaccgccactggttggatcctccgcgctgctctcaggaaccgccctgctgcgcccactccggcctaagcctcctctactgctgcctaaaccgcctgtcacagaggagcttccaccattagccagcattgcgcagataatcagcagtgtatcctccgcacctaccctgcttaaaacaaaagtggccgatcccggacccgcatcaactggttctaatactacagcctcagatagcttggggggtagcgtcccgaaagcagctaccactgcaactcctgccgcaacaacctcccctaaggaaagttctgaacctccagcgcctgcctccagtccagaggctgcctcccccaccgaacaggggcctgcaggaacatcaaagaaaagaggcaggaagcgcggtatgcggtctcgcccaagggcaaactctggcggagtggatctcgatagcagcggcgagttcgcgtccatagaaaagatgctggctactacagacacaaacaagtttagtccttttttgcagacagcggaggacaacacgcaggatgaggtggccggtgcacctgccgaccatcatgggccaagcgacgaggagcagggttcccccccagaagacaagttgttgagggctaagaggaattcctataccaactgccttcagaaaatcacatgtcctcattgccccagagtgttcccatgggcctctagcctgcagcgtcatatgttaacacacactggccagaagcccttcccttgtcagaagtgtgatgctttcttcagcacaaagtcgaattgcgaaagacatcagcttcgaaagcatggggtcaccacatgctctttgaggaggaacggactaattccccagtccaaggaatctgatgtaggctcccacgattctaccggcgagcgcccttataagtgccaaacctgtgaacggacgttcacactcaagcattcgctggttagacaccaaaggatacaccagaaggccagacacgccaagcatcacggaaaggactcagataaggaggagcgcggtgaagaggactcagaaaatgagtccacacactcaggaaacaatgccgtcagtgaaaacgaggctgagctggcacctaacgctagcaatcatatggcagttacgaggtcacgaaaagaaggccttgcctcagcaaccaaggattgctctcacagggaggagaaggtgacggcgggttggccatctgagccgggacagggggacctgaacccggagtcaccggcagctctgggccaagatctacttgagccaaggtccaaacggccagctcacccgattctggctaccgctgatggagcctcccagcttgtggggatggagtag

SEQ ID NO: 238029 - DNA, 5063 bp, synthetic construct
  misc_feature 1..5063: note = Description of Artificial Sequence: Synthetic coding sequence
  source 1..5063: mol_type = other DNA
atgacatcttcatcccccgcagggttggagggcagtgatctctcatcaataaacacgatgatgtctgccgtgatgtcggtcggcaaggtgaccgagaatggagggtcaccccaaggcattaagagtcccagtaaacctccagggccaaacaggatcggacgccgaaaccaagagacaaaagaggagaagagctcctacaattgtcctttgtgtgaaaagatttgcacaactcagcatcagctgaccatgcacatccggcagcataacacagataccggcggagcagatcactcttgttctatctgcgggaagagcctgtcctccgcctctagtctagataggcatatgttggtccacagtggtgaacgcccatataaatgcaccgtgtgcgggcagtcatttacaaccaacggcaacatgcacagacacatgaaaatccacgagaaggatcccaactccgccaccgccacggccccacctagccctttgaaacgtcgcagattatcctccaagcgcaagctgtctcatgacgctgaaagtgagcgagaggacccagcgccagccaaaaagatggtggaggatggtcaaagcggtgatctggagaagaaggccgacgaggtgtttcactgtcctgtctgctttaaggagtttgtgtgcaagtatggcctggaaacgcatatggagactcactccgacaaccccctgcgctgtgatatatgctgcgtgacatttcgcacccacagaggccttttgaggcacaatgctctggtgcataagcagcttcccagggacgctatgggaaggccttttattcagaataacccgagtatcccagctggcttccatgatctggggttcacggactttagttgtcgaaaatttccacgcatcagccaagcttggtgcgagacaaacctgaggcgatgtatctcagagcagcataggttcgtgtgcgacacctgtgataaagcctttcccatgttgtgcagcctggcgctacataaacaaacccatgtggctgcagaccaaggtcaggagaaaccacaagccacacctctccccggagacgctctggatcagaaaggattcctggcccttctggggctacagcatacaaaggatgtgagacccgcaccagcagaggagccactccctgacgataatcaagctatccagctacagaccttgaagtgtcaactgcctcaggaccctggatgtaccaatcttctgagtttgtctccatttgaggctgcctccctgggaggcagcctgaccgtgctgcctgccaccaaggattcaattaaacatctgagcctgcagcccttccagaaggggttcattatccagccagactcttctatcgtcgtcaagccaatctccggtgagagcgctatcgagctggccgatattcagcaaattctaaagatggccgcttcagccccaccccagatctctttgccaccgttctccaaagccccagcggctccgctgcaagccatttttaagcacatgcccccacttaagccaaaacctctggttacaccgcgtaccgtagttgccacctctactccccctcctttgatcaacgcccagcaggcaagccctggctgcattagcccgagtctccctccgcctcccctgaaacttcttaagggatcagtcgaagcggcatccaatgcccatctcttgcagagcaagagcggtacacagcctcacgcagcaacacgactcagccttcagcagccaagagccgaactgcctggacagccagaaatgaaaacccaactcgagcaggattcaatcattgaggccttgctgcccctgtccatggaagcaaaaattaagcaggagatcacagaaggtgagctcaaagcttttatgacagcaccgggagggaagaagactcctgccatgagaaaagtgctgtatccctgccgtttttgcaatcaggtctttgcattctctggggtactacgagcccatgtccgatcccacttaggaatcagtccatatcagtgcaatatctgcgattacatcgctgcagataaagccgcactgatccggcacttaaggacgcactctggcgaaagaccttatatctgcaaaatctgtcactatccctttaccgtaaaggctaactgtgagaggcatctacgcaaaaagcatcttaaggcaactcgcaaagacatcgaaaagaacattgagtatgtcagttcatctgccgcagaactcgtcgatgccttttgcgcccctgacaccgtgtgccgactgtgtggggaggatttaaaacactatcgggcactgaggatacacatgaggacacactgtggcaggggattgggtggagggcacaagggaagaaaaccgtttgaatgcaaggaatgctctgccgcattcgccgctaaaagaaactgtatccaccacatactgaagcagcacttgcacgtgcctgaacaagacatcgagagttatgtgttggctgctgacggcctaggccctgctgaggcaccagcagcagaagcctctggcaggggggaggattcagggtgtgctgcacttggagactgcaaacccttaacagcgttcctggagccacaaaacggctttctccatcgaggtccaactcagccaccaccgccacatgtgtctataaaactggaacctgccagcagtttcgccgttgacttcaacgagcccctggactttagccaaaaaggactggctttagtccaggtcaagcaagagaacatctcattcctgtcgccatcttctctggtgccctatgattgctccatggaaccaattgatcttagtattcctaagaactttaggaagggggataaggatttggctacacccagcgaagcaaaaaagcctgaagaggaggcgggaagttccgaacaaccttcaccatgccctgcaccgggacctagcctccccgtaacactggggccatcaggcatcttagagtcacccatggctcccgctcctgctgcaaccccagaaccccctgctcagcctcttcaggggccagtccagctggccgttcctatttacagctcagccctggtgagctccccccctcttgtaggatcatccgccctgctgagcggaactgcattgctccgcccacttagacctaagcctccactgctgctgccaaagccccctgtcacggaagaactgcccccactggcctctatcgctcagataatctcgagcgtgagctccgcccctaccctccttaaaactaaagtggcagaccccggtccggcatccaccggaagtaatacgaccgcatccgatagcttaggaggatctgtccctaaggccgcaacaaccgcaactcccgctgctaccactagccccaaggaatcttccgaacccccagccccagcatcatcccccgaagctgcttccccaacagagcagggcccagccggaactagcaagaaaagaggacggaagcggggaatgcgctccaggcccagagctaacagtgggggagtcgatttagattcatccggagaattcgcttcaatcgagaagatgttagccaccacagacaccaataagttctccccctttcttcagacagctgaggacaacacccaggatgaggtggcaggggcacccgcagatcaccatggcccatccgatgaggagcagggaagtccacccgaggacaagttgttaagggctaagcggaattcttatacaaattgtcttcaaaagatcacttgtccacattgcccacgcgtattcccatgggctagcagtctgcagaggcacatgctgactcacacagactctcagtctgacgccgaaacagcggctgctgccggagaagttcttgatctgacctcccgagatcgcgaacagccctccgaaggggctacagaactgcgccaagtagccggagatgcccctgtcgagcaggcaaccgctgagacagccagccccgtgcatagggaggaacacggcagaggcgagtctcatgaacccgaagaggagcacggaactgaggagtctaccggtgacgccgacggcgctgaagaagatgcttcttctaaccagagcctcgatctggatttcgctacaaagctcatggactttaagctggccgagggagacggagaagccggtgccggtggggcagccagtcaggagcaaaaattagcatgtgacacttgcggtaaaagtttcaagtttctgggtactctctctcggcatagaaaggcccatggacggcaggaacccaaagacgagaagggtgatggcgcttctaccgccgaagaaggcccacaaccagcgccagaacaggaggaaaagcctccagagactcctgccgaggtcgtggagagtgctcctggcgcaggcgaagcgccagctgaaaagctggcagaggagacagagggacctagcgatggagaaagtgcagccgaaaaacgtagctcagagaaatcagacgacgataagaagcccaagaccgacagtcctaaatctgttgcttccaaagctgataagaggaaaaaagtttgttcagtttgtaataagcgattctggtccctgcaggaccttacaagacacatgcgctcgcataccggagaaagaccgtacaagtgccagacctgtgaacgcacgtttacgttaaaacatagtcttgtgcggcatcagcgaattcatcagaaagctcggcacgccaaacaccacggcaaagatagcgacaaagaggagcgaggggaggaggacagcgaaaacgaaagtacacatagcggaaataacgcggtgtccgagaacgaggccgagctcgccccaaatgccagcaaccatatggccgtaaccagatcccgtaaggaaggactggcctctgctactaaggactgcagccatcgggaggaaaaagtaacggctggttggccatccgagcctggccagggagatctgaatcctgagtccccagcagcattggggcaggacctgctggagcctcgtagcaaacgccctgctcatccaatcctagctacagcggatggagccagtcagcttgtgggcatggagta

SEQ ID NO: 238030 - DNA, 5063 bp, synthetic construct
  misc_feature 1..5063: note = Description of Artificial Sequence: Synthetic coding sequence
  source 1..5063: mol_type = other DNA
atgaccagcagctcccctgcgggtctggagggaagtgatctgtcttctattaataccatgatgtcggctgtgatgtctgtcggcaaagtgacagaaaacgggggatcacctcaggggattaagtctccctccaagccacctgggcctaaccgtattggacggcgaaaccaggagaccaaggaggaaaaaagcagctataattgccccctctgcgagaagatttgtactactcaacaccaacttaccatgcacattcgacaacataatactgacactgggggagcggatcactcttgttctatctgtgggaagtccttgtcgagcgcttcaagcttagaccggcatatgcttgtacacagcggggaaagaccatacaagtgcaccgtgtgcggacaatcatttacaacgaatgggaacatgcaccggcatatgaaaatccacgaaaaggaccccaattccgcaacagccacagcgcctccgtctccactgaagcgcagaagactgtctagtaagcgcaagctgtctcatgatgccgagagcgaaagggaggatccggcaccggctaagaagatggtcgaggacggccaatcaggggacctggagaaaaaggccgacgaggtttttcattgtccggtgtgctttaaggaattcgtttgcaaatatggcctggagactcacatggagacacacagcgacaacccattgcgctgcgatatctgctgcgttacatttaggacccacagagggttgctccgccataacgcacttgtccacaagcagcttcccagggacgcgatgggcaggccatttattcaaaacaatccctcaatcccggctggattccatgatcttggattcactgatttcagctgtaggaagtttcccaggatctcacaagcttggtgtgagacaaacctaaggcgctgcatctcagagcagcatcggttcgtgtgcgatacttgcgataaggcattccccatgttgtgttctctcgccttgcataagcaaacccatgtggccgctgaccaaggccaggagaagccgcaagcaaccccgctcccaggtgatgcccttgatcagaagggattcctcgcgcttctaggcctccaacacactaaagacgtgagacccgctcccgctgaggagcctcttcccgacgacaatcaggctattcaattgcaaacattgaagtgccagctgccccaggacccaggctgcacaaatctcctgtccctgtccccatttgaagccgcaagtctgggcggatccctgactgtgctccctgctactaaagattcaattaagcacctgtcccttcagccctttcaaaaggggttcatcatacaaccagattcatctattgtggttaagcccatctctggcgaaagcgccatcgaactagctgatattcagcagatactgaaaatggccgcatcagccccaccgcagatatcgcttcccccattctcgaaggccccagccgcacctctacaggccatcttcaagcacatgcctccgttgaaaccaaagcccctggtcacccccaggaccgttgtcgccacctcgacaccccctcccctgattaatgcccagcaggcatcccccggatgtatctctcctagtctcccgcctcctccccttaagttgctcaagggttctgtagaagccgctagtaatgcccacctcctgcagtccaagtcaggcactcagccgcatgccgcaacccggctgagcctgcaacagcccagagctgagctgccaggacagcccgaaatgaagactcagttggaacaggacagtatcattgaagctctcctgcccctcagcatggaagctaagataaagcaggaaatcaccgagggtgaactgaaggcattcatgacagctcccggtggcaaaaagacccccgctatgcgaaaagtcttgtacccctgtagattctgcaaccaggtatttgcttttagtggcgtgttacgggctcatgtcagatcgcacctcggtatctcgccctaccaatgcaatatttgcgactatatcgcagctgataaggctgctctgatccggcacctgcgcactcactcgggtgaacggccatatatatgcaaaatatgtcactatcctttcaccgttaaggctaactgcgagaggcaccttagaaagaaacacctcaaagccacacgcaaagacatcgaaaagaacatcgaatacgtgagttcttcagctgccgagcttgttgacgcattctgcgcccctgataccgtctgtcgactgtgtggagaggatctgaaacactatcgagcattgagaattcacatgagaacacattgtggacgcggtcttggaggcggacataaaggtcgaaaaccatttgagtgtaaggagtgctcagccgcttttgccgctaagagaaattgtatacatcacattttaaaacaacaccttcacgtcccagagcaggatatcgagtcctacgtcctagcagctgatggcttggggcctgcagaggccccagccgcagaagcaagcggaaggggcgaggacagcggctgcgctgctttgggcgactgcaaacccttgaccgccttcctggaacctcagaacggatttctccatcgcggacccacccagccccctccaccacacgtgagcatcaaattagaaccagcatcttccttcgcagtcgacttcaacgaaccgctggacttctctcagaaaggactcgccctcgttcaggtcaaacaagaaaatatcagctttttgtctccctcttccctagtgccttatgactgtagcatggagcctattgatctgtcaattcccaaaaactttaggaaaggcgataaagacctggccactccttcggaggccaagaagcccgaagaggaagctggcagctccgaacagcctagcccgtgcccagccccaggtcctagcctgccagtgactctcggaccctctggcattctcgagtctccgatggcacctgctcccgcagctacacccgaaccccctgcccagcctctgcaaggcccagttcagctggccgtgcctatttatagctcggcactcgtgtccagccctccgttagtcggctcctcggctttactgtccgggaccgcattgctacggcctctgcgccctaagcccccattactgttgcccaagccccctgtgactgaggaattgcctccactggcctcaattgctcagattatttcaagcgtgtcctccgctccaaccctgcttaagaccaaggtggcagatccaggcccagcctccaccggatcgaacaccactgcttcagattcgttgggcggatctgtgcccaaggccgctactaccgccaccccagctgctaccacgagccccaaggagtcaagcgaaccgccagcaccagcttccagccccgaggccgcttctcccaccgaacaggggccagccggtaccagcaagaaaaggggacgcaaacggggaatgcgttcaagacctagagccaacagtggcggtgtggatctcgattcgtccggtgagttcgcctctattgagaaaatgctggccaccaccgataccaataaattcagcccattcctgcagaccgcggaagataacacacaggatgaggtggctggcgctcccgctgatcaccacggacccagtgacgaagagcagggctctccacctgaggataaactgctgagagctaaacgcaactcttataccaactgcctgcagaagatcacatgtccacattgccctcgagtgttcccctgggctagctcgcttcagagacacatgctgacccacacagactcacagtcagatgctgaaacagcagctgcggcaggggaggtgttggatttgacttcacgtgacagggagcagccttccgaaggcgctacagaactgcgacaggtggccggagatgcaccagttgagcaggccactgcggaaaccgcctccccagtccacagagaggaacatggacgcggagaatcgcatgaaccagaggaggaacatggtaccgaggaatctaccggtgacgccgatggcgctgaggaagacgctagtagcaatcaaagcctcgatctggactttgccactaagcttatggattttaagctggcggagggcgacggagaagctggcgctgggggagcggctagtcaagaacaaaagctcgcatgcgacacctgtggaaagagcttcaagtttctggggactcttagcaggcaccggaaagcccatgggaggcaggaaccaaaggacgagaagggagatggagcaagtaccgcggaagaaggaccacagccagcacccgagcaagaagagaaacctccagagacccctgctgaggtcgttgaaagcgctccaggagccggagaggccccagccgagaagctggctgaggagaccgagggcccatccgacggagaaagtgcggcagagaagcgctctagtgagaaatctgatgacgacaagaaacctaagactgacagcccgaagtctgtcgccagtaaggccgacaagaggaagaaggtttgcagtgtctgcaacaagcgcttctggtccctgcaagacttaactaggcacatgaggtcccacacaggcgagagaccatacaagtgccaaacctgtgagcggacctttactcttaaacacagtctggtgcgacaccagcggattcaccagaaagctcggcacgccaagcaccacggcaaagactcggacaaggaggagcggggagaagaggattcagaaaacgagagcacacactctggaaacaatgccgtctccgagaacgaagcggagctggctcccaatgcttcaaaccacatggcagtgacaagatcaaggaaagagggtttggcgtcagctacaaaggactgcagtcaccgggaggagaaagtcaccgctggctggcccagtgaacctgggcagggcgatctgaaccctgagtcaccagccgcattgggccaggacctgctggagcccagatctaagaggcccgctcacccaatcctggcaacagccgacggagcctcacaactggttggaatggagta

SEQ ID NO: 238031 - DNA, 5228 bp, synthetic construct
  misc_feature 1..5228: note = Description of Artificial Sequence: Synthetic coding sequence
  source 1..5228: mol_type = other DNA
atgaccagctcaagcccggctggactggagggttccgatctgagttcaatcaacaccatgatgtcagccgtgatgtcagtcggcaaagtgacagaaaacggagggtcaccccagggcatcaaaagtccatccaagccccctggccctaaccgtatagggcgacgcaatcaggaaaccaaggaggagaaatcctcttataactgcccactctgcgagaagatttgcaccactcagcatcagctcacaatgcatatccgccagcacaatacagacactggtggagcagatcacagttgcagcatatgtggtaaatcattaagcagcgcctctagtctggatcgccatatgcttgtccactctggcgaaagaccttacaagtgtacggtctgcgggcaatcttttaccacaaatggtaacatgcaccgacatatgaaaatacatgaaaaggacccaaattccgccacagccacagctcccccttcacctctcaaaaggagacgcctgagcagtaagcggaagctctctcatgacgctgaatcagaacgagaggatccagctccggctaagaagatggttgaagatggacagtcaggagatctagagaaaaaggctgatgaagtattccattgccctgtttgctttaaggagtttgtatgtaaatacggactggaaacacatatggagacacatagcgataatccactgcgctgcgatatatgttgtgtcacatttcgaacacacaggggcttgttgagacataatgccttggtgcataaacagcttcctcgggatgcgatgggtagaccgttcatccaaaataacccttccatcccagcaggttttcacgatctcggattcaccgacttttcatgtcgtaagttcccacgcatcagtcaggcttggtgcgagacaaatctgcgtagatgcatcagcgagcagcatagatttgtgtgtgacacttgcgataaggcgttccctatgctgtgctcactcgccctgcacaagcaaacccacgtcgcagcggaccagggccaagagaaaccacaggcaacaccgttgcccggtgatgccctcgaccagaaaggcttccttgccctgctgggtttgcaacatacaaaggatgtgcgccctgctcccgcagaagaacccctgcccgacgacaaccaggcaatacaactgcaaacactcaaatgtcagttgccgcaggatcctggatgcacaaatctcctctctctgagcccctttgaggccgcttccctagggggaagtctcacagtcctgccagcaaccaaggattctattaaacatttgtccttgcagccgtttcagaagggattcatcattcagcctgattcatcaatcgtggttaagccaatcagcggtgaatctgcaattgagctagcagacatacaacagatactgaagatggctgcgtccgcccctccccagatctcactgccgcctttctctaaggcgcctgcagcacctctgcaagccattttcaaacatatgcccccactcaaacctaagcctttggtgacgcctagaactgtggttgctaccagtacccctccgcctctaatcaatgcccagcaagcgagcccaggatgcataagtccttccctaccccctcccccacttaagctgctgaaggggagtgtggaggccgctagtaacgcacatctgctgcagagcaagagcggaacacagccacacgcagccacaaggcttagtctccaacagccacgtgcagagctgcccggtcagcccgagatgaagacccagcttgagcaagatagcataatcgaagccctgcttcccctgtcaatggaagccaaaataaaacaggagatcacagaaggtgaattgaaggcctttatgacagcacccggtggaaagaagaccccagccatgagaaaggtattatatccgtgtaggttctgtaatcaggtgttcgcattctcaggggtgcttagagctcacgtgaggtctcacctagggatctcaccttatcagtgtaatatttgtgattacattgccgcagataaggctgcgctgatacgccacctgagaacccactctggtgagcgtccctatatctgtaagatctgtcattaccccttcacagtgaaagcaaactgtgaaagacacctcaggaaaaagcatctgaaggcaacgagaaaggatatcgaaaagaacattgaatatgtgtcaagttctgcggctgaacttgtcgacgcattctgtgccccagacaccgtttgtcgcctatgcggagaggacctaaagcactatagggcacttcggattcacatgagaacccattgcgggagaggcctgggagggggacacaagggcaggaagccgttcgaatgtaaagagtgtagcgccgcttttgctgccaagcggaactgcattcatcacatattgaaacaacacctgcacgtgccagagcaggatattgagagctatgtgctcgccgctgacggcctcggcccagctgaagctcctgccgcagaggcttctggaagaggtgaggattccggttgtgccgcactgggggattgcaaacccctcaccgctttcctggagccacagaatgggttcctgcacagaggcccaactcagccccctcccccacacgtatctatcaagttagagcctgcctcctcattcgccgtggacttcaatgagcccttggactttagccagaaaggactggcattagtccaggtgaaacaggaaaacatcagttttttaagtcctagctccctagtgccctacgactgcagcatggagcctatcgatcttagtattccaaagaacttccggaagggtgacaaggacttggcgactccatccgaagcgaagaagcccgaggaggaggccggaagctccgaacaacccagcccttgtccagcccctgggcctagcctcccggtgacccttgggccaagcggtattctcgaaagtcccatggctcctgctcccgcagcaacaccggaacccccagcccagcccctgcaggggcctgtgcagctcgcagtgcccatctattcctcagcgctcgtgagctcgccgccactggtcggctccagcgcgttgttaagcgggaccgcattgctgcgtccactgaggccaaagcctccattactactgcctaaacccccagtgaccgaggagctgccccctttggcaagcattgctcagattatatcctcggtgagtagtgcccctactctgttgaagaccaaggttgcagaccccggacccgctagcactgggtctaatacgactgcgagcgattcactgggaggctctgttccgaaagcggctactacagctacccccgcagcaactacctctcccaaggagagcagtgagccaccagcccctgcatccagcccagaggcagcaagccccaccgaacaaggacctgcaggcacctccaaaaagcggggacgcaagcgaggtatgagatcccgccctcgggcaaactcaggtggggttgacctggattccagtggcgagtttgcctcaattgaaaagatgctggcaacaactgatactaataagttttctccatttttgcagacagcagaagataacacgcaagatgaggtcgcaggcgcacccgctgatcaccacgggccatccgacgaggagcagggtagtcccccagaggataagctgctcagggcgaaaaggaatagttataccaactgcctccagaagatcacctgcccccactgccctcgagtcttcccttgggccagttcacttcagcgacacatgttaactcacactggccaaaaacccttcccatgccagaaatgcgacgcgttcttcagtacgaagtctaactgtgagcgccaccagctccgcaagcacggagttacaacctgttcactgcgacgaaacggcctgatcccacagtccaaagaaagtgacgtgggctcccacgactcgactgactcacagtctgacgcagaaaccgccgctgcagctggcgaagtcctggatttgacatcccgggatagggagcagccttccgaaggggcaactgagctgcgacaggttgccggtgacgcgccagtcgagcaggctactgcggagaccgcttccccggtgcacagggaagaacatggccgtggagaatcacatgagcctgaagaagagcatggtactgaggagagcaccggagatgccgacggcgcagaggaggacgcgagctccaatcagagccttgatctggacttcgcaacgaagctgatggattttaaactcgctgagggagacggcgaagcaggagccggaggcgctgccagccaagagcaaaagttagcttgcgacacctgcggtaagtcttttaagttcctgggcacgctgagcagacaccggaaggcacatggcaggcaggagcctaaggacgaaaagggcgacggcgcatcaacagctgaagaaggtccccaacctgctcctgagcaggaagaaaagccgccagaaacaccggctgaggtggtggaaagtgcaccaggtgcaggggaggctcctgccgaaaaacttgctgaggagaccgagggcccaagcgacggagaatctgccgctgaaaaaagatcgagtgaaaagtctgacgacgataaaaagcctaaaacagacagtccaaaatcagttgccagtaaagctgacaagcgcaagaaagtgtgttctgtgtgcaataagcggttttggtctttgcaagatttaacgaggcacatgcggtctcacactggggaacgtccttataagtgccagacgtgcgagcggacgttcaccttgaaacatagtctggttaggcaccagcgcatacaccaaaaggcccgacacgcaaagcatcacgggaaagactccgacaaggaggagagaggtgaggaagactccgaaaacgagtctacacactctggtaacaatgccgtaagcgagaacgaagccgaactcgctcctaacgcctcaaatcatatggcagtgactaggagcaggaaggaagggctggcctcagccacaaaggattgttcccaccgggaggagaaggtgacagccggatggccaagcgagcccggacagggagatctgaatcccgaatcacctgcggcacttggccaggacctgctggagcctcgatcaaaacgacctgcacatccgattctagccaccgcagacggtgcatcacagctggtcggaatggagta

SEQ ID NO: 238032 - DNA, 15 bp, synthetic construct
  misc_feature 1..15: note = Description of Artificial Sequence: Synthetic coding sequence
  source 1..15: mol_type = other DNA
atgactagctcctag

SEQ ID NO: 238033 - DNA, 495 bp, synthetic construct
  misc_feature 1..495: note = Description of Artificial Sequence: Synthetic coding sequence
  source 1..495: mol_type = other DNA
atgacatccagcagtccggctggtcttgagggctcggatctgtcatctatcaacactatgatgagcgccgttatgtctgtcggcaaggtcaccgaaaacggtggcagcccacagggaatcaaatctcctagcaagcccccagggccaaaccgtatcggcagaaggaaccaggagactaaggaggaaaagtccagctataattgcccactgtgtgaaaaaatatgcacaacacagcaccaactaacaatgcacattcggcagcacaacaccgataccggcggagcagatcactcgtgctcgatctgcggtaagagcctgtcatcagccagttccctggaccggcacatgctggtgcactcgggagagcgcccatataagtgtacggtttgtgggcagagcttcactactaatggcaacatgcatagacatatgaaaatccacgagaaagaccccaacagtgcaacggctactgctcctcctagcccactgaaatag

SEQ ID NO: 238034 - DNA, 2337 bp, synthetic construct
  misc_feature 1..2337: note = Description of Artificial Sequence: Synthetic coding sequence
  source 1..2337: mol_type = other DNA
atgacgtcttctagtcctgccggtctggagggcagcgatttatcgtccattaacaccatgatgtctgcggttatgagcgtgggtaaggtcactgagaacggtggctccccccaggggattaaatcaccctccaagcctcccggtccaaatagaatcggcagacgaaaccaggagacaaaagaagagaaatcctcttacaattgcccactatgcgaaaaaatatgtaccactcagcaccaactgaccatgcacattaggcagcacaacaccgacactggtggcgctgatcactcctgcagcatatgtgggaagtctctttcgagcgcttcctccctggaccggcacatgttggtacattcaggggaacgtccgtataagtgtactgtatgcgggcaaagcttcaccactaacggcaacatgcaccgccacatgaaaattcacgagaaagatccgaatagcgcgacagctactgctccacccagccccctgaagcggagacggctttctagtaaacgaaagttgtctcacgatgctgagtctgaaagagaagatcccgctcctgccaagaaaatggtcgaggatgggcaaagcggcgacttggagaagaaagcagatgaggtctttcattgtcccgtttgctttaaagaatttgtgtgtaagtacggtctggagacgcatatggagactcacagtgacaatcccctgcgatgtgacatttgttgcgtgacgtttaggacccatcgcggtcttctcagacacaatgccttggtgcacaaacagctaccccgagatgccatggggaggccctttatacagaacaacccatcgatcccagccggatttcacgatctgggctttacagattttagctgcagaaagttccccagaatatcgcaggcctggtgcgaaaccaatctacgcagatgtatttctgaacagcaccgattcgtgtgtgatacatgcgacaaagcttttcctatgctatgcagcctggcactgcacaagcaaactcacgttgctgcagaccaggggcaggagaagccgcaggctacacccttgccaggagatgccctagaccagaaaggatttctggctctgttgggtctgcagcataccaaagacgtccgccctgctccggcagaggaacccttaccagatgataatcaagccattcagttgcaaaccctgaagtgccagcttcctcaggatcccggatgcacgaatttgctctctctgtctcccttcgaagctgcatctttagggggatccttaactgtccttccagctactaaagactccatcaagcacctctccctgcagcccttccagaagggtttcatcatccagccagatagctcaattgtggttaaaccaattagcggcgagtcagccattgagctcgcagatatccagcagatattaaaaatggctgcctccgcacctcctcagatcagccttcctccgttctccaaagcccctgccgctccactccaggccatattcaagcatatgccacctctgaagccaaagcctctggtaacgcctagaaccgtagttgccacctctacccctcctccgctaataaatgctcagcaggcttctcccggatgtatttcaccctcattaccccctcctcccctgaagcttttgaagggttcggttgaagcagcctccaatgcccacctgttacagtctaagagtggcacacagcctcacgcggcaacccgtttaagcttgcagcagcctagggcagagttgccgggacaaccagagatgaagacacagttagagcaggattccatcatcgaggctctacttccactgtctatggaggccaagatcaagcaggaaatcactgaaggcgaactgaaggcctttatgaccgcccctggcggaaagaaaacaccagcaatgcggaaggtcctctacccatgccggttctgcaaccaggtgtttgctttctcaggcgtattaagagcacatgtcaggtcacatctggggatcagcccttaccagtgcaatatttgtgattacatagcggctgacaaggcggctcttattaggcacttgcgcacccatagcggtgagcgcccttacatttgcaagatctgtcactacccatttacagtaaaagccaactgcgaacgacacttacggaaaaagcacctgaaggcaaccagaaaagacattgagaagaacattgagtatgtgagctcttcagctgctgaacttgttgatgcgttttgcgctccggataccgtttgccgactgtgcggagaggatttgaaacactaccgagctcttcgaatccacatgcgaacccactgtggaagatag

SEQ ID NO: 238035 - DNA, 411 bp, synthetic construct
  misc_feature 1..411: note = Description of Artificial Sequence: Synthetic coding sequence
  source 1..411: mol_type = other DNA
atgacaagttccagccccgctggactggagggctctgacctctcatccatcaacactatgatgtccgccgtcatgagcgtgggaaaggtaacggaaaacggtggcagcccgcagggcattaaatctcctagcaaacccccagggcctaaccgcatcggtaggaggaatcaagagacgaaagaggaaaagagcagctataattgtcccctatgcgagaagatctgcacgactcagcatcagctgactatgcacatccgtcaacacaacacagacacaggaggtgctgatcacagctgcagtatctgtggtaagtctttaagttccgcctcgtccctggaccggcatatgctagtgcacagcggcgaacgaccctacaagtgtaccgtttgtggccagagctttacaacctag

SEQ ID NO: 238036 - DNA, 189 bp, synthetic construct
  misc_feature 1..189: note = Description of Artificial Sequence: Synthetic coding sequence
  source 1..189: mol_type = other DNA
atgacgtccagcagtccagctggtctggaaggctccgacctctccagtattaacaccatgatgtctgccgtcatgtcagtgggcaaggtgactgaaaatggagggagcccccaaggcatcaagtcacctagtaagcctcctggacctaaccggatcgggaggagaaatcaggttagcgtccacacttag

SEQ ID NO: 238037 - DNA, 834 bp, synthetic construct
  misc_feature 1..834: note = Description of Artificial Sequence: Synthetic coding sequence
  source 1..834: mol_type = other DNA
atgtccaagagcttgaagaaactggttgaagagagcagagaaaagaaccagcctgaggtggatatgagcgataggggcatttctaacatgctagacgttaatggactgttcactctgtctcatataacacagctcgtgctgtctcacaataagctgaccatggtgccacccaatatcgcggaacttaagaatctcgaagtattgaacttcttcaacaatcaaattgaagagctgccaacccaaatttcaagcctccagaagctgaagcacctcaatctggggatgaacagactgaatactcttccccgtgggtttgggtcattgccagccctcgaggttctggatctcacttataataaccttagcgagaacagcctgcccggaaattttttttacctgactacactacgggctctctatctgagtgacaatgatttcgagattctgcccccagacattggaaaattgacaaagttgcagattctgagcctcagggacaatgatttaatatccctgcccaaagaaattggtgagctaacgcagctcaaggaactgcatatccaggggaatagattgacagtactcccccctgaattaggaaacctggaccttaccggtcagaagcaggtatttaaagccgagaacaacccctgggtgaccccgattgcggaccagtttcaactaggtgtttcccacgtgttcgaatacatccggtcagagacctataagtatctttacgggagacatatgcaagccaacccggaaccacccaaaaagaacaacgacaagtctaagaagatatcaaggaaaccactggcagctaagaaccgctag

SEQ ID NO: 238038 - DNA, 675 bp, synthetic construct
  misc_feature 1..675: note = Description of Artificial Sequence: Synthetic coding sequence
  source 1..675: mol_type = other DNA
atggtccccccaaatatcgcagagctcaaaaacctagaagtgcttaacttttttaacaatcagatcgaggagcttccaactcagatctcgtctctacagaaactgaaacacctgaatcttggaatgaaccggttgaatactctgcctcgcggattcggaagtcttcccgcactggaggtcctagacctgacctacaataacctttccgagaacagcctcccgggaaactttttctatcttaccactctgcgagctctctacttgtcagataatgacttcgaaattctgcctccagatatcggaaagctgacgaagctccagatcctgtctctgcgcgataatgacctgattagcctgccaaaggaaattggagaactgacacagctgaaggagctgcacatccagggcaacaggctcaccgtgctgcctcctgagcttggaaatctcgacctcaccggccagaagcaggtattcaaggcagagaacaacccttgggtgacgccgatagctgaccagttccaattgggggtgtcacacgtcttcgagtacattagatctgaaacatataagtacttgtacggacggcatatgcaagcgaatcccgagccacccaagaaaaataacgataagtccaaaaaaatttcccgaaagccattagctgcaaaaaaccggtag

SEQ ID NO: 238039 - DNA, 834 bp, synthetic construct
  misc_feature 1..834: note = Description of Artificial Sequence: Synthetic coding sequence
  source 1..834: mol_type = other DNA
atgagtaaaagcctcaaaaagctcgttgaggaatcccgtgagaagaaccaaccagaggttgacatgtctgatagaggaatcagcaatatgctggatgtgaatgggctgttcacactcagccatatcacgcagctagtgctctctcataataaactgacaatggtcccgcctaacatcgcagagcttaagaatcttgaggtgctcaatttttttaacaaccagatagaggagctgcccacacaaatttcatcgcttcagaagctgaagcacctgaacctgggcatgaacaggctgaacaccctgcccaggggcttcggaagcctgcccgcacttgaagtactcgatctgacttataacaacctgagtgagaattctctgcctgggaacttcttttatctaaccacactgagagctctctatctctctgacaacgactttgaaatcttgccaccagacatcgggaaactcacaaaattgcaaatcttgtctctgcgggacaatgatctgatttccctccctaaggaaatcggcgagctgactcagcttaaagaactgcacatacaagggaatcggctgactgtcctccctcctgagctaggcaacctcgatctgactggtcagaagcaggtgttcaaggcagaaaataatccttgggttaccccaatcgcggatcagtttcaattaggcgtgtcacatgttttcgaatacatcagatccgaaacctataagtacctatacggtcgtcacatgcaagcaaatcccgaacccccaaagaagaataatgacaagtctaagaagatcagcaggaagcctctggccgctaaaaatcggtag

SEQ ID NO: 238040 - DNA, 945 bp, synthetic construct
  misc_feature 1..945: note = Description of Artificial Sequence: Synthetic coding sequence
  source 1..945: mol_type = other DNA
atggctgctaccgcatcagccggtgcgggtgggatcgacggaaaaccgaggacatctccaaagagtgtgaaatttttattcgggggtttagctggcatgggggctaccgtgtttgtgcagcccctggaccttgtgaagaataggatgcagctgtccggtgaaggagccaaaactagagaatataaaacgagctttcatgccttaacaagcatacttaaggccgaggggctccgaggtatctataccggcctgtctgccggacttctgcggcaagccacatatactactacacgtctggggatctacactgtgctattcgaacgccttaccggtgcagatggcactccccctggatttctgttaaaggcagtgatcggcatgacagcaggtgccactggagcctttgtggggacccctgctgaagtcgctctaatccgcatgaccgccgacggccgactgcccgcagatcagagaagggggtataaaaatgtttttaatgccctaattaggatcaccagggaagagggcgttcttactctgtggcggggatgtatccccaccatggcgagagcggtggtcgtgaacgcggctcagctcgccagttactcccagtccaaacaatttctgctggactctggctacttttctgacaacatcctttgtcacttctgtgcttccatgattagcggtctggtcactacagccgcatctatgcccgtcgacattgctaaaactagaatccagaacatgcgcatgattgacggcaagcccgagtataagaatggtttggacgtgcttttcaaggtcgtgcgatacgaggggtttttctcactctggaagggcttcaccccctattatgcccgactcggccctcataccgtcctaacattcatcttcctggaacagatgaacaaggcctacaaacgcctctttctctctgggtag

SEQ ID NO: 238041 - DNA, 1530 bp, synthetic construct
  misc_feature 1..1530: note = Description of Artificial Sequence: Synthetic coding sequence
  source 1..1530: mol_type = other DNA
atgtctatgggggcaccgagatcactgctactggccctagccgctggactggccgtagccaggcctcctaatattgttctgatcttcgccgacgacctgggttatggagacctgggttgttacgggcacccgagctccacaacccccaatttggatcagctggcagccggagggctccggtttaccgatttctatgtgcccgtgtctctctgcacaccgtcgagagccgctttactgaccggcagattgcccgtgcggatgggtatgtatccaggtgttttggtcccttcctctcggggaggactccctcttgaggaggtcaccgtagcagaagtgctcgccgctaggggttatcttacaggaatggccggaaaatggcacctgggagtcggcccagagggggctttcttgccaccacatcaaggtttccatcggttcctggggattccatactcccatgatcaaggtccctgccagaacctcacttgttttccacccgcaactccatgcgacggtggttgtgatcagggattggtgcctatccctctgctcgctaatttaagtgtcgaagctcagccaccttggttgcccggtctagaagcgagatacatggccttcgcccacgacctcatggccgatgctcaacggcaggatagaccgtttttcctttattatgcatctcatcacacgcactatcctcagtttagcggccagtcattcgctgagcggagcggaagaggcccttttggagacagtctaatggagctggatgctgcagtggggaccctgatgactgctatcggggacctaggactcttggaagagactctcgttatattcacagcggataacggacccgagacaatgcgcatgtcccgtgggggatgctccggtctcctaagatgcggaaagggtactacttatgagggtggcgtgagagaaccggcattggctttctggccaggacatatcgcccctggtgtaacgcatgaactggccagctccctggatctactgccaacattggccgctctcgcaggcgctcctctgcccaacgtcactttggatggatttgatttaagtcctctccttctgggcaccggaaaatcccctcgccagtcgctgtttttctacccttcttaccccgacgaagtccgtggcgtgtttgcagtgaggactggaaagtataaggcgcacttctttacgcagggcagcgcccactctgacaccactgccgatcctgcatgccacgccagcagtagtctgaccgcccatgagccccctctactctacgatttatctaaggaccctggagagaattataacctgctcggaggtgtggctggtgccactcctgaagtcctgcaagcgttgaagcagctccagcttctcaaggcccaactagacgcagccgtgactttcggcccttctcaggttgccagaggggaggaccctgctctacaaatctgctgtcaccctggatgtacaccacgcccagcctgctgccactgcccagacccccacgcctag

SEQ ID NO: 238042 - DNA, 600 bp, synthetic construct
  misc_feature 1..600: note = Description of Artificial Sequence: Synthetic coding sequence
  source 1..600: mol_type = other DNA
atggcaaagtctgcggaggtcaagctggcaatcttcgggcgagctggggttggcaagagtgcgctggttgtccgcttcttaacaaagagatttatttgggaatacgaccccaccctcgaatccacatacaggcaccaggccacaattgatgacgaagtagtgtcaatggaaattctagacaccgctgggcaggaggacacgattcagagagagggccacatgcgctggggcgagggtttcgttttggtctatgatatcactgaccggggatcattcgaggaggtcctgccactcaagaacatcctggacgagatcaaaaagccaaaaaacgtcaccctgattctcgtgggcaataaggcagacttagatcacagtaggcaagtcagcacagaagaaggtgagaaactagcgactgaattggcctgtgctttctatgagtgttctgcctgtaccggtgaaggcaatatcacagagatcttttacgaactgtgccgcgaagtccggagacgcagaatggtgcagggcaaaaccaggagaaggtcctctaccacgcacgttaaacaggcgattaataagatgcttacaaaaatttctagttag

SEQ ID NO: 238043 - DNA, 120 bp, synthetic construct
  misc_feature 1..120: note = Description of Artificial Sequence: Synthetic coding sequence
  source 1..120: mol_type = other DNA
atggccaaaagcgcagaagtgaaactcgccatcttcgggagagccggtgtgggcaaatccgcactagtcgtgaggtttctgactaaacggttcatctgggagtacgacccgactctgtag

SEQ ID NO: 238044 - DNA, 600 bp, synthetic construct
  misc_feature 1..600: note = Description of Artificial Sequence: Synthetic coding sequence
  source 1..600: mol_type = other DNA
atggctaagagtgccgaggtgaagttggccatattcgggagagctggggtgggaaaatctgccctcgtagtccgatttttaacaaaacgctttatttgggaatacgaccccaccctggaaagcacgtataggcatcaggccacaattgacgatgaggtcgtgagcatggaaatactggataccgctggccaggaggataccattcagcgggaggggcacatgagatggggagaaggatttgtgttggtatacgatattaccgatcggggatcattcgaggaggtcctgccacttaaaaatattttggatgagattaagaagccaaaaaacgtcaccttgatcctagtagggaacaaagctgacttggatcatagtcgacaggtgtcaacggaggaaggggagaagctagcaaccgaactagcctgcgcattttacgagtgttcagcctgtactggcgaaggtaacatcacagagatattctacgagctgtgccgtgaagtgcggcgaagacgaatggtgcaaggaaagaccagacggcgtagctcaactacacatgtaaagcaggccatcaataaaatgctgaccaagattagctcctag

SEQ ID NO: 238045 - DNA, 600 bp, synthetic construct
  misc_feature 1..600: note = Description of Artificial Sequence: Synthetic coding sequence
  source 1..600: mol_type = other DNA
atggccaagtccgccgaggttaagctggctattttcggtcgcgcaggcgtgggtaagtctgccctcgtcgtacgcttcctgaccaaaagattcatttgggagtacgatcctacccttgagtctacttaccgtcaccaggccacaatcgacgacgaggtagtgagcatggagatactggatactgcaggccaagaggacacaatccagcgggaggggcacatgcgctggggtgaagggttcgttctggtctacgacataaccgatagggggagtttcgaagaagtactgcctctcaaaaacatcctcgatgaaattaagaaacccaaaaatgtgaccctgatcttggtggggaataaagccgacctggaccactccagacaggtttccacggaggagggagagaagttagccacggagctggcctgcgcattctatgagtgtagcgcgtgtacgggcgagggaaatattactgaaatcttctatgagctatgccgggaggttaggcgacgcaggatggtccaaggcaagactcgcaggcgcagctcgacgacacacgtgaagcaagctatcaacaaaatgctgaccaagattagttcttag

SEQ ID NO: 238046 - DNA, 543 bp, synthetic construct
  misc_feature 1..543: note = Description of Artificial Sequence: Synthetic coding sequence
  source 1..543: mol_type = other DNA
atggctaaatctgctgaagtgaagttggctatttttggtagggctggagtcggcaagtccgagtctacttatagacatcaagctaccatcgatgatgaagtagtctctatggagattctggacaccgccggacaagaggacaccatccaacgcgaaggtcatatgcgttggggggaaggcttcgtgctggtatatgacattaccgatcgcggtagcttcgaagaggtattgcctctgaaaaacattctcgacgagataaagaagccaaagaacgtgaccctcatcttagtgggcaacaaagcagacctagatcattcacggcaagtgagcacagaagagggtgagaagttggcaacagagctcgcttgtgctttctacgagtgttcagcttgcacaggagagggcaacatcactgaaattttctacgagctttgtcgagaagtgcggaggcgcagaatggtccagggcaagacgcggcgaaggtcctccacaacccacgttaagcaggcaatcaacaagatgttaaccaagatatctagctag

SEQ ID NO: 238047 - DNA, 612 bp, synthetic construct
  misc_feature 1..612: note = Description of Artificial Sequence: Synthetic coding sequence
  source 1..612: mol_type = other DNA
atggtgagcacatacagggtggccgttctcggagcacggggtgtgggtaaatccgctatcgtgcggcaattcctgtataacgagttctcagaggtttgtgtccccacaactgctcgaaggctgtatcttcccgcagtggtgatgaatggtcatgtccacgacctccagatcctggacttccctcctatttcagctttccctgtgaacaccctgcaggagtgggcagacacctgctgcagggggcttcgctctgtgcacgcctacatcctggtctatgacatctgttgctttgattcctttgagtacgtgaaaacaatcagacagcagatcttggagacccgggttattggaacctcagaaacacctattatcattgtcggtaataagcgggatctgcagaggggtagagttataccaaggtggaacgtgagccaccttgtgcgcaagacctggaaatgtggatatgtcgagtgttccgcaaaatataactggcacatcctgctgctcttcagtgagctccttaaatctgtgggctgcgctcggtgcaagcacgtgcatgcagcactgaggtttcagggcgcacttcgtaggaaccgctgcgctatcatgtag

SEQ ID NO: 238048 - DNA, 729 bp, synthetic construct
  misc_feature 1..729: note = Description of Artificial Sequence: Synthetic coding sequence
  source 1..729: mol_type = other DNA
atgaggccgctgagtatgtcggggcacttccttctagcacctattcccgaaagctctagtgactacttactgcccaaagatattaaactggctgtccttggcgctgggagggtggggaaaagtgcaatgattgtgagattcctgactaaaagattcattggagattacgagcccaatactggaaaattgtactcacggttagtgtacgtcgagggcgaccagctcagcctgcaaatacaagacacgcctggcggtgtgcagatacaggactctcttccacaggtggttgactccctgagcaagtgcgttcagtgggcagaaggctttcttttagtgtacagcataactgattatgactcatatctctcaataagaccactctatcagcacatccgcaaagtgcaccccgattcgaaggccccagttatcattgtggggaataagggggacctcctccacgccaggcaggtccagacacaagacggaatccagctcgcgaatgagctcgggtctctcttcctggagattagtacatccgaaaactacgaggacgtctgcgatgtgtttcaacacctctgcaaggaggtcagcaaaatgcacgggctgagtggggaacgccgaagagcatccatcattccacgaccgagatcccccaacatgcaggatctgaagcggagattcaagcaagccctgtctccaaaggtgaaggccccaagcgccctcggatag

SEQ ID NO: 238049 - DNA, 747 bp, synthetic construct
  misc_feature 1..747: note = Description of Artificial Sequence: Synthetic coding sequence
  source 1..747: mol_type = other DNA
atgaggctcattcaaaacatgtgtacaatcgcggagtaccctgcgccaggaaacgccgctgcctcagactgctgcgtgggagcagccggacggagacttgtaaagatagccgttgtcggagccagcggggtgggcaagactgcgctggttgtgcggttcctgactaaaaggtttataggtgactacgagagaaatgcagggaacctatacactagacaagtacagatcgagggcgagacgctggcactgcaggtgcaggacacaccgggtattcaggtgcacgagaattctcttagctgcagcgagcagctcaacagatgcattcgttgggccgatgccgtcgtgatcgtttttagcatcaccgactacaagagttatgagctgataagtcagctgcaccaacatgttcagcagctgcaccttggaacacgccttcccgttgtggttgtggctaataaagctgatttgctgcacatcaaacaggtggaccctcagcttggcctccagctggcgagcatgttgggatgcagcttctatgaggtttcggtctcggaaaactacaatgacgtgtactctgctttccacgtgttgtgcaaggaagtgtcacataaacagcagccatcctccactcctgagaagaggcgcaccagcttgattcccaggcctaaaagcccaaatatgcaggacctaaaaagaaggttcaagcaggccttgagcgccaaggtgcgaaccgtaaccagcgtgtag

SEQ ID NO: 238050 - DNA, 927 bp, synthetic construct
  misc_feature 1..927: note = Description of Artificial Sequence: Synthetic coding sequence
  source 1..927: mol_type = other DNA
atgacactgaacggcggtgggtctggtgctgggggtagccgcggtggcggacaggaacgggagcgcagaagagggtcgactccatggggccctgcgcctcctctgcatagacggagcatgcctgtcgacgagcgcgacctgcaggctgcattgacccccggagctctgaccgcggctgccgcagggactggtacccagggtccgagacttgattggccagaggactctgaggatagtttaagctccggcggaagcgacagcgatgagtccgtctataaagtcttgctgcttggcgcacccggtgtgggtaagtccgccttagctaggatctttggtggagttgaggacggccctgaggccgaagccgcagggcacacgtatgatcgctccatcgtagtcgatggtgaagaggccagtctaatggtgtatgacatatgggaacaggacggtggccgatggctaccaggtcactgtatggccatgggcgatgcgtacgtcattgtctattccgtcaccgataaaggtagttttgagaaggccagcgaactgagggtgcagctcaggagagcacgccaaacagatgacgtccctattatactggtgggtaacaagagcgatctcgtgcgttcaagagaagtgagcgttgatgaggggcgagcttgcgccgtcgtgtttgattgtaagttcatcgagacgagcgctgcccttcaccataacgtgcaagcattgttcgagggagtggtcaggcaaattcgtcttaggagggacagcaaggaggctaatgcgaggcgtcaagctggaacacgccgacgtgaatcactcggaaaaaaggccaagcggtttctgggcaggattgtagcacggaactcgcggaagatggcgtttcgtgctaagtccaagtcgtgtcatgatctcagtgtgctgtag

SEQ ID NO: 238051 - DNA, 927 bp, synthetic construct
  misc_feature 1..927: note = Description of Artificial Sequence: Synthetic coding sequence
  source 1..927: mol_type = other DNA
atgaccctcaatggtggcggatccggcgcaggaggcagcaggggagggggtcaggaaagggagcgcagaagagggtccaccccgtggggcccagctccccctctgcacagacggagtatgcccgttgacgaacgcgatctgcaggcagccctgacacccggagcgctgacggctgctgccgctggaacaggtacacagggcccaagattggactggcctgaggactccgaagattccttgtcgtctgggggaagcgacagcgatgagtccgtgtataaagtcttacttcttggggctcctggcgtggggaagtctgctttagccaggatatttggtggggttgaggatggcccagaagccgaagctgccggtcacacctacgaccgctccatagttgtggacggcgaagaagcctccttaatggtttacgatatctgggagcaggacggcggtaggtggctgcctggacactgtatggcaatgggggatgcctacgttatcgtctacagcgttactgataagggtagttttgaaaaagcttccgagttacgcgtccagctgaggcgtgcacgccagaccgatgacgtccccataatcctggtagggaataagagtgacctggtgcggtcccgtgaagtgtcagtggacgagggaagagcctgcgcagtcgtttttgactgcaagtttatagagacctctgcagcactccaccataatgtccaggctctgttcgagggcgtcgtcagacagattcgtctaagacgcgattcaaaagaggctaatgccagacgtcaggctgggactagaagaagggaatctctcggcaaaaaggcgaaaagattcctcggcaggatagtcgcccgtaattcccgcaagatggccttcagagctaaatctaagtcttgtcatgacctttctgtgctatag

SEQ ID NO: 238052 - DNA, 579 bp, synthetic construct
  misc_feature 1..579: note = Description of Artificial Sequence: Synthetic coding sequence
  source 1..579: mol_type = other DNA
atgcaagccattaagtgtgtcgttgtgggcgacggcgcagtcgggaaaacgtgtctgcttatttcttacaccactaacgcattcccaggggagtatattccgactgtatttgacaactatagcgctaatgtgatggtcgacggcaagcccgtgaatctggggctttgggacaccgctggacaagaggactacgatagactacggccactatcctatccacagacggatgtctttctgatctgcttcagtctcgtgagtccggcttcattcgagaatgttagggccaagtggtacccagaagttcgccaccactgtccacatacacctattttgctggttggcacaaaactggatctccgggacgacaaagacaccattgagcgcctgcgggataaaaaactggccccaataacataccctcaaggactagccatggccagggaaattggatccgttaagtacttggaatgtagtgccttgacgcagcgaggcctgaagaccgtgtttgatgaggccatcagggccgttctttgcccaccacccgtgaaaaagcctggaaaaaagtgcactgtcttctag

SEQ ID NO: 238053 - DNA, 942 bp, synthetic construct
  misc_feature 1..942: note = Description of Artificial Sequence: Synthetic coding sequence
  source 1..942: mol_type = other DNA
atgcctaacactgctatgaaaaagaaggtgcttctcatggggaagagcggctctggaaagacttccatgagatctatcattttcgccaactacatcgcaagggacacccgacggttaggcgctacaattgacgtcgaacatagtcatgtcaggttcctaggaaacctggtcttaaatctatgggactgtggcggtcaggacacctttatggagaactacttcaccagccagagggataatatctttcggaatgtggaggtgctaatttacgtctttgacgtcgaatcacgcgagctcgagaaggacatgcactactaccaatcctgtctagaagcgatattacagaactctccggatgctaagatattctgtctcgtgcacaagatggatttggtgcaggaggatcagcgcgaccttatcttcaaggagcgggaggaggatctgagaagacttagtcgcccactggagtgcgcctgctttcggacctcgatctgggatgaaacgctttacaaggcctggagcagcatcgtgtaccagttgattcccaatgttcagcagctcgagatgaacctgcgcaacttcgctcagatcatagaggccgacgaagtgttactttttgagcgcgctacattccttgttatcagccactatcaatgcaaggagcagcgtgacgtccaccggttcgagaagatctcgaatataattaagcaatttaagctctcttgtagtaaactggccgcatcatttcagtccatggaggtgcggaacagcaattttgccgcatttatcgatatttttacttcaaatacttatgtaatggttgttatgagcgacccctctatacccagcgctgctacactaattaacattcgtaatgcaaggaaacactttgagaagttggaacgagtggacggccctaagcatagccttttgatgcggtag

SEQ ID NO: 238054 - DNA, 1125 bp, synthetic construct
  misc_feature 1..1125: note = Description of Artificial Sequence: Synthetic coding sequence
  source 1..1125: mol_type = other DNA
atggaggaatcagacagcgagaagacgaccgagaaggagaatctgggccctcggatggaccctcctttaggggaaccagagggctcccttggctgggttttaccgaacaccgccatgaaaaaaaaggttttgctgatgggcaaatccggcagcgggaagactagcatgcgcagcataatcttcgctaactacatcgctcgggatacgcgacgtctgggagctacaatcctggaccgtatacactccttgcaaattaattcctcactgagcacttactcactggtggattccgtgggaaatactaagacattcgatgtcgagcattcccatgtgcggttcctcgggaatctcgtgctgaatctgtgggactgtggtggacaggacaccttcatggaaaactactttacctcccagagagataatatctttcggaacgtcgaggtgctgatctacgttttcgacgtcgaatcacgtgaactggaaaaagacatgcattattatcagtcgtgcctggaggcgatccttcagaacagtccagatgctaagatcttctgtctggtgcacaaaatggatctagtccaggaggatcagcgtgatctgatctttaaagagcgggaagaggacctgcgcagattatccagacccctggaatgttcttgtttccgcacttcaatttgggacgaaaccctctacaaagcctggagttctatagtgtatcagctgatacctaatgtacagcagctggagatgaaccttcggaatttcgccgaaattatcgaggctgatgaggtgctcctattcgaacgggcaacctttctggtcatttcacattaccaatgcaaagagcagagggacgctcacagatttgagaagatcagcaatattattaagcagttcaagctttcatgcagtaagctggccgctagtttccagagcatggaggtcaggaacagcaacttcgccgcattcattgacatatttacttccaacacatacgtgatggtggtgatgagtgacccctctattccctcggcagccacgctgataaacattcggaacgcacgcaaacactttgagaagctcgaaagagtcgacggcccaaagcagtgcttgctaatgcgttag

SEQ ID NO: 238055 - DNA, 1041 bp, synthetic construct
  misc_feature 1..1041: note = Description of Artificial Sequence: Synthetic coding sequence
  source 1..1041: mol_type = other DNA
atggaagaatccgattctgagaagactactgagaaggagaacttgggccctcggatggatcccccactcggagaacctgaagggtctctggggtgggtactccccaatactgctatgaagaagaaggtcttactgatggggaaaagcgggagcgggaagactagtatgagaagtattatattcgctaactatatcgcccgagacaccagaagactgggagctacaatcgatgtcgagcactcccacgtccgatttcttggcaatttggtgctgaacctctgggactgcggagggcaggacacattcatggaaaattatttcacctcacagcgcgataacatcttcagaaacgtggaggttctgatctatgtgtttgacgtggaatcacgggagctcgagaaggacatgcattactatcaatcttgcttggaagccattttacagaattctcctgatgccaagattttttgtcttgtccacaaaatggacctggttcaggaagaccagcgggacctgatcttcaaagagcgcgaggaagacctgcgcagactgtcccggccactggagtgttcttgttttcgtacttccatttgggacgaaacactctacaaggcctggagttcgattgtttaccagctgatccctaacgtccagcagctcgaaatgaatttgcgcaactttgcagagatcattgaggccgacgaggtgcttctgtttgagagggccactttcttggtcatttcccattatcagtgcaaggagcaaagagacgctcatcgatttgagaagatcagtaatatcatcaagcagttcaagctctcttgctcaaagctagcggcaagcttccagtcaatggaggtccggaattcaaactttgcagcgtttatagatatctttacgagcaacacatatgttatggttgttatgtcagacccttcaatccccagcgctgcaaccctaatcaatatcagaaacgccagaaagcatttcgagaaacttgaacgggttgatggacctaagcagtgcctcctaatgagatag

SEQ ID NO: 238056 - DNA, 585 bp, synthetic construct
  misc_feature 1..585: note = Description of Artificial Sequence: Synthetic coding sequence
  source 1..585: mol_type = other DNA
atgaagaaaaaggttctgctgatggggaagtctggttctggcaagaccagcatgagaagcattatcttcgctaactacatagccagagatacaaggcgtctgggtgctaccattgacgtggaacacagccatgtccggttcctcggaaacctggtcctcaacctgtgggattgcgggggacaggatacttttatggaaaactatttcacgagtcagcgagataacatctttaggaacgttgaggtcttgatctacgtgtttgatgtggaaagcagggaactggaaaaggacatgcactactatcagtcttgcttggaagctattcttcagaatagccccgacgccaaaattttctgcctggtgcacaagatggacttagtgcaggaggaccaacgagacttgatcttcaaagagcgagaggaagacctgagaaggctctccagaccgttggaatgctcatgcttcagaacatctatctgggacgaaacgctgtacaaggcgtggagcagcattgtctaccaattaattccaaacgttcaacagctggagatgaacttgcgaaacttcgcagagatcattgagtag

SEQ ID NO: 238057 - DNA, 1200 bp, synthetic construct
  misc_feature 1..1200: note = Description of Artificial Sequence: Synthetic coding sequence
  source 1..1200: mol_type = other DNA
atgtccctccagtatggggcagaggagacacccctcgccggatcctacggagctgcagacagtttccctaaagactttggctacggcgtcgaagaagaagaggaagaggccgctgccgctggaggcggagttggcgcaggtgccggaggcggttgcggcccaggcggagccgactcctccaaacccaggatcctccttatggggctgcgcaggagcggaaagtcctcaatacaaaaagttgtgttccataagatgtcccctaacgaaaccctctttctggagtccacaaacaaaatttacaaggatgacatttccaactcctcctttgtcaacttccagatctgggactttccagggcagatggacttctttgacccaacttttgattacgagatgatctttcgcggaacaggcgcactaatctacgttattgatgcgcaggatgattacatggaagctttgactagactgcatatcacggtgtccaaagcctataaggtcaatccggatatgaactttgaggtgttcattcataaagtggacggtctgtccgatgaccataaaatcgagacgcagagagatatccatcaacgcgctaacgacgacctggcagatgccggtctggagaagttgcacctgagtttttatcttacaagcatctatgaccacagcattttcgaggcattctccaaggtagtgcagaagctgattccacagctcccaactttagagaacctgctgaacatttttattagcaattccggaatcgagaaagccttcctctttgatgtggttagcaagatctacatcgccaccgactctagccccgtggacatgcagtcttacgaactgtgctgcgatatgatcgatgtcgtgatcgacgtctcctgcatctacggccttaaagaggacgggagcgggtctgcctacgataaagaaagtatggcaattatcaagctcaataatacgacagttctttaccttaaggaagtcaccaagttccttgcattagtgtgtatcctgagagaagaaagcttcgaacggaagggtttgattgattataactttcattgtttccggaaggccattcacgaggtgttcgaggtgggcgttaccagtcaccgctcttgtggtcaccagacttcagcctccagcttgaaagctctcacgcataacggtactcccaggaacgcgatttag

SEQ ID NO: 238058 - DNA, 750 bp, synthetic construct
  misc_feature 1..750: note = Description of Artificial Sequence: Synthetic coding sequence
  source 1..750: mol_type = other DNA
atggaagccttggcccgactgcacctgaccgtaacaagggcttataaggtcaatacagacattaacttcgaggtgtttattcataaagtggacggactatccgacgaccataagattgagacacagcgagatatacatcaacgcgcaaacgacgacctcgcagatgccggactggaaaagatccacttgtcattttacttgacctccatctacgaccatagcatattcgaagctttctctaaggtggtgcagaagttgatccctcagctgcctaccttagagaacctacttaatatttttatcagtaatagtggcatcgagaaagcttttttgttcgatgtagtcagcaagatatatatcgcgacagactcaacacctgtggacatgcagacatacgagctgtgttgcgacatgattgatgtggtgattgatatatcttgcatctacgggctaaaggaggacggcgctgggacaccatatgacaaagagtccaccgcaatcattaaactgaacaatacgaccgtcttgtacctgaaagaagtgaccaaatttctcgcactggtctgtttcgtgagggaagagtccttcgagcgcaagggactgatcgactacaattttcactgctttcgtaaggctattcacgaggtctttgaggtgcggatgaaagtggtgaaaagtcggaaagtgcagaaccgactccaaaaaaaaaagagagctacgccaaatggaacgccccgtgtgctcctttag

SEQ ID NO: 238059 - DNA, 1203 bp, synthetic construct
  misc_feature 1..1203: note = Description of Artificial Sequence: Synthetic coding sequence
  source 1..1203: mol_type = other DNA
atgtcccaggtactgggcaaaccgcagccccaggatgaggacgatgccgaagaggaggaagaggaggatgagctggtggggctcgccgactacggcgatggccctgactcttccgacgctgaccctgactcagggaccgaggagggggtactggatttttccgaccccttttccaccgaagttaaaccgaggatcttgctgatgggcctcagacggtcagggaagtcctccatacagaaagtggtgttccacaagatgtccccgaatgagaccctgtttctagaatccactaataagatttgtcgggaagacgtgagtaattcctcatttgtaaattttcagatttgggactttccgggacaaattgacttcttcgatcctactttcgactacgaaatgatttttagggggactggggctcttatttttgtgatcgacagtcaggatgactacatggaagccctggcccgtctacatttgaccgttacccgggcatataaggtgaataccgacatcaacttcgaagtattcatccacaaagtggacggcctttctgatgatcataaaatcgaaactcagcgtgacatccaccagagagctaatgatgacttagccgatgctggcctggaaaaaatccacctgagcttttatctgactagcatttacgatcacagcatttttgaggccttttctaaggtggtccagaagctcatacctcagttacccaccctagagaacctcctcaatatctttatctccaactctggcatcgaaaaggcatttctgtttgacgtggtgtcaaaaatatatatcgccaccgattcgacccctgtggatatgcaaacttatgagttgtgttgtgatatgatagatgtggtcattgacatcagctgtatatacggactgaaggaggatggagccggtactccttacgacaaggaaagcactgccatcataaagctcaataacactacagttctttacctcaaggaggtgaccaagtttctggccctggtgtgcttcgtgagagaagagtccttcgaacggaagggtttgatcgactacaacttccactgtttccgaaaagccattcacgaagtcttcgaagtgcgcatgaaggtcgttaagtcacgaaaggtgcagaatagactgcagaaaaagaagagagctaccccaaatggaacacctcgtgtgctcctgtag

SEQ ID NO: 238060 - DNA, 348 bp, synthetic construct
  misc_feature 1..348: note = Description of Artificial Sequence: Synthetic coding sequence
  source 1..348: mol_type = other DNA
atgttgagggacaccatgaagagttggaacgacagccagtccgacctatgtagtactgaccaagaagaggaggaagagatgattttcggcgagaatgaggatgatctggatgagatgatggatctgagtgatctgccaacaagtctgtttgcctgcagcgtccacgaggcagtgtttgaggcaagagagcagaaggaacggaacatgaactttaccagagagcagtcgaggcaccctgcctggtggtttatgtcagtgaaagtgaagctgaagcggaagaagcgccaaaaaaccccaaataggaagctgcctcgtaggggcgctcccaccctgcgccctcagaggtag

SEQ ID NO: 238061 - DNA, 726 bp, synthetic construct
  misc_feature 1..726: note = Description of Artificial Sequence: Synthetic coding sequence
  source 1..726: mol_type = other DNA
atgctgcgggacaccatgaagtcctggaatgattcgcagtccgatctctgcagcacagaccaggaggaagaggaggagatgatttttggggaaaacgaagacgacctagacgagatgatggacctgtccgatctgccaaccagcctttttgcttgcagtgtgcacgaggcggtgttcgaggcaagggaacagaaggaaagatttgaggccctcttcaccatttatgatgatcaggtgacctttcaattgttcaagagcttccgacgggtccggataaatttctcaaaacctgaagccgcagcacgggcaagaatagaattgcacgagacagatttcaacggccagaaactcaaactgtattttgcccaggttcagatgtctggggaggtgagggacaaaagctatcttctacccccacagccagtgaagcaattcctaattagccccccagctagcccgcctgtggggtggaagcagtccgaagacgccatgccggtgattaactacgatctcctatgtgccgtgtcaaagctcggtccaggtgagaaatacgagttgcatgcgggaaccgagtcaacaccctccgttgtggtgcacgtatgcgaaagcgagacagaggaagaggaggaaactaaaaaccccaaacaaaagatcgctcagaccaggcggccagatcccccaactgcagccttgaacgaaccacagacctttgattgcgccctttag

SEQ ID NO: 238062 - DNA, 522 bp, synthetic construct
  misc_feature 1..522: note = Description of Artificial Sequence: Synthetic coding sequence
  source 1..522: mol_type = other DNA
atgctgagggacaccatgaagagctggaatgacagccagagtgatctttgtagcactgaccaggaggaagaggaggagatgatctttggcgagaacgaggacgatctggacgagatgatggacttgagtgacctgcccaccagcctttttgcatgctcggtgcatgaggccgtctttgaagcccgagagcaaaaggagcgttttgaggccctgtttaccatttatgacgaccaggtgacattccaattgtttaagtcgttcaggcgagtgcggattaatttctccaaacccgaggcagctgccagagccaggattgaactgcacgaaacagacttcaatgggcagaagcttaagctctactttgcgcaagaacgaaacatgaattttaccagagaacaaagcaggcacccagcatggtggttcatgtctgtgaaagtgaagctgaaaaggaaaaaacggcaaaaaactcccaaccgcaagctgccacggcgaggggcaccgaccctaaggccccaaagatag

SEQ ID NO: 238063 - DNA, 198 bp, synthetic construct
  misc_feature 1..198: note = Description of Artificial Sequence: Synthetic coding sequence
  source 1..198: mol_type = other DNA
atgctgcgcgatactatgaaaagctggaacgatagccagagtgacctgtgctccaccgaccaagaagaggaagaggagatgatttttggtgaaaatgaggacgatcttgatgaaatgatggacctgtctgatttaccaaccagcctcttcgcatgcagtgtgcatgaggctgtattcgaggcgcgagagcagaagtag

SEQ ID NO: 238064 - DNA, 696 bp, synthetic construct
  misc_feature 1..696: note = Description of Artificial Sequence: Synthetic coding sequence
  source 1..696: mol_type = other DNA
atgctgagggataccatgaaaagctggaacgattcccaaagcgatctctgcagcaccgaccaggaggaggaagaggagatgatctttggtgaaaacgaggacgatctggacgaaatgatggatctttcagacctgccaacctccctcttcgcctgttctgttcacgaagccgtctttgaggctcgggagcagaaagaacgcttcgaggcattatttactatatatgacgaccaggtaacattccagctattcaagtcctttagaagagtgcggatcaacttctcaaaaccagaggccgctgcgcgtgcaaggatcgaattgcacgagaccgattttaacggccaaaagctcaagttgtactttgcccagtcatacctgttaccgcctcaaccagtcaaacagttcctgatcagtccacctgctagcccgcctgtgggttggaagcagtctgaagatgctatgcctgtgatcaattacgacctactctgcgccgtctcaaagctgggacccggtgagaagtatgagctgcacgctggcacagagtccacccccagcgtcgtcgtgcacgtttgcgagagtgaaacagaggaagaagaggagacgaagaaccctaaacagaagatagcccagactagacgccctgatcctcccactgccgcactcaatgaaccccagaccttcgactgcgctctgtag

SEQ ID NO: 238065 - DNA, 552 bp, synthetic construct
  misc_feature 1..552: note = Description of Artificial Sequence: Synthetic coding sequence
  source 1..552: mol_type = other DNA
atgctgcgagataccatgaagtcctggaacgattcccaaagtgacctatgtagcacagaccaggaggaggaggaagaaatgatcttcggcgagaatgaggatgacctggatgaaatgatggacttgtctgatctgcctacatccttgtttgcatgctccgtacatgaggccgttttcgaggcacgtgagcagaaggtgcagatgagcggcgaggtgcgggataagagctacttgctgccgcctcaacctgttaaacagtttttgatatcgcctcctgcttctccaccagtggggtggaagcagtctgaggacgcaatgccagtaattaattacgaccttctctgcgcagtgtccaaactcggtccaggagaaaaatacgagctgcacgcaggtaccgaaagtactccatccgtggtcgtgcatgtgtgcgaaagtgaaacagaggaagaagaggagaccaagaacccgaaacaaaagatcgcccaaacaaggagaccagatcctcctaccgccgcactcaatgaaccccagaccttcgattgcgcgctatag

SEQ ID NO: 238066 - DNA, 900 bp, synthetic construct
  misc_feature 1..900: note = Description of Artificial Sequence: Synthetic coding sequence
  source 1..900: mol_type = other DNA
atgcactcgcttgccacagccgctccggtgcctactactctggcccaggtggaccgggaaaagatctaccagtggatcaacgagctctcctcccctgaaacacgcgaaaacgccctgctcgaattatccaagaagcgagaatctgtgcctgacttggcacccatgctgtggcacagcttcgggacgatcgccgcactactgcaggagattgtgaatatttacccttcaatcaatccacctaccctgaccgcacaccagagcaatagagtgtgtaatgctcttgcactgctgcagtgtgtggctagtcacccggagacccgtagcgctttcctggccgctcatatccctttgttcctgtaccctttcttgcacaccgtgtcaaagacccgaccattcgagtacctgcggcttacctctctcggcgtgattggagccctggttaagacagatgaacaggaggtcattaattttttactcacgaccgagatcatccctctttgcctaaggattatggagtcggggagtgagctgtcaaaaacggtggctacctttattttacagaaaatcctgctggatgatacgggactggcctacatatgtcagacatatgaacggttcagccatgtcgccatgatactcggcaaaatggtccttcaactgtctaaggaaccatctgcaagattactgaaacatgtggttaggtgttacttgagactgagcgacaacccacgagccagagaagcgctgcgccagtgtctccccgaccagctcaaggataccaccttcgcacaggtgctcaaagacgacactaccaccaagcgctggttggcgcagctggtgaaaaacttgcaagaagggcaagtaacggatcctcggggtattcctctccctcctcagtag

SEQ ID NO: 238067 - DNA, 996 bp, synthetic construct
  misc_feature 1..996: note = Description of Artificial Sequence: Synthetic coding sequence
  source 1..996: mol_type = other DNA
atgcattccctcgctacagccgctcccgtgccaacgactctggctcaggtggatcgcgagaaaatctatcagtggatcaatgagctttcgtccccagagacaagagagaatgcgctcctcgagctgtccaagaagagggagagtgtgccagacttagctccaatgttgtggcacagttttggcacaattgctgctctgcttcaggaaatcgttaacatctacccttcaattaacccaccaacgttgacagcccaccaatctaatcgggtgtgcaacgccctcgcgcttttgcaatgtgtggcatctcacccagaaacccgcagcgcctttctcgccgctcacatacccctctttctttacccattcctgcacaccgtgtctaaaactcgaccctttgagtatcttaggctcacatcgctgggggtgatcgtagagactggattccatcatgtgggacaggctgatctggagcttcccacctcttccgacctgccagcttctgcctcacagtcggcgggaatcaccggtgccttggtaaagactgacgagcaggaggtgattaatttcttgttaaccaccgagattattccgctgtgccttaggatcatggaaagcggcagcgagcttagcaaaactgtggccacttttattctgcagaagattctgttggacgatacgggcctggcatatatctgtcagacatatgaaagattctcacacgtagccatgatattaggcaagatggttctgcagctgtctaaggagccctccgccaggcttctaaagcacgtggttcggtgctatttacggctatctgataatcccagggcacgagaagcactcagacaatgtctccctgatcagctaaaggataccacgttcgcacaggttttaaaggacgatacaacaaccaagcggtggttggcgcagcttgtgaagaatctgcaggagggtcaggtcaccgaccctcgtgggattcccctaccgccacaatag

SEQ ID NO: 238068 - DNA, 900 bp, synthetic construct
  misc_feature 1..900: note = Description of Artificial Sequence: Synthetic coding sequence
  source 1..900: mol_type = other DNA
atgcactccctggccaccgcagctccagtacctacaacactggcccaagtggatcgagaaaaaatctatcagtggattaacgagctgagttcccccgagaccagagaaaacgctttgctcgagctctcgaaaaaacgcgagtccgtccccgatctcgctccaatgttgtggcactcatttggcaccattgcggcactgctccaagagattgtcaacatctacccctctattaacccgcctacactgactgctcatcagtctaaccgggtgtgcaacgcccttgccctgctccagtgcgtcgctagtcacccagaaacgcggtctgcgttccttgccgctcacatcccccttttcctgtacccttttttgcacaccgtgagcaaaacccggccttttgaatacctgaggctcaccagcttgggggtgatcggggctttggtgaaaactgatgagcaggaggtcatcaacttcctgctcaccaccgagataatccctctctgtctgcggattatggaatccgggtcggaactctctaaaactgtcgcgacctttatcttacagaaaattcttctggatgataccggccttgcttacatatgtcagacatacgaacgtttctctcatgtggccatgattctcggcaagatggtgctacagctgagcaaagagccgtctgccaggctactgaagcatgtcgttcgatgttatttgcggcttagcgataaccctagagcaagggaggccttgcgccagtgtcttcctgatcagttgaaagataccactttcgcccaggtgctcaaggacgatacaaccactaaacgatggcttgctcaactcgtgaaaaacctccaggaaggccaggtcacagatcctagggggataccattacccccacagtag

SEQ ID NO: 238069 - DNA, 777 bp, synthetic construct
  misc_feature 1..777: note = Description of Artificial Sequence: Synthetic coding sequence
  source 1..777: mol_type = other DNA
atgcactccttagctaccgcagccccagtgccgaccacgctggctcaggtcgacagagaaaagatataccagtggatcaatgaactttcctcacccgagaccagggaaaacgcactgcttgagctctcgaaaaagcgggagtccgtccccgatctcgccccaatgctgtggcatagttttggaacaatagcagcactccttcaggaaatagtgaacatctacccaagtatcaaccccccaacactaacagcacatcaatctaatcgagtgtgtaatgccttggcgttgctgcagtgtgtggcaagccatccagaaacacgctctgccttcctggctgcccacatcccactctttctttacccatttctgcacaccgtctccaagacaaggcccttcgagtatttacggctgacaagcctaggagtgataggtgccctggtgaaaacagacgaacaggaggttataaactttcttctgactacagagatcattcctttgtgtttgcgcataatggagtcaggaagtgaactctctaagacggtggctaccttcatcctgcagaaaatcctgctcgatgacactggactggcttatatttgccagacttacgagcgtttttcccatgtggccatgatccttgggaaaatggtactgcagttgagcaaggagcctagcgctagactgctgaaacatgtggtgagatgctatcttcgactgtccgataatcccagattcagcgatcttacgttctgttggtctagtttccagcggaaatag

SEQ ID NO: 238070 - DNA, 990 bp, synthetic construct
  misc_feature 1..990: note = Description of Artificial Sequence: Synthetic coding sequence
  source 1..990: mol_type = other DNA
atggctgctcttggtggggacggtctgaggttgctgtcagtgtcccgacccgaacgaccgccagaatcggccgctcttggagggctggggccaggcctctgttgctgggtctctgtcttctcatgcctctcactggcctgttcgtacgtcggcagtctttacgtttggaaatctgagctgccacgagaccacccagccgtaattaaacggaggtttacttcggtcctagtggtgtccagccttagtcccctttgcgtcttgttgtggcgcgagctcacgggcatccagcctggcacgagtctgcttactttgatgggattccgactggaaggcatcttcccagcagcgttgctacccttgctgctgaccatgattctgttcctggggcctttgatgcagctgagcatggactgtccgtgcgatctggcggacggcctgaaagtggtccttgctccccgaagctgggctcgttgcctgacggatatgcgatggcttaggaatcaagtcatcgcgcctctcactgaagagttggtcttcagagcctgcatgctcccaatgctcgccccatgtatgggtttgggaccggctgtcttcacatgtccactgtttttcggagtggcacacttccaccacataatcgagcagctcagattccgtcaatcttccgtgggcaacatttttctgagcgctgccttccaattttcgtacacggccgtatttggggcatacacagcgtttctctttatccgcacaggccaccttatcgggccagttctgtgccacagtttttgtaattacatgggcttccctgcagtttgtgcagctctggaacatccccagcggaggcccttgctggcagggtatgcactgggcgtgggactgtttctgctgctgctgcagccacttactgatccgaaactttacgggtccctgcctctgtgcgtgctcctggaacgagctggcgattccgaagccccactgtgtagctag

SEQ ID NO: 238071 - DNA, 927 bp, synthetic construct
  misc_feature 1..927: note = Description of Artificial Sequence: Synthetic coding sequence
  source 1..927: mol_type = other DNA
atggccgcacttggcggagacgggttgagactgctgtccgtgagtcgccctgaacgccctcctgagagcgccgcactcggcggtcttgggcctggcttgtgctgttgggtttctgtgtttagctgtctctcccttgcctgcagctacgtcggatccctttacgtctggaagtccgaactgccccgtgatcatcctgccgttattaaacgccgatttacaagcgtactcgtagtgagctctttgtcgccgctatgtgtcctcctttggagagagctgacagggatccagcccggtacttccctgctgacccttatggggtttcgccttgaagggatctttccagccgcattgctcccgctgttacttaccatgattctctttctgggacctcttatgcaactgtccatggattgtccgtgcgacctggcagacggattaaaagtggtgctggcgcctcgctcctgggccagatgcctaactgacatgagatggctcaggaaccaagtcattgccccattgacagaggagttggtgttcagagcgtgcatgttacccatgttggctccgtgtatgggactcggcccagcagtgtttacctgccccctgtttttcggagtcgctcactttcatcacatcattgagcagctccggtttcgtcagagttctgtcggcaatatctttctatcagcaggacacctgatcggtcccgtcctgtgccatagcttctgcaactacatgggctttccagccgtttgcgctgccctcgagcacccccagcggagacccttactggctggatacgccctcggcgttggcttatttctgcttctgcttcagcctcttaccgatccaaagctgtacgggtcactacccctgtgtgttctactggaacgggcaggagactccgaggcccctctctgtagttag

SEQ ID NO: 238072 - DNA, 1164 bp, synthetic construct
  misc_feature 1..1164: note = Description of Artificial Sequence: Synthetic coding sequence
  source 1..1164: mol_type = other DNA
atggtacctaagggggcaactatgctggtgatcccccctggactctctgaggaggaagaggctctccagaaaaagttcaataagctgaaaaaaaagaagaaggctctgcttgctctcaaaaagcagtctagttccagcacgacatctcaaggtggtgtgaagaggtctctgtcggaacagcccgtgatggatactgccaccgctactgaacaggcaaagcagctggtcaagagcggagctatttccgcgatcaaagccgagacaaagaacagcggctttaaacgctctagaactttggagggaaaactgaaagaccccgagaagggaccagtgcccaccttccagcccttccagcgctccatttccgcagacgatgatcttcaggagagttctcgcagaccgcagagaaaaagcctatacgagtccttcgtatccagctctgatcgtctaagggagctggggccagatggtgaagaagcagaaggccctggggctggcgatggccctcctcgcagcttcgactggggctatgaggagcggtctggcgctcattcatctgcttcacctccacgcagtagatcccgcgatagatcccatgagcgaaatagagacagggatagggaccgggagcgggaccgggatcgcgacagggaccgcgatcgagagcgcgaccgcgatagggacagggatcgggaccgggaccgggagcgtgacagagaccgagaaagggacagagatcgggacagggaaggcccatttcgaagaagtgattctttcccagaaagacgggcaccaagaaaggggaacactctctacgtctacggggaggacatgactccaacgctgctccgaggggctttctcaccatttgggaacattattgatctaagtatggatccgccacgtaactgcgccttcgtcacgtacgaaaagatggagagtgctgatcaggctgtggctgagctgaatggcacgcaggttgagtccgtacagctgaaggtaaacatcgcccgtaaacagcccatgcttgatgctgccaccggaaagtctgtgtggggctctctagcagtgcagaacagtcccaagggttgtcaccgcgataaacggacccaaatcgtctattccgatgatgtatataaggagaatctggttgatggcttttag

SEQ ID NO: 238073 - DNA, 1143 bp, synthetic construct
  misc_feature 1..1143: note = Description of Artificial Sequence: Synthetic coding sequence
  source 1..1143: mol_type = other DNA
atgttggtaatccccccaggtctctccgaagaagaagaagcgctacaaaagaagttcaataaacttaaaaagaagaagaaggctctcctcgcgctgaagaaacaaagcagcagctccactacgagccagggcggagtgaaaaggagcctttctgaacagcctgtgatggataccgcaacagccaccgagcaggctaagcagctcgtcaaatctggtgcaatttccgctatcaaagcggagacgaaaaattctgggtttaagaggtcgagaactctggagggaaagctaaaagacccggaaaagggcccagtgcctacctttcagccgttccagcggtctatcagcgctgatgatgacttacaggaatcgtcacggcgaccccagagaaagtcactttatgagtcctttgtgagcagctcagataggctccgggagctgggacccgatggtgaggaagccgaggggcctggagccggagacggccctcccagaagtttcgactgggggtacgaggaaagatccggggcacatagctccgcatctccccctagatctcgcagtcgagaccggtctcacgaacgcaacagggaccgcgatcgggacagggagagggacagagacagggatagggaccgagaccgagagcgcgatagggatcgagatcgggacagggatagagatcgcgaacgggatcgcgaccgagagagggatagggacagggatagggaagggccttttcgcaggtccgatagttttcccgaaagaagagcccctaggaagggcaacactctttacgtgtacggcgaggatatgacccctactcttctgcggggagctttcagcccatttgggaatattatcgatctgtcaatggatccaccccgtaactgtgctttcgttacgtatgagaagatggagtccgcggatcaggcagtggctgagctcaacgggacccaggtggaatccgttcagctgaaagtaaatattgctcgcaagcagccaatgctcgatgccgctaccggcaaatcagtgtggggttcccttgcggtgcagaattctcccaaaggatgccacagagacaagcgcactcagatcgtgtactctgacgatgtgtataaagaaaacctcgtggatgggttttag

SEQ ID NO: 238074 - DNA, 1143 bp, synthetic construct
  misc_feature 1..1143: note = Description of Artificial Sequence: Synthetic coding sequence
  source 1..1143: mol_type = other DNA
atgctggtcatccccccaggcttaagtgaagaggaggaggccctgcagaagaaattcaataaactaaagaagaaaaaaaaagccctattggcactgaagaagcagagcagttcctccactacgtcacagggtggcgtcaagcgatccctcagcgagcagcccgtcatggacaccgcaaccgccacagagcaagccaaacagctggtgaagagtggtgctatatcagctataaaggcggaaacaaaaaattcaggctttaaaaggtcgagaacactcgagggcaaactgaaggaccccgagaaagggcctgtccctacctttcagcctttccagaggagtatctctgccgatgatgatttacaggagagctcccgtcggccacagcgaaagagcctgtatgaaagctttgtgagcagcagcgaccggctgagagagctgggccctgatggcgaggaagccgaaggccctggtgcgggagatggaccccctagatcattcgactggggttatgaggaacggagcggcgctcactcaagtgcctctccgccacggagcagatctcgcgaccgcagccacgagaggaacagagaccgggatagagacagagagagggatcgcgacagggaccgggaccgcgatcgggaaagggaccgggatcgcgatagggaccgcgatcgggatagggaacgcgatagagaccgcgaacgcgatagagacagagaccgtgaaggccctttcaggcggtcggactcttttcccgagagaagagcccctagaaaagggaacactctttacgtgtatggtgaggacatgacaccaactctgttacggggagcattctcccctttcggtaacatcatcgacttgtctatggaccccccaaggaactgtgcgtttgtcacctatgagaaaatggagtccgcagaccaagcagtcgctgagctcaatggcacgcaagtagagtccgtgcagttgaaggtgaacattgcacgcaagcagcctatgctggatgcagccacagggaagtcagtgtggggaagtttagctgtgcagaattcccctaagggctgccaccgggacaaaaggacccagattgtgtatagcgacgacgtgtacaaagagaacctggttgacgggttttag

SEQ ID NO: 238075 - DNA, 1143 bp, synthetic construct
  misc_feature 1..1143: note = Description of Artificial Sequence: Synthetic coding sequence
  source 1..1143: mol_type = other DNA
atgttggtgatcccaccagggctctctgaggaggaagaagccttacagaaaaagtttaataaactgaaaaagaagaagaaagccctcctggcgctgaagaaacagagttcttcttctacaactagccagggcggagtaaaaagaagcctaagcgagcagcctgtgatggacacagcaaccgcaaccgagcaagctaaacagctcgttaaaagtggagctatttcagcaattaaggctgagaccaaaaattcaggctttaaacgcagtaggacactcgaaggaaagctcaaggaccccgaaaaggggccagttccgactttccagccctttcaaaggagtattagtgctgatgatgatcttcaggagtcctccaggcgccctcagcgcaagtccctatatgaatcgtttgttagctcttccgacaggctccgagagttgggcccagacggtgaagaagccgagggtcccggagccggagacggtccacctaggtcttttgactgggggtacgaggaaaggtctggtgcccacagctcagcaagtcctccgaggagtaggagccgcgatagatcgcacgagagaaacagagacagggacagagaccgggagcgggatagggacagggatcgggatagagacagagaaagggatagagacagagatagggaccgagaccgcgacagagaacgggatcgtgacagggagcgggaccgagatcgggacagggaaggaccatttcggagatctgattcgtttccagaacgcagagcacctcgcaaggggaacacactttatgtttatggtgaagatatgacaccaacactgttgagaggtgccttctcaccgttcggcaatatcatcgatttaagcatggacccaccacggaactgcgcgttcgtgacgtacgaaaaaatggaaagtgccgatcaggctgttgccgagctgaacggaacacaggtggagtcagtgcaacttaaagtaaacatcgctagaaaacagcccatgctagatgctgccaccgggaagtccgtgtgggggtcactggccgtgcagaatagcccgaaggggtgtcatcgtgacaaaagaacgcagattgtatactctgacgacgtctacaaggagaacctggtggacggcttctag

SEQ ID NO: 238076 - DNA, 885 bp, synthetic construct
  misc_feature 1..885: note = Description of Artificial Sequence: Synthetic coding sequence
  source 1..885: mol_type = other DNA
atgttagttataccacccggacttagtgaggaagaggaggccctccagaagaagtttaacaagttgaagaaaaagaagaaggcacttctcgccctcaagaagcaatcaagctctagcactacgtcccagggtggagtgaagcggtccttaagtgagcagcccgtgatggacactgcaactgccactgagcaggccaagcagttggtcaaatcaggcgcaatctcggcaattaaggcagaaacaaagaattcggggtttaagcgatctagaacactcgagggaaaactgaaggaccctgaaaagggaccagttccaacttttcagccctttcagaggagcatttctgccgacgacgatctgcaggagtcatctcggcgtccacagcgcaaatctctttacgaatcgttcgtatcaagctcagatcgcctacgagagctgggacctgacggagaggaggctgaaggacctggcgcaggtgatggcccacctcggtccttcgactggggatacgaagagaggtccggcgctcatagttccgcttctccgccacggtctaggtcacgagacagaagccacgagcgaaacagagaccgggaccgagatagagagagggatcgagatcgtgacagggatagggaccgggaaagagatagggacagggaccgagatcgcgaccgtgaccgcgaacgggatcgagaccgcgagcgggacagggatcgagatagggagggtcctttccgcagatccgattcattccctgaaaggagagccccacggaaaggtaacactctgtatgtgtacggcgaagatatgacgcctacactgcttagaggtgctttttccccattcggaaacattatagacctgagtatggatccaccatag

SEQ ID NO: 238077 - DNA, 480 bp, synthetic construct
  misc_feature 1..480: note = Description of Artificial Sequence: Synthetic coding sequence
  source 1..480: mol_type = other DNA
atgctcgtgatcccccctgggctgagtgaggaggaagaagcactccaaaagaaattcaataagttgaagaaaaaaaagaaagctctgttggccctgaaaaaacagtcttcttcatctaccacgagccaggggggtgttaaacgctccctcagtgaacaacctgtgatggacactgctactgccactgagcaagcaaagcagcttgtcaagagcggcgctatctctgccatcaaggccgagactaaaaatagcggattcaagcggtcaaggacattagagggcaaactgaaggaccccgaaaaaggccctgtccctacatttcaacctttccagcgcagcatctcggctgacgatgatctccaagaaagtagccgaagaccccaaaggaaatctctctatgaatcgtttgtatcgtcaagtgacagactgagggaactgggtcctgatggcgaggaggcagaaggcccaggggctggatag

SEQ ID NO: 238078 - DNA, 723 bp, synthetic construct
  misc_feature 1..723: note = Description of Artificial Sequence: Synthetic coding sequence
  source 1..723: mol_type = other DNA
atgttggtcatacccccaggattaagtgaggaggaagaagccctgcagaagaaattcaataagctcaaaaagaaaaagaaagctctccttgcactcaagaaacagtcaagcagttcaacgacatcacaaggaggggtaaaacgttccctgtccgagcagccagtgatggataccgcaacagctacagagcaggcaaagcaattagtgaaaagcggtgcgatttctgctatcaaagcggagaccaaaaactcaggattcaagaggtcccggaccctcgaaggcaaactcaaagatcccgagaaaggacctgttcctacgtttcagccattccagaggagcattagcgcagacgacgacctccaggaaagctctaggcggccacagaggaaatcactctacgagagcgatcgcctccgtgaactggggcctgatggcgaagaggccgaagggcctggggctggagacggtcccccacgtagcttcgactggggatacgaagagaggagtggagcgcactccagcgcatcccccccacggagcagatcccgggataggagccacgaaagaaacagagacagagatagagacagagagcgagaccgggacagggatcgtgaccgtgatcgtgagcgtgacagagaccgcgatagagaccgcgaccgggatagagaacgagacagggatcgggaaagggatcgggatagggatcgtgagggtccttag

SEQ ID NO: 238079 - DNA, 480 bp, synthetic construct
  misc_feature 1..480: note = Description of Artificial Sequence: Synthetic coding sequence
  source 1..480: mol_type = other DNA
atgttagtgatccctccagggctatctgaggaggaagaggcgcttcagaagaaatttaacaagctgaagaaaaagaaaaaagcactgcttgctctcaagaagcagtctagcagttctactacgtcccaggggggagtcaagcgtagcctgagcgaacagcccgttatggacactgctaccgcaactgaacaggccaagcagctcgtgaaatcaggcgctatctccgctatcaaggcggagacgaagaacagcggtttcaaacgatctaggacactggagggtaagcttaaggaccccgagaagggccctgtccctacattccagccatttcagagatcgatctcagctgacgatgatctgcaggaaagctctagacggcctcagaggaagtccctgtatgaatctttcgtgtcatcgtccgacaggctgcgagagctagggccagacggcgaggaggcagagggacctggagccggatag

SEQ ID NO: 238080 - DNA, 480 bp, synthetic construct
  misc_feature 1..480: note = Description of Artificial Sequence: Synthetic coding sequence
  source 1..480: mol_type = other DNA
atgttagttattcccccaggactcagtgaagaggaagaggccttacaaaagaaatttaacaagctcaaaaaaaagaagaaggctctccttgccttgaagaaacagtcaagtagttcaaccacatctcaggggggtgttaaaaggtccctgtcagagcagcctgtgatggacacagccactgccactgagcaggccaaacagcttgtgaagtctggtgctatatcagcgatcaaagctgagacaaagaacagcggatttaaaaggagtcgcacccttgaaggcaagcttaaagatcctgagaaaggcccagtgcccaccttccagccctttcaacgaagtatcagcgcggacgatgatctgcaggaatctagtcgcaggccacagcggaaatccttgtacgagtcatttgtgagttctagtgacagactgcgggagcttggccctgacggcgaagaggccgagggaccaggagccggatag

SEQ ID NO: 238081 - DNA, 1005 bp, synthetic construct
  misc_feature 1..1005: note = Description of Artificial Sequence: Synthetic coding sequence
  source 1..1005: mol_type = other DNA
atgctggtaatccctcctggcttgtccgaggaagaggaggccctccagaaaaagttcaataagctcaaaaagaagaagaaagctctgcttgcactcaagaaacagagcagttccagcactaccagccaaggcggagtcaagagatccctcagtgagcagcccgttatggatacggccacagcaactgagcaggccaaacagctggtaaaatctggtgctattagtgccatcaaggccgagactaagaacagcgggttcaagagaagccgcacactggaaggcaagcttaaggaccccgagaagggacccgtccctacttttcagcccttccagagatctatctccgcagatgatgacctgcaggaatccagtaggaggccccagcggaagtcgctgtatgaatctgaccgcttgagggagctcggacccgatggagaggaagccgagggacctggagcaggggatggacctccgagatccttcgattgggggtacgaggaacggtctggcgctcactcctccgcatcccctccaagatctagaagcagggacaggtcccacgagcgaaatcgagaccgtgaccgggatcgggaaagggatagagatagagatcgcgacagggaccgcgagcgcgatagggatcgcgatagagacagggatagggatagagaaagagaccgcgatagggaaagggacagggacagagaccgggagggaccattccggagatcggattccttcccagagagacgcgctcccagaaagggcaatacactgtacgtatacggggaagatatgacgccaacactgctcagaggagccttctcaccgttcggcaatatcatcgatctctccatggatcctcccagaaactgcgccttcgttacctatgagaagatggaatcagcagaccaggccgtggccgagctcaatggcactcaggtcgagtccgtccagttgaaggtaaacatcgcaagaaagcagccgatgctagatgcagcttag

SEQ ID NO: 238082 - DNA, 723 bp, synthetic construct
  misc_feature 1..723: note = Description of Artificial Sequence: Synthetic coding sequence
  source 1..723: mol_type = other DNA
atgcttgttatcccccctggactgagcgaggaggaagaagctctccaaaagaagtttaacaagctcaagaaaaagaagaaagctctgttggccctcaagaaacagtcatcaagttcaacaactagccagggaggcgtcaaacggtccctaagcgagcagcctgtcatggataccgccaccgccacagagcaagccaagcaactggtgaagtcgggggcaatctcggccattaaggccgaaaccaaaaatagcggctttaagcgcagtaggaccctcgaggggaaactgaaggatcctgaaaaggggcctgtaccaacgtttcagccattccagagaagtatctccgccgatgacgaccttcaggagtctagtagacgtccccagcgtaagtcattgtacgagagcgaccgtctgcgtgaattagggccagatggcgaagaggccgagggcccaggcgcaggcgatgggcctccaaggtcctttgattggggatatgaagaacggtctggggctcactcatccgcgagcccaccacgcagtagaagtcgagaccggagtcatgagaggaatcgagaccgcgatcgggacagagagcgtgatcgtgacagagacagggatcgggatcgtgagagagatcgtgaccgcgaccgtgatagggatagggatagggagcgggaccgcgatagagagcgagatcgagatagagaccgggagggcccttag

SEQ ID NO: 238083 - DNA, 480 bp, synthetic construct
  misc_feature 1..480: note = Description of Artificial Sequence: Synthetic coding sequence
  source 1..480: mol_type = other DNA
atgttggtaatacccccaggactgagtgaagaagaggaagcactgcagaagaagttcaataagctgaaaaaaaaaaaaaaggccctccttgccttaaaaaagcagtcatcaagtagtacgacctcccagggaggcgtaaagcggagtttatcagagcagcctgttatggataccgccactgcaactgagcaagccaagcagttggtcaagagcggtgcaattagcgcgatcaaggcagagactaaaaacagcggattcaagagaagcagaacgctggaaggaaaactgaaggatccagaaaagggcccagtcccaacatttcaacctttccaaagaagcatttccgccgacgacgacctacaggagagttcacggaggccacaacggaaatccctgtatgaatcctttgtgtcttcaagcgatcgcctacgggagctgggcccagatggcgaagaagccgagggacccggtgctggatag

SEQ ID NO: 238084 - DNA, 1005 bp, synthetic construct
  misc_feature 1..1005: note = Description of Artificial Sequence: Synthetic coding sequence
  source 1..1005: mol_type = other DNA
atgctcgtgatccctcctggtctctcggaggaggaagaagcactgcaaaagaaatttaacaagctgaagaaaaagaagaaagcacttctggccctcaagaagcagtctagcagctcaaccacgtctcaggggggtgtgaagagaagccttagtgagcagcccgttatggatacagctacagctactgagcaggccaagcagctcgtaaagtcaggagccatatctgcaatcaaggccgagactaagaatagtggatttaagcgttcccggaccttagaggggaagctgaaggatcctgaaaagggccctgttccgaccttccaaccatttcaaagatccatcagcgccgacgacgatctccaggagtcttccagacggccacagagaaaatcactgtacgagtcagataggttacgagagctgggccctgacggggaagaggcagaggggcctggtgcgggtgacggaccccctaggagcttcgattggggttacgaagagaggagcggagcacacagctctgcgtcgcccccaagaagtagatcacgcgaccgatcccacgagaggaaccgcgaccgagacagagatcgggaacgcgacagggaccgcgaccgggatcgggacagagagagagaccgcgaccgagatcgagaccgcgatcgggacagagagagggatcgcgacagagaacgcgaccgtgatagagatagagaagggcctttccggagatccgactccttccctgagcggagagcccctagaaagggtaacactttatatgtttacggcgaagacatgacccctactcttctcagaggcgcatttagcccatttgggaacattattgatttgtcgatggatcctccgagaaactgcgcctttgtaacttacgagaagatggagagcgctgatcaggctgtggctgagctaaatgggacccaggtcgaatccgtccaactgaaggtaaacatagctagaaagcagccgatgcttgacgctgcatag

SEQ ID NO: 238085 - DNA, 480 bp, synthetic construct
  misc_feature 1..480: note = Description of Artificial Sequence: Synthetic coding sequence
  source 1..480: mol_type = other DNA
atgctggtgatcccacctggtctgtccgaagaagaagaagccctgcagaagaaattcaacaagctcaaaaaaaaaaagaaggctctgctggcccttaaaaaacagtcaagctcatcaacaacctcacagggtggagtgaaacgaagcctttctgagcagcccgtcatggacaccgccacggccacggaacaagccaagcaacttgtaaagtccggggcaataagcgcaatcaaggcggagaccaagaatagtgggttcaagcggtctcgcacactcgaggggaaacttaaggacccggaaaagggcccagtgcccaccttccagccctttcagcgctctatttccgcagacgacgatcttcaggagagttctcggcgaccgcagcgcaaatcgctatatgagtcatttgtgagcagttctgaccggttgcgggagctgggtcctgacggagaggaagcagagggaccgggtgcagggtag

SEQ ID NO: 238086 - DNA, 1143 bp, synthetic construct
  misc_feature 1..1143: note = Description of Artificial Sequence: Synthetic coding sequence
  source 1..1143: mol_type = other DNA
atgctcgtaatcccgccaggcctatcagaggaggaagaggccctgcaaaagaaatttaacaagctcaagaagaaaaagaaagcactactagccctgaagaaacagtcgtcatcctcaacaacctcccagggaggggtaaagcgaagcttgagtgagcagccagtcatggataccgctacagcgactgagcaggcaaagcaactggtgaaatctggtgctatctctgcgatcaaggccgagacaaagaacagcggcttcaagcgatctagaacactcgagggaaaattgaaggatccagagaaagggcctgtcccgactttccagccattccaaaggagcatctcggccgatgacgacttgcaggaatcgagtagacggcctcaacgcaaaagcctgtatgagtcttttgtatcaagctccgatcgcctgcgcgagttaggaccagacggcgaagaagcagagggtccaggcgcaggcgatggccctcccagatcttttgattggggttacgaggaaaggtctggcgctcattcctctgccagccctccaagatctcgaagcagagaccgatcccatgaacggaaccgcgacagggacagggaccgagaacgcgacagggacagggatcgtgatagggacagggaacgcgatcgcgatagagatagggatcgggaccgtgatcgcgagcgcgatagagatcgggagcgcgatcgcgatagagaccgtgagggcccatttcgccgttcagactcatttcccgaacgcagagcccctcggaaggggaacaccctctacgtttacggggaggatatgacacctaccttgctccggggagccttctcgccatttgggaacatcatcgatctaagcatggaccctccgaggaattgtgcctttgtcacatatgaaaaaatggaatccgctgatcaggccgttgctgaactgaatggcacccaagttgaaagtgtgcaactgaaggtcaatattgcacgcaagcagcccatgttggacgctgctaccgggaaaagtgtctgggggtcactggccgtacagaattcacccaagggctgccatcgggacaagagaacccagattgtttatagcgatgatgtctacaaggaaaaccttgtggatggcttctag

SEQ ID NO: 238087 - DNA, 885 bp, synthetic construct
  misc_feature 1..885: note = Description of Artificial Sequence: Synthetic coding sequence
  source 1..885: mol_type = other DNA
atgcttgttatcccgccaggtctaagcgaagaggaggaagcccttcagaaaaagtttaacaaacttaaaaagaaaaaaaaggctctgctggcactcaaaaagcagtcttcctcctcaacaacatctcaaggcggagtgaaaaggtcgctgtctgaacagccagtgatggataccgccacagccactgagcaggcaaaacagttggttaaatctggggcaatctcggctattaaggcagaaactaagaactcaggatttaaacgttccagaaccctggaaggcaaactcaaggacccggagaaagggcctgtccctacattccagccattccaacgctctattagcgcagacgacgatctgcaagaaagctcaaggcgccctcaaagaaagtccctgtacgaatctttcgtctcatctagtgatcgactgcgtgaactgggacctgacggcgaagaggctgagggtcccggtgctggggacggcccacctaggagcttcgactggggatatgaggaaagaagtggagctcatagtagcgcttcaccccctagatctagaagtagagatcggagtcacgagcggaacagagatcgggatcgcgaccgagaaagagatcgcgatcgggaccgggatagggatcgggaacgggacagggatcgtgacagagaccgggaccgagaccgggaaagggacagagatcgcgagagggatcgggacagggatcgcgagggccctttccggagaagcgacagttttcctgagcggcgtgcccctagaaaaggtaataccctctacgtgtatggagaggacatgactcccactctgctccggggagctttcagtcctttcggaaatataatcgatttatctatggatcctccctag

SEQ ID NO: 238088 - DNA, 723 bp, synthetic construct
  misc_feature 1..723: note = Description of Artificial Sequence: Synthetic coding sequence
  source 1..723: mol_type = other DNA
atgttagtcattccacctgggctctccgaggaagaggaggctctccagaagaagttcaataagttaaagaagaaaaagaaggccctgttagcattaaagaaacagagtagctcttcaacaacctcccaagggggtgttaaaaggagcctcagtgagcaacccgttatggacaccgcaaccgccacagaacaagctaagcagctggtcaaatccggggctatctcggctattaaggcagagacaaagaactctgggttcaagaggtcacggaccctcgaaggaaagctcaaagatcctgagaagggtcctgtccctactttccagccgttccagcggagcatttccgccgatgatgatttgcaggaaagctctagaaggccgcagcggaagagtttatatgaaagtgatcgtctgcgggaactggggcctgacggcgaagaagccgaggggccaggcgctggagatggaccgcctcggtcattcgattggggttacgaggaacgatccggcgctcattcatccgctagccccccaaggtctcgatctcgcgatagaagccacgaacggaatcgtgacagagaccgcgacagggagcgcgatcgggacagagatagggatcgggacagagagcgcgaccgggatagggatagagaccgtgacagggatcgggagcgagatcgtgacagggagagagatagggaccgagacagggagggcccttag

SEQ ID NO: 238089 - DNA, 885 bp, synthetic construct
  misc_feature 1..885: note = Description of Artificial Sequence: Synthetic coding sequence
  source 1..885: mol_type = other DNA
atgctggtcatcccgcctgggttgtctgaagaagaggaggcccttcagaagaaatttaacaaactgaaaaagaaaaaaaaggctttgctcgccttaaagaagcagtcgagttcaagcacaacatctcagggtggagtcaaaaggagcctctccgagcagcctgtgatggacactgcgactgccactgagcaggcaaagcaactggtgaagtcaggggctatcagcgccatcaaggctgagaccaaaaatagcggattcaaacgctcccgaacccttgaaggcaagctgaaggatcctgagaagggtcccgttccaacattccagccgttccagcggtcaatcagtgcagatgacgatttacaggagtctagccgaagaccacagaggaagtccctatatgaatccttcgtaagcagctctgatagactgcgcgaactgggccctgatggtgaggaggcggagggacccggtgcaggagacggacctcctcgcagcttcgattggggctatgaagagaggagcggggctcacagttcagcctcgcctccgcgatccaggtcacgtgatcggagccacgagaggaatcgggatcgcgacagggatagggaacgcgatcgcgatcgggatcgggatagagacagagagcgggaccgcgatcgagaccgcgaccgagatcgcgatcgagaacgcgaccgcgacagggaaagagaccgtgatcgagatcgcgaaggaccattcagacgcagcgatagtttcccagagcggagggctccaagaaaaggtaacactctgtacgtctatggagaagatatgacaccgaccctgctgagaggggcatttagtccttttggcaatatcattgatctaagcatggacccgccatag

SEQ ID NO: 238090 - DNA, 1005 bp, synthetic construct
  misc_feature 1..1005: note = Description of Artificial Sequence: Synthetic coding sequence
  source 1..1005: mol_type = other DNA
atgctcgttatcccacctggcctgtcagaggaggaggaagcactccaaaaaaagtttaacaagctgaaaaagaaaaagaaggcgctactggctctgaaaaaacagagtagctcatctacaacaagtcagggcggagttaaacgatcattgagtgaacagccagttatggacactgcgaccgcaacggagcaggctaaacaactcgtaaaaagcggagctatttcagctatcaaagcagagacaaagaactctgggtttaagcggtcacggactctcgaaggcaaactgaaagatcctgaaaaagggccagtgcctactttccaaccttttcaacggagcatctcagccgacgatgacctccaggaaagctccaggagaccccagagaaagagcctctacgagtctgatagactgcgcgagctcggtcctgacggggaagaagccgaaggcccaggagccggagacgggccacccagatccttcgactggggctatgaagagagaagcggagctcattcatctgcttccccccctcgctcacgatctcgtgacagaagccatgaaaggaaccgcgatcgagatcgcgaccgcgagcgagacagagaccgagatcgagatagggatcgcgagcgggatcgcgaccgcgacagagatagagaccgcgacagggagcgcgatagagatagggagcgggaccgagacagggaccgtgaggggcctttccgcaggtccgactcttttccagagcgacgcgctccacgcaaagggaataccttatatgtgtatggagaggacatgacccctaccttgcttagaggagcctttagcccttttggaaatattatcgatctttcaatggatcccccacggaactgtgcctttgtgacttatgaaaagatggagtcggctgaccaggccgtagctgaactgaatggtacccaggtagagtctgttcaactgaaagtcaacatagccaggaagcaacctatgctcgacgccgcttag

SEQ ID NO: 238091 - DNA, 1005 bp, synthetic construct
  misc_feature 1..1005: note = Description of Artificial Sequence: Synthetic coding sequence
  source 1..1005: mol_type = other DNA
atgctcgtgattccacctggactgagcgaggaagaggaggccctgcaaaaaaagttcaacaagcttaagaagaaaaagaaagcccttctggcacttaaaaagcagtcaagtagtagtacaacgtctcagggtggcgtcaagcgttctctgagcgaacagcccgttatggacaccgcaactgccaccgagcaggctaagcagctggtgaaaagtggggctatctccgcaattaaagcggagactaagaatagtggtttcaagcgttccagaaccttggagggaaagctgaaggaccccgagaagggtccagtccccactttccagccctttcagagaagcatttcagcagatgatgacctccaggaatcgagtcgcagacctcagcgcaagtcgctgtatgagagcgataggctgcgggaattggggccagacggggaagaagcagaaggcccaggcgctggggatgggcctcctcgatctttcgattggggatatgaggagcgctcaggggcacatagtagcgctagcccaccgcgaagtagaagtcgcgacaggagccacgagcggaatagagatagagaccgggaccgggaacgagatagggatcgcgaccgggacagggacagagagcgcgatcgagaccgtgacagggatcgagatagggacagggaacgcgatcgagatcgggagagggatagagaccgtgacagagaggggcctttcagaaggtccgacagtttcccggagcgaagggcaccacggaaggggaatactctttatgtgtatggtgaagacatgacccccacgttgctgcgcggtgccttttcccctttcggcaatataattgatctctcaatggacccacctcggaattgcgcttttgttacgtacgaaaagatggaatctgctgatcaggcagtggctgagctgaatggcactcaggttgagtcagttcagctgaaggttaatatcgcccgaaagcagcccatgcttgacgcagcatag

SEQ ID NO: 238092 - DNA, 1005 bp, synthetic construct
  misc_feature 1..1005: note = Description of Artificial Sequence: Synthetic coding sequence
  source 1..1005: mol_type = other DNA
atgctggtcatccctcctggtctctccgaggaagaggaagcattgcagaaaaagtttaataaacttaaaaagaagaaaaaggctctgctggctctgaaaaagcagagcagcagcagcaccacgagtcagggaggcgtgaaacgcagtctgtccgagcagcccgttatggatacggcgacggctacagaacaggctaagcagttggtcaaatccggcgctatcagcgccataaaggctgaaactaagaacagcggctttaaacggtcacgtacactcgagggcaaactgaaggaccctgagaaagggccagttcccacattccaaccattccagcgtagcatttcggctgacgatgacctccaggagagttcacgaaggccccagcgaaagtcgctctatgaatccgatagactcagagagctgggacccgatggcgaggaagccgaggggccaggcgctggagatggcccacctaggagcttcgactggggatatgaagagagatctggtgcccactcctccgcaagccctccacgttcccgatcccgagacaggtcacacgagcggaaccgagacagggaccgggatagggaaagagatagagaccgagacagagacagagatagagagagagaccgcgacagagaccgggacagggaccgcgacagagagcgcgacagggatcgtgaaagggaccgcgaccgggacagggagggaccattcaggcgttctgactcctttcccgagaggagggcaccaagaaagggcaacaccctctacgtgtatggcgaggatatgacaccaactttgcttcggggtgcctttagtccttttggtaatatcattgatttatcgatggacccacctcgaaattgcgcctttgtcacttacgaaaaaatggagagcgccgaccaggcagtcgcagagctgaatggcactcaggtagaatctgttcagcttaaagtcaacatcgctcggaaacaacctatgttagatgccgcttag

SEQ ID NO: 238093 - DNA, 1053 bp, synthetic construct
  misc_feature 1..1053: note = Description of Artificial Sequence: Synthetic coding sequence
  source 1..1053: mol_type = other DNA
atgttagtgatccctccaggattgagcgaggaggaggaggcattacagaagaaatttaataagctgaagaaaaagaaaaaagctctgctcgctttgaaaaaacagagcagttcaagtaccacctcccagggaggtgtgaaacgctcactctctgagcagcctgtgatggatactgccaccgccaccgagcaggcaaagcagctcgtgaagtcaggagcaatcagcgctattaaggctgagaccaagaacagcggtttcaaaagatccaggaccctggagggaaaattaaaagacccggaaaaaggcccagttccaacattccagccctttcaaagatccatcagcgccgacgatgatttacaggaaagcagcaggcgtccccagcgcaagagcctttacgagtccttcgactggggctacgaggagagatctggggcacactcctctgcttctcctccacgcagtaggtctagggacaggtcacatgaacgaaaccgagatcgggaccgcgatagggagcgcgacagagatagagatagggatcgggatcgcgagcgcgacagagatcgagatcgcgacagagatagggatcgcgagcgggacagggatagagaaagagatagagacagggatagagaaggcccatttcgcaggagtgattcatttcccgagaggcgggctccgagaaaaggcaacacactgtatgtgtatggagaagatatgacacccactctccttcggggagccttttcaccctttgggaacatcattgacctgagtatggatccacccaggaactgtgcctttgtcacctatgaaaaaatggagtccgccgatcaggccgtagccgagctgaatggtacgcaggtggagtctgtccagctcaaagtcaatattgcgaggaaacagcctatgctagacgcagccacaggaaagagcgtgtggggtagcctggccgtgcagaacagccctaaagggtgtcatagagacaaacggacccagatagtgtacagcgatgacgtctataaagaaaatctcgttgacgggttctag

SEQ ID NO: 238094 - DNA, 1143 bp, synthetic construct
  misc_feature 1..1143: note = Description of Artificial Sequence: Synthetic coding sequence
  source 1..1143: mol_type = other DNA
atgctagttatcccacccggtttgagtgaggaggaagaggcccttcagaagaaattcaataagctgaagaaaaaaaaaaaggctctccttgccctgaagaaacaatccagcagcagcacgacatcccaggggggagtgaagcgctccctctctgaacagccggtgatggatactgccacagccactgagcaggctaagcaactagttaagtcgggggctatttctgccataaaagctgagacgaagaactcgggtttcaagcgcagtagaacattagagggaaaactgaaagaccctgagaagggtcccgttccaacctttcaacccttccagcgctccatcagcgctgatgatgatctgcaagagtcttcacggagacctcagcggaagtccctctatgaaagctttgtgtcatcctctgacaggctgcgtgaactggggccagacggcgaggaggcggaaggacctggggctggagacgggcctcctcgttcattcgactggggctatgaagaaaggagcggagctcacagctctgctagcccgcctcgatctaggagtcgggaccggtcgcatgaaagaaacagagatcgtgaccgggaccgtgagcgcgacagagacagggaccgagatagagatcgcgagcgggatcgggatcgcgaccgggaccgggacagagatcgagaaagagatcgagatagggaacgggatcgggaccgtgaccgggaggggccttttcggagaagtgactccttcccggagaggcgggctccaagaaaaggcaatacactgtacgtctatggggaggatatgacgcctactcttttgcgaggcgcttttagcccttttggaaacattatagacctgagcatggaccccccacgcaactgtgcatttgtgacgtatgagaagatggagagtgcagatcaggctgtcgcagaacttaatggcacccaagttgaatcggtgcagctgaaggtcaacatcgctcgtaagcagcccatgttagacgcagcaacaggtaaaagtgtctggggttcacttgcagtgcagaacagtcccaagggctgccatcgcgacaagaggactcagatcgtctactctgatgacgtttacaaggagaatctggttgatggcttttag

SEQ ID NO: 238095 - DNA, 723 bp, synthetic construct
  misc_feature 1..723: note = Description of Artificial Sequence: Synthetic coding sequence
  source 1..723: mol_type = other DNA
atgttggtgattcctcccggtctttctgaagaggaagaggcattacagaagaagttcaacaaacttaagaaaaagaagaaagccctgctcgcactcaaaaaacaatcgagcagcagcacaacgtcccaaggaggtgtcaaacggtctctctccgaacaaccagtaatggacactgcaacagcaactgagcaggctaagcagctggtaaaatctggcgcaattagtgctattaaggctgaaaccaaaaattcaggtttcaagagatccagaacactcgaaggcaagctcaaagatcctgagaagggtcctgttccaacgtttcagcctttccagcggagtatttccgccgatgacgacttacaggagtcaagtaggagaccacagcggaaatctctatatgagagcgatcgactcagagagctgggaccggacggggaggaggcggaaggcccaggggctggcgatgggcctcctagaagtttcgactgggggtacgaggagagatccggcgcacacagttctgcttctccgccacgatcacgaagcagggatcgctctcatgaacgcaatagggaccgggatcgggatagggagcgcgatcgagatagagacagggatagggatagagagagagaccgtgatcgggatagagacagagatcgagacagggagagggaccgagaccgtgaaagggaccgggaccgggaccgggagggtccctag

SEQ ID NO: 238096 - DNA, 1005 bp, synthetic construct
  misc_feature 1..1005: note = Description of Artificial Sequence: Synthetic coding sequence
  source 1..1005: mol_type = other DNA
atgctggtgattccacctgggctctcggaggaggaggaggccctgcaaaagaagtttaataagttaaaaaaaaaaaaaaaggcactgttagcccttaaaaaacagtcatcaagtagcactaccagccagggaggggtaaagaggtccttgtcggaacagcctgtaatggacaccgcgactgcaactgaacaggccaaacagttggttaaaagtggggctatctccgcaatcaaggctgagaccaaaaactctgggttcaagagaagccgtaccctggaaggtaagctgaaagaccctgagaaaggtccggttcctaccttccaaccttttcagcggagcatcagtgccgacgacgacttacaggagtcaagtcgccgaccacagagaaaatcactgtacgagagcgatcgcctgcgggagttaggcccagacggggaagaggcagagggacccggagccggtgacgggccacccagatcttttgactggggctacgaggagaggagcggggcacactcttccgcctctccaccaaggtcaaggagtagagaccggtcacacgaaaggaatagagatagggatcgagaccgggaacgggaccgcgatagggaccgagaccgagacagggagcgagacagggaccgggatcgggatagagaccgggacagggagcgtgatcgggatcgcgaacgcgaccgagacagagacagagagggccctttcagacgcagtgactccttcccagaaaggagggcgcctaggaaagggaatacgctgtacgtgtacggggaagacatgacgcccaccctgttacggggagctttctctccttttggaaatattattgatttgtcaatggacccacctcgtaattgtgccttcgtgacatacgaaaagatggagtcagcagaccaggctgtcgcggagctaaacggcacacaagtggagtccgtgcagctgaaggttaacatagccagaaagcagccgatgttggacgcagcctag

SEQ ID NO: 238097 - DNA, 885 bp, synthetic construct
  misc_feature 1..885: note = Description of Artificial Sequence: Synthetic coding sequence
  source 1..885: mol_type = other DNA
atgttggtcattccccctggtctctcggaggaggaagaagcattacagaaaaaatttaacaaactaaagaaaaagaagaaagctctcctcgcactaaaaaaacagagttcctcttctaccaccagccagggaggcgtgaagcgatctctgtctgagcaacccgtgatggacactgccacggcaactgagcaggcaaaacagttagttaagtcaggtgccatctcagcgatcaaggcagagaccaaaaattccggctttaaaaggtcacggaccttagaaggcaaattaaaggatcctgagaagggccctgtgcctaccttccagccattccaaagaagtatcagcgcggatgatgacctgcaagaaagctcccggcgtcctcagagaaaatccctgtatgagtccttcgtgtcttctagtgacaggttgagggagctcggtccagacggtgaggaggcggagggcccaggcgctggcgacggcccacctcggtccttcgattggggatacgaggaacgtagcggggcacactcatcagcgtccccaccacgtagccgaagcagagaccggagtcatgagagaaatcgcgaccgggaccgcgaccgcgagcgggaccgggaccgggaccgggatcgcgaccgtgaaagagatagagaccgagacagagatcgagatagagacagggagagagatcgggaccgggagagagaccgagaccgcgaccgtgaaggcccattccggcgatcagattcattcccggagcggagagcaccgaggaagggaaatacgctttatgtctatggcgaagatatgacccccaccctgctgaggggtgctttcagcccgttcggtaatattatcgatctttctatggatccgccttag

SEQ ID NO: 238098 - DNA, 885 bp, synthetic construct
  misc_feature 1..885: note = Description of Artificial Sequence: Synthetic coding sequence
  source 1..885: mol_type = other DNA
atgctggtcattccaccaggattatctgaggaggaggaagcgcttcaaaagaagtttaacaaactgaagaaaaagaagaaagccctactggctctgaagaagcagtctagttcttccaccacttctcaaggcggtgtgaagcggagcctctcagagcagcctgtgatggacacagctacagctactgagcaagccaaacagctagttaagtctggagctattagtgcaattaaagcagaaacaaagaacagtggatttaagagatcccggacgctagagggcaagctgaaggatcctgagaagggcccagtgcctactttccagcctttccagaggagcatcagcgccgatgacgatctccaggaatctagtagacgaccccagagaaagtcgctatacgaatccttcgttagctcaagcgatagattacgtgaacttggacctgatggagaagaagcagagggacctggtgccggtgatggcccacctcgctctttcgactgggggtacgaggaacgtagtggggcacacagtagtgcttcgcctcctcggtcacgctctcgggatcggtcccatgagcggaatagggaccgagacagagatcgagaacgagaccgcgatcgagacagagatcgcgaccgtgaaagagaccgagatagagaccgagatcgtgatagagacagggaacgcgacagggatcgtgagcgagatcgcgatagagatcgcgaaggccctttccgtcgaagcgacagcttcccggagcgaagggccccacggaagggaaacactctctacgtttacggcgaggatatgacccccactctgcttaggggggctttcagtccattcggcaatatcatcgatcttagtatggaccctccatag

SEQ ID NO: 238099 - DNA, 885 bp, synthetic construct
  misc_feature 1..885: note = Description of Artificial Sequence: Synthetic coding sequence
  source 1..885: mol_type = other DNA
atgttggtaattcctccagggctctccgaggaagaggaggccctacagaagaaattcaataagttgaaaaaaaagaaaaaggcgcttctcgccttgaaaaaacagagttcaagtagcactacatcgcaaggcggagtgaaacgttccctgtcagagcagccggtgatggacaccgcaaccgcaacagagcaggccaagcagttggtcaagtcaggtgctatctcagccattaaggccgagactaaaaactcaggttttaaacgatctcgcaccttggagggtaaactaaaagaccctgaaaagggtccggtccctacctttcagcctttccagagatcaatttctgcagatgacgacctccaagaaagctcaagaaggccccaacgaaagtccttgtatgagtccttcgtttcttcttccgaccgactcagggagctcgggccagacggggaagaggctgaaggccctggcgctggagacgggcctccgaggtcctttgactgggggtacgaggagagatcgggagctcacagctcagcgagtcccccacggagccggagccgggacagatcacacgagcgcaatcgagacagggaccgggatcgggagcgcgacagagaccgagatcgggatagggatagagagcgcgacagagacagagatcgggatcgcgatagggacagggagcgcgaccgggacagagagcgcgaccgggatcgcgatcgtgaaggcccatttaggcggtctgatagctttccagagcgcagagccccacgaaaaggtaatacactttatgtttacggggaggacatgacaccaacccttctgcgtggggctttctctcccttcgggaacatcatcgatctgtccatggatccaccttag

SEQ ID NO: 238100 - DNA, 723 bp, synthetic construct
  misc_feature 1..723: note = Description of Artificial Sequence: Synthetic coding sequence
  source 1..723: mol_type = other DNA
atgctggtgatccctccgggactcagtgaggaggaagaggccctgcagaagaaatttaacaagctgaagaaaaaaaagaaggcattactcgccctcaaaaagcagagcagcagcagtactacctcccagggaggggtcaagaggtcgctgtctgagcagccggtgatggacactgcaaccgcgacggagcaggctaaacagttggtcaaatctggggcaatcagcgctattaaggcggaaaccaagaatagtggattcaagcgatcccgtaccctagaaggcaaattgaaagacccagagaagggcccagtgccaacattccagcccttccaaagatctattagtgctgacgacgatttacaggagtcctcccgcaggccccagcggaaaagtctgtatgagtctgacaggctgcgcgagctgggtcccgatggtgaggaagcggaggggcctggagccggagacggtccaccaagaagtttcgactgggggtacgaagagaggtccggcgcacatagttctgcatcccctccacgttcaaggtccagggacagaagccacgaacgaaatcgagaccgtgaccgggatcgtgaacgggacagggaccgcgatcgggatagggaccgggaacgtgacagagaccgcgatcgggatcgcgatagagatcgggaaagagatcgggaccgcgagagggacagagatcgggatcgggaggggccatag

SEQ ID NO: 238101 - DNA, 1143 bp, synthetic construct
  misc_feature 1..1143: note = Description of Artificial Sequence: Synthetic coding sequence
  source 1..1143: mol_type = other DNA
atgctggtcatccccccaggcctgagtgaagaagaggaggcgcttcagaagaagttcaacaagctcaaaaaaaaaaaaaaggctctcctggcactgaagaaacagagcagctcgtcaacaacaagccaaggaggagtcaagcgctcactgagtgagcagccagtcatggacaccgccaccgctaccgaacaggctaagcagttggtgaagagcggggcaattagcgcaattaaagcggagactaaaaactccggctttaagcgtagcaggacactggagggtaaactcaaggaccccgagaagggtcctgtccccacattccagccattccagcggtctatcagcgccgatgatgacctgcaggaatcatcacgtaggccccagaggaagtctctctatgaaagctttgtaagttccagcgacaggttgcgcgaactgggtcctgacggcgaagaagctgaaggtcccggagccggagacggccctcccaggtctttcgactggggctacgaggagaggagcggcgctcattcgtccgcttcaccaccgaggtcccggagtcgggataggtcgcatgaaagaaaccgggacagggacagggacagggaacgggaccgggatcgggatagggaccgggatagagagagagatcgcgaccgcgatagagatcgagacagggaccgcgaacgggatcgggatcgcgaaagagatagagacagagaccgagaagggccattccgacgctccgatagtttccccgaacgaagagcccctcgcaaaggaaatacgctgtatgtgtacggggaggatatgacaccgactcttttgcgtggtgctttttctcccttcggaaacatcattgacctgtcaatggacccccctagaaactgcgcctttgttacgtatgagaaaatggagtccgccgaccaggccgtggccgaactgaacggcacacaggtggaatctgttcaattaaaagtcaatatcgcgcgaaaacagcccatgctggatgctgctacaggaaagtccgtatggggaagcttagcagtccaaaattcccctaaaggatgccatcgtgataaaagaacccagattgtctattccgatgatgtgtataaagaaaacctggtagatgggttctag

SEQ ID NO: 238102 - DNA, 480 bp, synthetic construct
  misc_feature 1..480: note = Description of Artificial Sequence: Synthetic coding sequence
  source 1..480: mol_type = other DNA
atgttagtcattccccctggactctctgaagaagaagaggcattacaaaaaaagtttaacaagcttaaaaaaaagaagaaggccctgctggccctgaagaaacagagtagttcttccaccaccagccagggcggtgtgaaaagaagtctgtcagagcagcctgtgatggatacagccacagctactgagcaggctaaacagctggtcaagtccggtgccatttcagccattaaggccgaaactaaaaatagtggatttaagcggagccggaccctggaaggaaaactcaaggatccagagaaaggaccggtgcccacctttcagccctttcaaagaagcatttccgccgacgatgacctgcaagaatctagtaggcgccctcagcggaaatcactttacgaaagctttgtgagcagttcagaccggctgagagagctgggcccagacggtgaagaagctgagggtcccggagccggatag

SEQ ID NO: 238103 - DNA, 1164 bp, synthetic construct
  misc_feature 1..1164: note = Description of Artificial Sequence: Synthetic coding sequence
  source 1..1164: mol_type = other DNA
atggtaccaaaaggcgctacaatgctggtgatcccacccggactgtccgaggaagaagaggccctgcagaagaaatttaataaattaaaaaaaaagaagaaggcgctcctggcgttgaagaaacagagttcaagttcgaccacctctcagggcggagtgaagagatcactgtcagagcagcccgtgatggatacggctactgccactgagcaggcgaagcagctggtcaagagtggggcaatctccgcgatcaaggccgaaaccaagaatagtgggttcaagagatctaggacgctggaggggaagctgaaggatcctgaaaagggcccagtgcccacatttcagcctttccagcgttcaatctccgcagacgacgatttgcaggaatccagccgcaggccgcagaggaagtcactgtatgagagctttgtgtccagttcagataggctgagagagttggggccagacggagaagaggccgagggacccggtgcaggtgacggacccccaaggagtttcgattggggctacgaagagcgatctggcgcacacagctccgcgtcgccccctcgaagtcggtctcgcgatcgctcccacgaaagaaaccgtgatagagacagagatagagagcgcgatagagatagagatagagacagggaccgtgaaagggacagggaccgggatagagatcgcgacagggatcgggaaagggatagggacagagaacgtgaccgtgatagggatagagagggcccttttcgaaggagcgactcttttcctgaaaggcgggctcctagaaaaggaaataccctctatgtttatggcgaggatatgacccccactcttctgcggggagcgttctcgcccttcgggaacatcattgatctgagtatggatccaccccgaaattgcgctttcgtcacttacgagaagatggaaagcgccgaccaggctgttgcagagctcaatgggacacaggtcgagagtgtccagttgaaagtgaatatcgccaggaaacagccaatgctggatgccgcaactggcaagtctgtctggggatctctcgcagtacaaaacagccctaaagggtgccacagggacaaacggacccaaattgtgtattccgacgacgtgtataaagaaaatttggtggacggcttttag

SEQ ID NO: 238104 - DNA, 1164 bp, synthetic construct
  misc_feature 1..1164: note = Description of Artificial Sequence: Synthetic coding sequence
  source 1..1164: mol_type = other DNA
atggtcccaaagggggctaccatgctagtgatccctccaggcctgtcggaggaagaagaggcactccagaaaaagttcaataaactaaagaaaaagaaaaaagctctgctggcactcaagaagcagtcatccagcagtactactagccagggcggtgtcaaacgaagcctctcagagcaacctgtcatggacaccgctaccgccaccgagcaggctaagcagttggtaaagtctggtgccatttccgcgattaaagcagagacaaaaaattctggattcaaacgctctcgtacgctcgagggaaaactgaaggaccccgagaaaggacctgtacctacattccaaccattccaacgcagcatttctgcggatgatgacctccaagagtcatcacgccgacctcaaagaaagtctctttacgagtcgttcgtgtccagctcagatcgtctacgggagcttggccctgatggagaggaagctgaaggcccaggggctggcgacggtccacccagaagcttcgactggggctatgaggagagatccggagcccactcaagcgcatcgcctccacgttcccgttcccgggataggtcccacgagaggaatagagacagggacagagaccgggagagggatagagacagagaccgggacagggacagggaaagggacagggatcgggatcgcgatcgagacagggatcgggagcgggatcgtgaccgcgagagggacagagaccgggatcgcgaggggccattccgcagaagtgactcctttccggagcgcagagcccctcggaaggggaacactttatatgtgtacggcgaggacatgacaccgaccctgcttcggggtgcgtttagcccattcggtaacattattgatctgagcatggaccccccaaggaactgcgctttcgttacatacgagaagatggaaagcgcagatcaggccgtggccgaactcaacggtacccaggtggaatcagtacaactgaaggtcaacatagcccgaaagcagcctatgctggacgcagccacagggaagtcagtctggggctctctcgccgtgcagaactcccccaagggatgccaccgggacaagcgaactcagatcgtctatagtgacgatgtgtacaaggaaaacttggtggatgggttctag

SEQ ID NO: 238105 - DNA, 1164 bp, synthetic construct
  misc_feature 1..1164: note = Description of Artificial Sequence: Synthetic coding sequence
  source 1..1164: mol_type = other DNA
atggtgcccaagggggctacaatgttagtgattcctccaggactgagcgaggaggaggaggccctgcaaaaaaagtttaataagctgaaaaagaaaaagaaggcactgctggccctgaaaaaacaaagctctagctccaccacctctcaagggggagtcaaacgtagtctctctgagcagcccgtgatggacacagccactgccacggagcaggccaagcagctggtcaaatctggcgctattagtgcaatcaaggcagagactaagaactcggggtttaaaaggtcccgcactctggaaggaaagttgaaggatccagagaaaggccctgtgcctactttccagccttttcaaaggtcgatttctgcggatgacgatctccaggaatcgtcccgaagacctcagcggaaatctctgtatgagtcctttgtatctagctctgatagactcagagagctgggaccagacggcgaagaagctgaaggccctggggctggcgatgggccacctcggtcgttcgactgggggtacgaagaacgcagtggagcgcactcgagtgccagcccgccacgctcccgaagtagggatcgcagccatgagaggaatcgtgaccgggacagagaccgagagcgtgatagggatcgtgatcgcgaccgcgatcgcgagagagatcgggaccgggatcgggatcgtgatcgcgacagagaacgcgatagggatcgcgagagagaccgcgatagggatcgggagggccctttcaggcgcagcgactcattccccgagagaagagcaccccgaaagggtaacactctgtatgtgtacggtgaggatatgacccctacgctgttgaggggggctttctctccctttgggaacattatcgacttgagcatggatcctcctcgcaattgcgcttttgtcacttacgaaaagatggagtccgcagaccaggccgttgccgagctcaacggcactcaagtagagtccgtgcaattgaaggtcaatatcgcccgaaagcaaccaatgttagatgctgccaccggtaaatcggtttggggctccttggcagttcaaaacagtcccaaaggctgtcatcgcgataagagaactcagatcgtgtactctgatgacgtttataaagagaacttggtcgatggcttctag

SEQ ID NO: 238106 - DNA, 1164 bp, synthetic construct
  misc_feature 1..1164: note = Description of Artificial Sequence: Synthetic coding sequence
  source 1..1164: mol_type = other DNA
atggtcccgaagggtgccaccatgctagtgatcccacccggactgtccgaggaagaagaagctctgcagaagaaattcaataagctgaaaaagaaaaaaaaggcactgctggcactgaagaagcagtcctcgtcaagcacaacttctcaaggcggtgtaaagagatctctttccgagcagccagttatggacacagccacagctaccgagcaagcgaaacaactggtgaagtctggagcgatttccgccattaaggctgagacaaaaaattctggcttcaaacgcagccgaactctagagggcaagttgaaagaccctgagaagggtcccgtccccaccttccagccttttcagagaagtattagtgctgatgatgacctacaagagtcgagtaggaggcctcagcgtaagtctttatatgagagttttgtctccagcagcgatagactgagggaactgggacctgatggcgaagaggctgagggacccggagcaggcgacggccctcctaggtcattcgactggggatatgaggaaagatcaggtgcgcattcctcagccagcccaccccgttcccgcagccgagacaggtcccacgagcgcaaccgtgacagagacagggacagggagagagatcgcgatagggatcgagatagagatcgagagagggatagagaccgggaccgcgatcgagatcgcgatagagagagagaccgggaccgcgagagggacagagaccgcgatcgcgaaggcccttttcgacggtcagatagctttccagaaagaagggctccacgcaaggggaacaccctctatgtttacggagaggatatgaccccaactttgctgagaggtgctttctccccctttgggaatatcatagatctcagtatggacccgccacggaactgcgcgttcgtgacgtacgaaaagatggagagcgccgaccaggccgtcgccgagcttaacggcacacaggtggagtcagtccaactgaaagtgaacattgccagaaagcaaccgatgctggacgcagcgaccggaaagtcagtatgggggtccctcgctgtgcagaattccccgaagggctgccaccgcgataaaaggactcaaattgtgtacagtgacgatgtgtacaaagagaacctggtggacggcttttag

SEQ ID NO: 238107 - DNA, 1164 bp, synthetic construct
  misc_feature 1..1164: note = Description of Artificial Sequence: Synthetic coding sequence
  source 1..1164: mol_type = other DNA
atggtgccgaagggcgctactatgcttgtgatcccacctgggctgtctgaggaagaagaggccttgcagaagaagtttaacaagttaaaaaaaaagaagaaggcgctgctggcccttaagaagcagagctcatccagcactacaagccagggtggggtgaaaagaagccttagtgagcaaccagtgatggacactgccaccgcgactgagcaggcgaagcagctggtgaagtctggcgcaatctctgccattaaagctgagacgaagaattcgggatttaagcgctcacgcaccctggaaggaaagctgaaggatcccgagaagggcccagtacccaccttccaaccttttcaaaggtccatttccgcagatgacgacctgcaggaatcatctagacgtcctcagaggaagagcctgtacgagtccttcgtctcgtcaagcgacaggctgcgggagcttggccctgacggggaagaagccgaagggcctggtgctggagacgggccacctcggtcgttcgactggggttacgaagagaggtctggggcacattcctccgcctcccccccaaggtccagatctcgggaccggagtcatgaacgcaaccgcgacagggatcgggatcgggaaagggatagggatcgcgaccgtgatcgggatagggagagggatagagatcgggatcgtgaccgggatcgggaccgcgaaagagatagggatagagaacgtgatagggatagagaccgggagggtccattccggagatcagattccttcccggaaaggcgggctccaagaaagggaaatacgctgtatgtgtatggggaggacatgacaccaactcttttgcgcggagccttttctccatttggcaacatcattgatctgagcatggatccacccaggaattgcgcctttgtcacctatgagaaaatggaatcggcagatcaagccgttgccgagctcaacggtactcaagtagaaagcgtgcagctcaaggttaatatcgccaggaagcagccaatgctcgatgccgcaacaggtaagagcgtgtgggggtctctagctgtccagaactctcccaagggatgccatcgggacaagcgaacgcagattgtctatagcgatgacgtctacaaggagaacctggtcgacggcttctag

SEQ ID NO: 238108 - DNA, 3294 bp, synthetic construct
  misc_feature 1..3294: note = Description of Artificial Sequence: Synthetic coding sequence
  source 1..3294: mol_type = other DNA
atggccacgcaggtgatgggccaatcgtctggaggaggcggactgttcaccagctccggcaacatcggaatggccctccctaacgacatgtacgatttacacgaccttagtaaggctgagctcgctgccccacagttgattatgctcgctaacgttgctctgactggcgaggtcaatgggtcctgttgcgactatctcgtgggggaagaacgccagatggctgagctcatgccagttggcgataacaacttcagcgactccgaggaaggcgagggtctcgaagagagcgccgacattaagggcgagccccacgggcttgagaacatggagttgcgatcccttgagctatccgtggtcgagccacagcccgtgttcgaggcttctggcgctcccgatatttactcctcaaataaagatctgccccctgagacccccggagccgaagacaaaggcaagtcatccaagacgaagccctttcgatgtaagccctgtcagtacgaagcagagagcgaagagcagttcgttcatcatatccgggtgcattcagcaaagaagtttttcgtggaagaaagcgctgaaaagcaggccaaggcgagagagtcggggagttctactgccgaagagggcgatttttctaaaggccctatacgttgtgaccgctgcggatataacacaaaccggtacgaccactacacagcacacctgaagcatcacacaagggcaggcgacaacgagcgcgtttacaagtgtattatatgtacatatactaccgtgtctgaataccactggcgcaaacatctgcgcaaccactttcccagaaaagtgtacacctgcggtaagtgcaactatttctcggacagaaaaaacaattacgtgcagcacgtgaggacccacacaggcgagagaccgtacaaatgcgagctgtgtccttactcctcctcccagaaaacacacttaacgagacatatgcgcactcattctggagagaaaccctttaaatgcgatcagtgcagctatgttgcctcaaatcaacacgaagtgaccaggcacgctcgccaggttcacaacggacccaagccccttaactgcccacactgcgactacaagaccgcggacagatctaatttcaagaaacacgtggaactgcacgtgaacccgagacaatttaactgtcccgtctgtgactatgcagccagcaagaagtgcaacctacagtatcactttaagtcaaaacaccccacatgtccaaataagactatggacgtgtccaaggtgaaacttaaaaaaactaagaagcgggaggcagatctgccagacaacatcacgaatgagaaaacggagatagagcaaaccaagattaagggagatgtggcaggcaaaaaaaacgaaaaaagtgtgaaagcagaaaaacgagatgttagcaaagagaaaaaaccctccaacaatgtgagcgtcatacaagtaaccactcgcacccgcaagtccgtgacagaagtcaaagaaatggacgtccacaccggttcgaacagcgagaaattctcgaagaccaagaagagcaaacggaagttggaagttgattcacactcgctacatggaccagtgaacgatgaagagagctcaacaaaaaaaaagaagaaagtggagtcaaagtctaagaacaactctcaggaggtgcctaagggagattctaaggttgaggaaaacaaaaagcaaaacacgtgtatgaagaaatcaaccaagaagaaaacattaaaaaacaaatccagtaagaaatctagtaagccacctcagaaagaaccagtggagaaaggctccgctcaaatggaccctccacagatgggtcctgctcccacagaggcggtccaaaaaggaccggtgcaagtagagccccctccgccaatggagcatgcgcagatggaaggagcccagattcggcctgccccagatgagcccgtccagatggaggttgtccaggaagggccagcccagaaagagctcttgccccctgtcgaacctgctcagatggtaggcgcacagattgtcctggcacacatggagctgccgccaccaatggagaccgcgcaaacggaggtcgcacaaatgggcccagcccctatggagcctgctcagatggaagtggcccaggtggaatccgctcctatgcaggtagtgcagaaagagccagtccagatggaactaagtccaccaatggaagttgtgcaaaaagagccggttcagatcgaactcagtcccccaatggaagtcgtccaaaaagaacctgtgaaaatagagttgtcacctcctattgaggtggttcagaaggagccagttcagatggagctatccccacctatgggagtcgtgcagaaagagccagcccagcgcgaaccccctccacctcgggagccgccattgcacatggaacccattagcaaaaaacctccactcagaaaagacaagaaagaaaagagtaacatgcaaagcgagcgcgctcggaaagagcaggtgctgatcgaggtaggtcttgtgcccgttaaagactcctggcttctcaaagaatccgtgagtactgaagacctctccccccctagtccaccactgcccaaagaaaacctccgcgaagaagcgagtggagaccagaaactgctgaatacgggcgagggaaacaaagaggcgcctttgcagaaggtgggcgcagaagaagccgatgagtccttacccggactggcggctaatatcaacgaatctacccatatatcttctagtggccagaatctgaacacccctgaaggggagaccttgaatgggaagcatcaaaccgattccatagtctgtgaaatgaagatggatacagaccaaaacacccgggagaacttgactggaataaattccaccgttgaggagcccgtatcacctatgctgccacccagcgcagtggaagagagggaggcggtctctaaaacggctttggcttctcccccagcaaccatggctgctaatgagagtcaggaaattgatgaagatgagggcattcattcacatgagggtagcgacctctctgataatatgagcgagggcagtgacgatagcggcttacacggcgcacggcctgtgccacaagagtcgagtagaaaaaacgccaaggaagctctagccgtgaaagcagctaagggggacttcgtatgtatattctgtgatcgatcattccggaagggaaaagactattcaaagcatctgaaccgtcatcttgttaacgtctactaccttgaagaggctgcgcaaggccaggagtag

SEQ ID NO: 238109 - DNA, 3225 bp, synthetic construct
  misc_feature 1..3225: note = Description of Artificial Sequence: Synthetic coding sequence
  source 1..3225: mol_type = other DNA
atggctacacaggttatggggcagtcatccggtggcggaggcctttttaccagctccggcaatatcggtatggcactgcctaatgatatgtatgacctccacgacctttcaaaagccgagctcgctgcccctcagctcatcatgctcgcgaacgtcgcactcaccggcgaagtcaatggttcctgttgcgattatttggtgggggaggaacgccagatggccgaattgatgcctgtgggagacaataacttctctgactctgaagaaggagagggtttggaagagagcgccgatatcaaaggcgagccacatggcttggaaaacatggaactgagaagcctggaattaagcgtggtggagccccagcctgtattcgaggcaagtggagcacccgacatctatagctctaataaagatctgcctcccgaaacaccaggggctgaagacaaggggaagtcctcgaagactaagccttttcgctgtaagccttgccagtatgaagcggaatccgaagagcagtttgtgcatcacatccgcgtgcactctgctaaaaagttctttgttgaggaaagcgccgagaagcaagcaaaggcccgtgagtctggctcctcgactgcggaggaaggagacttctctaagggacccattcgttgcgaccgctgtggctacaatacaaaccgctacgaccactacacagcacatctcaagcaccacactcgggcaggggacaatgagcgcgtgtacaagtgtattatctgcacgtacactacagtctcagagtaccactggcggaaacacctgcgcaaccactttccaaggaaggtgtacacatgcggcaagtgtaattacttttctgaccggaaaaataactacgtacagcacgtgcggacccatacgggaaagcggccttccggcgagaagccctttaaatgcgaccagtgttcatatgtagcttctaaccagcatgaggttactcgtcatgccaggcaggttcataatggcccaaaaccactgaattgtccacactgtgactacaaaaccgccgatcgctccaacttcaaaaaacatgtggaactgcatgttaaccctcgacaattcaactgtccagtgtgcgattacgctgcttcaaagaaatgcaatctccaatatcacttcaagtcaaagcaccctacctgccctaacaaaactatggatgtatcaaaagtaaaactgaaaaagaccaagaagagggaggccgacctcccagataacattactaacgaaaaaaccgagattgagcaaacaaagattaagggggacgtggcagggaagaagaatgaaaagtccgttaaggccgaaaaaagagacgtgtccaaagaaaagaaaccgtccaataatgtctctgttattcaggtaacgacccggacccgcaaatccgtcacagaggttaaggagatggatgtgcacactggttcaaactccgagaagtttagtaagaccaagaaatctaagagaaaactggaggtggacagccattcactgcacggcccagtgaatgacgaagagagcagcacgaagaaaaaaaagaaagtagagagcaaatctaagaataacagtcaggaagtgcccaagggtgactccaaggtagaagagaacaagaaacaaaatacttgcatgaagaagtcaaccaagaaaaaaactctgaagaataaaagctccaagaaatccagcaaaccgcctcagaaggaacccgtggaaaaggggtcagcccagatggatccaccacagatgggacctgctcccaccgaggccgttcaaaaagggcctgtgcaagtcgagcctccccctcctatggaacatgcccagatggaaggggcacagatcagacccgcacctgacgagcccgtgcagatggaggtggttcaagagggcccagctcagaaggaattattgcctcctgtggagcccgctcaaatggtgggcgcacagatcgtgctcgctcacatggaactcccccctccgatggaaactgcccagacagaggtagcccagatgggacctgcacccatggaaccagcgcaaatggaggtcgcccaggtggagtctgcccctatgcaggtggtgcaaaaagaacctgtgcagatggagcttagccccccaatggaagtggtgcagaaggagcctgtgcaaattgaattgtcccctccaatggaggtggttcagaaagagccagtcaaaattgagctgagccctcccatagaggttgtgcagaaagagcccgtacagatggaactgagtccaccaatgggcgtggtacaaaaggagcccgcacagcgggagccaccacccccacgcgagcctcctctccatatggaacccattagtaaaaagcctcctctgcggaaggataagaaagagaaatctaatatgcaatccgaacgcgctagaaaggaacaggtattaatagaagtcgggctggtgcctgtgaaggactcttggctgctcaaagaatcggtaagcactgaggacctcagcccacctagccctcctctccccaaggagaacctgcgtgaagaagcctcaggggatcagaagctgcttaacacaggtgaggggaataaagaggctccactacaaaaagttggggctgaggaagccgatgagtctctgcccggtctagcagccaatatcaacgagtccacgcacatcagctcctcggggcagaaccttaacactcctgaaggggaaacactcaacggaaaacaccagacagatagcattgtctgtgagatgaagatggacaccgaccagaacacacgtgagaacctgaccggaatcaactcaaccgtagaggaacctgtgagccccatgctgcccccatctgctgtcgaggagcgagaggccgtttccaagaccgctctcgcctcacccccagctactatggccgctaatgagtcccaggaaatagacgaggatgaggggatccatagccacgaaggctccgatctgagcgataatatgtccgaagggagcgatgattctggtctgcacggggcacgccctgtaccccaagagtcatcgcgaaaaaacgccaaagaggccctcgccgtaaaggccgctaaaggggatttcgtttgtatcttttgcgacagaagctttagaaagggtaaggattactccaagcatctgaacaggcacctggtgaacgtgtactacctggaggaggccgcacagggccaggaatag

SEQ ID NO: 238110 - DNA, 1383 bp, synthetic construct
  misc_feature 1..1383: note = Description of Artificial Sequence: Synthetic coding sequence
  source 1..1383: mol_type = other DNA
atggccactcaggtcatgggccagtcgtcaggcggaggtgggttgtttacttctagcggcaacattggcatggcgcttcctaacgatatgtatgaccttcacgacctgtctaaggccgagctggcagctccccagcttatcatgttagcaaacgtggctctcaccggggaggtgaatggaagttgctgtgattatctcgtcggtgaagagcgccagatggccgagttgatgcctgttggcgataataacttcagtgattcggaggagggagaaggtctcgaggagtcagccgacataaaaggcgaaccacatggcttggaaaacatggaactccgctctcttgagctgagcgttgtcgagccccagccggtcttcgaagcttccggcgctccggatatctactcatctaataaagatcttcctcccgaaactcctggagcagaggacaaagggaagagctccaagactaaacctttcagatgtaaaccatgccagtacgaagccgaatcagaagagcagttcgtgcatcacatcagagtgcactccgccaaaaagtttttcgtggaggagagcgcagagaagcaggcaaaggcccgtgaatccggctccagcaccgcagaggaaggagacttctctaagggtcccattaggtgcgatcgctgtggatataataccaatcgctatgaccactacactgcgcacctgaaacatcatacccgagctggagacaatgagagggtgtataagtgtatcatctgcacatacacaactgtatctgagtatcactggcggaagcacttaaggaaccactttcccagaaaagtctacacctgtggcaagtgcaactatttcagtgataggaaaaataactatgtccaacacgtaagaactcacactggcgaaaggccctacaagtgtgaactctgcccctatagcagctcccagaaaactcaccttacaagacacatgcgcactcattctggcgagaagccctttaagtgtgatcagtgttcttacgtagcttctaatcagcacgaagtgactagacacgcgaggcaggtccacaatgggccaaaaccactcaattgcccacactgtgattacaagacggcagatcggtccaatttcaagaaacacgtcgagctgcatgtcaatccgagacagttcaattgtcccgtctgtgactacgccgcaagcaaaaaatgtaacctgcagtatcatttcaagtctaagcatcctacatgccccaacaagacaatggatgtcagcaaggtgaaactgaagaagacgaaaaaacgcgaagccgacttaccagataacataaccaatgaaaagactgaaatcgaacagactaagaaaaagaaaaaaaagaaaaaaaaatag

SEQ ID NO: 238111 - DNA, 5744 bp, synthetic construct
  misc_feature 1..5744: note = Description of Artificial Sequence: Synthetic coding sequence
  source 1..5744: mol_type = other DNA
atggctgatggcaagggggatgctgcagccgtggccggagcaggggcagaagcacctgccgtcgctggggcaggcgatggtgtcgaaacggaatcgatggtgagggggcatcgcccagtgagccccgcaccaggagcaagtgggctccggccatgcctgtggcaattagaaaccgaactcagagaacaagaggtgagcgaggtatcatccctgaattattgccgttctttttgtcagaccctcctgcagtacgcaagtaacaagaacgcatccgagcacatagtgtatctgctagaggtgtaccgactggcgattcagagcttcgctagtgcaaggccctacttgaccaccgaatgtgaagatgtgctcctggtgctggggaggctggtgctgagctgcttcgagctcctcttaagcgttagcgagtccgaactgccttgtgaagtttggctccccttcttgcaatcccttcaggagtcccacgacgctcttctggagttcggaaacaataatctacagatccttgtgcatgtcaccaaggaaggcgtctggaagaatccagtgctcctgaaaattttaagccagcagccagtggaaactgaggaagtaaacaaactgatcgcccaggagggaccctctttccttcaaatgagaatcaaacaccttctgaaatccaactgtattccccaggcgaccgccctgagcaagctctgcgctgaatcaaaggaaataagtaacgtctcttcgtttcagcaggcatacattacctgtctgtgtagcatgctacccaatgaagatgcaatcaaggaaatcgccaaggtggactgcaaagaggtgctggatattatttgtaacttagaatctgaggggcaagataacaccgccttcgtgctgtgtacaacctacttaacccagcagctgcagactgcctccgtgtattgttcttgggaattaacccttttttggagcaaactgcaacgtcggatagatcctagcttggatacttttctagagcggtgcagacagttcggagtcatagcaaaaactcagcagcacctgttctgtctgattagagtgatccaaacagaggctcaggatgccggattaggagtgagcattcttctgtgcgtgcgggctctgcagcttaggagttccgaagacgaggagatgaaagctagtgtatgtaagaccattgcttgcctcctgcctgaggacctggaagtgaggagagcatgccagctgactgaatttctgatcgaaccatccctggacggcttcaatatgctcgaggagctgtatctgcagcctgaccaaaaattcgacgaagagaacgccccagtcccgaacagcctgagatgcgagctgcttctcgcacttaaggcgcactggcccttcgaccccgagttctgggattggaagacactgaaacgccactgccaccagttgcttggacaggaggccagtgattcagatgacgatctctctggatatgagatgtcaatcaacgacactgacgtgctcgaaagttttctaagtgattacgatgagggaaaagaagataaacaatacaggagacgagatctcacggatcaacacaaagaaaagcgagataagaaacccatcggctcatccgagcgctatcagaggtggctgcaatataaatttttctgtctgctgtgcaaacgcgagtgtatagaagcacgaattttacatcacagtaagatgcatatggaggatggaatctatacgtgtccggtctgtatcaagaagtttaagcgaaaggagatgttcgtgccccatgtgatggagcacgtgaagatgcccccatcacggcgtgacagatctaagaagaagctgctgctgaaaggttcccagaaaggaatttgccctaaatctccgagtgccattccagaacagaaccatagtctgaatgaccaggcaaaaggggaatcccacgaatatgttaccttttctaagctggaagattgccacctgcaggacagggacctgtacccctgccccggaaccgactgcagccgggtgtttaaacagtttaaatacttaagcgtgcacctcaaagccgaacaccagaacaatgatgagaacgctaagcattatctggatatgaaaaacaggagagagaagtgtacatactgtaggcggcacttcatgagtgcgttccatcttcgcgaacacgaacaagtacactgcggtccgcagccctacatgtgcgtctctatcgattgctatgctagatttggctctgtgaatgagctgttgaaccacaagcagaagcatgacgacctgcgttacaagtgcgagctgaacgggtgcaacatcgtcttttctgatctgggccagttgtaccatcacgaggcccagcatttcagggatgccagttacacatgtaacttcttgggatgcaagaaattttattactcaaagatagagtaccagaatcacttgagtatgcataatgttgaaaatagcaacggagacattaagaagagtgtgaaacttgaagagtctgccaccggagaaaaacaagactgcatcaatcaacctcacctgttaaaccagaccgacaaaagccatctgcccgaggacctcttctgtgccgagagcgccaactctcaaatcgatacggagacagccgagaacttaaaggaaaacagcgacagtaactcttctgatcagctgtcccactcaagtagcgctagcatgaacgaagaacttattgacactcttgatcacagcgagaccatgcaagacgtgttactgagcaacgaaaaggttttcggtcctagcagcctgaaggagaaatgtagctccatggctgtgtgtttcgatggaaccaagttcacttgtggcttcgatggatgtggttccacctataagaatgctcgcggaatgcagaaacacctgcgcaaggtgcatccctatcatttcaaaccaaaaaaaatcaaaaccaaagatctgtttccatccctcggaaacgaacataatcagactaccgagaagctagatgctgaaccaaaaccttgtagcgataccaacagcgattcccccgatgagggactggaccacaatatccacattaaatgcaaaagggagcaccaaggatactcctctgaatccagcatttgtgcttcgaagcggccatgtacagaggacactatgctggagctgctgttgcggttgaagcacctgtcgcttaaaaacagcatcacccacgggtccttctcagggtcactgcaaggctatccttcatcaggcgctaaatccctgcagagcgtgtcgtcaatttccgatctgaactttcaaaatcaggacgagaacatgcctagccagtatttggcccaactggcggcaaagcccttcttttgtgagttgcagggttgtaagtacgagtttgtgactagagaggccctacttatgcactacctcaaaaagcataactactccaaagaaaaggtgctacagcttacaatgtttcagcacagatactccccatttcagtgtcacatttgtcagagaagttttacaaggaagacacatctaagaatccactataagaacaaacatcaaatcgggtctgatagggcaacccacaagttgctggataatgagaaatgtgatcatgaagggccatgtagcgtcgaccgcttgaagggcgactgcagcgccgagttagggggagaccccagctccaactccgaaaaaccacactgccaccccaaaaaggacgaatgctcatctgagacggatctggagtccagttgcgaagagactgagagcaaaacgagcgatatttcttccccaataggtagtcaccgagaggaacaagaagggagggaggggagaggatccaggcgaaccgtagctaaaggcaatctctgttacatcttaaacaagtaccacaagccatttcactgcattcataagacctgtaattccagttttacaaatctcaaaggccttatccgacactatagaaccgtgcaccagtacaacaaggagcaactgtgtctggaaaaggacaaagctcgtaccaaaagggagttagtaaaatgcaaaaagatattcgcctgcaaatacaaggagtgcaacaagcggttcctctgctccaaagcacttgcaaaacactgctctgattctcataacttggaccacatcgaagagcctaaagtcttgtcagaagccggtagtgctgccagattttcatgcaaccagccccaatgcccagcggtcttttacaccttcaataagcttaagcaccatctaatggagcagcacaacattgaaggcgagatacattccgattatgagatacactgcgacctgaatgggtgcggccaaattttcacacaccgttctaattattcacagcacgtgtattatcgacacaaagattattatgacgacctgtttagatcccagaaagtggctaacgagcggctactgaggagcgaaaaggtgtgccagacagctgacacccagggacacgaacatcagactacaagaagatcattcaatgccaaatcaaagaagtgtggtctgattaaagaaaagaaagcacccatctctttcaagacaagggcagaagcgcttcatatgtgtgttgagcactctgagcatacgcagtatccttgcatggtgcaaggctgcctttctgttgtaaagttggagagtagtatcgtgaggcattataagaggacccatcagatgagcagcgcctatctggagcagcaaatggagaaccttgtggtgtgtgtgaaatacgggactaaaatcaaggaagagcccccaagcgaagccgatccctgtattaaaaaagaagagaatcgctcctgcgaatccgaacgtacagagcattcacatagtcccggtgactcaagcgcccctattcaaaacaccgactgttgccactcaagcgagagggacgggggacagaagggctgcatcgagtctagttccgtgttcgacgcggacactctcctttaccggggaactctgaaatgcaaccactcttccaaaacgacaagtctcgagcagtgtaatatcgtccaaccacccccaccctgcaaaatcgaaaacagcattcccaacccaaatggcacagaaagcgggacttattttacctctttccagttgccattgcctcggatcaaagaatccgagaccagacagcactcctccgggcaggaaaatacagtgaaaaaccccactcatgtaccaaaagaaaatttccggaaacattctcagcccagaagctttgacctgaaaacttacaagcccatgggcttcgagtcgtcattcctgaagtttattcaggaaagcgaggagaaggaggatgacttcgacgactgggagcccagcgagcatctgaccctctccaacagcagccagtcctctaatgatcttactggcaatgtggtggcaaacaatatggttaatgattcagaacctgaggttgatataccacacagctctagtgactctactatacatgagaacctgacagctatcccaccattgattgtggcagagaccaccaccgtccctagcttggagaatttacgcgtggtgttagacaaggcactgacagattgtggggagctggccctgaaacagctgcattatctaagacccgttgtggtgctggagaggagtaaattttccacccctatcctagatttattcccaactaaaaaaacggacgagctgtgtgtggggagcagcta

SEQ ID NO: 238112 - DNA, 4824 bp, synthetic construct
  misc_feature 1..4824: note = Description of Artificial Sequence: Synthetic coding sequence
  source 1..4824: mol_type = other DNA
atgttctaccatgatctgttttaccgagagttgacgcttttttggtctaagttgcagcgaaggattgatcctagcttagacaccttccttgaaagatgtcggcagtttggcgtgattgctaagacacagcagcatctcttttgtctgattagggtcatccagaccgaagcacaagacgctggcctaggcgtttcgatattactctgtgtacgggctctgcagctgagaagtagcgaggacgaagagatgaaggcttcagtgtgcaaaacaatcgcttgcttactgcctgaggacctggaggtccgaagagcctgccagctgacagagtttctgatcgaaccttcacttgacggcttcaatatgctggaggagctatacctgcagccagatcaaaaattcgacgaggaaaacgcaccagtgcccaattccttgagatgcgaactactcctggcactcaaagcacattggccgtttgatcccgagttttgggactggaaaacactgaagcgccactgtcatcagctgcttggacaggaggcatctgatagcgatgacgacttgtcaggatatgagatgtcgattaatgacacggacgtgttggaatcttttcttagcgattacgacgaaggcaaagaggataagcagtaccgccgtcgggacctgacagatcagcacaaggagaaacgcgataaaaaacctatcggatcctccgagcgctaccagcgatggctgcagtataagtttttctgcctgttgtgtaaaagggaatgcatagaagctaggatattgcatcattcaaaaatgcatatggaggacggaatttacacctgtccggtctgcatcaaaaagttcaagcgaaaggagatgttcgtaccacacgtgatggagcacgtgaaaatgccgccatctagaagagaccgctcaaagaagaaactgctgctgaagggcagccagaaaggcatttgtcccaaatctcctagcgcaatacctgaacagaatcactccctgaatgatcaggccaagggcgaatctcatgagtacgtcacgttctccaaactcgaggactgccatttgcaagatagagacttatacccctgcccgggaactgattgtagtagggtgtttaaacagtttaagtacctgagcgtgcatctgaaggccgaacaccagaacaatgatgaaaacgccaaacactatctcgatatgaagaaccgcagggagaaatgcacctactgccggaggcattttatgtctgccttccacctcagagaacatgagcaggttcattgcggcccacagccttatatgtgtgttagtattgactgttatgccaggtttggaagcgtgaatgaactcctcaatcataagcagaagcacgacgatctacggtacaaatgtgagctgaatggctgcaacatcgttttctccgacctaggccagttatatcaccacgaagcccagcacttcagggatgcctcatacacctgtaacttcctcggttgcaaaaagttttattattctaagattgagtaccagaaccatctgagcatgcacaacgtcgagaattcgaatggtgatattaaaaagagcgtaaagctggaagaatccgcgactggggagaagcaggattgtattaatcagccccacctgctcaaccaaactgacaagtcacatctgccagaggacctcttctgtgcagaatccgccaattctcagattgatacggagaccgctgagaatctgaaagagaactcagattctaattcctcagaccagctttcgcactcctcctctgccagcatgaacgaggaacttatcgacacgctggaccactccgaaacaatgcaagatgtcctcttgtcaaatgaaaaagttttcgggccatcatcgctgaaggaaaagtgttcctccatggccgtctgctttgacggaactaaattcacctgcgggtttgatgggtgcggctcgacttacaaaaacgcacgtggcatgcagaaacacctcaggaaggtgcacccctatcactttaagcccaagaaaatcaaaacaaaggaccttttcccgagcctgggcaatgagcacaatcagacaacagagaaactcgacgccgagccaaagccatgtagcgacaccaatagcgactcacctgacgagggtttggatcacaacatccacatcaaatgtaagcgagagcatcagggttatagcagtgagagctccatttgtgcctctaaaaggccttgcaccgaggacacaatgctcgagctgctgttgcgtctgaaacacctcagtctgaagaactcaattacccacggctcattctctgggagcctgcaggggtaccctagctcaggcgctaaatcccttcaatctgttagtagtatttcggatctgaatttccaaaaccaagatgagaatatgccctcccagtacctcgcacagttggcagcgaagccattcttttgcgagctacagggctgtaagtacgaattcgtcacccgcgaagcgctcctcatgcactaccttaagaagcataactattccaaagagaaggtcctgcagctgaccatgttccagcaccgctacagcccctttcaatgccatatttgccagcggtcattcacaagaaaaactcacctgcgtatccattacaagaacaaacatcagatcggcagcgaccgcgctacgcacaaactgctcgacaacgaaaagtgtgatcacgaggggccttgctctgtggaccggctgaagggcgactgtagcgcagagctggggggagatccttctagtaacagtgagaagcctcactgtcatccaaagaaggatgaatgtagttcggaaacagatttggagagcagctgcgaggaaactgagagtaagaccagtgatatcagttcccctatcgggtcacacagggaagaacaggaaggacgagagggacgtgggtcccgcagaactgtggctaaaggcaacctctgctatatcctgaataagtaccataagccattccactgtattcataagacttgcaattcgtccttcacaaatctgaagggattgatccgtcattatcgtactgtccatcagtataacaaggaacaactctgcctggagaaagacaaggcccgaacaaagcgcgaattggtaaagtgtaaaaaaatcttcgcttgcaagtataaggaatgtaataagagattcctgtgcagtaaagcactcgccaaacattgcagcgactcacacaacctggatcacatcgaggagccaaaggtgctgagtgaggccggatcagcagcgcgtttcagctgcaatcaaccgcagtgtccagccgtgttttatacttttaacaagttgaagcaccatttaatggaacagcacaatatagagggcgagattcatagcgattatgaaattcactgcgatctcaatgggtgtggccagatctttactcatcgatccaattattcccagcacgtgtactaccgacataaggactattacgacgaccttttccgtagccagaaggtggctaatgagcgcctcctcagatctgaaaaagtgtgtcagactgctgatacacagggacatgaacaccagactacaagacggagctttaatgccaaatcaaagaaatgcggattgattaaagagaagaaagccccaatttcatttaagactagagccgaggctctacatatgtgcgtggagcacagcgagcatacgcagtacccatgcatggttcaaggctgcctgagcgttgtcaagctggagtcatctattgtgcgacactacaagcggacccatcagatgagttcagcgtaccttgaacagcagatggaaaacctggttgtgtgcgtgaagtacggaaccaaaataaaggaagaacctccttcggaagctgatccctgcatcaagaaagaggaaaatagatcttgcgagtccgaaagaactgagcacagtcattcacctggggacagtagcgcccctattcagaacaccgactgctgccactcttcagaaagggacggcggacagaagggatgtatcgaaagctcttctgtttttgatgcagacacgctgttatacagaggtactctcaagtgcaaccacagtagcaaaacaacaagtctggagcagtgtaacatcgtgcagccacctccgccttgtaaaattgagaacagtattcctaaccctaatgggaccgaatccgggacgtatttcacctcatttcagctgccactccctcgaatcaaagaatcagagaccagacagcatagttcaggtcaggagaatactgttaagaaccctacgcatgtgcctaaagaaaactttcgaaagcacagccagcccagatcctttgacctgaagacctataaacctatggggtttgaatccagtttcctgaaattcattcaggaatctgaggaaaaagaggatgactttgacgattgggagccgagcgagcacctaactttgtccaactcctcacaatcctccaatgacctgaccggaaacgtggtggcgaacaatatggttaatgattccgagcctgaggtcgacataccacattcgtcctcggactccacaatccacgaaaacctcactgcgatcccgccactcatagtagccgaaaccacaacggtgcccagtttggaaaacttgcgggtggtgttggacaaggcgctaacagattgcggcgagctggcactgaaacaactccattacctgcggccagtggtagtgttggagagatccaaatttagcactccaatcctagatctattccccaccaaaaagactgacgaactttgcgtgggctcttcgtag

SEQ ID NO: 238113 - DNA, 1641 bp, synthetic construct
  misc_feature 1..1641: note = Description of Artificial Sequence: Synthetic coding sequence
  source 1..1641: mol_type = other DNA
atgttctattatcctaacgtgctgcagcgacacactggctgctttgctaccatctggctcgcggcaactcggggatcaagactagtgaaaagggagtatttgcgggtgaacgttgtgaagacatgtgaagaaattctgaattacgtgctggtgagagtacaacctccccagccgggtctgccgaggcccaggttctctctgtacctgtctgctcagctccagatcggggtgatccgagtgtacagtcagcagtgccagtatctggtcgaagacatacagcatatcctggaacgtctccacagagctcagctgcagatccgaatagatatggaaacagagctaccttctctgctcttgccaaaccacctggccatgatggagaccctcgaagacgccccagaccctttttttggaatgatgtctgttgatcctagattgccgtccccatttgacattccccagataagacacctgctggaggctgccattccagaacgagttgaggaaattccaccagaggtgcctaccgagcccagggaacccgaacgcatacccgtcactgtgttaccaccagaagctataacgatcctggaggctgaacctattcgaatgcttgaaatagagggcgagagggagcttcccgaagtaagtaggcgtgagctggacctattaatagccgaagaagaagctattctgctggagataccgaggttgcccccacctgctccagcagaggtggaaggaatcggagaggccttaggcccagaggagttgagactcaccggctgggagccgggagcactcctcatggaggtgaccccaccagaggaactgaggcttcctgctcctcctagccctgagcgaaggccacccgtgcccccaccgcctcgcagacgacggagaaggagacttctcttctgggataaggagacgcagatttcacccgaaaaattccaggagcagctccagaccagagcacattgctgggaatgccctatggtgcagccaccagaacggacaattcggggacctgctgagttgttccggactcctactctgagcggatggctccccccagaattactgggattatggacccattgcgctcagcctccgccaaaggctctgcgaagggaactccccgaagaggccgctgctgaggaggaacgacgcaagatcgaagtgccctctgaaatcgaagtgccgagggaagctctcgagccatccgtcccactgatggtgtcattagaaatcagtctggaggccgcagaggaggagaaaagtcgtattagtttgattcctccagaagagcggtgggcctggcctgaggtggaggctccagaagcacctgccctgccggtggtgccagagctgccggaagtccctatggaaatgcctctcgtgctaccccctgagctggaacttttgtcactcgaggctgtgcaccgcgctgtggccctggagctccaggctaacagagaacctgactttagctccctggtctctccattatcacccaggcgtatggccgctcgcgtgttttaccttcttcttgtgctgtcagcacaacaaatactccacgtgaagcaggagaaaccctatggccgtcttttgattcagcccggaccgaggttccattag

SEQ ID NO: 238114 - DNA, 1590 bp, synthetic construct
  misc_feature 1..1590: note = Description of Artificial Sequence: Synthetic coding sequence
  source 1..1590: mol_type = other DNA
atgttctattatccaaatgttttacaacggcatacgggatgctttgcaaccatttggctggcagcaacacgcggttctaggttagtcaagcgggagtacctccgcgttaatgtcgttaagacctgcgaggagatacttaattacgtcctagtccgagtgcaacctccccaaccaggcctgccacggcctaggttctcactttatctgtctgcacagctgcagatcggcgtgatcagagtgtacagtcagcagtgtcaatacttggtggaggatattcagcacattctggagaggctccacagggcacagctgcaaattcggatcgatatggaaaccgaattaccgtctctacttttacctaaccacctcgcaatgatggaaacactggaagatgctcctgacccgtttttcggaatgatgagtgtcgatcctcggctgccctcacccttcgatatccctcagattcgccatctgctcgaagccgctatccccgagcgcgtcgaggagattcctcctgaggtccccaccgagcccagggaaccagaacgaatccccgtcacagtgctgcctcccgaggcgatcaccatccttgaggcagagcctatccgtatgcttgagatcgaaggggaacgggagctgcccgaggtatctcggagagaattggatctactgattgctgaggaggaagctattctcctcgaaatacctaggctgcccccacctgctcccgcagaggtagaaggaattggagaggccctggggcctgaagaactgagactcacaggctgggagcccggtgcgttgttaatgcgacggcctcctgtaccaccacctccaaggcggcgacgacgcagaaggctgctgttttgggataaagagacacaaatctctcctgaaaagtttcaggagcagctacagaccagagctcactgctgggagtgtcccatggtgcagccacccgagcggaccattagggggccagctgaactattcaggacccccactctgagcggctggctgcctcctgaactgctcgggctctggactcactgcgcccagccccctccaaaggctctgcggagggagttgccggaggaggccgcagctgaagaggaaaggcgcaaaattgaagtacctagcgaaattgaagtgcccagggaggccttagaaccttctgtgccgcttatggtgtcactcgagattagcctcgaggcagctgaagaggaaaagagcagaattagcctcattcctccagaagaacggtgggcctggcctgaggtcgaagctcctgaagcgccagccctgcctgtggtgccggaactgccggaggttcccatggagatgccacttgtcctgcccccagagttggaactgctatccctagaggccgtccacagagcagtggctctggagcttcaggccaaccgtgaaccagacttcagcagcctggtgtcacccctcagcccgcgaagaatggccgcaagggttttctatctcctacttgtgttgagcgcccagcaaatactgcacgtaaagcaggagaaaccctacgggcgactcctaatacaaccagggccaagattccattag

SEQ ID NO: 238115 - DNA, 225 bp, synthetic construct
  misc_feature 1..225: note = Description of Artificial Sequence: Synthetic coding sequence
  source 1..225: mol_type = other DNA
atgttttactaccctaatgtgcttcaacgtcacacgggctgcttcgcgacaatctggttggccgctacccgcggttccagacttgtgaaaagggaatacctacgggtgaatgtcgtcaagacctgtgaggagatcctgaattacgtactcgtacgcgtgcaacctccgcagccaggactgcctcgcccacgattctccctgtatctctctgcacagctgcagtag

SEQ ID NO: 238116 - DNA, 1641 bp, synthetic construct
  misc_feature 1..1641: note = Description of Artificial Sequence: Synthetic coding sequence
  source 1..1641: mol_type = other DNA
atgttttactatcccaatgtcctgcagaggcacacaggatgtttcgctacgatttggctggcagcaacacgaggttcaaggcttgtcaaacgagaatacttgagggtgaacgtagtgaagacttgtgaggagatcctgaactatgtactcgttcgggtgcagccgcctcagcccggtctacctcgcccacgatttagtttatatctcagcgcccaactgcagattggagttatccgcgtgtatagccagcagtgtcagtatctcgttgaagacattcagcacatcctggagcggttgcatcgcgcacagctgcaaataagaatagacatggagactgaactcccttccctccttcttcccaaccatctcgccatgatggaaacactggaagacgctcctgacccattcttcgggatgatgtccgtggatcccagactgcccagccctttcgatattccccagattcggcacttactggaggcagctataccggagcgggtggaagagattcccccagaagtgccaacagagccaagagaaccagaacgtatccccgtaacagtgctaccacctgaagccatcacaattctggaagccgaaccaattaggatgctggaaatagaaggagaacgagaactgcccgaagtatctcggagggagctagatcttctaatcgccgaagaagaagctatactcctggagatcccaaggctgcctccaccagcgcctgcggaggtggaaggtattggagaggctctcggaccagaagaacttagactgaccggatgggagcccggagccctcctgatggaggtgaccccacccgaggagctcagactgcccgcacctccatctcccgaacggcgtcctccagtgccacctcctccacggaggagaaggaggaggagactattattttgggacaaagaaacgcaaatttcccccgagaaatttcaagagcaactgcagactcgagcacattgctgggagtgtcccatggtgcagccacctgagaggactataagggggcctgccgagttattccggacaccgacactctccggctggctacctcctgagcttctgggtctgtggacacactgtgctcagccccctcccaaagctctgcgtcgcgaacttccagaggaggccgcagcggaggaggagcggaggaaaatcgaagtgccgagcgagattgaggtccccagagaagccctggaaccatcggttccactgatggtgagcctggagatctcgttagaagcagcagaggaagagaaatcccgtatttccttgattccacctgaagaaaggtgggcttggcctgaggtggaggcccctgaagctcccgctctgcccgtggttcctgaacttcctgaggtgcccatggagatgccgttagtcctgcctccagaattggagctgctgtcgcttgaagcggttcacagagcggtggctttggagctacaggccaacagagagccagatttcagctccttagtcagccccctgtctccacgcagaatggcagcccgagttttttatctgctgcttgttctatccgctcagcagattctgcacgtgaagcaggagaaaccatatgggaggctgttaatccagcccggacccaggtttcactag

SEQ ID NO: 238117 - DNA, 699 bp, synthetic construct
  misc_feature 1..699: note = Description of Artificial Sequence: Synthetic coding sequence
  source 1..699: mol_type = other DNA
atggccggagatacagaagtgtggaagcagatgttccaggaactgatgcgcgaggtgaaaccatggcatcgatggacacttagaccagataaggggctgctgcctaatgtcttgaaacccggatggatgcaataccagcagtggaccttcgccagattccagtgttcatcctgctcacgaaattgggcttccgcacaggtgctcgtccttttccacatgaactggtcagaagaaaagtctcgtgggcaagttaagatgcgcgtgttcacccagcgatgcaaaaaatgtcctcaaccactcttcgaggatccagagttcacccaggagaacatctccaggatcctaaaaaatttggtgttcagaatccttaagaaatgctaccgagggagatttcaactaattgaagaggttccgatgattaaagacatctcattggagggtccacacaactccgacaattgtgaagcatgcctgcagggattttgtgcgggaccaatccaggtgacctcacttccacctagccagacacccagggtacattctatttacaaggtggaagaagtggtcaagccctgggcctccggagagaacgtgtacagctacgcttgtcaaaaccatatctgcaggaatttaagtatattctgctgctgtgtgatcctgattgttatcgttgtgattgttgtgaagaccgcgatttag

SEQ ID NO: 238118 - DNA, 741 bp, synthetic construct
  misc_feature 1..741: note = Description of Artificial Sequence: Synthetic coding sequence
  source 1..741: mol_type = other DNA
atggttgtcgatttttggacatgggagcaaacgtttcaggagctgatccaggaggcaaagccacgggcaacctggaccttgaagcttgatggcaacctccaactggattgcctggcacagggttggaagcagtaccagcagagggccttcggctggtttaggtgtagcagctgtcaacgctcctgggcgtccgcccaggtccagattctgtgtcatacgtattgggaacattggacctcccagggccaggttcgcatgcgacttttcggacagcgttgtcaaaagtgcagctggagccagtatgaaatgcctgagttctccagcgatagcacaatgcggattctgagtaacttagttcagcatatcttgaagaaatactacggaaacggcaccagaaagtcccctgaaatgccagtcatcctcgaggtaagtctggagggatcccatgacaccgccaattgtgaagcctgtactctgggcatttgtggtcagggactaaagtcctgcatgactaagccgtccaaaagcctactcccccatctgaagacgggaaattcttccccgggaataggcgcagtgtatctcgcaaaccaggctaaaaaccagtccgccgaggcaaaggaagccaaaggttccgggtacgagaagttgggtccaagcagagatccagatccgctgaatatctgcgtttttatcctgctgttagtttttatcgtagtgaaatgtttcaccagtgagtag

SEQ ID NO: 238119 - DNA, 447 bp, synthetic construct
  misc_feature 1..447: note = Description of Artificial Sequence: Synthetic coding sequence
  source 1..447: mol_type = other DNA
atggccagggctctctgccgcctgccacgaaggggcctctggctcctcctagctcatcacttgtttatgactactgcatgtcaagaggccaactacggtgccctgttaagagagctgtgtcttacccagtttcaggtggacatggaggctgtcggtgagactttgtggtgtgactgggggaggacaatcagaagttatcgtgagctagctgactgtacatggcacatggccgagaaattaggctgcttctggccaaacgccgaggtcgaccgcttttttcttgcggtgcacggaagatactttaggtcttgcccaatttctggcagagcggtacgggaccccccaggcagtattctgtatccgttcattgtggtgcctattacagtgacgttgctggtgacggctcttgtggtgtggcagagtaagagaactgaggggatcgtgtag

SEQ ID NO: 238120 - DNA, 381 bp, synthetic construct
  misc_feature 1..381: note = Description of Artificial Sequence: Synthetic coding sequence
  source 1..381: mol_type = other DNA
atgacaaccgcatgccaggaagccaattatggtgccctgcttcgcgagctttgcctaactcaattccaggtggatatggaagccgtcggtgagactctttggtgtgattgggggcgaaccattcgctcttacagagaacttgccgattgcacatggcatatggcggagaaactcggctgcttctggccaaatgccgaggtagaccgattcttccttgccgtgcatgggagatacttccgctcctgccctatctctggacgggctgtgagagaccctccaggctccattctgtaccccttcatcgtcgtgcccatcaccgtgaccctgttggttactgcactggtagtgtggcagtctaagcgtaccgaggggatcgtgtag

SEQ ID NO: 238121 - DNA, 381 bp, synthetic construct
  misc_feature 1..381: note = Description of Artificial Sequence: Synthetic coding sequence
  source 1..381: mol_type = other DNA
atgacaacagcttgtcaggaagcgaattacggggctttgttgcgagaactttgtctgacacagtttcaggtggatatggaggccgtgggcgaaactctgtggtgtgattgggggaggaccatccgcagctaccgggagcttgcggattgtacttggcacatggccgagaaacttggatgtttctggcctaatgctgaagtagatcgattcttcctggctgtccacgggaggtacttcagatcctgcccaatttcgggcagagctgtgcgggatccgcctggctccattctttatccatttatcgtcgttcccatcaccgtgaccctcctggtgaccgctctggtcgtctggcagtctaaaagaacagaagggatcgtttag

SEQ ID NO: 238122 - DNA, 381 bp, synthetic construct
  misc_feature 1..381: note = Description of Artificial Sequence: Synthetic coding sequence
  source 1..381: mol_type = other DNA
atgaccacagcctgtcaagaagcaaactacggagccctgcttagagagctgtgccttacacaatttcaggtcgacatggaagccgtgggagaaacactctggtgcgactggggcaggacaatccgttcctatcgcgagctcgccgactgcacctggcacatggctgagaaactcggatgcttctggcctaacgctgaggttgatcgcttctttctggccgtgcatggcagatacttcaggtcctgccctatttctgggcgtgccgtgcgcgatcccccaggctccatcctgtatcccttcattgtggtccctatcacggttaccctgcttgtgactgctctagtagtctggcagtccaagcgcaccgaaggcatcgtgtag

SEQ ID NO: 238123 - DNA, 528 bp, synthetic construct
  misc_feature 1..528: note = Description of Artificial Sequence: Synthetic coding sequence
  source 1..528: mol_type = other DNA
atggcttccctgcgagttgaacgtgctggaggaccacgcctccccagaacacgggtcggtcggccagccgcactccgccttctgctcttgcttggcgcagtacttaacccgcacgaagcgctggcacaacctttacccactactggcacccctggcagcgaagggggtacagtgaaaaactacgaaactgccgttcagttttgctggaatcattataaagatcagatggatccaatcgagaaggactggtgtgattgggcaatgatcagcagaccatattcaaccctcagagattgcctggagcattttgcggaactatttgacctcgggttccctaatcccttggccgaaaggattattttcgagacccatcagatacacttcgctaactgttctttggtccagccaacctttagcgatccacctgaggacgtgctgctcgccatgatcatcgcccctatatgtcttattccattcctgatcactctggtcgtttggcgctcgaaggacagtgaagcccaagcatag

SEQ ID NO: 238124 - DNA, 447 bp, synthetic construct
  misc_feature 1..447: note = Description of Artificial Sequence: Synthetic coding sequence
  source 1..447: mol_type = other DNA
atggaaaccggcgctctgagaagaccacagctgctgccactgttactgctcctctgcggaggatgtccacgcgctggcggttgtaacgagactgggatgttggaacggcttccactgtgtgggaaagcttttgcagacatgatgggcaaggtcgatgtgtggaaatggtgcaacttgtccgaattcattgtgtactacgagagctttaccaattgtacagaaatggaagcgaacgtagtcggctgctattggccgaatcccctcgcacaggggtttattactgggatccaccgacagtttttctctaattgtacagtggaccgagtacacctcgaggacccgcctgacgaggtgctgatacccctgatcgtcatccctgtggtgctcactgtggcaatggctggcctcgtggtgtggcgctcaaaacgtacagatacactgctctag

SEQ ID NO: 238125 - DNA, 447 bp, synthetic construct
  misc_feature 1..447: note = Description of Artificial Sequence: Synthetic coding sequence
  source 1..447: mol_type = other DNA
atggaaactggagccttgagaagaccacaactgctcccattattactactgctctgtgggggttgtccccgagctggtgggtgcaatgagactggaatgctcgaacggttacccctgtgcggaaaagccttcgccgatatgatggggaaagtggacgtctggaagtggtgcaacctgagcgagtttattgtgtactacgaaagtttcaccaactgtacggagatggaggccaacgtggtgggctgttactggcctaatccacttgcccaggggttcataacgggaattcataggcagttcttcagtaactgcacagtagatcgtgtgcacctggaggatcctcctgacgaagtgcttattcctcttattgtcattccggttgtgctaacagtcgcaatggcaggtcttgtggtttggagatctaaacgcacggatacactgctctag

SEQ ID NO: 238126 - DNA, 456 bp, synthetic construct
  misc_feature 1..456: note = Description of Artificial Sequence: Synthetic coding sequence
  source 1..456: mol_type = other DNA
atggagacaggggcactgcggcgtccacagcttcttcctctgttgttactgctatgtggcggttgtccccgtgctgggggatgcaacgagaccggtatgttggagcgccttccactttgcggaaaggccttcgctgatatgatgggcaaagtggatgtgtggaagtggtgtaacctcagcgagttcattgtatactacgaaagcttcacaaattgcactgaaatggaagctaatgtcgtcggttgctactggccgaatccgctcgcacaaggtttcatcacagggatccatagacagttcttctccaattgtactgtggacagggtacatctcgaagaccctcccgacgaggtgctgataccactaattgtgatacctgtggtcctgactgtcgcgatggccggattggtggtctggcggtcgaaacgaactgacacactcctttgcggcaactag

SEQ ID NO: 238127 - DNA, 606 bp, synthetic construct
  misc_feature 1..606: note = Description of Artificial Sequence: Synthetic coding sequence
  source 1..606: mol_type = other DNA
atggtgtcctggataataagtcgtctggttgtgctcattttcggcaccctgtatcccgcatattacagctataaagcagtcaagtctaaggatatcaaagaatatgtgaagtggatgatgtactggatcatttttgccttgttcaccaccgcagagacgttcactgacatctttctttgttggtttcctttctattatgaactgaaaattgcctttgtggcgtggttactgtcaccctacactaaaggttcgtctctactctaccgcaagttcgtccaccccactctgagcagtaaagagaaggaaatagacgactgtttagtccaagccaaagacaggtcttatgatgctcttgtgcattttggcaagcgcggactgaatgttgcagctaccgctgctgtgatggcagcctctaagggccagggggcactttcagaaagactaagaagtttcagcatgcaagatctgaccacaatccgcggagacggagctccagcacccagcggcccacccccacccggtagcggtcgagcgtccggcaaacacggccagccaaagatgtctcgttctgcgagcgaatcagcttcatcgagtggtacagcatag

SEQ ID NO: 238128 - DNA, 525 bp, synthetic construct
  misc_feature 1..525: note = Description of Artificial Sequence: Synthetic coding sequence
  source 1..525: mol_type = other DNA
atggatcacctgcaggctggcggagttaagtggatgatgtactggattattttcgcactgtttaccaccgccgaaacattcaccgacatcttcttgtgctggttcccgttttattacgagctgaaaattgcattcgtggcttggctgctgtcaccttacacgaagggatccagtttgctctacaggaagtttgtacaccctactttgagtagtaaggaaaaggagatcgacgactgcctggtccaggctaaagatcgtagttacgatgctttggtccatttcgggaagcgcggtctgaatgttgcggctaccgccgctgtcatggccgcaagcaaggggcagggcgctctgtccgaacgactccggtcattcagcatgcaagatctcaccaccatcaggggcgatggcgctcctgcccctagcggcccaccaccgcctggcagtggaagagcaagtggaaagcatggtcagccgaagatgagtcggagcgcctctgaatcggcttcatccagcggaacggcttag

SEQ ID NO: 238129 - DNA, 627 bp, synthetic construct
  misc_feature 1..627: note = Description of Artificial Sequence: Synthetic coding sequence
  source 1..627: mol_type = other DNA
atgcagaaggtactgtctaatggccagactgaagaggtgagaagcgggtcccgcctcatctttggcacactgtaccctgcgtattattcatataaagctgtcaaatcaaaggacatcaaagagtatgtgaaatggatgatgtactggatcatattcgccctgttcaccaccgctgaaacattcactgatatcttcctttgttggtttccgttctactatgaactgaagatcgcattcgtcgcgtggttgctgtccccctacaccaaaggatcttcccttctttatcggaaattcgtccacccaacgctgagtagcaaggagaaggagatcgatgattgtctggtccaggcaaaggaccgctcttacgatgctctggttcactttggcaagcgaggattgaacgtggctgccactgccgcagttatggctgcttcaaaggggcagggcgcactgagtgagcggcttcggtcctttagcatgcaggatttgaccactattcgcggagacggagctcctgcaccttccgggcctccaccacccggatccgggagggcctctgggaagcacgggcagccaaagatgtcgcggagcgcttcagagtctgcttcaagctccggcacggcctag

SEQ ID NO: 238130 - DNA, 543 bp, synthetic construct
  misc_feature 1..543: note = Description of Artificial Sequence: Synthetic coding sequence
  source 1..543: mol_type = other DNA
atgtcactgcatccttgtcgactcaataatctaccaaatcaagtaaaatggatgatgtactggattatcttcgcactgttcactaccgcagagactttcacggacatcttcttgtgctggtttcccttctactacgagctgaagattgcattcgtggcttggctgctgtctccttacacaaagggaagttccctgctgtaccggaagttcgtccatccaaccctgtcatccaaggaaaaagaaattgatgattgcctggttcaggccaaagataggagctacgatgctctggtacacttcggtaagagagggctcaatgttgctgctactgcggcagtgatggccgcttctaaggggcagggagctttatcagagcgtttacgctccttttctatgcaggatttaacaacgattagaggcgatggtgcccctgccccaagtggcccaccccctcctggcagcggaagggcatcggggaagcacggccaacccaaaatgtctcgcagtgcttccgagtcagcatcctctagcggaactgcgtag

SEQ ID NO: 238131 - DNA, 432 bp, synthetic construct
  misc_feature 1..432: note = Description of Artificial Sequence: Synthetic coding sequence
  source 1..432: mol_type = other DNA
atggtgtcttggattatttcccggttggtcgtgctgatcttcgggaccctgtaccccgcttattattcctataaggctgtcaagagcaaggatatcaaggagtatgtgaaatggatgatgtattggatcatcttcgcactctttaccacagcagagacgtttactgacatttttctgtgctgggatcgggtgccctaccggcgagactgcggagcctcggcatgtagaacaagccctcctagcggcgaaaccgcccctctgctaccccgagcaccgcatcatcgagggctcggaggacccgcagcaaacactgcaagcctacgatgtcccggtgttttgctgagggctctggccgctcaagcgccaccgagaattctccgctctcgttttcgcaagaagtcaacttcatccagcgctactgaaaccacgtag

SEQ ID NO: 238132 - DNA, 759 bp, synthetic construct
  misc_feature 1..759: note = Description of Artificial Sequence: Synthetic coding sequence
  source 1..759: mol_type = other DNA
atggttagttggattatttctcgcctagtcgttctaatcttcggaacactgtaccccgcatacagctcgtacaaagctgtcaagacaaaaaacgtcaaagaatacgtgaaatggatgatgtactggattgtcttcgccttctttaccacagccgaaacgcttactgacattgtgctgtcttggttccccttttatttcgaacttaaaatcgccttcgtaatatggttgttatcaccttacactaagggtagtagtgtgctatataggaaattcgtgcacccgaccctttccaacaaggagaaagagatagacgagtatataactcaggctagagacaagagctatgagaccatgatgagggttggaaaacgcggtttgaatctggcggctaacgccgctgttacggctgctgccaagggcgttctctctgagaagctcagaagttttagcatgcaggatctcactctcatccgagacgaggacgcgcttcccctgcagcgccctgatggaaggctaaggccctcacccggttcattattggacaccattgaagatcttggtgacgaccccgctctatcactgcgatcaagcaccaaccccgcagattccaggacagaggcctctgaagatgatatgggcgacaaagcacccaagagagccaaacccatcaaaaaggcacccaaagcggagcccttggcttctaagactctgaaaactaggccgaagaaaaagacaagcggtggtggcgattcagcttag

SEQ ID NO: 238133 - DNA, 765 bp, synthetic construct
  misc_feature 1..765: note = Description of Artificial Sequence: Synthetic coding sequence
  source 1..765: mol_type = other DNA
atggtctcatggatcattagccggctggtcgttcttatctttgggacactgtatcccgcatattcttcgtacaaggcagtgaaaactaagaacgtgaaggaatacgtcaaatggatgatgtactggatagtgtttgcgttcttcaccacagccgaaacactgacagatatagtcttatcctggtttccgttctacttcgaattaaagatcgcctttgtgatctggctcctcagcccgtatacaaaggggtcctccgttctgtaccgtaagttcgttcatcccacactgagcaataaagaaaaagaaatagatgagtatatcacccaggcgagagacaagagctacgagacaatgatgcgcgttggaaagagaggcctgaacctggccgctaacgcagccgttacagccgcagcaaagggtcagggagtcctgtcagagaagctgcggtcatttagtatgcaggatctaacactgataagggatgaggacgctttgcctctccagcggcctgacgggcgtctgcggcctagccccggaagcctgctcgatacaattgaggacctgggggatgatcccgcattatccctgcggtcctctacgaatccggcagacagcaggacggaggccagtgaagatgacatgggcgacaaagcccctaaacgagctaaacccatcaagaaggcccctaaggccgagccgctggcgagtaaaacactgaaaaccagaccaaagaagaagactagcggaggaggagactctgcatag

SEQ ID NO: 238134 - DNA, 723 bp, synthetic construct
  misc_feature 1..723: note = Description of Artificial Sequence: Synthetic coding sequence
  source 1..723: mol_type = other DNA
atgctgtatccagcgtactactcatacaaagccgtcaagaccaagaacgtgaaagagtatgtgcggtggatgatgtactggattgtttttgcactgtacaccgtcatcgagaccgtcgccgaccagactgtcgcctggttccccctttactatgagcttaagattgcctttgttatttggttgttgtcgccatatacaaagggcgcttccctaatttatcgcaagttcctgcatcccctgctgtcctctaaagaaagggagatcgacgattacattgtacaggcgaaagaacgcggttacgagactatggtcaatttcgggaggcagggtctcaacctggctgctaccgcagccgtaaccgccgctgtgaaaagccagggtgctataaccgagaggctccgtagcttctctatgcacgacctgaccactatccagggagacgagcctgtaggccagcggccatatcagccactgccagaagcaaaaaagaagagcaaacccgcaccatccgaatctgccggatatggcatacccctgaaggacggtgacgaaaaaactgatgaagaggccgaaggcccttactccgacaacgagatgctgactcataagggcctgcgacgatcccagagcatgaagtcggtcaaaaccactaaggggaggaaagaagtgcggtacggttccctgaaatacaaggtgaaaaagaggccacaggtctacttctag

SEQ ID NO: 238135 - DNA, 768 bp, synthetic construct
  misc_feature 1..768: note = Description of Artificial Sequence: Synthetic coding sequence
  source 1..768: mol_type = other DNA
atggtttcctggatgatttctcgagccgtcgtgctcgtcttcggcatgttataccccgcatactacagctataaggccgttaaaactaagaatgttaaagaatatgtaaggtggatgatgtactggattgttttcgctctgtataccgtcatcgaaaccgttgctgatcagaccgtggcctggttccctttgtactatgaactgaagatcgccttcgtcatttggctcctaagcccatacaccaagggggcatccctgatctatcggaagtttcttcatccactcttgtcaagcaaagaacgggagattgatgactacatcgtccaggctaaagagcgcggatatgagaccatggtgaattttggtcggcaaggactgaacttggcagctactgctgccgtgaccgcagccgtcaagtctcagggggctattactgaaaggctacgatctttttccatgcacgacctgacaacgattcaaggagatgaaccggtgggccagcgtccgtatcagccactgccagaggctaaaaagaaaagcaaacccgcacccagtgaaagcgccggatacgggattccgctgaaggatggagatgagaaaactgacgaggaagccgaaggcccatactctgacaatgagatgctcactcacaaaggactgagacgcagccagagcatgaaatcggtcaagactaccaaagggaggaaagaagtccggtatggctccctgaagtacaaagtgaaaaagcggcctcaagtgtacttctag

SEQ ID NO: 238136 - DNA, 774 bp, synthetic construct
  misc_feature 1..774: note = Description of Artificial Sequence: Synthetic coding sequence
  source 1..774: mol_type = other DNA
ctcatgatgtggctcctcgtagaacgagctctgatccagctggtattcggtatgctttatcccgcatactatagctataaggcagtcaaaactaagaacgtcaaggagtacgttcgctggatgatgtattggatagtatttgccctttacacggtgatcgagacagtcgcggatcagactgtggcgtggttcccgctgtattacgaactaaagattgccttcgttatatggctcctctccccttacaccaaaggggcttccctaatttaccggaagttcttacacccattgttaagttctaaggaaagggagattgatgactatattgtgcaagccaaagagagaggatatgagaccatggtgaatttcggccgacagggtctcaacctggcagcgacagcagcagtgaccgccgctgttaagtcgcagggcgcaattactgagagactgagaagcttctccatgcacgacctcaccacaatccaaggagacgaacctgttgggcagcgcccttatcagccattacctgaagcaaaaaaaaaaagtaaacctgccccaagtgagagcgccggatatgggattccactgaaggacggcgatgaaaagacggacgaggaggcagaagggccatacagtgacaatgaaatgctgacccacaaggggctgaggcgttcacagtccatgaaatccgttaagaccaccaagggcagaaaagaggtcaggtacgggagccttaagtataaggtgaagaagcgaccccaagtatatttttag

SEQ ID NO: 238137 - DNA, 774 bp, synthetic construct
  misc_feature 1..774: note = Description of Artificial Sequence: Synthetic coding sequence
  source 1..774: mol_type = other DNA
atggtgtcatggatgatttgcaggcttgtggtacttgttttcggcatgctgtgtcctgcatacgcaagttacaaggctgtgaagacaaaaaatatacgggagtatgtccggtggatgatgtactggattgtattcgcgctgttcatggcagctgagattgttactgacatcttcattagttggttccctttttattacgagataaaaatggcatttgtcctgtggctgctcagcccttatactaagggcgcttctctgctctacaggaagtttgttcatccttcactgagccgccatgagaaggagattgacgcttacattgtgcaggcaaaggaaaggagctacgaaaccgtgctctcattcggcaagagaggcctcaacatagctgcgtcagccgctgtccaggcagcaactaagtcccagggggctctggccggacgactgcggtccttttctatgcaagacctgcgaagcatctccgacgcgcctgcccctgcataccacgaccccctctacttggaggatcaggttagtcaccgccgtccaccaattggctatagagcaggcggtctccaggacagcgatactgaggatgaatgctggtccgacacggaagctgtccccagagctccagcaaggccacgcgaaaagcccctcattcgctcccagagtctacgggtggtgaagaggaaacccccagtccgagagggaacatcccgttccctgaaggttcggactagaaagaaaaccgtaccaagcgatgtagactcatag

SEQ ID NO: 238138 - DNA, 522 bp, synthetic construct
  misc_feature 1..522: note = Description of Artificial Sequence: Synthetic coding sequence
  source 1..522: mol_type = other DNA
atggtttcttggatgatttgcaggctggtcgtgttagtgttcggcatgctatgtcctgcctacgcatcctacaaggctgtgaaaaccaagaacatccgagaatacgtacggtggatgatgtactggattgtgtttgccctctttatggcagcagagattgtgaccgacatcttcatctcctggttccctttctactatgagattaagatggctttcgttctgtggctgctcagtccttataccaaaggcgcaagtctgctgtacagaaaatttgttcatcccagcctgagcagacatgaaaaagagattgatgcctatatcgtacaggctaaggagcgaagctatgagactgtgctgagctttggcaagcggggtctgaacatcgcggctagcgccgcagtgcaggccgctactaaaggcacagggcctggagcatgtcggaccgctacaccgagaatgagcgttggacagatcctgagacagtctcccggtagacagccaggtccagagagatctccatag

SEQ ID NO: 238139 - DNA, 570 bp, synthetic construct
  misc_feature 1..570: note = Description of Artificial Sequence: Synthetic coding sequence
  source 1..570: mol_type = other DNA
atgagtgccgcaatgcgtgaacggttcgaccgtttcctccatgagaaaaattgcatgacggatctcctggccaaactagaggccaagaccggcgtaaaccgatccttcattgctctgggggtcattggactcgtcgccctctacttagtcttcgggtatggggcatcacttctgtgcaatctcatcggattcggctaccccgcttatatctcaattaaggcaatcgagtcaccaaacaaagaggacgacacccagtggttgacctactgggtggtctacggcgtcttctccattgccgagttcttttcagatatctttctgagttggtttccgttttactacatgcttaaatgtggattcttgctttggtgcatggccccatcaccaagtaacggcgcagaacttttgtacaaacggattatcaggccctttttcttgaaacacgaaagccagatggacagtgtagtaaaggacttaaaagataaagccaaggagaccgccgatgcgattactaaagaggccaaaaaggccacggtaaatctactcggtgaagagaaaaagtccacatag

SEQ ID NO: 238140 - DNA, 396 bp, synthetic construct
  misc_feature 1..396: note = Description of Artificial Sequence: Synthetic coding sequence
  source 1..396: mol_type = other DNA
atgtccgccgctatgagggagaggtttgatcgtttcttgcacgaaaaaaactgtatgacggacttgctcgccaagctggaggctaaaacaggagtcaatcgctcctttatcgctctgggcgtgatcgggctggtcgcactttatctggtttttggatatggcgcttcgctcctttgcaacttgattggtttcggttaccctgcctacatttctatcaaagctatcgaaagccctaataaggaggacgatactcagtggttgacctattgggtggtctatggcgtgttctctatcgcagaattcttctcagatattttcctcagttggtttccattctattatatgctgaaggtgtggtcaggattgggttttctcctgcccaggtgtcttctgtag

SEQ ID NO: 238141 - DNA, 1413 bp, synthetic construct
  misc_feature 1..1413: note = Description of Artificial Sequence: Synthetic coding sequence
  source 1..1413: mol_type = other DNA
atgcacttttcaatcccagagacagaatctcggtccggggattctgggggatctgcttacgtggcctataatattcatgtcaacggagttctgcattgtagggtcagatacagtcagttactcggcttgcacgagcaactgcgaaaagagtatggcgctaatgtgctgccagcatttcctcctaagaaactgtttagtctcacgcctgctgaggttgagcagaggcgggagcagctcgagaaatatatgcaggccgtaaggcaagaccctctgctggggtcatctgagacttttaattcctttcttagacgcgcacaacaagaaactcagcaggtgccaactgaggaggtttcactggaagtgctcttatccaacggccaaaaggtgctggttaatgtcctcacttcggatcagactgaagacgtgctcgaagccgtggctgccaaactagatttgcctgatgacttgatcggatacttttctctgttcctcgtgcgcgagaaggaggatggcgctttcagcttcgtaagaaagcttcaggagttcgagctgccctacgtttccgtgacctctctccggtctcaggagtacaaaatcgtcttgcggaaatcctactgggattccgcctatgatgacgacgtaatggaaaatcgggttggcttgaacctcctgtacgctcaaactgtttctgatatagagagaggatggattcttgtgacaaaagagcagcatcggcagcttaaatctttgcaagaaaaggtgagcaagaaagagttcctccgccttgctcagactctgcgacattacggctatttacggtttgatgcttgtgtcgccgacttcccagagaaggattgccctgttgtggtgagcgctgggaatagtgagctcagcctccagttacggcttcctggccaacagctgagggaaggcagcttcagagtgactagaatgcgctgctggcgcgtgacgagttccgtccccctgccatcaggatcaaccagcagccccggacgaggcagaggagaagtgagactggagctggcgtttgagtatctgatgtctaaagaccggctgcagtgggttaccattacctcacctcaagcaatcatgatgtccatttgcctgcaaagcatggtggacgagctgatggttaaaaaatccggaggatccatccggaaaatgctgcggcgaagggtggggggaaccctgcgtaggtctgattcccaacaggctgtgaaaagcccaccattactcgaatctccagatgctaccagggagagtatggtgaagctcagtagcaaattatctgcagtaagccttcgcggaatcggatccccatccaccgatgcaagtgccagtgatgtgcacggcaatttcgcgttcgaagggataggcgatgaagacctctag

SEQ ID NO: 238142 - DNA, 2814 bp, synthetic construct
  misc_feature 1..2814: note = Description of Artificial Sequence: Synthetic coding sequence
  source 1..2814: mol_type = other DNA
atgcaccgccctcggcgtcggggtacccgacctcctctgctcgccctactggctgccctgctgctggctgccaggggtgccgcagcccaggaaactgaactatccgtgtccgcggagttagtacccacgtcatcttggaacatttcgagtgagcttaataaggactcatatctgacactggacgagcccatgaataatataactacctcattgggccagaccgccgagctgcactgcaaggtgtcaggaaaccctcctccgacaatcaggtggttcaaaaatgatgctccagtggtgcaggagcctagacgcctttccttccgctcaacaatctatggatcccgcttgaggattcggaacttggatacgactgacacaggatacttccagtgtgttgcgacgaatggcaaagaagtcgtctcgtcaaccggggtactctttgttaaatttggcccacctcccaccgcttctccaggctactccgatgagtacgaggaagacgggttttgccagccatatcgcggaattgcctgcgccagattcataggtaatcgtacggtgtacatggagtcccttcacatgcagggtgaaatcgagaatcagatcactgcagcctttacgatgattgggaccagctctcatctgtccgacaagtgctctcaattcgccataccttctctatgccactatgcattcccttactgtgacgaaacctcttccgtccccaagccacgcgacctctgtagggacgaatgcgagatcttagaaaatgtcctgtgccagacagagtacatctttgcacgcagtaatcccatgatcctcatgcgcctcaaacttccgaattgcgaggacctgccgcaaccagagtccccagaagctgcaaactgtatcaggatcgggatccccatggcagatcctatcaataaaaatcataaatgttacaattctaccggggttgattaccgagggaccgtttctgtgaccaagagtgggaggcagtgccagccctggaatagtcagtaccctcacacacacacatttacagcactcagattcccggagcttaacggcggacacagctattgtaggaacccaggaaaccagaaggaggcgccatggtgctttactcttgacgagaattttaaatcagacctgtgcgatatacccgcttgtgattctaaagattcgaaagagaaaaacaaaatggagattctctacatcctggtgccaagtgtggcaatccccctcgctatcgccctgctcttctttttcatatgtgtttgtcggaacaaccagaaatcctcatctgcccctgtgcagagacagccgaaacacgtccgtggccagaacgtagaaatgagcatgctgaacgcatataagccgaaaagcaaagcgaaagaactgcctctatctgccgtgcgcttcatggaagagctcggggagtgcgccttcgggaaaatatacaagggccacttgtaccttcctggtatggaccatgcacagctggtggcaatcaaaactctgaaggattataacaatcctcagcagtggaccgagttccagcaggaggcgtcactgatggccgagctgcatcaccccaatatagtctgtctgttgggagccgtgacccaagagcagcctgtgtgtatgctttttgaatacatcaatcaaggagatctacacgagttccttataatgcgaagcccacacagtgacgtgggatgttctagcgatgaggacgggaccgtgaaatcaagtttagaccatggggacttcctgcacatcgcaatccagatagcggctggtatggagtacctgtcctcccacttttttgtgcacaaggatctggccgctcggaacatcctaataggagaacaactgcatgtcaagatctcggacctcggcctgagccgggagatatatagcgccgattactaccgagtgcagtccaagtcacttctacccatcaggtggatgccccctgaggcgattatgtacggaaagtttagctccgactccgatatctggtctttcggcgtggtgctctgggaaatcttcagctttggccttcaaccttattatgggttttctaaccaggaggttatcgaaatggtgagaaaacggcagttattgccctgttcagaggactgtcccccacgtatgtatagcctgatgactgagtgctggaatgagataccgagccggaggcctcgcttcaaggacattcatgtgcgtttgcgatcttgggaaggactgagctcccatacctcatcaacaacaccctccgggggaaacgccacgacccaaacaacaagcctctccgcctctccggtgtccaacctgtccaatcccaggtacccaaactacatgtttccctctcagggtattacaccgcaaggacaaatcgctggttttataggcccaccgataccccagaaccaaagattcatcccgataaatggttaccctattccccctggttacgcggcattccctgccgctcattaccagccaaccggtcctccgagagtaatccaacactgcccccctccaaagtctcgaagcccatcttctgcttctgggtctaccagtaccggacacgtgactagcctcccttctagcggttccaaccaagaggcgaatatacccctccttcctcacatgtcgatccccaaccaccctggcggaatggggatcaccgtttttgggaacaagtcccagaaaccctataaaatcgactctaaacaagcatctttactcggtgacgccaacatccacggacacaccgagtcaatgatttcagctgaactatag

SEQ ID NO: 238143 - DNA, 1182 bp, synthetic construct
  misc_feature 1..1182: note = Description of Artificial Sequence: Synthetic coding sequence
  source 1..1182: mol_type = other DNA
atgcaccgacctcggcgtcgaggcactcggccacccttgctggcactcttagctgcccttctcctggccgctcgcggtgcggctgctcaggagacagagctgtctgtgtcagccgagcttgtgccaacttcctcatggaacatctccagtgagctcaacaaagattcgtacctcacattggacgaacctatgaataatatcacaactagtttgggacagacggctgagcttcactgcaaggtttccgggaatccacctcctaccatacgttggtttaagaacgacgccccagtggtccaggagcctaggcggttatcatttcggagcactatctatgggtctcgattaagaatacgtaacctggatacgacagataccgggtattttcaatgtgttgccaccaacgggaaggaggtggtctcttccacgggcgttctgttcgtaaagttcggcccacctcctacggcttcacccggttacagcgacgagtatgaggaggatggtttctgtcagccctaccggggaatcgcctgcgcacggtttattggcaaccgaaccgtgtacatggaatccctgcatatgcagggggaaatcgagaatcaaataaccgccgcatttactatgatcggcacctcctcacacctcagcgataagtgcagccaatttgccatcccaagcctctgccattatgcttttccttactgtgacgagactagcagcgttcccaagcccagggatctgtgtcgagacgaatgtgagattctagaaaacgtgctttgccagacggaatatatttttgccaggagcaatccgatgatcttgatgagactgaagctaccaaactgtgaggatctgccacaacccgaatcacccgaagcagctaattgtataaggatcggcatccctatggcggatcccataaacaaaaaccacaagtgctataactctaccggagtggactacagaggaacggtgtctgtgacaaagagtggtcggcagtgccagccttggaatagtcagtatccccatactcacacttttaccgctctcaggtttcccgagctcaatggcggtcatagttattgtagaaatccgggtaaccagaaagaagccccttggtgtttcaccctggatgaaaacttcaaatccgacctctgtgacattccagcctgtggtaaatag

SEQ ID NO: 238144 - DNA, 2823 bp, synthetic construct
  misc_feature 1..2823: note = Description of Artificial Sequence: Synthetic coding sequence
  source 1..2823: mol_type = other DNA
agagcccgtgggtgctccgctcggagaaggggcacacgtccgccactcctggctttgctcgcagctctgttactggctgcccgaggcgctgccgcacaggaaactgaactcagcgtctctgccgagttagtgccgacatcctcttggaacatttcctctgagctgaataaagatagctacttgactttggatgaacccatgaacaacattacaaccagtctgggccagaccgctgaactgcattgcaaggtttccggtaatcctcccccaactatccgctggttcaagaacgacgctcccgtcgtgcaggagccaagaagattgagcttccggagcaccatctacggaagcagactacgaatccgtaacctcgacaccacagacactggatacttccaatgcgtggctactaatgggaaggaagtggtgtctagtacaggcgtgctgtttgttaagttcggcccaccccctaccgcatctcccggttacagtgatgagtacgaggaagatggcttttgccagccgtatcggggaatcgcctgtgccaggtttatcggaaatcggacggtctacatggaatcgcttcatatgcaaggagagatcgaaaatcagatcactgccgcattcactatgataggaacttcctcgcacctgagcgataaatgctcacagtttgctatcccctctctgtgtcactacgctttcccctattgtgacgagacaagcagcgtccccaaaccccgagatctgtgcagggacgaatgcgaaattctggagaatgtcttatgccaaacagaatatatattcgctaggtcaaacccgatgattttgatgaggctaaagctacccaactgcgaagatctgcctcagccagagagcccggaggcagctaattgtattcgcattgggatccccatggccgaccctatcaacaagaatcacaaatgttacaactctaccggagtggactacagaggcaccgtttctgtgacaaagagcgggaggcaatgccaaccttggaacagtcagtacccccacacccacacgtttacagctctacgctttccagagctgaacgggggtcactcctactgtagaaacccaggcaaccaaaaagaggcaccctggtgcttcactctggacgaaaactttaaatccgacttatgcgacattcctgcctgcgactccaaagactccaaagagaagaacaagatggaaattttatatatcctggtaccaagcgtcgccatacctctggcaattgccctcctattcttctttatctgtgtgtgtcgaaacaatcagaagagctcgtccgctccagttcaacgtcaacctaagcacgttaggggtcagaacgttgaaatgagcatgctaaacgcttacaagcctaagagcaaagcgaaagaattgcccctttccgcggtgcgcttcatggaggagctaggtgaatgtgcgttcggtaagatttataagggtcatctgtacttacccggtatggaccatgctcagctcgtggccataaagaccctgaaagactacaataatccacagcagtggacagaatttcagcaggaggcatccttaatggcagaactgcatcaccctaatatcgtctgtctgctcggggctgtgacccaggagcagcccgtgtgcatgctcttcgagtacattaaccagggcgatctccatgagttcctaatcatgaggtcccctcacagcgatgttggatgctcaagcgatgaggatgggaccgtaaagagttccttggaccacggggacttcctgcacatcgcgatccagattgctgcaggtatggaatatttatcaagtcattttttcgttcataaagacctggctgcacgcaacattttgattggagaacagcttcatgtgaaaatttcagatcttggtttgtctagagagatttatagcgccgattattatagggtccaatccaaatctcttctgccaattaggtggatgcccccagaggcaataatgtacggaaagttctcctcagatagtgacatctggtcctttggcgtcgttctatgggaaattttctctttcggtcttcagccatactacggcttcagcaaccaagaagtgatcgagatggtgcgaaagcgccagcttctgccctgcagcgaggattgtccccctagaatgtatagcttaatgactgagtgttggaacgaaatccctagtagaaggccccgtttcaaggatatccatgttaggctcaggagctgggagggattgtcctcacacacctcgagtactacacccagcggaggtaacgccaccacccaaactacttctctcagcgctagcccagtgtctaacctctccaaccctagatatccaaactacatgttcccaagtcagggtatcacccctcagggccagatcgcaggctttattggccctcccatacctcagaaccagcgtttcattcccatcaacggatacccaatccctcctgggtacgctgctttcccagccgcacattaccaacccacagggcctccaagagttatacagcactgcccacctcctaagtccaggtctccttcatccgcttctgggagcaccagtacggggcacgtaactagtctgcctagttctggtagcaaccaggaagcaaatatccctttactgccccacatgtcaattcctaaccaccccggaggcatgggtatcacagtattcggtaacaaaagccagaagccctacaaaattgactccaaacaggcgtcccttctgggggatgccaacattcacgggcacacggagtccatgataagcgccgaactgtag

SEQ ID NO: 238145 - DNA, 1167 bp, synthetic construct
  misc_feature 1..1167: note = Description of Artificial Sequence: Synthetic coding sequence
  source 1..1167: mol_type = other DNA
atgctgttcgagtacattaaccaaggagatctccacgagttcctaatcatgcgcagtccccacagcgacgtgggttgctcctcagatgaagatgggacggttaagagctctttagaccacggagacttcctccatattgctatacagattgctgcaggcatggagtacctgtccagccatttcttcgtgcacaaggacctagccgctcggaatattcttatcggcgaacagcttcatgtcaagatttccgacctgggtttgagccgcgagatttattcagccgattactatagagtgcagtcaaagtcacttttgcccatcagatggatgcccccagaggcaatcatgtatggaaagttcagctcggacagtgatatatggtcttttggagtcgtcctatgggagatctttagttttggactccagccctattacggctttagcaaccaagaggttattgagatggtgcgaaagcgccagctattgccttgttcagaagactgcccccctcgcatgtactctctgatgaccgagtgctggaacgaaatcccctctaggagaccacgttttaaagacatccacgtgcgcctccgtagctgggaaggcctgagcagccacacatcaagtaccactccctccggcggtaacgccaccacccagaccactagtctgtccgcaagtccagtcagcaatctctcgaatccacggtacccaaactatatgtttccttcgcagggcattaccccccaaggacaaattgccggtttcattggaccacctatcccacagaatcaaagatttatacctattaatgggtaccccattcctcctgggtatgcggctttccccgcagcccactatcaacccaccggtcccccaagggtgatccagcactgtccgcctcctaagagcagaagccccagttccgcatccggatccactagcacgggacatgtgacctcacttcccagttcaggctcgaaccaggaagcaaatatcccccttctgcctcacatgagcatccccaaccatcctgggggtatgggtatcactgtgtttgggaacaaatcccaaaaaccttacaagattgactctaagcaggctagtctactgggtgatgctaacatacatggccacaccgaaagcatgatttccgccgagctgtag

SEQ ID NO: 238146 - DNA, 2832 bp, synthetic construct
  misc_feature 1..2832: note = Description of Artificial Sequence: Synthetic coding sequence
  source 1..2832: mol_type = other DNA
atggcccgtgggagcgcccttccaagacggcctctgctctgcatccccgctgtttgggctgctgccgcactgcttctcagcgtatcccgaacatccggcgaagttgaagtcttagatcctaacgatccacttggtcctctggatggacaggatggaccaataccaactctgaaaggctacttcctgaactttctcgagccggtgaacaacataacaatcgtgcaggggcaaacggccattctgcactgtaaggtggccggaaatccacctcccaatgtgcggtggcttaaaaacgacgcgccagtggtgcaggagccgagacgtattatcattcggaaaaccgagtacgggtcaaggctcaggatacaggatctggacaccactgacactggttactatcagtgcgttgcaacgaatggcatgaagactatcacagccaccggcgtgctgtttgtgcgtcttgggccaacacacagccctaaccataatttccaagacgattatcatgaagacgggttctgtcagccctaccgagggatagcatgcgcacggttcatagggaatcgaacgatatacgtggactctttgcaaatgcagggagaaattgaaaacaggatcacagccgcttttactatgattgggacttccactcatctcagcgatcagtgcagccaatttgcaataccaagtttctgtcattttgtgttccctttgtgtgacgcccgatctcgtactcctaaaccgcgtgagttgtgccgtgacgaatgtgaagtcctggagtcggacctatgcagacaggagtatacaattgcacggtctaaccccctgatactcatgcgcctgcagttgcctaagtgcgaagcgctgcccatgccggagtcgcccgatgcggcaaattgcatgaggattggtatacctgccgagcgtttaggccgatatcatcagtgctataacggctctggcatggactaccgaggcaccgctagcacaactaagtcaggacaccaatgccagccttgggctctccaacacccccattcccaccacctctcatccaccgatttcccggagctggggggaggccacgcttattgtcgcaatccgggaggccagatggaaggaccctggtgttttacacagaacaagaacgttcggatggaactctgcgacgtgccatcctgttccccgagggatagctccaaaatgggaattctctacattctggttccttccatcgccatccccctcgtgatcgcttgtctttttttcttggtgtgcatgtgcagaaacaagcagaaagcctccgcatctaccccccaacgtagacaactgatggccagcccaagccaagacatggagatgcctctgattaaccagcacaaacaggctaaactgaaggaaatcagcctatctgccgtccgctttatggaagagctgggggaggatcgcttcggaaaagtatataagggacacctgtttggacctgcccctggggaacagacccaggctgttgcgattaaaaccctaaaggacaaagctgagggacctttacgcgaggaatttagacacgaggcaatgcttagagccagactgcagcacccaaatgtagtatgcctcctaggtgtcgtgacaaaggatcagccgctgtcgatgatctttagctactgttcccacggtgacttacatgaattcctggttatgcgcagtcctcacagtgatgttggatcaacggacgacgatcgcactgtgaagtccgccttagagcccccagatttcgtacatctggtggcgcagatcgcggctggaatggaatatctgtcaagccatcacgtggtccacaaagacctggctactcgtaacgtattggtatacgataagctgaacgtgaagattagcgacttgggcctattcagggaagtgtacgccgctgattattataagttgctaggaaactccttgctgcccatcaggtggatggcacccgaagccattatgtacgggaagttcagcattgacagtgatatttggtcttacggcgtagtattatgggaggtcttctcttacggccttcaaccgtattgcggatactccaatcaggacgtcgttgagatgattcgcaatcgacaggtcctgccatgtcctgatgactgtcctgcatgggtttacgcccttatgatcgaatgctggaatgagtttccaagccgacgccctagatttaaagatatccatagccgcctgagggcgtggggtaacctgtccaattataacagctctgcacagacttccggggcaagcaacacaacacagacgtcaagcctctctacaagccccgtctctaacgtctctaacgctcggtacgtcggaccaaaacagaaagcaccaccctttccccagccgcaattcattccaatgaagggccaaatcaggcccatggtccctcccccacagctgtatgtgccagtcaacggctaccagccggttcccgcatatggggcttatcttcctaatttctatcccgttcagatcccaatgcagatggcgccacaacaggtacccccacagatggtgcccaaaccaagctctcaccactccggctctggatctacctccactgggtacgtcactacagccccaagcaacacatctatggctgatcgtgccgctctcctgtctgaaggcgcagatgacacgcaaaatgctcccgaggacggggctcagtccactgtgcaggaagcagaggaggaggaagaaggctccgtccctgagacagagcttctgggagactgcgacacactgcaggttgacgaggctcaggttcagttagaagcctag

SEQ ID NO: 238147 - DNA, 1239 bp, synthetic construct
  misc_feature 1..1239: note = Description of Artificial Sequence: Synthetic coding sequence
  source 1..1239: mol_type = other DNA
atgggtcaagatcaaaccaaacagcagatcgaaaaggggctgcagctgtatcagtcgaaccagactgaaaaggctctccaggtctggacaaaagttctcgaaaagtcctccgatctgatggggagattcagggtgctggggtgcctggtgaccgctcattctgaaatgggcagatataaagaaatgctgaagtttgcagttgttcagattgacacagcacgtgaactggaggatgctgactttctgctggaaagttacctcaacttagccaggtctaatgaaaaattgtgtgagttccacaagacaatttcttactgcaaaacatgcctcggcctgcctgggacacgagcaggggcacagctcggcggacaagtttctctttcaatgggtaatgccttcctgggcttaagtgtcttccagaaggccctggagtcattcgaaaaggctctccgttacgctcacaataacgatgacgccatgctagaatgtcgtgtgtgttgtagcctgggtagcttctacgcgcaggtaaaggactatgagaaggctctcttcttcccatgcaaggccgctgaactggtcaataattatggtaagggctggtcgctcaagtatcgcgcaatgagccaataccatatggccgtggcctaccggttactcggcaggttgggaagcgctatggaatgttgcgaggaatctatgaagatcgccctgcagcatggggatcggcctcttcaggctctttgcctcctgtgttttgctgacatacaccggtctcgcggagacctggaaacggcctttcccaggtacgacagcgcgatgtccataatgactgaaattgggaatagattgggccaagtgcaggcacttctcggcgtggcgaaatgttgggttgctcgcaaggcactcgataaggccctcgatgccattgagcgagcccaggatctggccgaggaagtcggtaataagctctctcaactcaagcttcactgccttagtgaaagtatatatcggtccaaaggacttcagagggaactgcgagcccatgtggttcggttccacgaatgtgttgaggaaaccgagctttattgtggcctatgcggggagagtatcggcgagaagaatagccgtctgcaagccctgccatgctcgcatatattccaccttcggtgtcttcagaataacggcacccggtcatgtcctaattgtcggcgatctagcatgaagccaggattcgtatag

SEQ ID NO: 238148 - DNA, 1062 bp, synthetic construct
  misc_feature 1..1062: note = Description of Artificial Sequence: Synthetic coding sequence
  source 1..1062: mol_type = other DNA
atgggccaagaccaaaccaagcagcagatcgagaaggggttgcaattgtaccagtcgaatcagactgaaaaggctctccaggtctggaccaaggtgcttgaaaaatcctctgacctgatggggaggttccgagtgctagggtgtttggtcacagctcatagtgaaatggggcgttataaagagatgctgaagttcgccgtggttcaaattgataccgcccgagagttagaagacgcagattttcttcttgaatcttatctcaatcttgctagatccaacgaaaaactatgcgaatttcataagaccatatcttattgcaagacttgcttgggcttacccggtacgcgggcaggcgcacagctcggtggacaggtgtccttgagtatggggaacgcgtttctgggactatcagtgttccagaaggcgctcgagtccttcgagaaagcgctgagatatgcgcacaataatgatgatgcaatgcttgagtgccgcgtttgctgcagccttggcagtttttatgcacaggtaaaagactatgagaaggcactgttctttccttgcaaggccgctgaactcgtcaacaactatggcaagggttggagcctcaaataccgggcaatgtctcagtaccatatggcagtggcatataggctcctcggaaggctgggcagtgccatggaatgctgcgaggaaagcatgaaaatagccttgcaacatggtgaccgccctttgcaagccctttgcctgctgtgctttgccgacatccaccgctccaggggggacctggagctgtcacaattaaaactacactgtctctccgagtccatatatagatcaaaggggctgcaacgagagttgcgtgcccatgtggtgaggttccacgagtgtgtcgaagagacagaactgtattgcgggctctgcggggagagtatcggcgagaaaaactccaggctgcaggccctgccttgcagccacatatttcacctgcggtgtctgcagaataatggaacgcgttcgtgccccaactgccgccgatctagtatgaagcctggatttgtgtag

SEQ ID NO: 238149 - DNA, 2010 bp, synthetic construct
  misc_feature 1..2010: note = Description of Artificial Sequence: Synthetic coding sequence
  source 1..2010: mol_type = other DNA
atgggtacagccctggtataccacgaagatatgactgccacaagacttttatgggacgaccccgagtgtgaaatcgaacgccctgaaaggctgaccgcggctctcgacaggctcaggcaaagagggctggaacagaggtgtctgcgattaagcgcacgggaggctagcgaggaggaattgggtttggttcattcaccagaatacgtgagcctggtccgcgaaacccaggttctcggcaaggaggaactccaggcactgtccgggcaatttgacgcgatttattttcacccctccactttccactgcgccagactagctgccggagccggactgcagctggtggacgcggtgctgaccggggctgtccagaacggactggctttggttaggccaccaggtcaccacggtcaacgagccgcagcaaatggtttctgtgtgtttaataacgtggccattgcggcagctcacgcaaaacagaagcatggcctccaccgcattttagtggtggactgggatgtacatcatggacagggcatccaatatctctttgaagacgatcctagcgtcctgtacttcagctggcaccggtacgagcacggaaggttttggcccttcctgcgagaatctgacgcggacgctgttgggcgtggacagggcctcggtttcactgtgaatctgccatggaaccaggtcgggatgggcaacgccgactacgttgccgcattcctacatctcctcttgcccctggcattcgaatttgatccagaacttgtgctcgtatctgccggattcgattccgcgattggtgaccctgagggccagatgcaggcaaccccagagtgcttcgcgcacctgacgcaactgcttcaggtcctggcaggtgggcgtgtctgcgcagttttagagggcggataccatcttgaaagcctggccgaatccgtttgcatgaccgtgcagaccctgttaggcgatccagcacctcctttatcaggcccaatggctccctgtcagtcggcactggagagcattcagtccgcccgtgctgcccaggcccctcattggaagagtctgcagcagcaggacgtcacagccgtcccaatgtccccatcctctcactcccctgagggtcggcctccccctttgctccctggaggacccgtgtgtaaggccgcagcatcagcgccatcatcgctgctggatcagccttgtctctgccccgcacccagcgttcgcaccgccgtagctctaaccaccccagacatcacattagtgctgccgccagacgtgatacagcaagaagcttcggctctcagagaagagactgaagcttgggccagaccgcatgagtcacttgcgagagaagaggcactgacagctctcgggaagctcctctacctgctcgatggtatgctggatggtcaagtgaatagcggcatcgccgctacacccgcttccgccgcagccgcaactctggacgttgccgtgcggaggggactgtcacatggcgcacagaggctcctgtgcgttgctctggggcagctcgaccggccaccagatcttgctcacgatgggaggtctctctggctcaacattagaggcaaggaggctgcggctctgtctatgttccacgtttcgactcctcttccagtgatgacaggtggttttcttagttgcattctagggctggtcttaccactcgcctacggcttccagcctgacctggtcctagttgctctggggccagggcatggactccaagggccacacgccgctctccttgcagctatgctccgtggcctcgcaggaggtagagtgctagctctgctggaggagaactcaaccccgcagctggccggaatactggcacgggtgctcaatggggaagccccaccgagcctggggccttccagtgtggccagtcccgaggacgtgcaagcacttatgtacttgcgcggtcaactggaaccgcagtggaagatgttgcagtgtcacccccaccttgtggcttag

SEQ ID NO: 238150 - DNA, 1206 bp, synthetic construct
  misc_feature 1..1206: note = Description of Artificial Sequence: Synthetic coding sequence
  source 1..1206: mol_type = other DNA
atgcagcgttgttggcagggagaccccagagtcagacccaccttccaggagattacctccgagaccgaagacctgtgcgaaaaacccgacgacgaggtgaaagaaacggcccatgacctagacgtgaaatcacctccggaaccccgatccgaggtagttcctgcgagattgaagcgagcctcagctcctacattcgataatgactacagtttgtctgagctgctgtcccagcttgactctggtgtttcccaagccgttgaaggaccagaagaactatctagatcaagtagcgagtctaagctcccttcctctgggtcaggaaagaggctttctggcgtgtcaagcgtggacagtgctttctctagccgcggaagccttagcctgagttttgagcgtgagccttctacttccgatttaggaacgaccgacgtgcaaaagaaaaagctggtcgatgccatcgtctctggggacacgagcaagctgatgaaaattctacagccacaggatgtggacttagccctcgactccggcgctagcctcctgcatctcgccgtcgaggctggccaggaggaatgcgccaaatggctgttgctgaataatgctaatcctaatctgagcaaccgcagggggagtacaccactgcacatggctgtggagagaagggtgcgcggagtggtcgaactgctgctggccaggaaaatcagcgtgaacgctaaggatgaagaccagtggacagccctgcactttgccgctcagaacggagatgaaagcagtactaggctcctgctggagaaaaacgctagcgtgaacgaggttgattttgagggtcgcacccccatgcatgtggcttgccagcacggccaggaaaacatcgtcagaatactgctgagacgcggagtggatgtgagccttcagggcaaggatgcttggcactgcaccacactggccggtccaccagcgcaccgacaagcagccggtcaggctgcgggaggggaatgtgaaaggcccgatgcagggtgggaagatgccatcgcacctggccgaactgctcgcgctttgccaagaggccctcatccacatcgcccagttctaagaaggcagagactccagcctgccggaactgacacaccagccaggccacgacggagaggcacccgtgctcttcccggatgttcctgtatcggagccctcgccaggcgaccttag

SEQ ID NO: 238151 - DNA, 2355 bp, synthetic construct
  misc_feature 1..2355: note = Description of Artificial Sequence: Synthetic coding sequence
  source 1..2355: mol_type = other DNA
atggagggcgacggaggcactccttgggccctggcactgctcaggacattcgatgcgggagaatttacaggttgggagaaggtcggctccggcggtttcggacaagtgtataaagtgcgccacgttcactggaaaacctggctggccataaagtgcagcccttcactgcacgttgacgaccgtgagaggatggagctgctggaggaggctaaaaagatggaaatggcaaagttcagatatatcctcccggtctacggcatctgtcgggagccggtggggcttgtgatggaatatatggagaccggtagcctggagaaactactggcaagtgaacctctcccctgggaccttcgattccggatcattcatgagacggccgtcggcatgaacttcctgcattgtatggcaccaccattgctccacctggacctcaaaccggcaaatatcctcctcgacgcccactaccacgtgaaaatcagcgattttgggctcgccaaatgtaacgggctctcacacagtcacgatctgtccatggatgggttgtttggaactatagcttatttaccccctgaaaggatccgagagaaaagccgcctattcgatacaaagcatgacgtctatagttttgccattgtgatttggggggtcttgacccagaaaaagcctttcgccgacgaaaagaatatcctccacattatggtcaaggtcgtgaagggacatagacccgagctgcctccagtgtgtcgggcacggccaagagcgtgttctcacttgatcaggttaatgcaaaggtgctggcagggcgatccgagggtccgccctaccttccaggaaatcacatcggagaccgaagatctttgtgaaaagccggacgacgaagttaaagaaacagcgcacgacttggacgtcaaaagtccacctgaaccacgctccgaagtagtgcccgctcgtcttaagcgtgcatccgctccaacatttgacaacgattactctctgtccgagctgctgtcccagctagactctggggtgtcccaggctgtggaagggcctgaagagctctcaaggtcttcatctgaatcaaaacttcctagcagtggatccggaaagagattgtccggcgtctcctctgtggatagcgccttttcatccagggggtctctaagcttgtctttcgagcgcgagccaagtacttccgatctggggaccaccgacgtgcaaaaaaaaaaactggtggacgcgattgtcagcggagatacctccaagctgatgaaaatccttcagccccaggatgtcgaccttgctctggattccggggcatctttgctccacctggccgttgaggcgggtcaggaggagtgcgccaaatggctgctcctgaataatgcaaaccctaaccttagcaatagaagaggctctaccccccttcacatggccgtggaacgcagagtccgcggtgtagtggagcttctgcttgccagaaagatttccgtgaatgccaaggacgaagatcaatggaccgcgcttcatttcgccgctcagaatggcgacgagagttcaacacggctgttgctggagaagaacgcatctgtgaacgaggtggatttcgagggcagaaccccaatgcatgttgcctgccagcacggacaggagaacatagtccgcattttgctgcgccgaggggtcgacgttagcctgcagggaaaggatgcttggttacccctgcattatgcagcctggcagggtcaccttccaatcgtgaaactgctcgctaaacaacccggagtaagcgtgaacgctcagaccttggacggcaggacccctcttcacttggcagctcagaggggccactacagagtggccaggatcctgattgatttgtgtagtgatgtgaatgtctgctctctgctggcacagacccccctgcacgttgccgctgaaaccggacacaccagtacagccaggctgctccttcacagaggcgcaggaaaagaagccatgacgtctgatggctataccgcgttacacctggccgctcggaatggccatctagcaacagttaaactactggtggaggagaaggctgatgtcttagcgaggggtcccctgaatcaaactgcgctgcatctcgctgccgctcatggacattctgaggtagtcgaggaactggtgtcggccgacgtgatcgacttgtttgatgagcaaggtctaagtgctctccatctggcagcgcagggaagacacgctcagactgtggagactctgctcaggcatggagcccacattaacctgcagagcctgaaattccaaggaggccacgggccagcggcaaccctgctccggagatctaagacatag

SEQ ID NO: 238152 - DNA, 2499 bp, synthetic construct
  misc_feature 1..2499: note = Description of Artificial Sequence: Synthetic coding sequence
  source 1..2499: mol_type = other DNA
atggagggcgatggcggaaccccctgggcactagcactcctcagaacattcgacgcgggtgaattcactgggtgggagaaggttggaagcggcggattcggccaggtctacaaggttaggcatgtccactggaaaacttggctggctatcaagtgctctccctctctccatgttgacgacagggaacgcatggagctgctagaagaagcaaaaaaaatggaaatggcgaagtttcgctacattctgccagtttacggcatttgccgggaaccagttggattagtcatggaatacatggaaactgggagtctggaaaagttgttggcttccgaacctcttccgtgggatctgcgtttcaggatcatacacgagaccgcagttggcatgaatttcctccactgcatggccccacctctgcttcacctggatcttaagcctgccaatattctgctggatgcccactaccacgttaaaatcagcgacttcggcctagctaagtgcaacggactgtctcacagtcacgatttgtccatggatgggttattcggaaccattgcgtatctgccaccagaacggatccgagagaaaagccgcctgtttgatactaagcatgatgtctatagctttgctatcgtgatttggggggtactgacacagaaaaagccctttgccgatgaaaaaaatattctccatattatggtaaaagttgtgaaaggtcaccgtccagaactgccccctgtttgtagggccaggccacgcgcatgcagtcacttgattcggctgatgcaacgctgctggcagggtgacccccgtgttcggcctacgtttcagggcaacggccttaacggcgagctgatccggcaggttctagccgctcttctgcccgttaccggacgttggcgctctcccggagaaggttttcgtttggagagcgaagtcatcatcagagtaacatgcccccttagctctcctcaagaaattacaagcgagaccgaagacttatgcgagaagcccgacgatgaagtgaaggagaccgctcacgatctcgacgtgaagtcgccacccgaaccgaggagcgaggtggttcccgcaaggctaaagcgggcttcagcccctaccttcgataacgactactctctatccgaactcttgtctcagcttgatagcggtgtgagccaggctgtcgagggccctgaagagctttcacgtagcagcagcgagtcaaagttaccctcctcaggctccgggaagcgtctgtctggtgtatcttccgttgattcagccttttcaagccgaggtagcctctctctcagttttgagagagagccttccaccagtgatctgggcactactgatgtgcagaaaaagaagctggtcgatgctatagtgtcaggagacacgagtaaactgatgaaaatcctgcagccccaagatgtggatctggccctcgacagcggcgctagcttactgcatttggctgtggaagctgggcaggaggagtgcgccaagtggcttctgctcaacaacgctaaccccaatctgtctaaccggaggggttccacacctctgcatatggctgtcgagcgccgagtgagaggggtagtggagctgctgctcgccaggaagatctctgtgaatgccaaagacgaggaccagtggaccgccctgcacttcgcggcacagaatggcgatgaatcctccacccggttattgctggagaaaaatgcatccgtgaatgaggtggacttcgaaggaagaacgcctatgcacgtggcgtgccagcatggccaggagaacattgtccggattctgttgaggcgaggtgttgacgtgtccctgcaaggcaaggacgcctggctacccttgcactatgcagcctggcaggggcatttgcccattgtaaaactgctggctaagcagcccggagtatctgtgaacgcacagaccttagacgggaggactccactgcatctggcagcccagcggggtcactaccgcgtggccaggatccttatcgacctgtgctccgatgttaacgtgtgtagcctgctggcccaaacacctctgcacgtggccgcagagacgggccatactagcactgctaggttgctcttgcaccgaggagccggaaaggaggcaatgacgtcagatggctatacggctctccacctggctgctcgtaatggccacctggccaccgtgaagcttctggttgaggagaaagccgatgtcctggcaagaggacccctgaaccagacagcactgcacctggccgcagcacacggccactcagaagtggtggaggagctggtctccgcggacgttatcgacctgttcgacgagcagggactcagcgcactccacctggctgcgcaaggcagacatgctcagacagtagaaactctcctacgacatggtgctcacatcaatctacagagccttaagtttcaagggggtcatggtcccgctgcaactctcctgcggcgtagtaaaacatag

SEQ ID NO: 238153 - DNA, 2166 bp, synthetic construct
  misc_feature 1..2166: note = Description of Artificial Sequence: Synthetic coding sequence
  source 1..2166: mol_type = other DNA
atggagctgctagaagaggccaaaaaaatggagatggcaaagttccggtatattcttcccgtttacggcatctgcagagagcctgtaggactggtgatggaatacatggagaccgggagcctggagaaattgttagcctcagaacctttgccatgggatctccggttcaggatcatccacgaaacagctgtgggaatgaactttctgcactgcatggctcccccactattgcatttggaccttaagccagccaatattctgctcgatgcccattatcatgttaagatatccgattttggcttggccaaatgtaacggcttgtcccactcccacgatctaagcatggacggcctctttgggactatcgcctacctcccacccgagcggatccgggaaaagtctcgactgttcgacaccaagcacgacgtctactctttcgccattgttatctggggagtcctgactcagaagaaacccttcgctgacgaaaaaaacatcctccatattatggtgaaagttgtcaaagggcatcgacccgagctgcctcctgtgtgcagggcacgtccacgcgcatgttcccacttgatccgcctcatgcagcgatgctggcagggtgatccaagggtgcggcctactttccaggaaatcacttccgaaacagaagatctatgtgaaaagcctgacgacgaggttaaggaaactgctcacgatctggatgtgaaatcccctccagagcctcgaagcgaggtcgtaccagccagactgaagagagccagtgcacctactttcgacaatgactatagcctgtccgagttactaagtcagctggactcgggcgtctcccaggccgttgagggccctgaagagctctcgagatccagctcggagtcaaaactcccgtcctctgggtccggtaaacgcctttccggggtatctagcgtcgattctgctttcagcagtcgcggaagcctgagcctgagttttgaacgggagccaagtactagtgacctgggaactaccgacgtacagaagaagaaactggtcgacgcgatcgtttcaggtgatactagtaaattaatgaaaatcctgcagccgcaggatgttgacttggccctggattctggtgccagtctgttgcacctggccgtagaagcaggccaggaagagtgcgccaaatggctcttactaaataatgccaacccgaacctgtcgaatcggaggggcagtacgccattgcacatggccgttgaaaggcgagttcgcggagtcgtggaactccttctcgcccgaaagatttcagtgaatgcgaaagacgaagaccaatggactgccctgcattttgcagcgcagaatggggatgagagctcgacaaggctgttgctcgagaagaacgctagcgtaaacgaggtcgacttcgaaggcaggactcctatgcatgtggcctgtcaacacgggcaagaaaacattgtgagaatcttattgcggaggggtgtggatgtgtccctgcagggcaaagacgcctggctgcccttacactacgctgcttggcagggccacctgcctatcgtgaaactcctagccaagcagcctggagtgagtgtgaacgcgcagaccctcgatgggagaacaccgttacacctggctgctcagcgcggtcactatcgcgtggctaggattctgatcgacttatgttcagatgtcaacgtttgttcattgcttgcacaaacccctctgcacgtcgccgctgaaactggtcacacttctacggctcgtcttctgttacatagaggagccggaaaggaggcaatgacatctgacggttatactgcactgcacctggctgcacgtaatggacatttggctacagtgaagttgctcgtggaagaaaaagcggatgtgctggccaggggcccactgaaccagaccgcgctgcatttggcagccgctcacggacactcagaggtggtagaggaactggtctcggccgacgtgatagacctattcgatgaacaaggcctgagcgcactgcacctcgctgctcaaggcaggcacgcacagaccgttgaaacgctgctccggcacggtgcccatatcaatctgcaaagtttaaaattccagggagggcacggccctgcggcaaccctgcttaggcgatcaaagacgtag

SEQ ID NO: 238154 - DNA, 2166 bp, synthetic construct
  misc_feature 1..2166: note = Description of Artificial Sequence: Synthetic coding sequence
  source 1..2166: mol_type = other DNA
atggagctgctcgaggaagctaaaaaaatggaaatggccaagtttaggtacatcctacctgtgtatggaatttgccgcgaacctgtgggtctggtaatggaatatatggagacagggtccctagaaaagcttctggcttctgaaccactgccctgggacctgcgcttccgcattatccatgaaaccgcagtggggatgaattttctgcattgcatggccccacccctgctgcacttagacctaaaacctgccaacatactcctggacgcccactatcatgtgaagatcagtgacttcggtctcgccaaatgtaatggcctgagccactctcacgatttgtcaatggacggattgtttggcaccatagcctacctgccccctgagcgcatacgtgagaaatccagactatttgatacaaagcacgacgtgtactcgtttgcaatcgtgatctggggggtgttgacacagaagaagccctttgcggatgagaagaatatcttgcacatcatggttaaggtcgtgaagggccaccgcccagaacttccccctgtatgccgcgctcgtcctagggcatgctctcaccttattagacttatgcagcgctgttggcagggcgaccctagggtcaggccaacgttccaggaaatcacctctgaaactgaggatctgtgtgagaagcccgatgatgaggtgaaagagactgcccacgatcttgacgtgaagagcccacccgagcctaggagtgaggtcgtgccggcacggctgaaaagagccagcgcccctacttttgacaacgattacagcctgtcagaactcctgagccagctcgatagcggtgtcagtcaggcagtggagggacccgaggagctgtcccgttcctcctccgaaagtaaactcccttcatccggcagcgggaagcggcttagcggcgtgagcagtgttgactcagccttcagctctcgcggttcgctgagcctgtccttcgaacgtgagccttctacttcagacctcgggaccacggatgtccagaaaaagaaactcgttgatgccattgtgtcgggagacaccagtaagcttatgaaaatacttcagccccaggacgtcgatctggcactggactctggcgcttccctgctgcacctggctgttgaagccggtcaagaagagtgcgccaagtggttactactgaataatgccaaccccaacttgtccaacaggcgcggaagcaccccactgcacatggctgtcgagcgtagagtgaggggagtggttgagctcctgttggcccgtaagatttctgtgaatgcaaaggacgaggaccagtggaccgcattgcacttcgccgcacagaatggcgacgaaagcagtactcggctgcttttagagaaaaacgctagcgttaatgaagtcgactttgagggacgaaccccaatgcacgtcgcctgtcaacatggacaggagaacatcgtcaggatccttcttaggagaggagtagatgttagcttgcagggcaaagacgcctggctcccgttgcactacgctgcgtggcaaggtcaccttccaatcgtgaagctcctggcaaaacaacccggagtgtccgtcaacgcccagacactggatggaagaacccctctccacctggcagcacagcgcggtcactatcgggtggcaaggatcctgattgatctttgctcagatgtgaacgtctgttccctgttagcccagactcctctccatgtggcagccgagactggccacacctctacagctaggttattactgcaccgcggtgctggaaaggaagcaatgacatcagatggttacactgcccttcacttggccgctcgcaacggccacttggctacagtgaagctgctcgtcgaagagaaggccgacgtcctggccaggggtcccctgaatcagaccgccctgcacctggccgctgcacatggccactcggaggtggtggaggaattggtgagtgctgacgtgattgatctttttgacgaacagggcctgtcagcgctccatctggcggcacagggtcggcatgcgcagaccgtggagacactcctgagacacggagcccacatcaacctgcagagcttaaagttccaggggggacatggcccagccgctacactcttgaggagaagcaaaacctag

SEQ ID NO: 238155 - DNA, 3132 bp, synthetic construct
  misc_feature 1..3132: note = Description of Artificial Sequence: Synthetic coding sequence
  source 1..3132: mol_type = other DNA
atggctgcctcatttccacccaccctcgggctttccagcgccccagatgagatccaacacccacatattaaattctcggagtggaagtttaaactcttccgggtgaggagtttcgagaaaactcctgaggaagcccagaaggaaaagaaggatagtttcgaaggtaagccatcccttgagcagtccccagctgtgttagacaaagcggacggacagaagcctgttcccactcaacccctcctgaaggcccaccctaagttctcaaaaaaattccatgataacgagaaggctagagggaaggccatccatcaggccaatctgcgccacctctgtcgtatatgtgggaattctttccgagctgacgagcacaataggagatatcccgtgcatgggcctgtcgacggaaagacgctaggtctgcttcgcaaaaaggagaaacgagccacatcatggccagatcttatcgccaaagtcttccgcatagacgtgaaagctgatgtggattctattcatcctacagagttttgccacaactgctggtctattatgcatcgcaagttcagctccgccccttgcgaagtgtactttcccagaaacgtgaccatggaatggcacccacacaccccaagctgtgacatatgcaacactgcccgtagaggcctcaagaggaagagcctacagcccaatttacaattaagtaagaagcttaaaaccgttcttgatcaggcaaggcaagcacgtcagcacaaaagaagagcacaggcccgaatttcttcaaaggatgtgatgaagaaaattgccaactgttccaagatccacctatcgacaaaactcctggcggttgatttccctgaacacttcgtgaagtcgatttcctgccagatctgcgagcacattctggccgaccccgtcgagacaaactgtaaacatgtcttttgtagggtgtgcatccttaggtgcctgaaggttatgggctcatattgtccctcatgcaggtatccctgttttcctaccgatctggaatcaccagtcaagtcttttctcagcgtccttaactctctgatggttaagtgtcctgctaaagaatgtaacgaggaagtctctctggaaaagtataaccaccacatttcttctcacaaggaaagtaaagagatctttgtgcatatcaataaaggcggaagaccacggcaacacctgctctccctgacccggcgagctcagaagcacaggctgagggagctcaaactgcaggttaaggcattcgctgacaaggaggaggggggagacgtaaagtctgtctgcatgacccttttccttctcgctctgagagcacgcaacgaacaccggcaagccgatgagctggaagcaatcatgcagggcaaaggatcagggctccaaccggctgtctgccttgctataagagtcaacacctttctgagttgctctcagtatcacaagatgtatcggaccgttaaagccatcacaggacggcagatctttcaacctcttcacgcattgcgcaatgctgaaaaagtgctcttgccaggatatcatcatttcgagtggcagcctcctttgaagaacgtttcctcttctactgatgtcggcataatcgatggccttagtggcttaagcagtagcgtggatgactacccagtcgacaccattgcaaaacgatttcggtatgatagtgctctggtaagcgcgttaatggatatggaagaggatattctcgaaggaatgagaagtcaggacctggatgactatttaaatggcccttttacggtagtcgtgaaggaaagttgcgatggcatgggagacgtgtccgaaaaacatgggtccgggccagtcgttcctgagaaggctgtgagatttagcttcactatcatgaagatcactatcgcacactcatcacagaacgtcaaggtgttcgaagaagccaaaccaaatagcgagctgtgctgcaaaccgctgtgcctcatgctcgcagatgagtctgaccacgagaccctgacagctattttatcccccctcatcgccgagcgagaagccatgaagtctagtgaactaatgctggagctggggggtatccttcgtacttttaagttcatcttccgcggtacaggatatgatgaaaaactggttagagaggtggaggggctggaagcttccggaagtgtgtatatctgtactctctgcgacgcaacacgacttgaggctagccaaaatctggtgtttcactctataacgagaagccacgcagagaacctggagcggtatgaagtgtggcgttcaaacccttatcacgaatcagtcgaggaactgagagacagggtcaagggcgtttcagctaagccctttatcgagactgttccctccattgacgccctccattgtgacatcgggaatgcggctgagttttacaagatatttcagttggagattggggaggtgtacaagaatcccaatgcaagcaaagaggagcggaaacgctggcaagccaccctcgacaaacatctgcgtaaaaaaatgaatttgaagcccatcatgagaatgaatggcaactttgctaggaagctgatgactaaggagacagtggatgcagtatgcgaactgatacctagcgaggagagacacgaggctctgcgcgagctgatggatttatatctcaagatgaagccggtctggcgatcttcatgccccgctaaagaatgccctgagagcctctgccagtacagctttaattcccagagatttgctgaactgctgtccaccaagttcaaatacaggtacgagggaaaaattaccaattatttccacaaaactctcgcccacgtgcccgagattatcgagcgggatggatccatcggagcttgggccagcgaaggtaacgaaagtggaaacaagttgtttcggagatttagaaagatgaatgcacggcagtccaagtgttacgaaatggaggacgtgctgaaacaccactggctttacacctccaagtatctgcagaaattcatgaatgctcacaatgcacttaagacctctggcttcaccatgaacccccaggcttccctgggagatccattggggattgaagatagtctcgaatcccaggattcaatggagttctag

SEQ ID NO: 238156 - DNA, 1584 bp, synthetic construct
  misc_feature 1..1584: note = Description of Artificial Sequence: Synthetic coding sequence
  source 1..1584: mol_type = other DNA
atgagtcttcagatggtcacagttagtaacaatatcgcactgattcagcccggattcagcttgatgaacttcgacggtcaggtgtttttttttggccagaagggttggccaaaaagatcctgccctaccggcgtgttccatctggacgtaaagcacaaccatgtcaagcttaaaccaaccatcttctctaaagattcttgttacctgccgcctctgcggtaccctgctacctgtaccttcaagggcagtttggagtctgaaaaacaccagtatatcattcatggaggcaagacaccaaataatgaggtgtccgataaaatttacgtgatgagcattgtgtgtaagaataacaaaaaagtaacttttaggtgcaccgaaaaggacctcgtcggtgacgttccagaggccagatatggacacagtatcaacgtggtgtactcgagaggtaagtctatgggtgttttgtttgggggaagatcatatatgccatctacacatcggaccacagaaaagtggaatagcgtagccgattgtcttccatgcgtgtttctcgtcgacttcgagttcggctgtgctacatcttacattctaccagagcttcaggatgggctttccttccacgtgtctattgcgaagaatgataccatctatatactcggaggacactctcttgccaacaatataaggccagctaacttatatagaattagggtcgacctgcctctgggttctcctgcggtgaactgcacagtcctgcccggaggtattagtgtttctagtgccattttaactcagactaataacgacgagttcgtaatcgtcgggggataccagttagaaaaccagaagagaatgatctgcaatattatctctttagaggataacaaaatagaaatccgagaaatggaaaccccggattggacaccggatatcaagcattcgaagatatggttcggcagtaatatgggcaacggaaccgtctttctggggatccccggagacaataaacaggtcgtgtcggaaggtttctacttttacatgctcaaatgcgcagaagacgatacaaacgaagaacaaaccaccttcacaaattctcagacttcaaccgaagaccctggagactcaaccccctttgaggattctgaggaattttgcttctctgctgaggccaattccttcgacggggacgatgagtttgatacatacaatgaagatgacgaagaagacgaaagtgagacgggctattggatcacatgttgtcctacatgtgatgtcgatattaacacgtgggttccgttttatagtactgagttaaacaaaccggctatgatctactgctcccatggcgacggacactgggtacacgcccagtgtatggatctcgctgagaggacgctgatccatttgtctgccggatctaacaaatactattgcaatgaacacgttgaaatagcccgtgcgcttcatacaccgcaaagagtgctgccacttaagaaaccccctatgaaaagcctcagaaagaaaggctccgggaagatcctgacaccggctaaaaaatcgtttttgcgaaggttgtttgactag

SEQ ID NO: 238157 - DNA, 216 bp, synthetic construct
  misc_feature 1..216: note = Description of Artificial Sequence: Synthetic coding sequence
  source 1..216: mol_type = other DNA
atgtctctccagatggtgaccgttagcaataatatcgcgctgatccaacctggattcagcctcatgaactttgatgggcaggtttttttttttggccaaaaaggatggccaaaacgctcgtgtcccaccggggtgttccatttggatgtgaagcataatcatgttaaattgaagccaacgatattctccaaggacagctgctaccttcccccttag

SEQ ID NO: 238158 - DNA, 453 bp, synthetic construct
  misc_feature 1..453: note = Description of Artificial Sequence: Synthetic coding sequence
  source 1..453: mol_type = other DNA
atgtcactgcaaatggtgaccgtttccaacaacattgccctaatacagccgggtttctccctgatgaacttcgatggccaggtgttcttcttcggccagaaagggtggcccaagagatcctgcccaaccggcgtgtttcatttggacgtgaagcataaccatgtgaagctgaaaccaacaatctttagcaaggattcttgctatcttccacccctgaggtaccctgccacatgtactttcaaaggcagcctcgagtctgaaaaacatcagtacattattcacgggggtaagaccccgaacaatgaagtgtcagacaaaatttatgttatgtcaattgtgtgtaagaataacaagaaagtgacttttagatgcactgagaaggacctggtcggcgatgtgcccgaggcccgatatggccatagcattaacgtggtctatagcagaggaaagtag

SEQ ID NO: 238159 - skipped

SEQ ID NO: 238160 - DNA, 1503 bp, synthetic construct
  misc_feature 1..1503: note = Description of Artificial Sequence: Synthetic coding sequence
  source 1..1503: mol_type = other DNA
atggatcacacagaagggtcccctgccgaagagcctccagcccatgctcccagtcctgggaagtttggcgaacggccaccccctaagcgactcacgcgtgaggcgatgagaaattatctcaaggagcgtggcgatcagaccgtgctgatcctccatgccaaagtcgcccagaaatcgtacggcaacgagaagcgcttcttttgtcctccaccgtgcgtttatttgatgggctctggttggaaaaagaaaaaggagcagatggaaagggacggatgctctgagcaggaatcacaaccctgtgcgttcatagggattggcaactcagaccaggagatgcagcagctaaacctcgagggaaaaaattattgcacagctaagacattgtacatttcagactctgataagcgaaaacattttatgctaagcgtcaaaatgttttacggaaatagtgatgacatcggagtgttcttgagcaaacgcatcaaagtcataagtaaaccttcaaagaagaaacaatcattgaagaacgccgatctctgcatcgcaagcggcactaaagtcgctcttttcaatagactgagatcccagactgtgtccacacgttatctgcacgtcgaaggcggtaactttcatgcatcttcacagcaatggggggcattcttcatccatttactggatgatgacgaatcagaaggcgaagaattcaccgtgcgagatggttatatccattatgggcagactgtgaagctagtgtgctccgtgacaggcatggcgttaccaaggctaatcatcaggaaggtagacaagcagacggctctgctggacgctgacgacccggttagccagcttcacaagtgtgccttttacctgaaagatactgagcgcatgtacctgtgcctgtctcaggaacgtatcattcagttccaagccactccatgccccaaagaacctaacaaggagatgatcaacgacggggctagctggacaattattagcactgacaaggcagaatacactttttacgaggggatggggccagttcttgcacccgtcactcccgtccccgttgtggagtcccttcagttgaacggcggtggggacgtcgccatgctcgagcttacgggacaaaacttcacaccaaatctcagggtgtggtttggcgacgtcgaggccgaaaccatgtatcgctgcggcgaatccatgctctgcgtggtgcctgacataagtgcttttcgagaggggtggcgctgggtgcgccagcctgttcaggtccccgtgaccctggtaagaaatgatggtataatttatagtacgagcctcacgttcacttacacacctgagccagggcctcggccacactgcagcgctgccggagccattctcagagctaactcctctcaggtgcccccaaacgagtccaataccaacagcgaaggctcttataccaatgctagcacgaatagtacaagcgtgacatcgtccacagctactgtggtgtcttag

SEQ ID NO: 238161 - DNA, 1461 bp, synthetic construct
  misc_feature 1..1461: note = Description of Artificial Sequence: Synthetic coding sequence
  source 1..1461: mol_type = other DNA
atggcctggatcaagagaaaattcggtgaacgacccccaccaaagcggctaacgcgggaagcaatgagaaactacttgaaggagcgtggtgaccagaccgttctcattttgcatgcgaaagtcgcccaaaagtcgtatggaaatgagaaaaggtttttctgcccaccaccctgtgtttacttaatgggatcaggttggaaaaagaagaaggagcagatggaacgagacggctgctccgagcaggaatcacagccctgtgccttcattggcattgggaactcagaccaagaaatgcagcagttgaacctcgaggggaagaactactgtacagccaaaactctgtacatctctgattccgataagagaaagcactttatgctgtctgttaaaatgttctatggcaactccgacgacatcggggtgtttctgagtaaaaggatcaaggtaatcagtaaaccttcaaagaaaaagcaaagtttaaaaaatgctgacctgtgcatagcctccggcaccaaggtggcactgttcaacaggctaagatcgcagaccgtgagcacacggtacttacatgtggaaggcggtaatttccatgcgtcgtcgcagcaatggggagccttctttatacatctgctggacgacgacgagtctgaaggtgaggagttcaccgtgagagacggatacattcactacggccaaaccgtgaagctggtgtgcagtgtgactggcatggcattgcccaggctcattatacgaaaggtggataaacagactgccctgctcgacgccgatgatccagtgagccagctccacaagtgtgccttttacctaaaagacacagagagaatgtacctgtgtctatcccaggagcgaattatccagtttcaggcaacgccatgcccaaaggagccaaataaagaaatgataaacgacggagctagctggaccatcatctcgacagataaggccgagtatactttttatgaaggcatgggaccggttcttgccccagtcacacctgttcccgtcgttgaatccctgcagttaaacggcggtggcgatgtcgccatgctggagctgacagggcagaactttaccccaaatctcagagtctggttcggagacgtggaagcagaaaccatgtaccggtgcggtgaaagtatgctgtgcgtagtgcccgatatcagtgcattccgcgagggatggcgctgggtccgccagccagtgcaggtgccagttactttagtaagaaacgatggaattatctattccactagcttaacattcacctatactcctgaacccggtccccgtccacattgcagcgccgcaggcgcaattctcagggccaacagctcacaggtccccccaaacgaaagtaacacaaattcagaaggatcctataccaatgcaagtaccaactcaacatcggtgacctcctctaccgccacagtagtcagttag

SEQ ID NO: 238162 - DNA, 1458 bp, synthetic construct
  misc_feature 1..1458: note = Description of Artificial Sequence: Synthetic coding sequence
  source 1..1458: mol_type = other DNA
atggggggttgcagaaagtttggcgagcgccctccccctaagagactgacccgcgaagccatgaggaactaccttaaagaacgcggagaccaaaccgtcctgatcctccatgccaaggtcgcacagaagagctacggaaatgagaagaggttcttttgtcccccaccctgtgtgtacctgatgggtagtggctggaagaagaagaaagaacaaatggaacgcgatggttgttctgagcaggaaagccagccctgcgccttcattgggatcggcaactcagaccaagaaatgcagcagcttaacctggagggcaagaactactgtaccgcaaaaactctttatatatccgactctgataaacgcaagcacttcatgttgtccgtgaaaatgttctacggtaacagcgacgacattggcgttttcctttcgaaacggattaaggtgattagcaagcctagcaagaaaaagcagtcccttaagaacgcagacctgtgtatcgccagtgggaccaaggtggcactgtttaatagactgcgttcgcaaactgtatcaacgagatatctgcatgtggaaggtgggaatttccatgccagctcccagcagtggggcgctttttttattcacttattggatgacgatgagtcagaaggtgaggaatttacagtaagagatgggtatatccactacggacagaccgtgaaattggtgtgctcagtcacaggcatggcgttgccacggctgatcatcagaaaagtggataagcagacagcgttgttggatgcagatgaccctgtcagtcagctgcacaagtgcgctttttatctcaaggatacagagcggatgtacctttgcctcagccaagagagaatcattcagttccaagcaactccctgcccaaaggaacctaacaaggaaatgattaatgatggcgctagttggactatcattagtactgacaaggcggaatacaccttttatgaaggaatgggccctgtgctggccccagttaccccggtaccggtggtggagagcctccaactcaacggcggtggggacgtcgctatgctcgagctgacaggacaaaactttactcccaaccttagagtctggtttggcgatgtggaggctgaaacaatgtaccgttgtggggagtctatgctatgtgtcgtgcctgacatctccgcattccgcgaaggctggcgatgggtgcggcagcctgtccaggtccctgtgactttggtccggaacgacggtattatctactcgacctccctgacgttcacctatacccccgagccagggccacggcctcactgttcagctgcgggtgccatcttaagagcaaattcttcccaggtaccccctaatgagtctaatactaactctgagggcagttatacgaatgcgagcactaattcaacttctgtcactagctcaaccgccacagtggtcagctag

SEQ ID NO: 238163 - DNA, 1464 bp, synthetic construct
  misc_feature 1..1464: note = Description of Artificial Sequence: Synthetic coding sequence
  source 1..1464: mol_type = other DNA
atggccccagtggtcaccggcaaattcggagaacgccctccccctaagcggctaacacgagaagctatgcggaactacctgaaagaaaggggcgaccagacggtactgatcctccacgccaaggttgcccagaagtcctatgggaacgagaagcgattcttctgccctccaccctgtgtgtatctgatgggaagtggctggaaaaagaagaaagagcaaatggagagagacggatgcagcgagcaagagagccagccttgtgccttcattgggatcggaaacagcgatcaggaaatgcaacagctaaacctggagggtaaaaattactgtactgctaagactctgtatatcagtgatagcgacaagaggaagcatttcatgctgtccgtcaagatgttctatggtaattccgatgacatcggtgtgttcttatctaaacggatcaaggttatatccaaacccagcaaaaagaaacagtctttgaaaaatgctgacctctgtatcgcttctgggaccaaggtggctctgttcaacagactccgcagccagaccgtgtctacacggtacctgcacgtcgagggaggcaatttccacgcttcatctcagcagtggggcgcattctttatccatctactggatgatgatgagagtgagggggaggaatttacagtgcgggatggatacatccactatggtcagacagtgaagctagtttgctcagtcactgggatggcccttcccagacttatcattcgtaaagtagacaagcagaccgccctgctcgatgccgacgaccctgtcagccagctgcacaagtgtgcgttctatctgaaagataccgagcggatgtacttgtgcctgtcacaggagagaatcatccaattccaggccactccttgccccaaagaaccaaataaggaaatgatcaacgacggcgcaagttggacaataatcagtactgacaaggcagagtatactttttacgaggggatggggcctgtattggccccagtgacacctgtgcccgttgtggagagtttacaactgaatgggggaggcgatgtggcaatgttggaactaacagggcagaacttcaccccgaacctgcgggtgtggttcggtgatgttgaagcagagactatgtaccgttgtggagagagcatgctttgcgtcgtgccggacatctccgcgttccgggaaggctggcgctgggtgaggcagcctgtccaagtcccagtgactttggtgaggaatgacgggatcatctactccacttcattaaccttcacttacacacccgagcccggtcctaggccgcattgctccgccgctggggcaattctgcgtgctaactcttcccaggttccacccaacgaaagtaacaccaatagtgaggggtcttacaccaacgccagtaccaactccacaagcgtcacgtcctccacagccaccgtggtgtcttag

SEQ ID NO: 238164 - DNA, 1461 bp, synthetic construct
  misc_feature 1..1461: note = Description of Artificial Sequence: Synthetic coding sequence
  source 1..1461: mol_type = other DNA
atggcttggataaaacggaaatttggcgagcgaccccctccaaagagacttactagggaagcgatgcgtaactacttgaaggaacgcggtgaccagaccgttctgattctgcatgcaaaggtggcacagaaaagctacggcaatgaaaagcgcttcttctgtccacctccatgcgtataccttatgggaagtggatggaagaagaaaaaggaacagatggaacgagacggctgtagcgagcaagagtctcagccttgtgcatttatcggaatcggaaatagtgaccaagaaatgcagcaactcaacctggaggggaagaattactgcacagcaaaaaccctgtacatcagtgatagtgacaaacgcaagcacttcatgctgtcggtgaagatgttttatggaaacagtgacgacattggtgtcttcctgagcaaacgaatcaaggtcataagcaaaccaagcaagaaaaagcaaagcctgaaaaatgcagacctctgtattgcctctggaacaaaggtcgctttattcaaccggctaaggtcacaaacagtgtctactaggtacctgcatgtggaggggggaaacttccacgcctcaagccaacagtggggggcattctttatccacctactggatgacgatgagtctgagggtgaagagttcactgtccgagacgggtacatacattacggccaaacagttaaactggtgtgtagtgtgaccggcatggcactgccgagactgataattaggaaagtggacaagcagactgctctgttagacgctgatgatcccgtcagtcagctgcataaatgtgccttctaccttaaagatactgagaggatgtatctgtgcctttcacaggagaggattatacagtttcaagctaccccctgccccaaggaaccaaataaagaaatgatcaacgatggcgcttcttggactattatcagtacggataaagcggaatacaccttttacgaaggtatggggcctgttctcgccccagtcacacccgtccctgttgttgagagcctgcagctcaacggaggaggcgatgtcgctatgcttgagctcacaggacagaattttacccccaatctgcgcgtgtggtttggggacgtagaggcggagaccatgtacaggtgcggggagtccatgctctgcgtggtacctgatatcagcgcctttagagaaggctggagatgggttaggcagcccgtgcaagtgcctgttaccctggttcggaatgacggtatcatctactctacttcgctgactttcacctacacgccagagccaggccctaggcctcactgtagcgcggctggcgctatcttgagggcgaatagctcacaagtgccacctaacgagagcaacaccaatagtgaaggttcctatactaacgccagtaccaactccacctctgtgactagttccactgcaactgtggtctcttag

SEQ ID NO: 238165 - DNA, 1503 bp, synthetic construct
  misc_feature 1..1503: note = Description of Artificial Sequence: Synthetic coding sequence
  source 1..1503: mol_type = other DNA
atggaccacaccgaaggcagcccagctgaggagccacctgcacatgcacccagcccaggcaagttcggagaacgtcccccaccgaaacggctgaccagggaggctatgcgcaactacctcaaggagcgcggagatcagacggttctgattctccatgccaaggtggctcagaagtcctatggtaacgagaagaggttcttctgtccaccgccttgtgtgtaccttatgggctcgggctggaagaagaaaaaggaacaaatggagagagatggatgctcagaacaggaatcacaaccttgcgcttttataggtataggtaactctgaccaagagatgcagcagctcaatctggaggggaaaaattattgcaccgccaagacactctatatcagcgattccgataaacggaaacactttatgctaagcgtgaaaatgttctacggcaactctgatgacattggagttttcttgtcaaaacgcataaaggttatctcaaaacccagtaagaagaaacaaagccttaaaaacgccgatctgtgcatagcatccgggaccaaagttgcgctatttaacaggctgaggagtcagaccgtcagtacccgataccttcacgtggagggtggtaattttcatgcttcatcacagcagtggggcgcttttttcattcatctgctggatgacgatgaaagtgagggcgaggagtttaccgtgagggacggctatattcattacgggcagaccgtaaaacttgtttgctcagtgacggggatggccttgcctcgactgattattagaaaggttgataagcagactgccttgctcgacgcagatgaccccgtctcccaactgcataagtgcgccttttacctgaaggataccgagcggatgtatctgtgcctgtcacaagagaggatcatccaatttcaagctactccctgtcccaaagagccaaacaaggagatgatcaatgacggagcgtcctggacgataatctctactgataaggcagagtacaccttttatgaaggtatgggtccggtacttgcccctgtgacccctgtgccagtggtagagagtctgcaactaaatggcggtggagacgtagccatgctcgagctcacaggccagaattttaccccgaacctgagagtgtggttcggtgacgtcgaagcagagaccatgtaccgctgcggggagtctatgttatgcgtggtcccggatattagcgcgttccgggagggctggcgttgggttaggcagcctgtgcaggttccagtgactcttgtccggaacgatgggataatctatagcacctcattaacatttacatacactcccgagcccggaccgaggccccattgctctgctgcaggcgctattctgcgcgctaacagttctcaggtccctccaaatgagagtaacaccaacagtgagggatcttacaccaatgctagcaccaactctaccagcgtgaccagttccacagccactgtcgtaagctag

SEQ ID NO: 238166 - DNA, 432 bp, synthetic construct
  misc_feature 1..432: note = Description of Artificial Sequence: Synthetic coding sequence
  source 1..432: mol_type = other DNA
atgcgcaattatttgaaagagcgcggagatcagaccgttctcatcctgcacgccaaggtcgcccaaaagtcttacggaaacgagaagcgctttttttgtccacctccgtgcgtctatttgatgggatcaggatggaaaaagaaaaaagagcagatggagagagacgggtgcagcgaacaggagtctcagccttgtgcttttattggaatcggtaactccgatcaggagatgcagcagttgaatctagaaggcaagaattactgtacagcaaagactctatacatctccgactcagataagagaaagcacttcatgctttccgtgaaaatgttttacggaaacagcgacgacatcggagtctttctgtctaaaagaatcaaggtgatttctaagccatcaaaaaagaagcagtctttgaaaaatgcagactag

SEQ ID NO: 238167 - DNA, 87 bp, synthetic construct
  misc_feature 1..87: note = Description of Artificial Sequence: Synthetic coding sequence
  source 1..87: mol_type = other DNA
atggcttggataaaacggaaattcggcgaacgcccaccacctaagcgcttaacgcgggaagccatgcgcaattaccttaaggaatag

SEQ ID NO: 238168 - DNA, 294 bp, synthetic construct
  misc_feature 1..294: note = Description of Artificial Sequence: Synthetic coding sequence
  source 1..294: mol_type = other DNA
atggcgtggataaagcggaagtttggagagaggccaccaccaaagaggctaacccgggaggctatgaggaattacctgaaggagaggggggaccagacagtcctcatcctacacgcaaaagtcgcacaaaaatcctacgggaacgagaaacgattcttttgcccaccaccctgtgtgtacctgatggggtcgggttggaagaaaaaaaaggagcagatggagagagatgggtgctctgagcaggaatctcaaccctgtgccttcatcggcattgggaacagcgatcaagagtag

SEQ ID NO: 238169 - DNA, 1398 bp, synthetic construct
  misc_feature 1..1398: note = Description of Artificial Sequence: Synthetic coding sequence
  source 1..1398: mol_type = other DNA
atgcgcaattatctgaaagagcgcggagatcagacagtcctgattctccatgctaaggtggctcagaagagctacgggaacgagaagaggttcttttgcccaccgccttgcgtgtatctgatgggctcgggatggaaaaagaagaaggaacagatggagagagacgggtgttcggagcaggaatcacaaccatgcgcgttcatagggatcggcaactcagaccaggagatgcagcagttgaacctcgagggaaaaaactattgcaccgcaaagactctgtacatctctgatagcgacaaacgcaagcattttatgttgtccgtcaagatgttttacggaaacagcgacgatatcggagtcttcttatccaagaggatcaaagtcatttctaagccatccaaaaaaaaacagtcactgaagaacgcagatctgtgtattgcttcggggactaaagtggccctcttcaacagacttagaagccagactgtttctacccgctaccttcatgtggaaggagggaatttccatgcctcgtctcagcaatggggagctttctttattcacttactagacgacgacgagagtgaaggagaagaatttaccgtgcgcgacggatatatccactatgggcaaaccgttaagctcgtgtgttcagtgacaggtatggctctccctagattgatcatcaggaaggtggataaacagacggccctcttagacgcggatgatcctgttagccagctccacaaatgcgccttctacttgaaggacacagagcgcatgtatctatgcctgtcacaggaacgaattatccagtttcaagctaccccttgccctaaggaaccaaataaagaaatgatcaacgacggagcatcatggaccattatttcgaccgataaagcggagtataccttttacgaaggcatgggccctgtgcttgcaccagtgacaccagttcctgttgttgaatccctgcagctcaacggcggaggagatgtggccatgctggagttgacaggccagaactttacaccaaacctgcgggtgtggtttggggacgtcgaggctgagaccatgtaccggtgcggcgagagtatgctctgcgttgttcccgatatctccgctttcagggagggctggaggtgggtccgccagccagtgcaagtcccggtgacgctggtacggaatgacggcatcatatatagcacaagtctcactttcacttacacacctgaaccagggcctagaccgcactgcagtgcagccggagctattctccgagccaattcttcacaagtccctccaaatgagtccaacaccaattcggagggcagctacaccaacgcttccaccaatagtacttccgtgacaagttctactgccaccgtggtttcttag

SEQ ID NO: 238170 - DNA, 474 bp, synthetic construct
  misc_feature 1..474: note = Description of Artificial Sequence: Synthetic coding sequence
  source 1..474: mol_type = other DNA
atgagaaattatcttaaagagcggggagaccaaaccgtgctgattctacatgcgaaggttgcccaaaaatcctacgggaacgagaagcgatttttctgtccgcctccttgtgtctacctgatgggaagcggatggaagaaaaaaaaggaacagatggagcgtgacggctgtagtgagcaggagagccaaccgtgcgcattcatcggcattggtaactcagaccaggagatgcagcagctgaatcttgaaggcaagaactactgtactgccaagaccctttatatcagtgacagcgacaagcgtaaacactttatgctgtccgtcaaaatgttttacggaaacagtgacgacattggtgtctttctctcaaaacggataaaagtgatatctaaacccagtaagaagaagcagtcacttaaaaacgccgatctgtgcatcgcctccggtacgaaggttgctttattcaatcgctag

SEQ ID NO: 238171 - DNA, 150 bp, synthetic construct
  misc_feature 1..150: note = Description of Artificial Sequence: Synthetic coding sequence
  source 1..150: mol_type = other DNA
atggcctggatcaagagaaaattcggcgagcgaccaccgcctaagagattaactagggaagccatgaggaattatttaaaggagcgcggtgatcagaccgttctgattcttcacgctaaggtggcccagaagtcatacggtaatgagtag

SEQ ID NO: 238172 - DNA, 324 bp, synthetic construct
  misc_feature 1..324: note = Description of Artificial Sequence: Synthetic coding sequence
  source 1..324: mol_type = other DNA
atggcttggatcaaacggaagtttggagaaaggcctccgccaaagagactcacaagggaggctatgagaaattacctgaaagaacgaggagatcagacggttcttattctgcacgccaaagtggcgcagaaaagttacggaaatgaaaaacgatttttctgtcctccaccatgcgtgtacctgatggggtcaggatggaaaaagaagaaggagcagatggagagggacgggtgttcagagcaggaaagtcagccttgtgcctttattggaatcggtaatagtgatcaggagatgcagcaactgaacctggaaggcaaaaactag

SEQ ID NO: 238173 - DNA, 285 bp, synthetic construct
  misc_feature 1..285: note = Description of Artificial Sequence: Synthetic coding sequence
  source 1..285: mol_type = other DNA
atggcttggatcaagagaaaatttggcgagaggccccctcctaaaagattgacgagggaagcgatgaggaattaccttaaggagagaggtgaccagacagtccttatcttgcatgccaaggttgctcagaaaagctatggcaatgaaaagagattcttttgccccccaccttgtgtgtacttgatgggtagcgggtggaagaagaagaaagaacagatggagcgagacggttgttccgagcaggaatcacagccctgcgctttcattggtatcggaaactcctag

SEQ ID NO: 238174 - DNA, 537 bp, synthetic construct
  misc_feature 1..537: note = Description of Artificial Sequence: Synthetic coding sequence
  source 1..537: mol_type = other DNA
atggaccatactgagggatcaccggcagaagagcctcctgcccacgcgccttcacccggtaagttcggagagcgaccaccgccaaagagactgacgcgagaagcaatgcgcaattacctaaaagagaggggcgaccagactgtgctcatccttcacgctaaagtggcacaaaaatcctatgggaatgagaaacgcttcttctgcccacctccttgtgtctatctaatggggagcggatggaagaagaaaaaagagcagatggagagggacgggtgttctgaacaggaaagtcagccatgcgcttttattggaatcggcaacagtgaccaggaaatgcaacagctaaatcttgaggggaaaaattattgcacggctaaaacactttacatctctgattccgacaaacggaagcatttcatgctctctgttaagatgttctatggaaactccgacgacatcggagtttttctgtcaaaacgcattaaagttattagtaaaccatctaaaaagaagcagagtctcaaaaacgctgactag

SEQ ID NO: 238175 - DNA, 333 bp, synthetic construct
  misc_feature 1..333: note = Description of Artificial Sequence: Synthetic coding sequence
  source 1..333: mol_type = other DNA
atggcctggatcaagaggaaattcggggaacgccctcctcccaagcgtctgacccgggaggcaatgcgcaactatcttaaagaacgtggtgatcagactgtgttaatcctgcacgcaaaggtggctcagaagtcgtacggaaacgagaaaaggttcttttgcccccctccttgcgtttatctgatgggcagtggatggaagaaaaaaaaggagcagatggagagagatgggtgttctgaacaggaatcacagccttgtgcctttataggcatcggaaattccgaccaagagatgcagcagcttaatctggagggtaagaattattgcacctag

SEQ ID NO: 238176 - DNA, 342 bp, synthetic construct
  misc_feature 1..342: note = Description of Artificial Sequence: Synthetic coding sequence
  source 1..342: mol_type = other DNA
atggcctggattaaacgtaagttcggtgagagacccccaccaaagcggctcacacgggaggccatgcgcaactatctcaaggagcggggtgaccagacagtgctgattctgcacgcaaaggtcgcacagaaatcctacggcaatgaaaagaggttcttctgccccccaccttgcgtatacctgatgggctcaggttggaagaagaagaaagagcaaatggagcgtgacggatgttcggagcaggagagccaaccgtgtgcatttatagggatcgggaacagtgaccaggaaatgcagcagttgaacctggaaggaaaaaattactgtacggctaaaacctag

SEQ ID NO: 238177 - DNA, 147 bp, synthetic construct
  misc_feature 1..147: note = Description of Artificial Sequence: Synthetic coding sequence
  source 1..147: mol_type = other DNA
atggcctggataaaacgaaagtttggagagagaccacccccaaaacgcctgacaagagaggccatgagaaactatcttaaggaacgtggcgaccagacagtgttaatcctgcatgcaaaggtggctcagaagtcctacggtaattag

SEQ ID NO: 238178 - DNA, 570 bp, synthetic construct
  misc_feature 1..570: note = Description of Artificial Sequence: Synthetic coding sequence
  source 1..570: mol_type = other DNA
atgcgaaattacttgaaggagaggggtgatcaaactgtcctgattctgcatgcaaaagtggcccagaaatcatatggcaacgaaaagagatttttttgtcctcctccgtgtgtgtatttgatggggagcgggtggaagaagaaaaaagaacagatggagcgggatggctgctctgaacaggagtctcaaccctgcgccttcatcggaattgggaacagtgaccaggagatgcaacaactcaacctagagggcaagaactattgcaccgctaaaacgctgtacatctccgattctgataagcgtaaacactttatgctatctgtcaagatgttctatggcaactcagacgacataggggtgttccttagcaaaaggattaaggtcatatcaaagccttcaaaaaaaaaacagagcctcaagaatgcagacctctgcattgctagcgggacgaaggtggcactgttcaacaggttaaggagccagactgtatctacacggtacctccacgttgaggggggaaacttccacgcatctagtcaacagtggggtgcattctttatccacctgtag

SEQ ID NO: 238179 - DNA, 600 bp, synthetic construct
  misc_feature 1..600: note = Description of Artificial Sequence: Synthetic coding sequence
  source 1..600: mol_type = other DNA
atggctagtgttagcgccttgacagaggagttggattccattacatctgagctgcacgccgtcgagatacaaattcaagagctcacagagaggcagcaggaactcatccagaagaaaaaggtgctgactaaaaaaattaagcagtgcctggaagactccgacgcaggagcttcaaatgagtacgactccagccctgccgcatggaacaaagaagacttcccctggtctgggaaagtgaaggacatcctgcagaacgtctttaaactggagaaattccgacccctgcagcttgagaccatcaatgtaactatggcaggaaaagaagtttttctcgtgatgcctacgggcggaggtaaatcactctgctatcaactccccgcattgtgttcagatggctttactctggtcatctgccccctaatctccctcatggaagatcagctcatggttctgaaacagcttgggatctctgctacaatgctaaatgcctcgagtagcaaagagcacgtgaaatgggtgcatgccgagatggtcaacaagaactcggagttaaagttgatttacgtcacccccgaaaaaatcgctaagtctaagatgtag

SEQ ID NO: 238180 - DNA, 636 bp, synthetic construct
  misc_feature 1..636: note = Description of Artificial Sequence: Synthetic coding sequence
  source 1..636: mol_type = other DNA
atggcatctgtaagcgctttgacagaggaacttgacagtattacctcagagctgcatgcagtggagatccaaatccaggagctgacagagcggcagcaagagctgatccagaagaagaaggtactgaccaagaagataaagcagtgcttggaggactctgatgccggtgcatccaatgagtatgattcctccccagcagcttggaacaaagaggacttcccatggtcaggcaaggtcaaagatatcttgcagaacgtgttcaaattggaaaagttccggcctctgcagctcgagactatcaatgtgacaatggcgggtaaagaggttttcctagtcatgcccacaggtggtggcaaatccctgtgttatcagttgcctgcactttgtagcgatggcttcaccctggtgatctgtcctttgatctccctcatggaggaccagttaatggtactcaaacagctggggatttccgccaccatgctcaacgcctcatcgagcaaggagcacgtgaagtgggtgcatgctgaaatggtcaataagaattctgagctgaagctgatatatgtcacaccagaaaaaatcgccaagtctaaaatgtttatgagccggttagagaaggcctatgaagcacgctag

SEQ ID NO: 238181 - DNA, 1950 bp, synthetic construct
  misc_feature 1..1950: note = Description of Artificial Sequence: Synthetic coding sequence
  source 1..1950: mol_type = other DNA
atggctagtgtatctgcgctgactgaggagctcgattctatcacctcagaactgcatgctgtagagattcaaatacaggaactgacggagcgccagcaagaattgatacagaagaaaaaagtactcaccaagaaaatcaaacaatgtctcgaggattcggacgccggagcgtctaacgaatatgacagttcgcccgcagcatggaacaaggaggatttcccctggtccggcaaagtgaaggacatcctgcaaaatgtattcaagctcgaaaaatttcgtcccttgcagctggagaccattaacgtgaccatggctggaaaagaggttttcctggtgatgccaaccgggggaggaaaaagcttatgttaccagctgcccgctctctgttccgatgggttcacgctcgtgatctgccccctgatttctttgatggaagatcagctgatggtgctaaagcagttagggatctccgccacaatgctgaatgcctcctcttccaaagaacatgtgaagtgggttcatgccgagatggttaacaagaactcggaacttaagctgatatacgtcacccctgagaaaatcgccaaatctaaaatgttcatgtctagactggagaaggcctatgaggccaggcggttcacaaggatcgccgtggatgaggtccattgttgttcccagtggggccacgatttccgacccgactataaagctctcggcatcttgaagagacagtttcctaatgctagcctgattggactgacagcgacagctaccaaccacgttttaactgacgcccaaaaaattctgtgcatcgaaaagtgtttcaccttcacggcttctttcaacaggcccaatctctattatgaggtgaggcagaaaccctcaaacactgaggatttcatcgaggacatcgtaaaactgattaacggtcgctacaaggggcagagcgggattatttattgtttctcgcagaaggactccgaacaggtcaccgtctcactccaaaatctcggaatacacgccggtgcctaccacgctaacctggagcccgaggataagaccactgtgcatcgtaaatggtctgccaatgagattcaggtcgtcgtggcaactgttgcctttggaatggggattgataagcccgacgttaggttcgtgatacaccactcaatgtccaaaagtatggagaactactatcaggaatcaggacgggcaggacgagatgatatgaaagctgattgtatactctactacggattcggtgacatcttccgcattagctctatggttgtaatggagaacgtggggcagcaaaagctgtatgagatggtgtcgtattgtcaaaatatctccaagtgtagacgtgtgctgatggcccagcattttgatgaggtgtggaattcggaggcttgtaacaagatgtgcgataattgctgtaaagattcggccttcgaacgcaaaaatatcacagagtactgcagggatcttattaaaatcctcaagcaggccgaggaactgaatgaaaagctgacaccacttaagttaatagatagctggatggggaagggcgcagccaagctccgagtggccggtgtcgtagcgccaacactgccacgcgaagatctggagaaaattattgcacatttcctcattcagcaatacctcaaagaggattattcattcacagcctatgcgactatcagttacttgaaaatcggcccaaaagctaacctgctgaataatgaggcacatgcgattacaatgcaagttacaaagtccacgcagaattcctttcgcgcagagtcgagtcagacctgtcatagtgaacaaggggacaaaaagatggaggagaaaaatagcggaaattttcagaaaaaggcggctaacatgctccagcagagtggttcaaaaaatacaggcgcaaagaagaggaaaatagatgacgcttag

SEQ ID NO: 238182 - DNA, 1950 bp, synthetic construct
  misc_feature 1..1950: note = Description of Artificial Sequence: Synthetic coding sequence
  source 1..1950: mol_type = other DNA
atggccagcgtgagcgcactgaccgaagaactggactcaatcacgtccgagcttcatgccgtggaaatccagattcaggaattgaccgagcggcagcaggaattgattcagaagaaaaaagtgctaacaaaaaagattaagcagtgcctggaagattcagacgcgggtgccagtaacgagtacgatagtagtcctgctgcctggaataaggaagacttcccctggagcgggaaagtcaaggatatcttgcagaacgttttcaaactagagaagtttaggccactccagctagagacaatcaatgtgaccatggctggcaaagaagtctttctggtgatgcccacgggtggcggtaaatccctgtgttatcagctgccagcgctgtgttctgatggcttcaccctggttatttgccctctcatttcattaatggaagaccagctcatggtgcttaagcaactggggatctcagccactatgctgaacgcttcatccagcaaggagcacgtcaaatgggtgcacgccgaaatggtgaataagaattctgagcttaaattgatttatgttactccagagaaaatcgcgaagagtaaaatgttcatgagcagactggagaaggcctatgaagcacgaagattcacccgtatcgcagtcgacgaagtacactgctgctctcaatgggggcacgactttcgccctgactataaggctctgggcatcctcaagagacaattccccaatgcctccctaatcggactgaccgccactgcaaccaatcatgtgttgacggacgcacaaaagatcctgtgcatagaaaagtgcttcacctttacagcctcttttaaccggccaaatctgtattatgaagttcggcagaagccaagcaatacagaggacttcattgaggacatagtcaagttgataaatggaagatataagggacagtcagggatcatctattgcttctcgcagaaagacagtgagcaggtgacagtgtccctgcagaacctggggatacacgctggcgcttaccacgccaatctggagcctgaggacaagactaccgttcaccggaaatggtctgccaacgagattcaggtggtggtcgccacagtggccttcggcatggggatcgataagccggacgtcagattcgtcattcaccattccatgtctaaaagtatggagaactactatcaggaatcagggagagccggtcgcgatgacatgaaagccgactgtatactgtactatggcttcggcgatattttccgtattagtagcatggtagtgatggaaaacgtggggcagcagaaattgtatgaaatggtatcatactgtcaaaacatttctaagtgccggagggtgctgatggcccaacactttgatgaggtgtggaattccgaggcctgcaacaaaatgtgtgacaattgttgcaaggattctgcctttgagcggaaaaacattaccgagtattgcagggacctcatcaaaattctgaaacaggccgaagagctgaacgagaagctgacccccctaaaactcatcgatagctggatgggcaaaggtgcagccaaactgagggttgcgggagtggtcgctcccacactcccgcgtgaggatttagagaaaattatcgcacattttttaattcagcagtacctgaaggaggactacagctttacggcatacgccaccatctcctacctgaaaatcgggcctaaagctaatctgctcaataacgaggctcacgccatcaccatgcaggtgactaaaagcacccaaaattcctttagagcagagtcttcccagacatgccattcagaacagggggacaagaaaatggaggaaaagaattccggcaacttccaaaagaaagctgccaatatgctgcagcagtccggatccaagaacaccggcgcaaaaaaacggaaaattgatgacgcttag

SEQ ID NO: 238183 - DNA, 321 bp, synthetic construct
  misc_feature 1..321: note = Description of Artificial Sequence: Synthetic coding sequence
  source 1..321: mol_type = other DNA
atggcctcagtgtccgctttaactgaggaactggacagcataacctcagaattacacgccgtcgagattcaaatccaagagttgacagagcggcagcaggagctgatccagaagaaaaaagttctgacaaaaaaaatcaagcagtgtctcgaggactctgatgcaggcgcttctaatgaatacgactcgagtccagccgcatggaacaaagaagacttcccgtggagcggtaaagtcaaggatatccttcagaacgtgtttaagcttgaaaagtttcgccctttgcagctggaaaccattaacgtgactatggcagggtag

SEQ ID NO: 238184 - DNA, 294 bp, synthetic construct
  misc_feature 1..294: note = Description of Artificial Sequence: Synthetic coding sequence
  source 1..294: mol_type = other DNA
atggcatctgtttctgccctgactgaggaacttgacagcatcacaagcgagctccacgctgtggaaatacaaattcaggagctgaccgaaaggcagcaggagcttattcaaaaaaagaaagtcctcacaaaaaagatcaagcagtgcttggaagattctgatgccggagctagtaacgagtatgactcatcaccagcagcatggaacaaggaggattttccatggtcagggaaggttaaagacatacttcagaatgttttcaagctcgagaagttcagaccattgcagctctag

SEQ ID NO: 238185 - DNA, 219 bp, synthetic construct
  misc_feature 1..219: note = Description of Artificial Sequence: Synthetic coding sequence
  source 1..219: mol_type = other DNA
atggctagcgttagcgcactgacggaagagttggactcaattaccagcgagctgcacgcggtagagatccagatacaggagctcaccgagcgccaacaggaactgatccagaaaaaaaaggtcctaactaagaagataaagcagtgtctagaggacagtgatgccggagcttctaatgaatacgactcttcccctgctgcttggaataaggaagattag

SEQ ID NO: 238186 - DNA, 396 bp, synthetic construct
  misc_feature 1..396: note = Description of Artificial Sequence: Synthetic coding sequence
  source 1..396: mol_type = other DNA
atggccagcgtgtcagctctgacagaggagctagactcaattacctccgagcttcacgcagttgagattcagattcaggaactgaccgagaggcagcaggagctgattcagaagaagaaggtcctcaccaaaaagatcaaacagtgcttggaggactccgacgctggcgcatcgaatgagtatgacagctccccagctgcctggaacaaagaggattttccatggagtgggaaagtaaaagatattctccagaatgtgtttaagctggaaaaatttcgtccactgcagcttgaaactatcaacgtcaccatggctggaaaggaggtgtttctggtgatgcctaccggaggtggcaagtctctttgctaccagctccccgcactctgctcagactag

SEQ ID NO: 238187 - DNA, 2976 bp, synthetic construct
  misc_feature 1..2976: note = Description of Artificial Sequence: Synthetic coding sequence
  source 1..2976: mol_type = other DNA
atgtcctcacatcacaccaccttcccttttgatcctgaacggagagtgaggagcactctgaagaaagtgtttggcttcgattcctttaaaacccccctgcaggagagtgctacaatggctgtcgtgaagggtaataaagatgtgttcgtctgcatgccaaccggtgccggaaaaagtctgtgctatcagttacctgccctattggccaagggcatcactatcgtagtaagcccactcatagccctgattcaagaccaggtggaccacttgctgactttaaaggtgcgagtgtctagcctcaatagcaagttgtcagcgcaagaaagaaaagaactgttggctgatctggaaagggaaaagcctcaaaccaagattctatacatcactccggaaatggcggcttcttccagcttccagccgacattgaatagcctggtcagcagacacctattgtcttatctggtcgtggatgaagcacactgtgtgtcccaatgggggcacgacttccgtcccgattacctcagactcggcgcactccgatccagactagggcatgcaccttgtgtcgcgctgaccgctactgctactccacaggtgcaggaagatgtgtttgcggctctgcacctgaagaagccggtggctatctttaaaacgccatgttttagagcgaaccttttttacgatgtgcagtttaaggagcttatatccgacccttatggaaacctgaaggatttctgcttaaaagccctggggcaggaggccgataaagggttgtctggctgcggaatcgtctattgcagaactcgtgaggcctgtgaacagctggccattgaactgtcatgtagaggtgtcaacgcaaaggcctatcacgccggactgaaggcgagtgagcggactctcgttcagaatgactggatggaggaaaaggttccagtgattgtggccacaatctccttcggaatgggtgtggataaggccaacgtgagattcgtggctcactggaacattgccaagtcaatggccggatattaccaggagtccggaagggccggacgggacggtaagccctcctggtgccgactgtactattcacggaacgatcgcgatcaggtgtcatttctgatccggaaagaggtcgcaaagcttcaggaaaagagaggtaacaaagcctcagataaggccacgattatggcatttgacgcacttgtgacgttctgcgaagaactgggttgtagacacgccgcaattgctaagtacttcggggacgccctccctgcttgtgcaaaaggttgcgatcactgccagaatccaaccgcagtgcgcagacgcttagaggcgctggagcggtcttcctcttggtctaaaacctgtataggaccgtcccagggtaacgggttcgatccagagctttatgagggcggacgcaagggctacggtgacttttcacgatacgacgaaggctccgggggatctggcgatgaggggcgagatgaagctcataagcgagaatggaacctcttctatcagaaacagatgcagttgagaaaaggtaaggacccaaaaatcgaggaattcgtgcctcctgatgagaactgccccctcaaggaggctagttctagacggattcctcgattgaccgtcaaagcacgtgaacactgtctcagactcctcgaggaagcgctgtcgagtaatcgccagtcaacaaggaccgcggatgaggccgacttacgagctaaggccgtcgagctcgagcatgagacttttagaaatgccaaggtagccaatctgtataaggcctctgtcctgaaaaaggttgcagacattcaccgcgctagcaaagatgggcaaccttatgatatgggtggttctgctaagtcctgttcagctcaagctgaaccacccgaacccaatgagtatgacatacctccagccagccacgtgtatagtctgaagccgaaacgggtcggagccggttttcctaagggcagctgtccttttcaaactgctaccgaactcatggaaactacgcgcatccgcgaacaggccccacaacccgagcgcggtggcgagcatgaacccccttcacgaccttgcgggctgctggacgaggacggctctgagcccctgcccggaccgagaggcgaggttccaggcggttcagctcactatggtggcccttcacccgagaagaaggctaagtcttcttccgggggtagctcactggctaaaggaagagcctctaagaagcagcagctgctggcaactgccgcacacaaagactcacaatccatcgcacgatttttttgtcgccgagtggaatcccctgcacttttagctagcgcaccggaggccgagggtgcctgtccaagctgcgagggtgtccaggggccacccatggcccctgagaagtatactggagaggaagacggggcaggagggcacagtcccgctcctccacaaaccgaagaatgcctgcgcgaaaggccttccacctgtcccccacgggaccaggggacgccggaagttcagcccacacctgcaaaagacacatggaaaggcaagagacccagatctcagcaagagaacccagagtcacagccccaaaagcgtcctcgcccatctgccaagcccagcgtggtggccgaagttaagggcagtgtcagtgcctcagaacagggtacccttaatccaaccgctcaggaccctttccagctgagtgcacctggggtgagtcttaaggaagcagctaacgttgtagtaaaatgcctcaccccgttttacaaagaggggaagttcgcttccaaggaactgtttaaggggtttgccaggcacctttcccacctcctcactcagaaaacgagccctgggcgttcagtcaaagaagaagcacagaaccttatacggcacttttttcacggcagagctcgctgcgaaagtgaggcagactggcatggactctgtgggccacaacggtag

SEQ ID NO: 238188 - DNA, 1308 bp, synthetic construct
  misc_feature 1..1308: note = Description of Artificial Sequence: Synthetic coding sequence
  source 1..1308: mol_type = other DNA
atgagcagccatcacactaccttccccttcgatccggagcgacgagtgcgcagcacgctgaagaaggtgttcgggttcgacagttttaagacccctctgcaagagagcgccactatggccgtggtcaaggggaacaaggacgtgtttgtttgcatgccgaccggcgctggtaagtcactgtgttatcagttacccgctctcctggcgaagggaattacaatcgtggtatctccactgatcgctcttatccaggatcaagtggaccaccttctcactctgaaagtgagggttagctcactcaattctaaactgagcgcccaggaacgcaaggaactcttggctgatcttgagcgagaaaaaccccagactaagatcctgtatatcacaccggagatggccgcaagttcatcatttcagccgacccttaactccctggtgagtaggcatctgttatcctatctcgtcgtcgacgaggcccattgcgtgagtcagtgggggcatgatttccgaccggattacttacggttaggcgctctgaggagtcgtctgggccacgccccttgcgtggcgctgaccgctacagctacaccacaagtgcaggaggacgtgtttgctgcgctgcacctgaagaaacctgtggccatattcaagactccatgttttcgcgctaacctgttttacgacgttcaattcaaggagctaatcagcgatccatatggtaatcttaaagatttttgcctgaaggccctggggcaagaggcagataaagggctgagcggttgcggaatagtctactgcagaacccgggaggcttgcgaacagctggcaattgaactctcttgtcggggagtcaatgcaaaggcctatcacgctggcctaaaagcttccgaacgcactctggtacaaaatgattggatggaggagaaagtgccggttattgtcgctacaatttcctttgggatgggcgtagacaaggctaatgttcgctttgtggctcattggaacatagcaaaaagtatggccggttactaccaggagagcggaagggccggtagagacggaaagccatcatggtgccggctatattatagtaggaatgacagagaccaggtttcgtttctgattaggaaggaagtggcgaaattgcaagaaaaaagagggaacaaagcttcagacaaggcaaccataatggcctttgatgctctcgttaccttttgcgaagagctgggcagatggggcagggggcatggaaaaagcttaagggccgcttggtgcagccaggtggtgagcaggcacgccgaactgtag

SEQ ID NO: 238189 - DNA, 1233 bp, synthetic construct
  misc_feature 1..1233: note = Description of Artificial Sequence: Synthetic coding sequence
  source 1..1233: mol_type = other DNA
atgagctctcaccacactactttccccttcgatcccgagagacgggtccggtctaccctcaaaaaggtctttgggtttgatagttttaagacccctctccaggagtctgctacaatggcagttgtgaaggggaataaggatgtgtttgtctgcatgcctacgggcgctggaaaatctttgtgctatcagctgcctgccttgctggcgaaaggaatcacaattgttgtatctcctctaattgccctgatccaggatcaggtcgatcatctactcacactgaaagttagagtctcatctctgaactcaaagttgagtgcccaggaacggaaagaattgctggcagatctggagagagagaagccccagaccaagattctgtacatcacccccgagatggctgcatcctcctcttttcagcctacattgaactcccttgtgtcgagacatctgctcagttacttggtggtcgatgaggcccactgcgttagtcaatggggccacgatttcaggccagactacctccggctgggagccctgaggtcacgcctagggcatgcgccttgtgtcgcgctaaccgccactgcaaccccacaggtgcaggaggacgtgttcgccgctctgcacctcaagaaaccggtcgccatcttcaaaacaccgtgctttcgggcaaacctgttttacgatgtgcagttcaaagaactgatctcagatccatacggcaacctgaaggatttttgcctgaaagcacttggacaggaagcggataagggactgtctggttgcggtattgtttactgtcgcacacgggaagcgtgtgagcagttggccatagaactttcttgcagaggcgtcaatgcaaaggcctatcatgcaggcctgaaggcttccgagaggacactggtccagaacgactggatggaagagaaagttcctgtgatcgtggctaccataagctttggcatgggggttgacaaagccaatgtgcgtttcgttgctcactggaacatcgccaaatctatggctggttactaccaggaatccggcagggccggacgtgacggcaagccgtcctggtgtcggctctactacagtagaaatgatcgggatcaggtctcattcctgattcgaaaagaggtggccaaactgcaagaaaagaggggtaacaaagccagtgacaaggctactattatggcttttgatgcactcgttacattttgcgaggaattaggatag

SEQ ID NO: 238190 - DNA, 3057 bp, synthetic construct
  misc_feature 1..3057: note = Description of Artificial Sequence: Synthetic coding sequence
  source 1..3057: mol_type = other DNA
atgtcatcccaccatacaactttcccatttgatccagagagaagggtgagatcaacactgaaaaaggtcttcggctttgacagcttcaaaacaccactgcaggagtcagctacaatggcagtcgtgaaaggaaacaaggacgtctttgtctgcatgccaacgggcgcaggaaagagtctttgctaccagctgcccgctcttttagctaaagggatcaccatcgtcgtgagtccgttgatcgcactgattcaagatcaggtagatcatctgctgacccttaaggtgagagtttccagcttaaatagcaaactgagcgcccaggagcgaaaagagcttttggcggacctggagcgcgaaaaacctcagactaaaatcctatatatcacacccgaaatggcagctagtagcagcttccagccgactttaaactccttggtcagtaggcacctgctgagctaccttgtcgtggatgaggctcactgtgtcagtcaatggggacatgatttccggcctgactatttgcgcttaggggcattgcggtccaggttgggccacgcgccatgtgtggccttgacagcaaccgctacaccccaggttcaggaagatgtatttgccgctttacacctgaaaaagccagtcgctatcttcaagacaccctgcttcagggcgaatctgttctacgatgtgcagttcaaggagctgatatcagacccttacggcaatctcaaggatttctgcctgaaggccttgggccaagaagccgataagggcttgtcaggctgtggaatagtctactgtcggacgagagaagcttgcgaacagctcgccatagagctctcttgtaggggggtgaacgctaaggcttatcatgctggattgaaagctagcgagaggaccttggtgcagaatgactggatggaggaaaaagtgcctgtcattgtggcaacaatcagctttggcatgggggtggacaaggccaacgtcaggtttgtggctcactggaatattgccaagagcatggctgggtattatcaagaaagcggtcgcgcagggagagatggcaagccatcatggtgccggctgtattattccaggaatgaccgcgatcaggtgagcttcctcattaggaaggaggtcgccaagctgcaggaaaagcggggaaacaaggcctctgacaaagccacaattatggcctttgatgccctagtcaccttctgtgaggagctcggctgtcgccatgcggcaattgctaaatatttcggggatgcgctgcctgcatgcgctaagggctgcgaccactgtcaaaaccccacagcagtacgaaggcgcctggaagcacttgagcgttcgtcttcctggagtaagacatgtattgggccttcacaggggaacggcttcgatcccgaactttacgagggaggcaggaagggctacggtgatttctctagatatgatgagggttccggaggcagcggagatgagggcagggacgaggctcacaagcgagaatggaatcttttctaccagaagcagatgcagctgcggaaaggcaaggatccaaaaattgaggagttcgttcctcccgatgaaaactgcccactcaaagaagcctccagcaggcgcatcccacgtcttactgtgaaagctagggagcattgtctcaggctgttagaggaggcattgagcagcaatcgacagtctacacggacagccgacgaggcagatttaagagccaaggcagtcgaactggagcacgagactttccgcaatgcgaaggtggctaacctgtacaaggcttctgttctgaagaaggtcgccgatattcaccgggctagcaaagatggccagccctacgacatggggggatcagccaagtcgtgctccgctcaagctgaacccccagagcccaatgagtatgatattccacccgcatctcacgtttattcgctaaagcctaaacgagtcggagctggattcccaaagggaagctgtcctttccagactgcaaccgagctgatggagaccaccagaatacgagaacaagcacctcagcccgaacggggaggagagcatgaaccgcctagtaggccctgtggtttactggatgaggatgggtccgaacctttaccgggtccacgtggggaggttccaggaggttccgcacactatgggggtccttcgcccgaaaaaaaggcgaagtcaagcagcggcggtagttcacttgctaaaggaagggcatccaagaagcagcaattgctggcaaccgcagcccacaaggacagtcaatctatcgcacggttcttctgcaggcgcgtggagtcccccgcactgctggcatctgctccggaggctgaaggggcttgccccagttgcgaaggggtgcaaggccctcccatggcgcctgagaagtatacaggtgaggaagatggagccggaggacactcacctgctccaccccagaccgaggaatgcctcagggagcgcccttctacctgccctccacgggatcagggcacccctgaggttcagcctacgccagcaaaggatacttggaaaggcaagagacccagatcacagcaagaaaaccccgaaagtcagccccagaaacgcccaagaccctctgccaagccctctgtggtggctgaagtgaaagggagcgtgtctgcttccgaacaagggacgctgaacccgacggcccaagacccttttcagctgtccgctcctggcgtaagtctgaaggaggccgctaatgtggttgtgaaatgcctgactcctttctacaaggaaggaaagtttgcctccaaggaactgtttaagggtttcgcaaggcaccttagccacctcctaactcagaagaccagcccaggtcggagcgtcaaagaggaggctcagaacctgatacgccactttttccacgggcgagcacggtgcgaatccggtccacacggatgggttttctgggacacgtgtagagggcagaaggtcgaaggagggggagctgccgcaggcagaaggggcagaaaatcaggcccatctccatctagtaaatccggttag

SEQ ID NO: 238191 - DNA, 1761 bp, synthetic construct
  misc_feature 1..1761: note = Description of Artificial Sequence: Synthetic coding sequence
  source 1..1761: mol_type = other DNA
atgtttctggtgcgttgtaggcacgctgccatcgccaaatatttcggagatgccttgcccgcttgcgctaaagggtgtgatcactgtcagaatcccacagccgtccgtaggcgcttggaggcactcgaacggagctcctcttggagcaagacttgcattggtccttctcaaggcaacggcttcgaccctgaactgtacgagggcggaaggaagggatacggagatttcagccgctacgacgaggggtccgggggaagcggggatgagggacgggatgaggcccacaagagggagtggaatctcttttaccagaagcagatgcaactgaggaagggtaaggaccctaaaattgaagaatttgtgccgccagatgagaattgccctctcaaagaggcctctagccgcagaatcccacgactaacagtcaaggccagggagcactgtcttagattactggaagaagccctttccagtaaccgccagtcaactagaaccgctgatgaagcggatttaagggccaaagccgtggagctggaacacgagacatttcgcaacgccaaagtggccaacctgtacaaggcctctgtgctcaaaaaagtagccgatatacatagagcgagcaaggatgggcagccgtacgacatgggaggaagtgcaaaaagttgcagtgctcaggctgagccgcctgaacccaacgagtacgacatccctcctgcatcgcatgtctattccctcaagccaaaacgggttggagcagggtttccgaagggatcttgtccttttcagaccgcgactgaactcatggaaacaactagaatcagggaacaagcgcctcaaccggaaagaggtggcgagcatgagccaccctctagaccgtgcgggttattggatgaagatggttcagagcccctccccggacctcgcggagaggtgccgggaggctccgcacattatgggggaccgtcgcctgaaaaaaaagccaagagtagttccggaggctcctccctagccaaaggtagagcttcaaaaaaacagcagctgcttgccaccgcagcacataaggattcccagagcattgcacggttcttctgtcgcagggttgaaagccctgctctcctagcaagcgctccagaagccgagggtgcgtgtcctagctgcgagggtgtgcagggcccaccgatggcacccgaaaaatacacaggcgaggaagatggggcaggaggacactcgccagctccccctcagactgaagagtgccttagggagaggccatctacctgcccccctagggaccagggcacccccgaagttcagcccacccctgcaaaggacacatggaaaggaaaaaggcctagaagtcaacaagagaacccggaaagccagccacaaaaaagaccacggccttcggccaagccctccgtggtcgccgaggtgaagggatccgtgagtgcatccgagcagggtaccctgaacccaacggctcaggacccgtttcagttgagtgcccctggggtcagcctcaaggaggctgctaatgtggttgtgaaatgcctcacacctttctataaggaagggaaattcgcttccaaggagctgttcaaaggatttgctaggcacctcagccatttactgacccagaagaccagtccagggcgatctgtcaaggaggaagcccagaatctgatcagacattttttccacggcagggccaggtgcgagtctgaggcagactggcacggcctgtgtgggcctcagcggtag

SEQ ID NO: 238192 - DNA, 1200 bp, synthetic construct
  misc_feature 1..1200: note = Description of Artificial Sequence: Synthetic coding sequence
  source 1..1200: mol_type = other DNA
atggcccagcgggctttccctaatccatacgcagattataacaaaagtctcgctgagggctactttgatgccgcagggcgacttactcctgaattttcccagcggttgactaataaaattagagagctcctgcaacagatggaaagaggtttaaagtctgccgaccctagggacggaacaggatataccgggtgggctggcatcgcagttctctacttacatctgtatgatgtgtttggcgatcctgcttatctgcagctcgcccatggctacgttaaacagagtctgaattgcctgaccaaacgatctatcacctttctgtgcggcgacgccggaccattagccgtagccgcagttctttatcataaaatgaataacgaaaaacaggcggaggattgtatcacccggttgatccatttgaacaagattgatccccacgctcctaatgagatgctctatgggagaataggctatatttacgctctgctgtttgtgaataaaaacttcggagtagagaagattccccagagtcacattcagcagatttgcgagacaatcctcacctctggcgagaatctggcccgaaaacgcaacttcaccgccaaaagtccccttatgtacgaatggtaccaggaatactacgtcggagccgctcatggattggccggaatctactattacctgatgcagcctagcttgcaggtcagtcagggcaaacttcacagcttggttaaaccctcagtagactatgtttgccagctaaagtttcctagcgggaactatcctccctgcataggggataatagagacctgctggtgcactggtgccacggtgcacccggagtgatctatatgctcatccaggcctacaaggtattcagagaagaaaaatacctctgcgacgcatatcagtgcgccgatgtgatctggcaatatggactgctgaagaaagggtacggactctgtcatggcagcgcaggcaatgcctacgcatttctgacgttgtataacttgactcaggacatgaagtacctgtatagagcttgcaaattcgcggagtggtgcctcgaatacggtgaacatgggtgccggacccctgacacacctttttccctcttcgaggggatggcaggcaccatctactttctggccgatctgctcgtacccaccaaagctaggtttcccgcattcgagctctag

SEQ ID NO: 238193 - DNA, 528 bp, synthetic construct
  misc_feature 1..528: note = Description of Artificial Sequence: Synthetic coding sequence
  source 1..528: mol_type = other DNA
atgctccctcccatggcgctaccttcggtgtcctggatgctgcttagctgcttgatactcttgtgtcaggtgcagggcgaagaaacacagaaggaattgcctagtcccagaatctcatgtcccaagggatccaaggcttacggatctccttgttatgccctctttctcagccccaagtcctggatggacgccgacctggcctgccaaaagcgcccttcgggcaagcttgtctcggtgttatccggtgcggaaggttcattcgtcagtagtctcgtccggtccatatcgaacagctattcgtatatctggataggcctccatgaccctacacaaggcagcgaacccgacggggatgggtgggagtggtcctccacagacgttatgaattacttcgcgtgggagaagaacccctctaccatccttaaccctggccattgcggtagcttaagtaggagcacaggattcctgaagtggaaagattacaattgcgatgccaaacttccttacgtctgtaaattcaaagattag

SEQ ID NO: 238194 - DNA, 528 bp, synthetic construct
  misc_feature 1..528: note = Description of Artificial Sequence: Synthetic coding sequence
  source 1..528: mol_type = other DNA
atgctgccccctatggctctaccatcggtgtcttggatgctcctcagctgtctcatccttctctgtcaggtgcaaggagaggagactcagaaggaattgccatctcctcggattagctgtcccaaaggctccaaagcctacgggagcccatgttatgccttattcctttccccaaagagctggatggacgcagacctggcatgccagaaaagaccctccggaaaactcgtaagtgttctaagcggggctgagggcagttttgtgagcagcctggtaaggagcatctcaaatagttacagctatatctggattggcttacacgacccaacgcagggtagcgaacctgatggagatggttgggagtggtcttcaaccgacgtgatgaactactttgcctgggaaaagaatccatccactatcttgaacccagggcactgtgggtctctctccaggtcgacagggttcctcaagtggaaggactataactgcgatgccaagcttccttatgtgtgtaaatttaaggattag

SEQ ID NO: 238195 - DNA, 390 bp, synthetic construct
  misc_feature 1..390: note = Description of Artificial Sequence: Synthetic coding sequence
  source 1..390: mol_type = other DNA
atgctcccacccatggcgctgcccagcgtgagctggatgctgctttcctgcctgatcctgctctgccaagtacaaggggaggaaactcaaaaggagctaccctcccccaggatatcttgtccaaaaggctctaaggcctatggatcaccttgctatgctctgttcctgtcacccaagtcatggatggacgccgacggatcagagcctgatggggacggctgggagtggtcctctacagacgtcatgaactactttgcttgggagaagaaccctagcacaatcctgaacccgggacactgcgggagcctgagtcgctcgactggcttcctgaagtggaaggactacaattgtgatgctaagctcccatatgtgtgcaaattcaaggactag

SEQ ID NO: 238196 - DNA, 477 bp, synthetic construct
  misc_feature 1..477: note = Description of Artificial Sequence: Synthetic coding sequence
  source 1..477: mol_type = other DNA
atggcttcgaggtcaatgagacttctactgttgctctcatgtctggcaaagaccggggtcctcggcgatatcataatgcggccatcttgcgctcccggatggttctaccataagtccaattgttacggctattttcgcaaactccgcaattggtccgacgctgagcttgagtgtcagtcttacggaaatggagcgcacctagcctccattctgagcctgaaagaagcatccaccattgctgagtacatctccggctaccagagaagccagcctatttggatcggcctgcacgacccccagaaacgtcagcagtggcaatggatagatggagccatgtacttatacaggtcatggtctgggaagagcatgggcggtaataagcactgcgccgagatgtctagcaacaataattttttgacttggtcatcaaatgagtgtaataaacgccagcactttctttgtaaatatcggccatag

SEQ ID NO: 238197 - DNA, 477 bp, synthetic construct
  misc_feature 1..477: note = Description of Artificial Sequence: Synthetic coding sequence
  source 1..477: mol_type = other DNA
atggccagtagaagtatgaggttgttgctattactcagctgtctcgcgaaaactggcgtcctaggagatatcattatgcgcccttcttgtgctcccggatggttctaccacaagtccaactgctacgggtatttccgcaaattgagaaactggtccgatgcagagttggaatgtcaatcctacggcaatggcgctcatctggcaagcatcttgtctctaaaagaggccagcactattgcggagtacatcagcgggtaccaacgatcgcagcccatttggattggtctgcatgatccgcagaagaggcagcaatggcagtggattgatggggctatgtatctgtaccgatcttggtctgggaagagcatgggtggaaacaagcattgcgccgagatgagctccaataataactttcttacttggagctccaacgagtgcaataagagacagcatttcttatgcaaatacaggccatag

SEQ ID NO: 238198 - DNA, 405 bp, synthetic construct
  misc_feature 1..405: note = Description of Artificial Sequence: Synthetic coding sequence
  source 1..405: mol_type = other DNA
atggcctctagatccatgcggctgctgctgttgttgagttgtctggcaaagactggagtcctcggggacattatcatgaggccatcatgtgcccctggctggttctatcataagtctaactgttacggttacttccggaagcttagaaactggtccgatgcggaagtccggaatctgctgccggcttggcccggactgtcaagagccaaggatcaaccagagccccaaatttctttcgacagcggctcttctgtactgcctggccactacgaggagaagcccctgtggctggtcaaatggagagaagagggctgcgtgttcaatagtttcaactcggtctctattgcggaggccggagctgtctgtcaaacgctggatggattgcaggcccacactgatacttag

SEQ ID NO: 238199 - DNA, 375 bp, synthetic construct
  misc_feature 1..375: note = Description of Artificial Sequence: Synthetic coding sequence
  source 1..375: mol_type = other DNA
atggccagtaggtccatgaggttgctgctgttgctgtcatgcctggccaagacaggcgtacttggagacattattatgagaccctcctgcgcccctgggtggttctaccataagtctaactgctacggatattttagaaagctgaggaactggagcgatgccgagctggaatgtcagtcctacggtaatggagcgcacctcgcctctattctgagcctcaaggaggcttctaccattgccgaatacattagtggataccaaaggtctcaacccatttggatcggtctgcatgatcctcagaagcagcccttaaactcttgtcttttcttcctgtggccttgggaaggtctgccagtagagtctctgctgggttag

SEQ ID NO: 238200 - DNA, 900 bp, synthetic construct
  misc_feature 1..900: note = Description of Artificial Sequence: Synthetic coding sequence
  source 1..900: mol_type = other DNA
atgagcagtattaaaattgaatgtgtcctccccgagaattgtcggtgcggagagtcacctgtctgggaggaagtcagtaattcacttctattcgtggacatccctgccaaaaaagtgtgcaggtgggatagttttacaaaacaggtgcagcgcgttacaatggatgcacctgtgtcctctgtggcattacgacagagcgggggttatgtggccaccatcggaactaagttttgtgcgctcaactggaaggagcagagcgcagtcgttttagctaccgttgacaacgacaagaagaacaatagattcaatgatggtaaagttgaccctgctggcagatacttcgctggtaccatggccgaggagacagcaccagccgtcctggaaagacaccagggtgcactgtattcgctgtttcctgaccaccacgtgaagaagtacttcgaccaggttgacatcagcaatggactggactggagtctcgatcataagatcttctactacatcgatagcttgtcgtactctgttgacgcattcgactatgacctccaaacaggccagatctccaaccggcgaagcgtctacaagctggagaaagaggaacagatccctgatgggatgtgtatcgatgcagaggggaagctctgggtcgcttgctacaacggtggaagagtgatcagacttgaccccgttaccgggaagagactccaaacggtaaaactaccagtcgacaagaccacctcctgctgctttggaggcaagaactattcagagatgtacgtgacttgtgcccgtgacggcatggaccccgaggggctgctcagacagccagaggctggaggaatctttaagatcactgggctgggggtgaaaggaatcgcgccatactcttacgctggatag

SEQ ID NO: 238201 - DNA, 900 bp, synthetic construct
  misc_feature 1..900: note = Description of Artificial Sequence: Synthetic coding sequence
  source 1..900: mol_type = other DNA
atgagcagtatcaagatcgaatgtgtgctccctgagaattgtcggtgtggagaaagcccagtgtgggaggaggtgagtaactccttacttttcgtagacattccggcaaagaaggtatgtagatgggactcatttaccaagcaggtgcagagagtgacaatggacgcccctgttagctctgtggcactccgacaatcaggcggatacgttgctaccatcgggactaaattctgcgcgctcaactggaaagaacagtcagcagttgtcctagccacagtagacaacgataaaaagaacaaccgcttcaacgacggcaaggttgaccctgcaggcagatacttcgcgggaacaatggctgaagaaaccgctcctgccgtgcttgaacgtcaccagggagccctctactccctctttcctgaccaccacgtcaaaaaatatttcgaccaagtagacatatcaaatggtctggactggtctctggatcacaagatcttttattatatcgacagcctgtcctatagtgtcgacgcattcgattacgacctccagacaggccagatctctaaccgcaggagcgtctacaaacttgaaaaagaggagcaaattcccgacggcatgtgtattgacgccgagggcaaactgtgggtagcctgttacaatggaggaagggttatccggctagatcccgtcaccggcaagagactacagaccgtgaaactacccgtggacaaaaccacatcctgttgcttcggcggaaagaactattctgaaatgtacgtgacgtgtgcccgagatgggatggatcctgagggccttttgcgccagccggaagcaggcggtatcttcaagatcaccggattgggcgtgaagggcatagcaccatatagctatgccggatag

SEQ ID NO: 238202 - DNA, 900 bp, synthetic construct
  misc_feature 1..900: note = Description of Artificial Sequence: Synthetic coding sequence
  source 1..900: mol_type = other DNA
atgtcttcgataaagatcgaatgtgtgctgcccgaaaactgccggtgcggagagtcccccgtttgggaagaggtgagtaacagcctactgtttgtggacattcctgccaagaaagtctgtcgatgggatagcttcaccaagcaggtccagcgagtaacaatggatgctcccgtttcttcggtagcactgcgccagagcggaggatacgtggccactatcgggaccaagttctgtgctttgaactggaaagaacaatctgccgtggtgctggccacggtggataatgataagaagaataataggttcaacgatggtaaagtcgatcctgcaggtagatacttcgccggtactatggcagaggaaacagccccagctgttttggaaagacaccaaggcgctctgtattctttgttccccgaccaccatgttaagaaatacttcgatcaggtagatattagcaacggtttagattggtcgctggatcataagatattttactatatcgacagtctctcatattccgttgacgccttcgactatgatctccagaccggacaaatttcaaacaggaggagtgtatataaactggagaaggaagagcagattccagacggaatgtgcatagacgcagagggcaaactgtgggtagcgtgttacaacggcggtagagtgataagacttgacccagtgacaggcaaacgtctccagaccgtgaaacttccagttgacaagactaccagctgctgctttggcggtaagaactactcagagatgtacgttacttgcgccagggacgggatggaccctgagggactgctgaggcagcctgaggcgggaggtatctttaagattacaggcctgggagtgaagggtatcgcaccgtattcctatgccggttag

SEQ ID NO: 238203 - DNA, 684 bp, synthetic construct
  misc_feature 1..684: note = Description of Artificial Sequence: Synthetic coding sequence
  source 1..684: mol_type = other DNA
atgagctcgattaaaatagagtgcgtgcttcccgaaaattgcaggtgtggcgagagcccggtctgggaggaagtgtctaattctctactgttcgtggatatccctgccaaaaaggtttgtaggtgggacagcttcaccaaacaggtccaacgggtgactatggatgcgcctgtgtctagtgtggccctccgccagtccggcggttacgtggcaactatcggtaccaagttctgcgcactaaactggaaagaacagtcggccgtggtgctcgcaacagtcgacaacgacaaaaagaacaatcggttcaacgatggcaaggtggatccagccggtcggtacttcgccgcaaacagaagatctgtttacaagctggaaaaggaagaacagatccccgatggaatgtgtatcgacgccgaaggaaaactttgggtcgcatgttacaatggaggaagggttatcagactcgacccggtgactggcaagcgcctgcagaccgtgaaattgccggtcgacaagaccacaagctgttgctttggaggaaagaattactccgaaatgtatgtgacctgtgcaagagacggtatggatcctgagggcctactgaggcagccagaggctggcggtatttttaaaatcacagggttgggggtcaaaggcattgccccttactcttacgcgggatag

SEQ ID NO: 238204 - DNA, 3876 bp, synthetic construct
  misc_feature 1..3876: note = Description of Artificial Sequence: Synthetic coding sequence
  source 1..3876: mol_type = other DNA
atgagctctgcggtaggtcccaggggaccgcgacccccaactgtgcctccgccaatgcaagagcttccagatttgagtcacctaaccgaggaggagagaaatattattatggcagtgatggacagacagaaagaggaggaagagaaggaggaggctatgctgaaatgtgtcgtgagagacatggccaagcctgctgcatgcaaaacgccacgtaatgcagaaaaccagccccatcagccatctccaaggctgcaccagcagtttgaatcctataaagaacaggtgaggaaaatcggagaggaagccaggcgatatcagggggagcataaagacgatgccccaacttgtggcatctgtcataagacaaagtttgcagatgggtgcggccatctctgctcatactgtcgcacaaagttttgcgcaaggtgcgggggtcgcgtctcactgcgttctaacaatgaggacaagtacgtaatgtgggtctgcaatttatgccggaagcagcaggagattttaacgaaatcaggggcatggttctttggatccggcccacagcaaacctcacaggacgggacactaagcgataccgccacgggggctggatcagaagttccaagagaaaagaaggccaggctacaagagagaagtcggtcccagacccctttgagtactgctgcagcctcttctcaagacgccgctcctccttccgcccctcctgacaggtcaaaaggtgctgagccgagtcagcaggccctgggacctgagcagaagcaagcgtcctcccgctcccggtcagaaccacctcgagaacgcaaaaaaacccctgggctgtccgaacagaacggcaagggggctctgaaaagcgagaggaagcgcgttcctaaaacctccgcgcaaccggtggaaggagccgtggaggaacgcgaacgaaaagagcggcgtgagtcaaggcggctggagaagggacggtcacaggactaccccgatacaccggagaagcgtgacgaaggcaaggccgctgatgaagaaaaacagaggaaagaggaggattatcagactcggtaccgatccgaccctaatctggccagatacccagtgaaacctccccctgaggaacaacagatgcgcatgcacgccagggtctcccgcgctaggcacgagagacggcactccgacgttgcccttccaaggaccgaggctggcgctgccctgcctgagggcaaggcgggtaaaagagcgcctgcggcagcacgcgctagtccgcctgattcccccagagcctattctgcagagaggacagctgagaccagagcacccggtgccaagcagctgaccaaccatagcccccctgccccaaggcatggtccagtcccggctgaagcccctgaacttaaagcgcaggagcccctaagaaagcaatctcgcctggacccgagctcagctgtgttgatgaggaaggctaagagagagaaagtcgagacaatgctccgtaatgacagcctgtcaagcgatcagagcgaaagtgtgcgaccctccccaccaaagccccacaggagtaaacgcggaggcaaaaaaagacaaatgtctgtatcctcttcagaggaggagggcgtgagcactcccgagtacacctcatgtgaggatgtggaactggaatccgagagtgtgtccgagaagggagatctagactactactggctcgatccggcaacttggcacagccgagaaacatcaccaatcagttcgcaccccgtcacttggcaaccatccaaggagggtgaccgcctgattggcagagtcatactcaataagagaacaactatgcccaaagattctggagccctactggggctaaaagttgttggtggcaagatgaccgacctgggaaggttgggcgctttcatcacgaaggtcaaaaaaggaagtctggccgatgttgtgggtcaccttcgtgcgggagatgaagtgctcgagtggaatggtaaacccttacctggcgcaacaaatgaggaagtctacaatataattcttgagtcgaagtctgaacctcaagttgagatcattgtgagtcgtccgatcggggatatcccacgaattcctgaaagctctcatcctcctctcgaatcgagctccagctcttttgagagccagaagatggaacgaccaagcatcagtgtgatttcaccgaccagtcctggcgcactgaaagatgccccacaagttttacctgggcagctgagcgtcaagttatggtatgacaaagtcggccatcaattgattgtaaatgtcctccaggctaccgacctgcctgctcgagtcgacgggcgacctcggaatccctacgtaaagatgtacttcctgcctgaccgctcagacaagtccaaaagacgtacaaagacagtaaaaaagatcttagagccaaagtggaaccagaccttcgtttatagtcatgttcaccgtcgggattttcgagaacgaatgctggagattaccgtgtgggaccagcccagagtacaggaggaagaatcggagttcctaggagaaattcttattgaactcgaaaccgctctccttgacgacgagccgcattggtacaagttgcagactcatgacgagagcagtcttcccttgccacagcccagccctttcatgccgaggcgtcatatccacggcgagagtagctctaagaaactgcagcgctctcagcggatttccgattcagacatatccgattatgaggtggacgatggcatcggcgttgtgccacccggttacagatccagtgctcgagaatctaagtccacgactttgactgtgccagagcagcaaagaaccacacatcacaggtcacggtccgtgtcaccacatcgtggtaacgaccaagggaaacctcgttcgcgattacccaacgttcctcttcagcgctccttggatgagatccaccccaccagaaggtctcgctcccctacaagacaccatgatgccagccggagccctgtggatcataggacacgcgatgtcgattctcagtacctgagtgagcaggacagaatgcatagacagcgctctccaactcagtcaccccctgcagacacatctttctcgtctagacgaggaaggcagttgccgcaggtgcctgtaagatctggctccatagagcaggaaagcggccataaaaagctgaaaagcacaattcagaggtcaactgagacagggatggcagctgagatgcggaagatggtccgccagccctctagggaatcaaccgacggcagtatcaactcctacagctccgagggtaatctgatctttcctggagtgcggctgggcgctgactcacagttctcagatttcttggacggccttgggccagcacagctggtaggcaggcagacactggcaacacctgctatgggcgacattcagatcggcatggaagacaaaaaagggcaactcgaagtggaagtaatccgggcacgctcattgacgcagaaaccaggaagtaaaagcacgccagccccatacgtgaaagtatatttattagagaacggtgcttgtatagccaagaagaagaccagaatcgcgagaaagactctggatccactataccaacagtcgttagtgttcgacgagagtccccaggggaaggtgctccaggtcatcgtgtggggggactacggcaggatggatcataaatgctttatgggcgtcgcccagatcctccttgaggagctggacctcagcagtatggtcatcggctggtataagctttttccacccagttcacttgttgaccccacactcacccctctgaccagaagggcttcccagtcttcgctggaaagtagcaccggcccaccctgtatcagatcttag

SEQ ID NO: 238205 - DNA, 4428 bp, synthetic construct
  misc_feature 1..4428: note = Description of Artificial Sequence: Synthetic coding sequence
  source 1..4428: mol_type = other DNA
atgtctagcgcagtgggcccacgcggtcctagacccccaacggtgccccctccgatgcaggagctgcctgacctgtcacacctgaccgaggaggaacgcaatattattatggcagtgatggaccgtcagaaagaggaggaggaaaaggaggaagccatgctgaagtgcgtggtgagggacatggccaagcccgctgcttgcaagacacccagaaatgcagagaaccagcctcaccagccatccccacgcctccatcagcagttcgaaagctacaaggagcaggtgagaaagatcggtgaggaggctcggcgttatcagggagaacataaggacgatgcgccaacttgtggcatctgccacaaaacaaagtttgcggacggatgcggccacttatgtagttattgcagaacaaaattttgcgctcggtgtggtggccgagtttctctgcgctcaaacaacgaggacatttgtgtcatgtgggtctgtaatctgtgtagaaagcagcaggagatcctcactaaaagtggtgcttggttcttcggctccgggccacagcagacttcacaagatgggacactctccgacacggcaaccggggctggcagcgaagtccctcgggagaagaaggccagactgcaagagagatccagatcccaaacgcccctatctaccgcagctgcatcttcgcaggatgctgctcctcccagcgctccacctgacaggtccaaaggagccgaaccgagccaacaggctttgggaccagaacagaagcaagcgtcctcgcggtccagatctgaaccaccgagggagcgaaagaaaacccccggactgtccgagcaaaacggcaaaggagccctaaagtctgagcgcaagagggtgccaaagaccagcgctcagcccgtggaaggggctgttgaggagcgcgaacggaaagaacggagagaatctcgaaggctagagaaaggcagaagtcaggactatcccgacactcctgagaagcgcgatgaagggaaagcagctgatgaagaaaagcaacggaaagaagaagattatcagactcggtatcggtcagacccaaatctcgctcggtaccctgtcaagcctcctcctgaggaacagcagatgcgaatgcatgcccgagtgtcaagggctcgtcacgaaaggcgacattcggacgtggctctgccccgtaccgaagcaggagcagctctccctgaagggaaggccggaaagcgtgccccagccgcagccagagcctctccaccagactccccccgtgcctattccgccgagcggacagcggagacaagggcgccaggcgctaagcagctgaccaaccactctcctcctgcacccagacacgggccagtacctgccgaggcgccagagctgaaagcccaggagcctttgcgtaagcaatcccgtctggatccatcttccgctgtcctgatgagaaaagctaaacgtgagaaggttgagaccatgctgagaaacgattccctttccagtgaccaaagtgaatctgtgaggccttcgccgcctaagccccataggagcaagcgcggtggcaagaaacgacaaatgagtgtgagctcatccgaggaggaaggagtaagcacgcctgaatatacaagctgtgaggatgtggagctggagtcggagagtgtaagcgagaagggggacctggactactactggttagacccagcaacttggcactctcgtgaaacgagcccaatcagttctcacccagtgacctggcagccctctaaggaaggggatcgcctcatcggcagagtgattctgaataagagaaccacaatgcccaaagactctggcgctctcctggggctcaaagtggtggggggaaagatgactgacctgggtcggttaggagccttcattacaaaagtcaagaaagggagtctggccgacgtggtggggcacttgcgtgctggtgatgaggtgctggagtggaacggaaaaccattgccgggagcgacgaacgaggaggtctataacatcatactcgagtccaagagcgagccacaggtcgaaatcatagtcagcagacccatcggcgatattcccagaattccagaatcttcccacccacccctggagtcatcgtctagtagttttgaatcccaaaaaatggaaaggcccagcatcagcgtgatctctccaacatcccccggagctctcaaggacgccccacaggtattacccggacagctaagcgtcaagctgtggtatgataaggtcggtcaccagctaatcgtgaatgtgctgcaggccaccgacctgcctgcaagggtagacggacggccacggaacccatatgtgaagatgtactttctgcccgatcgatctgataaaagcaaaagaaggactaagacggtcaaaaaaatactggagcctaagtggaatcagaccttcgtttacagtcacgtgcatcgcagggacttcagggaaagaatgctggaaattacagtctgggaccagccgagggtgcaggaagaggagagtgagttcttaggagagattctcattgaactggagacagccctgttggacgatgaacctcactggtacaagctgcaaactcacgatgagtctagccttcctcttcctcagccctccccctttatgcccagaaggcatatccacggtgagagcagtagcaagaaacttcagcgctcacagcggatttcagattccgatatctctgattacgaagtggacgatggtattggcgtcgttccaccaggatacagatcttccgcacgggagtctaagtctaccactctgaccgtgccggaacagcagagaaccacacaccaccgctcacgctctgtctcaccccaccggggtaatgaccaagggaagcctagaagcagacttcctaatgtgcccttgcaacggtctttggatgagattcatccaactcgaaggtctcgcagtcccacccgccaccatgatgccagtagaagccccgtcgaccataggactcgcgatgtggactcccagtatctcagcgagcaagattctgagcttctgatgttgcctcgggcaaaaagaggcaggtcagcagaatgcctgcataccacccgcatgcataggcagcggagtccgacccaatcaccacccgctgacacgtctttttcttctcgccgtgggagacagctgcctcaggtccccgtcaggtcaggctcaatcgaacaggctagtttagttgtggaagagcggacacgtcagatgaagatgaaagtacaccgtttcaaacagaccacaggttctgggtcgtctcaggagctcgaccgagagcaatatagcaaatacaacatacacaaggatcagtacagatcctgcgataatgttagcgcaaaatcctctgacagtgacgtgagcgacgtgtcagctatctcacggactagctccgcatcacgcctcagttcaacaagcttcatgtcagagcagtccgagagacccaggggcagaataagacggatgggcacgtccgggagatctattatgaaatctacctcagtgtctggcgaaatgtataccctggagcataatgacgggtctcagagtgataccgctgtaggaactgtcggcgctggcggaaaaaagcggagaagttccctgagcgcgaaagtcgtcgccattgtgagccggagatcacggtccactagccaattgagccaaacagagtccggacacaagaagttaaaatccactatccaacgatctaccgagaccggtatggctgcagagatgagaaaaatggtgcggcaaccttcccgcgagagcaccgatgggagcatcaatagctactccagcgagggcaatctcattttccccggtgtaaggttgggggctgactcacagttcagcgacttcctggatgggttgggccctgctcagctggtgggacgccagaccctggcaacaccggcaatgggtgacattcaaatcgggatggaggacaagaaagggcagctggaggtcgaggttattcgagctagaagcctgacccaaaaaccaggtagcaagagtacccccgctccttacgtcaaagtctacctgctggagaatggggcttgtattgcaaaaaaaaaaacccgcattgctcggaagaccctcgaccccctctaccagcagagcctggtgttcgatgagtcaccccaaggaaaggttctacaagtgattgtgtggggagattatggacgcatggatcacaaatgtttcatgggcgttgctcaaatcctgctggaggaacttgatctcagctccatggtaatcggatggtataaattatttccaccgtcctccctcgtggatcccaccctgactccacttacgaggcgcgcatctcaatcctctctagaaagctctacgggtcctccctgcatacgcagctag

SEQ ID NO: 238206 - DNA, 4116 bp, synthetic construct
  misc_feature 1..4116: note = Description of Artificial Sequence: Synthetic coding sequence
  source 1..4116: mol_type = other DNA
atgtcttccgcagtcggccctcggggaccccgaccccctacggtgccacccccaatgcaggagctgccggacctctcccacttgacggaggaagagcgaaacataatcatggccgtgatggataggcagaaggaagaagaggaaaaggaggaggctatgcttaagtgcgtggttcgagatatggccaaacctgccgcttgcaaaacacctcggaacgcagaaaatcagccacaccagccctcaccccgattgcaccagcaatttgagagctataaggagcaggtccggaagatcggagaggaagcccgacgttatcagggggagcataaggacgacgccccaacctgcggaatctgtcataagaccaagttcgcagacggctgcggacacctctgttcttactgtcggaccaaattctgtgctagatgcggcggacgcgtgtcactcaggtctaataacgaaaataaaattgttatgtgggtgtgtaatctgtgtaggaaacaacaggaaatcctgaccaagtctggcgcatggttctttgggtctggtccccagcagaccagtcaagacggtacactgagtgacaccgcgaccggagcagggagcgaggtgccaagagagaagaaggcacggcttcaagagagatctaggagccagacaccattatctaccgccgcagcttcttcacaggatgccgctcctcccagtgcccctccagacagaagtaaaggtgcagaacctagtcagcaggcactggggccagagcagaagcaagcctcctcacggtcaaggagcgaaccaccacgcgagcgcaagaagaccccaggcttatccgagcagaatggaaaaggagcactaaaaagcgaaagaaagagagtgccaaagacttccgctcagcctgttgagggtgcagtcgaggagagggaacgaaaggagaggcgggagtcaagacgactcgagaagggccgttctcaggactatcccgataccccagagaaaagggacgaaggtaaggcggcagacgaagaaaagcagagaaaagaagaggattatcagacccgttatagatccgaccctaatcttgcccgatatccagtgaagcctcccccagaggaacagcagatgcgcatgcacgccagagtctcacgcgctcggcacgaacgtcgtcactctgatgtcgcactacccagaactgaggcaggagcagcgctgcccgagggcaaagcagggaaacgtgcccctgccgcagctagagcatcacccccagattcaccccgtgcatactctgccgagcggactgccgaaaccagagctccaggcgcaaaacagttgactaatcacagtcctccagcacctcggcatggcccagtcccggcagaagcccctgagcttaaggcacaggagccattgaggaagcagtcccggctcgatccgagctctgcagtgttaatgagaaaggccaaacgggagaaggtagagactatgctccgtaacgacagtttatcctccgaccagtcggagtccgtgcgtccttctccgccaaaaccccaccggagcaaacgcggaggtaaaaaaagacagatgagcgtcagtagcagtgaagaggagggcgtgtccacccccgaatatacctcgtgtgaggatgttgagctcgaatccgaatcagtgtcagagaagggcgacctcgactattattggctggaccccgctacatggcactcccgggaaacatctcctatctcatctcaccccgttacgtggcagccctccaaagagggagacaggttgatagggagggttatattaaataagaggaccacaatgccaaaggattcaggagctctactgggtctaaaagtggtgggtgggaagatgacagacctggggagactgggcgcatttattacaaaagtaaaaaaaggcagcctggcagatgtcgtcggtcacctccgtgccggtgacgaggtactggaatggaacggcaaaccgctgccaggagcaactaatgaagaggtgtataacattatcctcgagagtaagtcagagcctcaggtcgagataattgtgtcgaggcccattggagacattccaagaatccccgagtcctcccacccacccttagagagctcgagttcaagtttcgagtcgcagaagatggaacgcccttccatctccgtgatctcacctacctcccccggagcattaaaggacgccccacaggtgttacctggtcaattgtctgtaaagctttggtacgacaaagtcggccaccagctaattgttaatgttctacaggccacggatctgcccgcaagggtggatgggaggcccaggaacccttacgttaagatgtacttcctgcccgacagatctgacaaatctaagaggagaacaaaaaccgtgaagaaaatactcgagcctaagtggaaccagaccttcgtctattcacacgtccatcgcagggattttcgtgagaggatgctggagatcacggtttgggaccagccacgcgtccaagaagaggagagcgagtttctgggagaaatcctaatcgagcttgaaaccgctctgctggatgatgaaccccattggtataagttgcagactcacgatgagagcagcttgcctttgccccagcccagtccctttatgcccaggagacacatccatggagaaagcagcagtaagaaactacaaagaagccagaggattagcgatagtgatattagtgactatgaagtcgatgatggcataggagtcgtgccgccagtgggttaccgttccagtgcaagagaatcaaaatccactactttaaccgtgcctgagcaacagcgcactacccatcaccgaagtagatctgtgagcccgcatcgtggaaacgaccaaggcaaacctcgctctcggctgcctaacgtgcctttgcagcgttccctcgacgagatccatccaacaaggcggtcccgctccccgacacggcaccacgacgcctctcggagcccggtagatcaccgtactcgtgacgtcgactctcagtatttatccgaacaagactcagaactgctgatgctgcccagagccaagcgtggacgtagtgctgagtgtctccacactacctcagaattgcagccttttcttgatagggcacgcagcgcctctacaaattgtctccggccagacacatctctccatagccccgagcgggagcgcggtcgttggtccccctctctggatagacgaaggcctccctcaccaaggattcagatccaacatgcaagccccgagaatgatagaatgcatagacaacggtcgcccacacagagtcccccagccgacaccagcttctcgtctcgacgcggaaggcagctgccccaggtgccagtgaggtccggttctatcgagcaggaatcaggtcataagaagttgaaaagcactattcaaaggtccaccgaaacggggatggccgctgaaatgcgaaagatggtgagacaacctagccgggaaagcactgacggctccatcaattcgtacagcagcgagggaaacctgatcttcccaggtgttagactgggcgctgatagccagttcagcgatttccttgatggactggggccagctcagcttgttgggcgtcaaactctagccacaccggctatgggagacattcagatcgggatggaggataagaagggacaactagaggttgaagtcatcagggcaagaagtctcacccagaaacccggttccaaatctacccctgccccatacgttaaggtatacctgctggagaatggggcatgcattgccaaaaagaagacccggatcgctcgcaaaaccctggacccactgtaccagcagtcgctcgtgtttgatgagagtcctcaaggaaaagtactccaagtgatcgtgtggggggattacggccgaatggatcacaaatgctttatgggggtagcacagatcttactggaagagctggatctcagcagcatggtcatagggtggtacaaactcttcccaccctcctctctagtggatcccaccctgactcccctgacccggcgagcctctcaatcctcattggaatcatccactggacccccttgtattcgatcctag

SEQ ID NO: 238207 - DNA, 4626 bp, synthetic construct
  misc_feature 1..4626: note = Description of Artificial Sequence: Synthetic coding sequence
  source 1..4626: mol_type = other DNA
atgagttcagccgtggggcctaggggccctcgtccccctaccgttcctcctcccatgcaagagttacccgacctgagtcacttaactgaagaggagcgaaatataattatggccgtcatggatcggcaaaaggaggaggaggagaaggaggaagcaatgttgaagtgtgtggtgcgagacatggctaagcctgctgcctgcaagactcccagaaacgcggaaaaccagccacaccagcccagccccagattacaccagcaattcgagtcatataaagagcaggttcggaagatcggtgaggaggccagacggtaccagggcgaacacaaggacgacgctcccacctgcggtatttgtcacaaaactaaattcgccgacgggtgcgggcatctgtgcagctactgccgcacaaagttttgcgctagatgcggcggacgcgtgagtcttaggagcaataacgaagacaaatacgtgatgtgggtgtgcaacttgtgcaggaaacaacaggaaatcctcaccaaatctggtgcttggtttttcgggtcagggcctcaacaaacatcccaggacggtactctcagtgacaccgccacaggcgcagggagcgaagtgcccagggagaaaaaagcacgcctccaggagaggagccgttcacagactcctcttagcactgccgctgcatcgtcacaggatgccgcacccccttctgcacctcccgacaggtctaagggcgctgagccctcccagcaagccttgggacccgaacagaaacaggccagttcccgcagccggagtgagcccccaagggaaagaaaaaagactccaggtctgtccgagcagaatggcaagggtgctctaaaaagcgaaaggaagagggtgcccaaaacctctgcacaaccagttgaaggcgctgttgaggaaagagagcgtaaggaacgtcgcgagtctcgcaggcttgagaaaggcaggtcccaggactacccagatactcctgaaaaacgggatgagggtaaggcagcagatgaagagaagcagagaaaggaggaagactaccagacacggtaccgctctgacccaaatctggcccgttatcccgttaaacctccccctgaggagcagcaaatgcggatgcatgcgcgtgttagccgcgctaggcatgaacgtagacacagtgatgttgctcttccccgtacagaagctggcgcagcattaccagagggcaaggcaggtaaaagggcccctgcggctgccagagcgtcccccccagactccccaagagcctactccgcggaacgaacagcggagacgagggcccctggcgctaagcagttgactaatcattcccccccagcgccacgccacggcccagtacccgcagaggccccagagctcaaagcacaggaaccccttaggaaacagtcaagacttgacccatcaagtgccgtacttatgagaaaggccaagagggagaaggtggaaacaatgcttaggaacgactctctaagtagtgaccagtctgaaagcgttcggccaagccccccaaaacctcacagatctaagagggggggaaagaagaggcaaatgtctgtgagcagctcagaagaggaaggagtctccacccctgaatacaccagctgtgaggacgttgagctggagtctgaatctgtgtcagaaaaaggagatttagattactactggttggaccccgcaacctggcactctcgggagacttcgccaatcagctcccatccagtgacttggcaaccaagtaaggagggggataggttaatcggacgcgtcatactaaataaacgtacaacaatgccaaaggactcaggtgctctgttgggcctgaaggtggttggtggaaaaatgaccgaccttggcagactgggagccttcatcacaaaggtaaagaaaggaagtcttgctgacgtggtcggccacctgcgggctggagacgaagtcctggaatggaatggcaagccgctgcctggtgccactaatgaagaagtgtacaacatcatactggagtccaagagtgaacctcaagtggagataatcgtttcgagaccaattggggacatcccgaggatcccagaaagtagtcacccaccactcgagtcaagttctagctctttcgagagccagaaaatggagagaccatcaatttccgtgatctcccctactagccctggtgcacttaaagacgcaccacaagttttgcccggtcagctttccgtgaagctctggtatgacaaggttggtcatcaactgattgtcaatgtgctgcaagctaccgatctgccggctagagtggatggacgtccacgcaacccatacgtcaaaatgtatttcctgccggataggtcagacaagtctaaacggagaaccaaaacagtgaagaagattctggagccgaaatggaatcagacttttgtgtacagccatgtccatcggagagattttcgggaaaggatgttggagattactgtgtgggaccagccacgggttcaggaggaagagtcagagttccttggcgaaattctgattgaactcgaaacggcactgctcgacgatgagccacactggtacaagctacagacacatgatgagtcaagcctgcccttacctcagccctccccgtttatgcccagaaggcatattcacggcgaaagttcatccaaaaagctccaacgctcgcagcgcatttccgattccgatatcagcgattatgaggtggacgatggcatcggcgtggtacccccagtgggttacagaagctccgcgcgagagtcgaagagcactaccctgacggttcccgaacaacagagaaccactcatcatagatctcgcagcgtatctccccaccgcggaaacgatcagggaaaaccacggtcaaggctgcccaatgtccctcttcagcggtcgctcgatgagatacatcccaccaggagatctcggtcccctacccgacaccacgatgcgagcagaagcccggtagaccaccgaacccgagacgttgacagccagtacctgagtgaacaggactcagaactcctgatgctgccgagagcgaagcgaggtaggagtgcagagtgcctacataccactagacacctagtgcggcattacaaaaccctgccgccaaaaatgccacttctgcaaagtagttctcactggaacatttactctgagcttcaaccattcctggatagggcgagatctgcctccacaaactgccttaggcccgacacctccctacatagcccagaacgggaacggatgcatagacagaggagccctacccagtcacccccagccgataccagctttagcagtcggagaggcaggcaactgcctcaagtacccgtaagatctggatcgattgaacaggccagcctggtggtggaggagagaaccaggcagatgaaaatgaaagtccatcgattcaagcagacgactggtagtggcagcagccaggaattagaccgcgaacagtatagcaagtataacattcacaaggaccaatacagaagttgcgacaatgtgtcagccaagagttcagattcagacgtgtccgacgtgtctgctatcagccggaccagttcagcctccagactgtcctcaacaagcttcatgtcagagcagtctgaacgtcctcggggtaggatttcctcttttacacccaagatgcagggacggaggatgggaacctcagggaggtccatcatgaaatctacgtcagtcagcggtgagatgtatacacttgagcataatgacggatcccaaagtgacactgccgtcggcacggttggcgctgggggaaagaaacgccgatccagcctcagcgcaaaggtcgtggctattgtgtcacgccgatcgagaagtacctcgcaacttagtcagactgagtccggccataagaaacttaaatcgacaattcagcgtagtaccgagactgggatggccgcagaaatgcgcaaaatggttaggcagccctcacgagaaagtaccgatggtagcatcaattcctactcatctgagggaaatttgattttcccaggcgtaagactgggtgctgacagccagttttctgacttccttgacgggctgggtcctgcccagcttgtcggacgtcagaccctggccactcccgctatgggggacattcagattggcatggaagataaaaaagggcagctagaggtagaagtaattagggctcgaagcctcacacagaaacctgggtccaagtccactccggcaccttacgtgaaggtatatcttttggagaacggcgcatgcatcgctaagaagaagacacggatcgcgaggaaaaccctggatccactgtaccagcagtccctggtatttgacgagagtcctcaggggaaggtgctgcaagtgattgtgtggggtgattacgggaggatggatcataaatgctttatgggcgtagcccaaatcctgctggaggagcttgacttgtcaagtatggtcatcggttggtataagttgtttccaccatcttcacttgtggatcccacccttacacccctcacacggagggctagtcaaagttcccttgagagttcaacaggcccaccctgtatccggtcctag

SEQ ID NO: 238208 - DNA, 4446 bp, synthetic construct
  misc_feature 1..4446: note = Description of Artificial Sequence: Synthetic coding sequence
  source 1..4446: mol_type = other DNA
atgtctagcgccgtcggaccacgcggaccccgacctcctaccgttccacccccaatgcaagagctgcctgacctctcccaccttaccgaagaagaacgcaacataataatggctgtgatggatagacagaaagaagaggaggagaaagaggaagccatgttaaagtgcgttgtgagggatatggcaaagcctgccgcttgtaagacacccaggaatgctgaaaatcagccacaccagccttcaccgagactccatcagcagttcgagtcctataaggaacaggtgaggaaaatcggcgaggaggccaggagatatcaaggcgagcataaggatgatgcccctacatgcggcatatgccataagacaaaattcgcggacggctgcggtcatctttgtagttactgtagaactaagttctgcgccaggtgtggcggtagagtgtctttaagaagtaataacgagaataagatcgtcatgtgggtgtgtaacctctgccgaaagcagcaagaaatcctgaccaagtcgggagcttggttttttggcagcggccctcagcagacatcacaggacggcactcttagcgacaccgccacgggtgctggaagcgaggtacccagagagaaaaaggccagactgcaggaaaggtcccgctcccaaacacccctcagcacagccgcagcatccagtcaagacgccgcacctcctagtgctcctccagatagatcgaagggggctgagccctctcaacaggccctaggccctgaacagaaacaagccagctcccgaagcaggagtgagcctcctagagaaaggaagaaaacaccgggtctgagcgaacagaatgggaagggcgcattaaagagtgaaagaaaaagagttccaaagacatcagctcagccagtggaaggggctgtagaggaaagagaacgaaaggagcgaagggaaagccggagattggagaaaggcagatctcaggactatcctgacactccagagaagagggatgaaggaaaggcagcggatgaggaaaagcagagaaaagaggaggactatcagacccgctacagatccgatcccaatctggctcgctatccagtaaagcctccacccgaggagcagcagatgcgtatgcatgccagggtaagccgggcaaggcacgagcggagacactccgatgtcgcactgcccaggaccgaggctggagccgcactgcccgagggcaaagccggaaaacgagcacctgccgctgcacgggctagcccccctgacagtcctcgcgcttactccgcagagagaaccgctgagaccagagcccctggagctaagcagctcactaaccattctcccccagcccctagacacggacctgtgccagcagaggcaccagaactgaaagcccaggagccactgaggaagcagtctaggttggatccctccagtgccgtgcttatgagaaaggccaagcgtgagaaggtcgagacgatgctgagaaacgactctctgtcttcagaccagtctgagtccgttaggccgtcccctcccaagccccatagaagtaaaaggggtggcaaaaagcgccagatgagtgtgtcctcatcggaagaagagggggtatcaacaccggaatataccagctgcgaggacgtggaactcgaaagcgagtctgtgagcgagaagggagatctggactattactggctggatcctgccacctggcactctcgcgagacatctcctatctcctcccatcctgtcacatggcagcctagcaaggagggtgaccggctcataggcagagtgattctgaataagagaaccaccatgccgaaagattcaggcgcattgctgggactcaaagtggtcggcggaaaaatgacagatctaggacgcctcggagcattcattactaaagttaagaaaggctcgttggcggacgtcgtgggacatttgagggccggagacgaggtgctagaatggaacgggaagccactgccaggggctaccaacgaggaggtgtacaacattatcctggaaagtaaaagcgagcctcaggtcgagattattgtgtctaggcccattggggacattccaaggatcccagaatcaagccaccctcccctcgagtcctccagtagcagtttcgagtcacagaaaatggagcggccatccatttcagttatctctcctacctctcctggcgcactgaaagacgcaccccaggtcctcccaggtcaactgtccgtgaaactgtggtatgacaaagtagggcaccagctcatcgtgaacgtgttacaagctaccgatctgccggcacgggtggatggaagacctcgtaacccatatgtgaaaatgtattttctgcccgatagatcagataaaagcaaacgcagaaccaaaactgtgaagaaaattctagaaccaaagtggaaccagacgttcgtgtacagccacgtccatagacgcgacttccgcgaacgcatgctggaaatcacggtatgggaccaacctagggtccaggaggaggaatctgagtttctcggagagatactcatcgagctcgagacggccctgctggatgacgagccacactggtataagcttcagactcatgacgagtccagtctccctttaccccagccctccccatttatgcctcgtcgccatatccatggcgagtcaagctctaagaagttacagcgcagccagagaatctctgatagcgacatatcagactacgaggtagatgacggaataggggtagttcccccagtcggataccggagcagcgcaagggaaagcaagtcaaccaccctgacggttcctgaacagcaacggactacacatcatcgctcccggagcgtgtctccccataggggtaatgatcaagggaagcccaggtcacgtttgcctaacgttccactgcaaaggtccttagatgaaatccatcctaccaggcgttccagatcaccgaccaggcaccacgacgcctctcgctctccagtagatcaccgaacaagggacgtcgactcacaatacttaagcgaacaggactcagaactacttatgctgcctcgtgccaagcgcggtcgctcagcagagtgtctgcacaccacatctgaactgcagcctttcctggaccgtgccaggtctgcctcaacaaactgcctgagaccagatacatctctccacagtcccgaaagagagaggatgcacaggcagcggagccccacccagtctcctccagccgacacttccttctccagcaggagagggcgacagctcccacaggtgccagtgcgcagcggttccattgagcaggcgagtctggtggtcgaagagcgtacacggcagatgaagatgaaagtccaccgatttaaacagacgacaggatccgggtcatcccaggagctggacagagagcagtatagtaagtataatatccacaaggaccagtaccgcagttgcgataacgtgtccgcaaagagcagtgacagcgatgtgagtgatgtctctgcaatctcacgcacctccagtgcctccagactctcatctacctcttttatgagcgagcagtccgagaggcctcgtggcagaatttcttctttcactccgaaaatgcaaggtcggagaatgggaacaagcggcaggagtataatgaaatcaacatcagtgagcggagaaatgtacacacttgaacataacgacggatcccagtccgatacagcggtcgggacagtgggcgcaggtggaaaaaagagaaggtcttcactttcagcaaaggtggtcgctatagtgtcgcggaggagcagatccacgagtcagctgagtcaaacagagagcggacataaaaaactgaagagcaccattcagagaagcacagaaactggtatggccgcagagatgcgtaagatggtgcgccagccctctcgcgagagcacagacgggtccatcaatagttacagttccgaggggaacctaatcttcccaggcgtccggctgggggctgactcacagttttccgatttcctggacggcctgggccctgcacagctcgtgggccgtcagaccctggccactcccgctatggcaccatatgtgaaagtgtatttgctcgagaatggagcttgtattgcaaaaaaaaagactcgcatcgcaagaaagactttggaccctctttatcagcagagcctggtcttcgacgaaagcccacagggcaaggttctccaggtcatagtatggggtgattacgggcgaatggaccacaagtgtttcatgggcgtggcccagattcttctggaggagctcgacctgagttctatggtgatcggctggtacaaacttttccctcctagtagtcttgttgatcccacacttactccactgacaagaagagcttcccagagcagcctggagtcgtcaaccgggcctccttgcataagaagttag

SEQ ID NO: 238209 - DNA, 4446 bp, synthetic construct
  misc_feature 1..4446: note = Description of Artificial Sequence: Synthetic coding sequence
  source 1..4446: mol_type = other DNA
atgtcaagtgctgtgggtcccagggggccacggccacccactgtcccgcctcctatgcaggagctgccagacctgagtcaccttaccgaggaggagagaaacatcatcatggcagtaatggaccggcagaaagaagaagaggaaaaagaggaagcgatgcttaagtgtgttgtgcgcgatatggctaaaccagctgcatgtaaaacgccgaggaacgccgagaaccaaccccatcagccttcccctcgattgcaccagcagttcgagtcatacaaggagcaggtccgaaagatcggggaggaggcacggaggtatcagggagaacataaggatgatgcacctacctgcggcatttgtcacaagactaaatttgctgatggatgcggccacctatgtagttactgccgcactaagttctgcgctcgttgcggaggccgagttagcctgcggtctaataacgaagataaggtcgttatgtgggtgtgcaatctgtgtcggaagcagcaagaaattctgaccaaatccggcgcttggtttttcggaagtggcccacagcagacctcacaggacggaactcttagcgatacagccacaggagcagggtcagaggtccctagagagaaaaaagcgagactgcaagaacgaagtcggtcccaaactcctctgtctacagcggcagcaagttctcaggacgctgcacctccgtcagcccctccagatagaagtaagggggctgaaccttcacaacaggctcttggacccgagcaaaagcaggcatcttctcgaagcagaagcgaaccccctcgagagagaaaaaagaccccaggattgagtgagcagaacggcaaaggcgcattgaaatctgagcgcaagcgggtacccaagacatccgctcaacctgtggagggcgcagtggaggaacgagagcggaaagaaagaagagagtctcgcaggctggaaaaggggagaagccaggactacccggatacaccagagaaacgcgacgagggaaaggctgccgatgaggaaaagcagagaaaggaagaggactatcagactaggtatcggagcgatccaaatctggctcgctaccccgttaagccccctccagaggagcagcaaatgcgcatgcatgcacgtgtctcgagggccagacacgagcggagacacagcgatgtggccctgcctagaaccgaagccggtgccgctctccccgagggaaaggccggaaagcgagctcctgctgcagctcgggcaagcccaccagattcccctagggcttatagtgctgaacgcactgccgagactcgcgcacccggtgccaaacagctcacaaaccactctcctccagcaccacggcacgggcctgtgccggctgaggctcccgaactaaaagcccaggaaccacttagaaagcagtctcgactggacccctccagcgcggtgctaatgagaaaagcgaaacgtgagaaagtggagaccatgttgaggaatgacagtttgagctccgaccaatccgagtccgtcagacccagccctcctaagcctcacagaagtaagaggggcggaaagaaacggcagatgagcgtctccagctctgaagaagaaggcgtgtctactcccgagtatacatcctgcgaagatgtggagcttgaaagcgaatcagtgtccgagaaaggtgatctggattactactggctcgatcctgccacctggcacagcagggagacttccccaatcagcagccatccggtaacatggcagcctagtaaggagggggaccggcttatcggacgggtgatcctgaacaaacgcaccacaatgccgaaggacagcggcgctctgctggggctcaaggtagtaggaggaaaaatgaccgacttaggaaggctgggcgcattcatcaccaaggtgaagaaggggtctctggccgacgtagttgggcacctgcgagctggtgacgaagtcctggagtggaatggcaaacctttgcccggagcgactaatgaagaggtgtataacattattctcgagagtaagtcagagcctcaagttgagatcatagtgtccaggcccattggggacattcctagaatcccagagagtagccaccctccactagaatcatcatcatcatctttcgagagccagaaaatggagagaccatccatcagcgtaatctctcccactagccccggagccttgaaagatgctcctcaggttctgcccggtcagctgagcgtcaagttgtggtacgataaggtgggccaccagctcatcgtgaatgtgttacaggctacagatttaccagcccgagtggatgggagacccagaaatccttatgtgaaaatgtatttccttcccgataggtctgacaagtctaagagaaggacaaaaaccgtcaaaaagattctggaaccaaaatggaaccagaccttcgtatactcacacgtgcaccgaagggattttagagagagaatgctcgaaattaccgtgtgggatcaacctcgcgtgcaggaagaggagtctgaattcctcggcgagatactgattgaattggaaaccgcccttcttgacgacgagccccactggtacaaacttcaaactcacgatgaatcatcactccctcttccccagccatcaccgtttatgccacgacggcatatacacggtgaaagctcttccaagaaactgcaacgaagccagcgtattagtgatagcgacattagtgattatgaggtagatgacggaatcggagtagtgccacccgtcggctatcgctcaagcgccagagaatctaaatccacaacattaactgtgcctgaacagcagcgaaccactcatcacagaagtaggagcgtgagcccacaccgcggaaatgaccaaggcaagccgaggtcaaggttgccgaacgtgccactacaacgctccctggacgaaatccaccccactaggcgaagcagatcgccaactaggcatcacgacgcctcacgtagtcccgtggaccatcgaactcgagacgtcgattctcagtacctttctgagcaggattccgaattgttgatgctgcctagagctaagcggggtagaagtgcagaatgtcttcacacgacatccgaactgcagccatttttggacagggcaagaagcgctagcaccaattgcctgcgccctgacacctccttgcattcgccagagagggaacggatgcatcgtcaaagaagccccacccagtcgccccctgcagacacgtccttcagctctcgcagaggcaggcagctaccgcaggtacctgtgcggagcggaagcattgaacaggccagtttagtagtggaagagaggaccagacagatgaaaatgaaagtccatcgcttcaaacagaccacgggctctggatctagccaggagctcgatcgagaacaatattcaaagtataacatccataaagatcagtatcgctcctgtgataatgtgtcggctaagtcctctgactctgatgtatccgacgtgagcgccataagtagaacctcctccgcttcccggctttcatcaacttcattcatgtctgaacagtcagaaagaccgagaggcagaatctcttcctttacacctaaaatgcaaggccgacgtatggggaccagcggcagaagcattatgaagtctacttccgtgagtggcgagatgtacaccctggagcacaatgacggttctcaatcagacactgctgtaggaacggtaggtgctggcggaaagaagcgtcgctcctcactgtctgccaaggtagtggcaatcgtcagccggcgatctagatccacaagccagttatcgcagactgagtccggacataagaaactgaaatctacaatccaaagatccactgagacgggcatggccgcagaaatgaggaagatggtgcgccaacccagccgtgagtccacagacggttcgatcaacagttactcttccgaaggcaatcttatttttccaggggtgaggctgggcgctgacagccagttttctgacttccttgacgggctggggcctgcccagctggtcgggagacagaccctggccacccccgcaatggcgccttacgtgaaggtgtatctgttggaaaatggggcttgcattgcaaagaagaagacccggatcgccaggaaaactctcgacccactctaccagcagtctcttgtttttgacgagtctcctcagggcaaggtgctgcaggttatcgtgtggggtgactacggacgaatggaccataaatgttttatgggagtggcccagatattacttgaggagctggatttatcatcaatggttattgggtggtataagcttttccccccttctagcctggtggaccctaccctcactcctctcaccaggcgcgcttctcagagcagtctcgagagttccaccgggccaccctgtatccgctcctag

SEQ ID NO: 238210 - DNA, 5079 bp, synthetic construct
  misc_feature 1..5079: note = Description of Artificial Sequence: Synthetic coding sequence
  source 1..5079: mol_type = other DNA
atgtcttccgcggtggggccacggggtcctaggcctcctacagtgccacccccaatgcaggaactgccagatctgagccatctcacggaggaggaaaggaacattatcatggctgttatggaccgccaaaaggaggaggaagagaaagaggaggccatgttaaagtgtgtcgtcagagatatggccaaacccgctgcctgcaagaccccacgcaatgcggagaatcagccccaccaaccttctccgagattgcaccaacagttcgagagctataaggagcaggtgagaaagattggtgaggaggcccgacgatatcaaggggagcacaaggacgacgctcctacatgtggtatctgccacaaaactaaattcgcagacggctgtgggcatctatgttcttattgccgcaccaaattctgtgctcgatgtggcggtcgagtttccctgaggagcaacaacgaggataaggtcgttatgtgggtgtgtaacctttgtcgcaagcagcaagagatcctcaccaagtctggcgcttggttctttgggtccggtccacaacagactagccaagatgggactttatccgacaccgccaccggggctgggagcgaggtcccaagggaaaagaaagccaggctgcaggaaagatctaggtctcagaccccactttctactgctgccgcatcctctcaggatgccgctcccccaagtgcccctcctgatagatcgaagggggctgagccaagtcaacaggcgcttggcccagagcagaaacaggcctcctctagatcccgatcagagcctcccagagagcgcaaaaagactcctgggcttagtgaacaaaatggtaaaggtgctctaaaaagtgagagaaagcgagtgccaaagacaagcgcacaacctgtcgagggtgcagtcgaggaaagggagaggaaggagcggcgtgaatcacgtcggcttgaaaaaggccgttcacaggattacccagatacaccggagaagcgcgacgaaggcaaagccgctgatgaagaaaaacagcggaaggaggaggactatcagactcggtaccgatccgaccccaatctagcccgttaccctgtaaagccgccaccagaggaacagcagatgagaatgcatgccagagtgtccagggctagacacgaaaggcggcattcagatgtggccttgcctcggacagaggcaggtgccgcactccctgagggcaaggctggtaagcgcgcaccggctgcagctcgtgcttcgcctcctgacagcccaagagcgtacagtgctgaacggacagctgagacgcgggcaccgggtgcaaaacagctgacaaaccacagtcccccagcccctcgccatgggcctgtgccagccgaggccccagagctgaaggcacaagaacctctcagaaagcagtcccggctggacccctcaagcgcagtccttatgcgtaaggccaagcgggagaaggtcgagacgatgttacgcaacgactcgctgtcctctgaccaatccgagtcagtgcgccctagcccccctaaaccgcacagaagtaagagaggtggcaaaaagcgccagatgagtgtctcaagctcagaagaagaaggcgttagcacgcctgaatacacaagctgcgaggacgtcgagcttgagtcagaatcggtgtcagaaaagggggatcttgactactactggctggaccccgctacttggcactcaagagaaacatccccgatcagctcccatcctgtcacttggcaaccttctaaggagggcgacagactgattggaagagtgatcttgaacaagcgcacaaccatgcctaaagattccggcgctctcctgggtttaaaagtggtcggaggcaagatgacagacttaggtcgcctgggggctttcattacgaaagtaaaaaaagggagcctggccgatgttgttggccacctgagagctggagacgaggtgcttgagtggaatggtaaacctcttccaggcgctactaatgaggaggtctataacatcatcttggagtctaaatccgaaccccaggtcgagataatcgtgtcaagacccataggagacattcctcgtatcccagaatctagtcatccccctctagaaagctccagtagctcgttcgaatctcagaagatggagagacccagcatttccgtcatcagcccaacatcaccgggtgccctgaaggatgcgccacaggtcctgccaggtcaactctctgtgaagctctggtacgataaagtgggacaccagctaattgtaaacgtcctgcaggcaactgatctgccagcacgcgttgacggacgaccaagaaatccttatgttaagatgtacttcctgccagacagatctgacaaaagcaagcgcaggaccaagaccgtgaagaaaatcctggaacccaagtggaaccaaacattcgtgtattctcatgttcaccggcgagatttccgggaaaggatgctggagatcaccgtatgggatcagccgcgtgtgcaggaagaagaaagcgagtttctcggagagatcctcatagagttggagacagccctcctggacgatgagcctcattggtataagctccaaacgcacgacgaaagctcacttccactgccccagccgtcgcccttcatgcccagaagacacatccacggggagtctagtagtaaaaagctgcaaagatcccagaggatctccgactcagacatttccgactacgaggtggacgacggtatcggggtggtaccgcctgtgggttatcgatcttctgcgagagaatccaaatcaaccacattaactgtccctgaacaacagcgaactacgcatcatcggagccgatctgtcagtccgcatagggggaatgaccagggtaagccacgtagccgccttccaaacgttcccctccagaggtcactcgatgagatccatcctaccaggcgctcccgaagtcctacaaggcatcatgatgctagtcggagtcctgtggaccacagaaccagagacgtggatagccaatatctgtccgagcaagacagtgaactcttgatgctgcctcgcgctaaaagagggagatctgctgaatgtctgcacaccacgcgccacctggtacgtcactacaagacactgccaccaaaaatgccactccttcagagctcttcccattggaacatttacagctctattctgcccgcacacactaaaactaagtccgtcaccaggcaggacataagcctgcaccacgaatgttttaactcaactgtattgaggtttacagacgaaattctcgtcagcgagctgcaaccctttctggatagagcacgaagcgctagcactaactgccttagaccggatactagcttgcacagtcccgagagggaaagaggtaggtggtcccccagtttagacagaagaaggccaccctcccctaggatccagattcagcacgcttctccagaaaacgaccgccactcacggaagagcgagaggagttcaattcagaagcaaactagaaaaggcacagcaagcgacgcggaaagggtcctgcctacttgcctgagcagacgcggacacgccgctcctcgggctactgaccagcctgtgatcaggggaaaacacccagctaggtcccgctcctcagaacactcttccatcagaacgctgtgcagtatgcatcaccttgtgcctggaggtagtgcacccccatctcctttgctcaccaggatgcatcgccagcgctctccaacgcagtcccctcccgctgacaccagcttctctagccgcagaggaaggcagctgccacaagttccagttaggagcggaagcatcgagcaggcttcgctggtagtcgaggagcgcacccgccagatgaagatgaaagtacaccgcttcaaacagactaccggatcagggagctcccaggaactggatcgcgaacagtatagtaagtacaatatccataaggatcagtacaggtcctgcgataacgtctcggccaaatcctctgattcggacgtgtcagacgtatccgcgatcagccgtaccagcagcgcatcccgcttaagtagcacatccttcatgtccgagcaatccgagaggcctcgtgggcgaatctcttccttcactccaaagatgcaaggcagaaggatggggaccagtgggaggtctattatgaagtcaacgtccgtgagtggggagatgtacacccttgagcacaatgacggctctcaatccgataccgcagtagggactgttggcgcaggcggaaaaaagagaaggtctagcctgagtgcaaaggtggtggcgatcgtgtctaggagatccagatccacttcccagctatcccagaccgagtccggacataagaagttaaagtctaccatccagagatcaactgagacggggatggctgcagagatgcgtaagatggtgcgacagccatccagagagagcaccgatggaagtattaatagttatagcagcgaggggaatttaattttccccggagtgcggctcggagctgattcacagttcagcgactttctcgacgggcttggaccagcacagctggtcggcaggcagaccctggcaacaccagcaatgggcgacatccagatcgggatggaggataaaaaaggacagctcgaagtcgaagtaatcagggctcggtccttaactcaaaaacccggaagtaaatctacccccgcaccctacgtgaaagtgtatttgcttgaaaatggcgcatgcatcgccaaaaagaagacaaggatcgccaggaaaaccttagatcccctgtatcagcagtctctcgttttcgacgaatcccctcaaggcaaggtcttacaagtgatcgtatggggtgattacggtagaatggatcataaatgcttcatgggggttgctcagatcttgctggaagaactggatctctcaagtatggtgattggttggtataagctatttcccccatccagtctggtagaccccacacttacccctctgactaggcgggcttcgcaatcatctctggaaagctctactgggcctccctgcatacgatcctag

SEQ ID NO: 238211 - DNA, 1497 bp, synthetic construct
  misc_feature 1..1497: note = Description of Artificial Sequence: Synthetic coding sequence
  source 1..1497: mol_type = other DNA
atgctgccacgcgctaagaggggaaggtctgctgagtgtctgcacaccaccaggcatagtcgcaaaagcgagaggtctagcattcaaaaacaaacacggaagggaacagcatccgatgctgaaaggatgcaccgtcagcggtcccctacccaatccccaccggcagacacttctttctcctcccggagaggaaggcagctgccacaggttcccgtccggagtggatcaatcgaacaggaacaggaaaaatataacagctcaacgaaggcaagtctcgtggtcgaggaacgaacccggcagatgaagatgaaagtgcaccggttcaaacagacgacgggtagcgggagctcacaggagctcgaccgcgaacaatattctaaatacaatatccacaaagaccagtaccgatcatgtgacaatgtgtctgctaaaagtagtgattctgacgtgtctgatgtgtccgccatatcgagaaccagcagtgctagtcgactctcttccaccagtttcatgtctgagcagtcagaaaggccacggggtcgcatatctagcttcactcccaagatgcaaggcagaaggatgggaaccagtggccgaagtatcatgaagagcacaagcgtctccggagaaatgtatacactcgaacacaacgatggaagtcaatcagacaccgctgtgggtacggtgggggcaggcggtaaaaaaagacgaagttctcttagcgcgaaggtagtggcgatagtgtctcgccgaagcaggtcgacttcacaacttagccaaaccgagagcgggcacaagaagctcaaaagcacgattcagaggtccactgagactggtatggccgctgagatgaggaaaatggtgcggcagcccagcagagaaagcacggacggatctattaacagctactcttccgaagggaatctgatatttcccggtgtccgccttggagctgattcacaattctctgattttctggacggactgggtccagctcagctcgtaggccgacagacactcgccaccccggcaatgggcgacattcaaattgggatggaggataagaaagggcaactcgaggtggaggttattcgtgcgagaagtctgactcaaaaaccagggagtaagagcaccccagctccatatgtgaaagtgtatctcctggagaatggagcttgtatcgctaaaaaaaaaacacgaattgcaagaaagacactcgatccgctttatcagcagagcctggtgttcgatgagtctccccagggcaaggtgctgcaggtaatcgtgtggggagattacggtcgaatggaccataagtgctttatgggcgtggcccagattctgctcgaagagttagacctttcgagtatggtgatcgggtggtacaaattgtttcctccttcttcactggtggaccccaccctgaccccactaacaagaagggccagccagtccagcctggaatcttcaaccggcccaccttgtatacgttcatag

SEQ ID NO: 238212 - DNA, 3039 bp, synthetic construct
  misc_feature 1..3039: note = Description of Artificial Sequence: Synthetic coding sequence
  source 1..3039: mol_type = other DNA
atgtgtgcaccaggtatacacgtctcctcagagggctgggaagaagtgcgctctgtcgacagcgaggagggaaccatcgaggccagacgagccgtagccggtgacctggattactattggttggatccagccacatggcatagccgagagacatcacctatttcgtctcatccagtaacctggcaaccaagcaaagaaggggaccgtctaattggacgcgtgattcttaacaagaggactaccatgcctaaggactccggcgcactattggggttgaaagtcgtgggcggaaagatgacagatctgggtagattaggggcttttatcactaaggtgaaaaaaggctccctggctgacgtcgtcggacaccttcgagcgggagatgaggtccttgagtggaacggtaagcctcttccaggcgcaactaatgaagaagtatataacattattctcgaatccaaatctgagcctcaagtcgagatcatcgtgtccagaccgatcggtgatatccctaggataccggagtcaagccatcctcctctcgagtcgagctctagctcctttgaatctcagaagatggaaaggcctagcatcagcgtaatcagtcctacctctcctggcgcacttaaggacgcccctcaggtacttcccggtcagctttcagtgaaactctggtatgacaaggtgggacatcagctcattgtgaatgtactgcaggctacggatctgcctgctcgcgttgatggcagacccagaaacccatacgtaaaaatgtactttttgccagacagatccgataaaagcaagagaagaaccaaaaccgtaaaaaagatcttggaacctaaatggaatcagacctttgtctacagtcacgtgcacagacgggactttcgggagcgtatgctagagataacagtttgggaccagcctcgcgtgcaggaagaggaatccgagttcctaggggagatactcatagagctggaaaccgccctgttggatgatgagccccactggtacaagttacagacgcacgatgagtcaagcctccccctgcctcagccgtcgcccttcatgccccgaaggcacatccatggagaaagctcctctaagaagctgcagagaagtcaacgcatctctgatagcgatatttccgactatgaagtggatgatggaattggagtggtcccccctggctatcgctccagtgcaagagaatcaaagtctactaccctaacagtgcctgagcagcagaggacgacacaccaccgcagccgcagtgtttctccacatagaggaaatgatcagggcaagccgaggagtaggctcccaaatgttccactccagcggtccctagacgagatccaccccacgcggcgttctagatccccgacccgccaccatgatgcgtcaaggtccccagtggaccaccgcacacgcgatgtcgactcacagtacttgagtgagcaggattcagagctcctcatgttgcccagagcaaagcgaggccgaagtgcagagtgtctgcatacaacttcagaactgcagccttttctggatagggccaggtccgcctctactaattgtctgcggcctgacacttcattacactcccccgagagggaacggcatagtcgtaagtccgagcggagctcgatacagaaacagactcggaaaggaacagccagtgacgccgaacggatgcacagacaaagatctccgacccagagtccacctgcagacacgagctttagcagcagacggggaagacaactgccccaggtccctgtacgctccggaagtattgaacaagccagtctggtggtagaggagagaaccagacagatgaagatgaaagtgcatcggttcaagcagactacggggagcgggagttctcaagagctcgacagagaacagtacagtaagtacaacatacacaaggatcagtacagaagttgcgacaatgtttctgctaaaagctccgattcggatgtgtccgatgtgagcgccatctcccggacatctagcgccagccgccttagcagcacctcttttatgtcggaacagagtgagaggccacgtggccgaatttccagctttacccccaaaatgcagggacggcgaatgggcacaagcggccgttccattatgaagtccacaagcgtgtccggtgaaatgtacacactggaacacaatgacgggagccagagcgacacagcggttggcacagtgggagccggaggaaaaaagagacggtcctccctgtctgctaaggtggttgcaattgtgtcacggaggtctaggtctaccagtcagctgtcccaaaccgagtcaggtcacaagaagttgaagtctaccatccagcgatcaaccgaaacgggtatggccgcagaaatgcggaagatggtgaggcagccctcccgggagagtaccgatggctccatcaatagctactcctccgaggggaaccttatattccctggggtacgtctcggggcagactcacagttctcggacttccttgatgggctgggtcccgcacagttggtgggcagacagaccttagcaacacctgcgatgggggatattcagataggaatggaagataagaagggacaactcgaggtggaagttatccgcgctcgctctctcacacagaagcccggttcaaagagcacaccggcaccttacgttaaggtatatcttttggagaacggcgcttgtatcgcaaagaaaaagactcgcatcgcacgtaagaccctagatccgttgtatcagcaaagcctcgtcttcgacgaaagcccacaaggtaaagtactgcaagtcatcgtctggggggactacggccgaatggatcataagtgtttcatgggcgttgcccagatcctgctggaagagctggacctgtcgagtatggtcatcgggtggtacaagctttttccaccatcaagtttggtggatccaacgctgacacctctgacccggagagccagtcaaagttcactggaaagcagcacgggacctccttgcatcaggtcttag

SEQ ID NO: 238213 - DNA, 660 bp, synthetic construct
  misc_feature 1..660: note = Description of Artificial Sequence: Synthetic coding sequence
  source 1..660: mol_type = other DNA
atggctgccgagatgagaaagatggtgaggcagccctcgcgtgaaagtactgatggttccatcaattcgtatagcagcgaaggaaaccttatctttcctggcgtgaggcttggagcagattctcagttctctgacttcttggacgggctggggcctgcacagcttgtgggcagacagaccttggcaacgcccgctatgggagatatccagatcggcatggaagacaagaaaggtcaactcgaagtcgaggtgattcgggcacgcagcctgacccagaagccgggaagtaagagtactcccgctccatatgtgaaggtctatcttctcgagaacggcgcatgtatcgccaagaaaaaaacacggatcgcccgaaagactttagatcccctctaccagcagtcacttgtttttgatgaatcgccgcagggtaaggtgctccaggtcattgtctggggtgattatggacggatggatcataaatgctttatgggcgtggcgcaaattcttctggaggaactggacctgtcctccatggtaatagggtggtacaagcttttccctcctagcagtctggtggatccaaccctcacgccgttgactcgtagagccagccagtcttccctggaatcttccaccggtccaccctgtatccggtcttag

SEQ ID NO: 238214 - DNA, 2283 bp, synthetic construct
  misc_feature 1..2283: note = Description of Artificial Sequence: Synthetic coding sequence
  source 1..2283: mol_type = other DNA
atgcccaaggatagtggcgctctcctgggactcaaggtggtaggtggaaagatgaccgacttgggtaggctcggagccttcattacaaaggtgaaaaaaggaagtcttgcagacgtggtaggtcaccttcgtgccggtgatgaggtactggagtggaatggcaaaccactgcctggtgctacgaatgaggaagtatacaatatcatcctggaatcaaagtcagaaccacaggtggaaataattgtgagtaggccaattggagatattccgcgaatccccgagtcttctcaccccccactggagtctagcagttctagtttcgagtctcagaaaatggagagaccgagcattagcgtgatctcaccgacctcacccggagcacttaaggacgccccacaggttctgcctggccagttatcggttaaattatggtacgacaaggttggacatcagcttatcgttaatgttctgcaggccaccgaccttccagctcgcgtcgacggcagacccaggaacccgtacgttaagatgtattttctccccgaccgctcagataagagcaagcgtagaaccaagacagtgaagaaaatactggaacccaagtggaaccagacctttgtgtatagccatgtacacaggcgcgacttcagagagcgcatgctggagattacagtttgggatcagcctagggtccaggaggaggagtccgagtttctcggcgagattttaatcgaactggaaacagccttgttagacgatgagccccattggtataaacttcagacccacgacgaatcgtctctgccattgccacaaccgtcacccttcatgccaaggcgacacattcacggagagagctcttcgaagaagctgcagaggtcccagagaatcagcgactctgatatcagtgactatgaagtggacgatggtattggagtggttcctccagtgggctatagaagttccgctagggaatccaagtccactactctaaccgtgcctgagcagcagcgtaccactcaccacagatcgcggtctgtaagtcctcacaggggcaatgaccagggcaagcctcgatcaaggttgccaaatgtgcctctgcagagatctttagacgaaatccacccgacacggaggtccaggtcgcccactcggcaccacgacgcctcaagatcccccgtagatcacagaacccgcgatgttgactcccagtacctgagtgaacaggactctgaactgctgatgctgccacgcgctaaacgcggtaggtcggctgagtgtcttcataccaccagtgaactacaaccctttttggatagggctaggtccgccagtaccaattgtctgcggcctgatacctcccttcactcacctgagcgcgagaggcactctcggaagagcgagagatcctctattcagaaacaaaccagaaaaggaacagctagcgacgccgagagaatgcatcgccagcgatctcccactcagtctcccccagctgacacgtcattcagttctaggagaggacgtcagttaccacaggtccccgtcagatccggttcgatcgagcaggagtcaggccataagaaacttaagtcaacgattcagcgatctacagagaccggcatggcagcggagatgcgcaaaatggtgcggcagccatctcgggagtctacagacggcagcatcaacagctatagttccgaggggaacctaatcttccctggggtgcgattgggagcagattcccaattcagtgattttctggacgggcttgggccagcacaacttgttggaagacagactttggcgactccggcaatgggtgacatccagatcggtatggaagataagaaagggcagctcgaggttgaagtgatcagggcacggtctttaacccagaagcccggatctaagtccaccccagccccatacgtgaaagtttacctattggaaaatggcgcttgcattgccaaaaagaaaacacgtattgcgaggaagactttagacccgctgtatcagcagtccctcgtctttgacgaaagcccacagggaaaggtgctccaggtcattgtttggggtgactacggcaggatggatcacaagtgctttatgggagtcgcacagattctgctggaggaactggatctgtccagcatggtgattgggtggtacaagcttttcccgccaagctcactcgtggacccaaccctaacacccctgaccagacgcgctagtcagtctagcctggagtcctcaaccggccctccctgtatcaggagttag

SEQ ID NO: 238215 - DNA, 2481 bp, synthetic construct
  misc_feature 1..2481: note = Description of Artificial Sequence: Synthetic coding sequence
  source 1..2481: mol_type = other DNA
atgttcgccggtttccttcagttcctgctgctacacactctgcattccggtaccggagatctcgactattattggttggaccctgctacgtggcattccagggagacttcacccatatcaagccaccccgtcacctggcagcccagcaaggagggagaccgccttattggaagggtcattttgaataagagaaccaccatgccgaaggactctggtgccctgctgggtttgaaagtggtaggtggtaaaatgacggacctcggtcgactcggagcgttcattacaaaggtaaaaaagggctcactggcagatgtggtgggtcatcttcgagctggggacgaggtccttgaatggaatggaaagcctttgcccggtgctaccaatgaggaggtatacaatatcatcttggaatcaaagagtgaacctcaagtggaaattattgtctctcgacccatcggcgacattcctagaatccctgaatcatctcatccccctctcgagtccagctctagctcgttcgagagccagaaaatggagcgcccttctattagcgtgatcagtcctacttcaccaggcgcacttaaagatgcgccacaggtattacccggtcagctcagcgtgaaactgtggtacgataaagttggtcaccaactgatcgtgaatgtgctccaggccacagatttacctgccagggttgacggcagaccccgaaacccctacgtgaaaatgtatttcctgcctgacaggtcagacaagtctaagcggagaaccaagacggtcaaaaagattctggagccaaagtggaatcagacatttgtctattcccatgttcacaggcgggattttcgggagaggatgttagagattactgtctgggatcagccccgtgttcaagaagaagagtcagaattcttgggcgagattctgattgaactggaaacagcactcctagatgatgaaccgcattggtataagctccagacccacgacgaatctagcttgcccctgccgcagccttctccatttatgccgcgacgccacattcacggtgagagtagctcgaaaaagctgcagaggtcccagaggatcagtgactcagatatctccgactatgaagtggatgacggaattggtgtggttccccctgtgggatatcgctcctctgccagggagagtaagtccacgactctgaccgtcccagagcagcaaaggacaactcaccaccgctcaaggtccgtgtccccccatcgcggaaatgaccaagggaagcctagaagtcggctgcctaacgtgcccctgcagagatccctagacgagatccacccgactcgaagaagccgatctcccacacgtcatcatgacgccagcaggtcccctgttgaccatcggacacgcgatgtggactcccagtatctcagtgaacaggacagtgagttgctcatgcttcctcgcgcaaagcgcggacgctccgccgaatgccttcatactaccagtgagttgcagccatttcttgaccgcgctaggagtgcctcaacaaactgcctccgcccagatacctccctccattcaccagaaagagagcgccactcacgcaaatcggagagaagttcaattcaaaagcagacacgcaaagggacagcttctgacgccgagcggatgcacaggcaacgctctccaacccagtccccacccgctgatacatccttctccagtcggcgaggacgccagctacctcaagtgcccgtcaggagtggatccattgaacaggagtcaggacataaaaagctaaaatcaaccattcagcgaagtactgagaccggaatggcagccgagatgcgaaagatggtgcgccagccaagcagagagtccacagacggttctatcaattcatactctagcgagggaaacttaatatttcctggagtccgcttgggagctgatagtcaattcagcgattttcttgacggccttggccctgctcagctggtgggtcggcaaacactggctacccctgccatgggcgacatccaaattgggatggaagacaagaagggtcagctggaggtggaagtcattagggcaagatctcttactcagaaaccgggttcaaaatcaactcccgcaccgtacgtaaaagtttacttgctggagaatggggcatgtattgcaaagaaaaagacgagaattgccagaaagaccttggatcccctataccagcagtcactggttttcgacgagagtccccaggggaaagttctgcaagtcatcgtctggggcgactacggccgaatggatcataagtgcttcatgggggtcgcccagatcctcttggaggaactcgatctgagctccatggttatcgggtggtacaagctgtttccccctagcagtctggtggaccccactctgacaccgctcacccggcgagcatcacagtccagcctcgaatcgtcaactggccctccctgcattcgctcatag

SEQ ID NO: 238216 - DNA, 2454 bp, synthetic construct
  misc_feature 1..2454: note = Description of Artificial Sequence: Synthetic coding sequence
  source 1..2454: mol_type = other DNA
atgtgcgctcccggaatccacgtcagttccgaaggttgggaagaagtgagatccgtggactctgaggaaggcacaatcgaggctaggcgagccgtcgcaggagatctggattattactggctggatccggctacgtggcatagccgtgagacttcacctataagctctcacccggtgacctggcagccatccaaagagggagaccgccttattggccgagttatacttaacaaacgcacaaccatgcctaaggacagcggagctttgctaggcctgaaggtggtgggtggcaaaatgaccgacctaggccgtttgggagcctttatcacaaaggtgaagaagggaagcctggcagatgtggtcgggcacctgcgggctggagatgaagtcttagaatggaatgggaagccccttcccggagcgaccaacgaggaagtttacaacatcatcctggagtccaagagcgagccacaagtggagatcatcgtctcacgcccaattggtgacataccacggatcccggaaagttctcatccgccactagagtcgagctcctcgagcttcgagagccaaaaaatggaacggccaagcattagtgtgattagtccaactagccctggcgcactcaaggatgcaccacaggttttgcccggacagctctctgttaaactctggtacgacaaggttggtcatcaattgatcgtcaacgtgcttcaagccacggatctccccgcaagggtggacggacggccacgaaatccatacgtgaaaatgtatttcctgcctgatcgcagtgataagtcgaaaaggagaaccaagaccgtcaagaagatactggaacctaaatggaatcaaacttttgtgtactcacacgtgcaccgccgagactttagagagcgcatgctggaaatcaccgtttgggatcaaccaagagtccaggaggaagaatccgaatttctgggcgagattctgattgaactggagaccgcgttattagacgatgaacctcactggtacaaattgcagacccacgacgaaagcagtctgcctctccctcagccatccccttttatgccacgcaggcacatacatggggagtccagttcaaaaaagttgcaacggtcacagcggattagtgactcagacatctccgactacgaggtggatgacggcataggtgtggtgccacctgtgggttatcgcagcagcgcccgagaatctaagagcaccactttgaccgtgcctgaacaacagcgcaccacacatcaccgttctcgttcagtgagtccacatcggggaaacgatcagggtaagccccgttccagattgcctaacgtccctcttcagcggtctcttgatgaaattcatcccaccaggcgatccagatctcccactcggcaccatgatgcttcacgcagccctgttgaccatagaacacgggatgtggattcccagtacctttccgaacaggattcagagctcttgatgttaccacgcgctaagaggggaaggagcgccgaatgtctgcacaccacctcggaactgcagccgttcctcgatagggccaggtctgcatcaacaaattgtcttaggcctgataccagcctccactcccctgagagagagaggatgcatcgacagaggagcccaacccagtcacctcccgcagacactagtttctcgtcaaggcgcggtcgccagttacctcaagtacccgttaggtctggcagtattgagcaggaatccggacacaaaaagctgaagtctaccatacaacgatctacagaaacaggtatggctgccgagatgagaaaaatggtgagacagccttctagggagtcaaccgacgggagcatcaattcttatagcagtgaaggcaacctgatatttccgggagttcgcctcggcgcagactcgcagtttagcgactttctggacggacttggccctgcccagctggtgggtaggcaaacactggccacgcctgccatgggggacatccagatcggaatggaagacaagaaagggcagctggaggtcgaagtgatcagagcccgttctctaactcaaaagccagggtccaaatctacccccgcaccatatgtgaaggtgtatctcctggaaaatggcgcatgtatagccaaaaagaaaacccggatcgcacggaaaacacttgacccactgtaccagcaatctttagtgttcgatgaatctccgcagggtaaagtgctgcaagtcatcgtctggggggattacggcaggatggatcacaaatgttttatgggggtcgctcagattctgttggaagaactggatctgtcttcgatggtgattggttggtacaagctgtttccgccatctagtctagttgaccctactttaacccccctgacaagaagggcgtctcaatcgtccctcgagtcttccactgggcctccatgcatcagatcctag

SEQ ID NO: 238217 - DNA, 3567 bp, synthetic construct
  misc_feature 1..3567: note = Description of Artificial Sequence: Synthetic coding sequence
  source 1..3567: mol_type = other DNA
atgcagtttgaaacactccgtcaggtgtgcaacagtgtcctgagccactttcatggcgtattctcttcccctccaaacatcctgcaaaatgagctctttggccagacactcaacaatgctaggaagcgttcaccctctgtttcaagggaccaaaaccgcaggtatgaccagcgggaggagcgtgaggaatactcacagtacgccacaagtgacactgccatgcccagaagcccctcagattatgctgaccggcgatcccagcacgaaccgcagttctacgaagactctgaccacctttcctaccgcgatagtaaccgaagaagtcatagacactcaaaagaatatattgttgatgatgaggacgtggagagccgagatgaatatgagcgtcaaaggcgcgaggaggaataccaatcgcggtatcgtagcgaccctaacctggccaggtatccagtgaaaccacaaccatatgaagagcagatgaggatacacgccgaggtgtctcgggcacggcacgaacgccgtcactccgatgtctctctcgctaacgctgatttagaggactccaggataagtatgctaaggatggataggcctagccggcagcgtagcatttctgagcgccgagccgctatggagaaccagagatcctactctatggagagaacacgggaagctcaggggccttccagctatgcccagcgtaccaccaaccactccccccctaccccaagacgctctccattgccgattgaccggccagatcttagaaggacggactcactcagaaaacagcatcacctagaccctagctctgccgttcgtaagacaaaacgcgagaaaatggaaacgatgctgcgaaacgactccctgagtagcgaccagtccgagagtgttaggcccccaccacccaagcctcacaagtcaaagaagggaggcaagatgagacagatctcattgagctccagcgaggaagagcttgcttcgacacctgagtacacgtcatgtgatgacgtcgaaatcgaaagcgaatcggtgtcagagaaaggcgactctcaaaaaggcaaacgtaaaaccagtgagcaagcagtgctctctgattcaaatacacgcagtgagcggcagaaagaaatgatgtacttcggcggacactctcttgaggaagatttggaatggtccgaaccccagataaaagatagcggagtggatacatgcagttccaccaccctgaacgaagaacacagtcactcagacaaacaccctgtaacctggcagccatctaaagatggcgataggcttatcggcagaatattgctgaacaaaagactgaaggatgggtccgtgccccgtgatagtggcgctatgctgggccttaaagtcgtcgggggaaagatgaccgagagcgggcgtttgtgcgcctttatcaccaaggtaaagaaggggagcctcgctgacaccgtaggacatctgcgccctggtgacgaagtcctcgaatggaacggcaggctactccaaggtgctaccttcgaggaagtgtataacatcattctagagtccaagcccgaaccacaggtggagttggtcgtgagtagacctatcggtgatatcccaagaatccctgactcaacacatgctcagctggagtcatcctctagctcatttgagtcgcagaaaatggacaggccctcaatttccgtgacatcaccaatgagtcccggaatgttacgggatgtgcctcagtttctcagcgggcaactgagcatcaaactttggttcgacaaagttgggcatcagctcattgtgaccatccttggcgcaaaggacctcccttcaagagaggacgggaggccaagaaatccgtacgtcaagatctattttctaccagaccgaagtgacaagaataaacgcagaaccaagactgtcaaaaagacactggaacccaagtggaaccagacattcatatattcgccagtgcaccgcagagagttcagagagcgcatgctggaaatcactctgtgggaccaagcacgcgttcgggaggaagagagtgagttcttgggagagattctcattgaactggaaacagctctgttggacgatgaacctcactggtacaagctgcaaacacatgatgtttcttcacttccgctgccacatccatccccctacatgcctagaagacagttgcacggagagtcccccactcgacgcctccaacggtccaaaagaatttccgacagtgaagtttccgactacgattgtgacgatggcataggcgtcgtgagcgactatcgacacgacggaagggatcttcagagctccactttgagcgtgcctgagcaggttatgagcagtaatcattgttctccttccggcagccctcaccgggtcgacgtgatcggccgtacacgctcttggagtccaagtgtgccccctcctcagtcccggaatgtggagcagggtcttagaggcactcggacgatgaccgggcactacaacacaatttccaggatggaccggcacagagtcatggatgaccactactccccagatagggaccgcgattgtgaggccgcagatcgtcagccctaccacaggtccagatcgacagaacagcgccctcttctggagcgcaccaccaccaggtctagatcaacagagagaccggatacaaatctgatgaggagcatgccatcactcatgacgggtagaagcgcccctccaagtcccgcattatctcggtcacacccccgaacaggttctgttcagacctcaccctcatccacacccgtcgccggtagacgtggaaggcagcttccacagctgccaccaaagggcacccttgaccggaaagctggcggaaaaaagttacgcagcactgtgcagcgcagtacagaaaccggattggcggtcgaaatgagaaattggatgacccggcaggcctctcgcgagtccactgatgggagtatgaacagctatagctccgaaggaaatttaattttccctggtgtgaggctggctagcgacagccaattttctgacttcctagacgggctgggtccagcccagctggtgggtaggcagacgctggcaacacctgccatgggagatattcaagtgggcatgatggacaaaaagggacagctggaagtggagatcattagagccagaggcctggtggtgaaacctggctctaagacattacccgctccttatgtgaaagtctatcttttggacaacggtgtgtgcatcgccaaaaaaaagactaaggttgctcggaagaccctcgagccgctgtaccagcagctgctgtcttttgaagaatcaccgcagggtaaagtattgcaaattatagtttggggtgactacggccgaatggaccataagtcttttatgggtgtggctcagattctcctggacgagttagagttgtcgaacatggtgattggctggtttaagctgttccccccatccagtcttgtcgaccctacccttgccccattaaccaggagggcctctcagtcttcacttgaaagcagtacagggccatcctacagtaggtcatag

SEQ ID NO: 238218 - DNA, 4161 bp, synthetic construct
  misc_feature 1..4161: note = Description of Artificial Sequence: Synthetic coding sequence
  source 1..4161: mol_type = other DNA
atgagtgcacccgtgggtcctcgcggaagactggccccaatccccgctgcatcacagccaccattacaacccgagatgcccgacttatcacatctgacggaagaagagagaaaaataatactggccgtcatggaccgacagaaaaaggaggtgaaggaggagcataaacctcagttgacccaatggtttcccttcagcggaatcactgagctggtaaataatgttctccagcctcagcagaagcaacagaacgaaaaagaaccccaaacaaagctgcaccagcagttcgagatgtacaaggagcaggtgaagaagatgggagaggagtcacagcaacagcaggaacagaagggtgacgccccaacttgtggaatatgccataagacaaagtttgcggacggttgtgggcacaattgtagttattgtcagactaagttttgtgccagatgcggaggacgggtgagccttagaagcaacaaagtgatgtgggtatgcaatctctgtcggaagcagcaagagattctcacgaaaagcggggcatggttttataacagcggcagtaacacacctcagcagcccgaccagaaggtactgaggggattaaggaacgaagaagcgcctcaagagaaaaaaccaaagctgcatgaacagacacagttccaagggccaagtggggacctgagtgtccccgcagtggagaagtcacgtagccacggccttacaagacaacactcgattaaaaacgggagcggtgttaaacaccatattgcctccgacattgcttccgatcgcaagcggagcccctctgtgtccagggaccaaaaccgcaggtacgaccagcgggaagagcgagaagagtattctcaatatgccacaagcgacacggctatgccgaggtccccctccgactatgctgataggagaagccagcacgagcctcaattttacgaggactctgaccatctgagttatagagactcgaatcgacgctcccaccgccattccaaagagtacatagtggatgatgaagatgttgagagtcgcgacgagtacgaacggcagcgacgagaagaggagtaccaatctcgctaccggtctgaccctaatctggcacgctaccctgttaagccacagccttatgaagaacagatgagaatccacgctgaggtcagtcgcgctcgccacgagaggaggcatagcgacgtgtctctggctaacgcggacttagaggatagtcgaattagcatgttacggatggaccgtccaagccgccagagaagcatcagcgagcggagggcagccatggaaaatcagaggtcatacagcatggagaggacgagagaagctcagggaccctcgtcctacgcccagaggacaacgaaccactcgcctcccaccccaaggagatccccgttacccattgaccgacctgacttgagaagaacagatagtttacgtaaacaacatcatctcgatccctcaagtgctgttagaaagaccaagagagagaagatggaaactatgttgcgaaacgacagtctctcatctgatcagtccgaatctgtccgccctccaccacccaagccacacaagtccaaaaagggtggcaagatgcggcagatatctttgtcttcaagtgaggaggagctggcatccacacccgagtacacaagctgcgacgacgtggagatcgaaagtgagagcgtgtctgaaaaaggggatatggattacaattggctcgaccacaccagttggcactcctccgaagccagccccatgagcttgcatcccgtaacttggcagccatctaaggatggtgataggcttatcggacgtatactgttgaacaagcgactcaaggacggcagcgttcctagagacagtggggcaatgttgggtctcaaggtcgtgggcggtaaaatgactgagtcaggaagattgtgcgccttcatcactaaggtcaagaaaggctccctcgccgacactgtgggccatctgagaccaggagacgaagtgctggaatggaacggccgactgctgcagggcgcaacttttgaggaagtctacaatatcatcttggaaagcaaacctgagccacaggtggaactcgttgtgtcccggccaattggagacattccgcgaattccagacagtacacacgcccagctcgaaagttcttccagttccttcgaatcccagaaaatggataggccgagcatcagcgtaacatcgcctatgagccctggtatgcttcgggacgtccctcagttcctaagcggtcagctaagtatcaaattgtggttcgacaaggtaggacaccagctgatagttaccatacttggggcaaaggacctccctagccgggaagatggaagacctcgtaatccttacgtaaagatctacttcttgccagaccgaagtgataaaaataagcgtaggactaaaacagtaaaaaaaactctggagccgaagtggaatcaaacattcatctattcgcctgtccatcgcagagagtttcgtgagcgaatgctcgaaataacactctgggatcaggctcgcgtgcgagaggaagaaagcgagtttttgggcgagatcctcatcgaactggaaacagccctgcttgatgatgaaccccactggtacaaacttcagacgcacgatgtgagctcattgccactgccgcacccctctccctacatgcctaggagacagttgcacggcgaatccccaaccagacgtctccagcggagcaaacgcatttctgactctgaggtctctgattacgattgtgacgacggaataggagttgtatctgactatagacacgatggtcgtgatctgcagtccagtacgctgtccgtgccagagcaggtcatgagtagtaaccactgctccccatccggaagccctcacagggtcgacgtaatcgggaggactagatcctggtcaccctcagtgcctcctccacagtctaggaatgttgagcagggcctgaggggaacacgcaccatgacgggacactacaatacgataagtcggatggaccggcatcgtgtcatggatgaccactactcccccgaccgagactcccatttcctcaccctgcccaggtcccggtacagccagactatagatcatcaccaccgggacggaagggactgcgaagccgcagatagacaaccatatcatagatctcgatccaccgaacagcggccattgcttgaacggacaacaacccgcagccggagcacagagcgacctgataccaatttaatgcgcagcatgccatctcttatgacaggcagatctgcacccccatctccagctttgtctcgaagccatcctcgaacgggtagtgtacagacctctccatcttccacacctgtcgccggaaggcggggacgacaactgcctcagcttccacccaagggtactctggatagaaaagcaggcggaaaaaagctgcggtctactgtgcagcggtctaccgaaactggtctggccgtggagatgcggaattggatgacccggcaagctagccgtgagagtaccgatggttcaatgaattcatattcaagcgagggtaacctgatcttcccaggggtgcggcttgccagcgattcccaatttagcgactttctcgatgggttggggccagcacagttagtaggccgacagactttagctacacctgccatgggggatatccaagtggggatgatggacaagaagggccaactggaggtcgagattattcgggcaagaggcctggtggtgaagccagggagtaaaaccctgccggcaccatatgtcaaggtttatctgctggataatggtgtttgcatcgccaagaaaaagaccaaagtggctaggaagacactggaaccactgtatcagcaactcttatcttttgaggagtctcctcaaggcaaggtgttgcagatcatcgtttggggcgactatgggagaatggatcataagagctttatgggtgtcgcccagattctgctggacgagttggaattgtcaaatatggtaatcggatggtttaagctgtttcctccaagctcactcgtagaccctaccctggccccactcacaagaagggcttctcaaagtagccttgagtctagcacggggccttcatattcccggtcttag

SEQ ID NO: 238219 - DNA, 858 bp, synthetic construct
  misc_feature 1..858: note = Description of Artificial Sequence: Synthetic coding sequence
  source 1..858: mol_type = other DNA
atggggcgacaggggctgggtggagccagtgctgctggcaggtcgatgcagaggtcacagtcaaggtccagcctaagtgccagcttcgaggcactggctggatactttccttgcatgaactcattggaggaagaagagggggaagctggcggtaagaagctgagatccaccgtgcagaggtccaccgaaactggcctggcagtggagatgagaaattggatgacccgccaagcctcccgtgaatctactgacggctccatgaattcctacagcagtgaaggcaacctgatattccctggtgtgcgactggcgtcagatagccagttctctgacttccttgacggactgggacccgcacagcttgtaggccgacagactcttgctactcctgctatgggcgatattcaggtggggatgatggacaagaagggccagcttgaggtggaaatcatcagggcccgaggccttgtggttaaacctggaagtaaaaccctgcccgctccctacgtgaaggtctacctgctcgataacggcgtgtgcattgcaaagaaaaaaaccaaagtggctagaaagacactggaacccttataccagcagctcctatcattcgaagaaagcccccaggggaaagtgttgcagatcattgtttggggggattatggaagaatggatcacaagtcgttcatgggggtggctcagattcttctcgacgagttggaacttagcaacatggtgatcggctggttcaaactattcccccctagctcccttgtcgaccctacactggcccctctcacaagaagagcttcacagtcctccctcgagtccagtaccggcccatcttatagccggagctag

SEQ ID NO: 238220 - DNA, 384 bp, synthetic construct
  misc_feature 1..384: note = Description of Artificial Sequence: Synthetic coding sequence
  source 1..384: mol_type = other DNA
atgaccgagagcggaaggctctgtgcttttatcacaaaggtgaagaagggctcgctggcagatactgtgggtcaccttcgcccaggggatgaagtgcttgagtggaatgggagattgctacagggggcaacttttgaggaggtgtataatattatcctggaaagtaagccggagccccaagtagagctcgtggtgtccagaccaatcggagatataccgaggattccagactctacacacgctcagcttgagtccagccttccgggactggcttggtggctgacccgagtgattccagccttgtgggaagccgaggctggtggtagcagagggcaggaaattgaaacaattctggctaatacggtgaagcccaggctctattag

SEQ ID NO: 238221 - DNA, 4236 bp, synthetic construct
  misc_feature 1..4236: note = Description of Artificial Sequence: Synthetic coding sequence
  source 1..4236: mol_type = other DNA
atgagcgcacccgttggcccacgaggaaggctcgcacctattcccgctgcttcgcagccccctctgcagccagagatgcccgacctgtcccacctaactgaggaggagaggaagatcatcctggcggttatggacaggcagaaaaaggaggtaaaagaagaacataaaccgcagctgacccagtggttcccctttagcggaattacagaactggttaacaacgttcttcagccccagcagaagcagcagaatgaaaaggaacctcagaccaaacttcaccagcagtttgagatgtacaaggagcaggtcaaaaagatgggggaagaatctcagcagcagcaggagcagaagggcgatgctccaacttgcggcatctgtcacaagacaaagtttgccgacggttgcggacacaattgttcttattgtcagacgaaattctgtgcccgttgcggaggacgggtcagtttgaggagcaataaggtgatgtgggtgtgtaacctgtgtagaaagcaacaagagatactgaccaagagtggtgcttggttttataattccggcagtaacacccctcaacagcctgatcaaaaggtgctaagggggctccgcaatgaagaagcaccacaggaaaagaaaccaaagttgcacgagcagacacaatttcagggaccttctggcgacctgagcgtccctgctgtggaaaaatctcgaagccatggactgactcgccagcactctatcaagaatgggagcggtgtaaagcaccacattgcctcggacattgcaagtgataggaagaggtctccctctgtgtcacgtgaccagaatagacggtatgaccagagggaagagcgcgaagaatactcgcagtatgcgacttccgatacagctatgcccagaagtcctagtgattacgctgacagaaggagtcaacatgagcctcagttttacgaggactccgatcatttatcctacagggatagtaacagaaggagccatcgccatagcaaagagtatatcgtcgatgacgaagatgttgagtcgagagatgagtatgagcggcagaggcgggaagaagagtatcagtccaggtatcgtagtgaccctaatttggctcggtatcctgtgaagccccagccctacgaggagcagatgcgaatacacgctgaggtgtcccgagctcgtcatgaaagacgacattctgacgtgtcactggctaatgctgacctcgaggacagcaggatctctatgctcaggatggatcgcccatcgagacagcgcagcatcagtgaacgtagggcagctatggagaaccagcgctcctatagtatggagcgaaccagagaagctcaggggccttcttcctatgctcagagaactaccaaccattcaccccctacgccgagaaggtccccgttgcccatagacagacccgatttgagaaggactgactcccttaggaagcagcaccatctggatcctagctccgctgtccgcaaaacgaaacgtgaaaaaatggagacgatgttgagaaatgactctctgtcctcagatcaatccgaaagtgttcgacctcccccaccaaaaccccacaaatcaaagaaaggaggcaagatgcgtcagattagtctgagctcttcagaggaggaactagcttctacgccagagtatacatcatgtgacgacgtagaaattgagagtgagagcgtcagcgagaagggagattcacagaaagggaaacgcaagacgagcgagcaagcagtactctcggacagcaatactagaagcgagcgccaaaaggagatgatgtattttgggggacattcgctcgaggaagatttagagtggtctgagccccagattaaggattccggggtcgacacttgttcctcaactacactaaatgaggaacatagccactccgacaaacatcccgttacctggcaaccctccaaagatggcgatcgtctcatagggaggatactgttgaataagagattgaaggacggatctgtccctagagactccggagcgatgttgggtctgaaggtggtaggcggaaagatgaccgagtcaggcagactctgcgcgtttatcacaaaggtcaagaaagggagtttggccgatacagttgggcatctgcggccaggcgacgaagtgctggagtggaatggaagactgctccagggggctacttttgaggaagtttacaatattatccttgagtcaaaacccgaaccccaggtggaactggtggtttcgcggcctatcggcgatataccgagaatcccagatagcacacacgcacagctggagtcctcttcgagttcctttgaatctcagaagatggaccgcccatccattagcgtcacctctccaatgtccccaggcatgctcagagatgtgccgcagtttttgtctggacagctatccattaaattgtggttcgataaagttggacatcagctgatagtgaccattctaggggcaaaagatttaccaagccgcgaggacgggcgaccaaggaatccatacgtgaagatctatttcctccccgacagatccgataagaataagcggagaaccaaaacagtcaagaaaacactcgagccgaaatggaatcaaacctttatttacagcccggtgcaccggcgagagtttcgggagcgcatgttggaaattaccctgtgggaccaggccagagtgagagaagaagaatcggaattcttgggtgagatcctgatcgagcttgaaacggcactgcttgacgatgagccgcactggtacaaactgcaaacccacgacgtgtcatccctgccactcccccacccgtcaccctacatgccgcgtcgccagctccatggagagtccccaaccagacggcttcagcgctccaagcggatctccgatagtgaagtttctgactatgactgcgatgatgggattggggttgtcagtgattacagacacgacggtcgcgatctgcagtcaagtaccttgagtgtgcccgagcaggtgatgtcatctaaccactgttctcccagcgggagtcctcatcgggtggacgtcatcgggagaactcgatcgtggagcccaagcgtgcctccaccacagtcgcggaacgtagagcagggcctccgcggaacacgcactatgaccggccactataatacaatctcgcggatggataggcatagagtcatggacgaccactacagtcctgaccgagacagggattgtgaagccgcagacaggcaaccttaccacagatcacgatctacagagcaaaggcccctcctggagcgaacgactacacgaagtcgttcaacagaacgccctgacactaacctcatgagatcgatgcctagcctgatgaccggccgtagtgcccctccgtcgcccgctctgtccagaagccatccacgaaccggatctgtgcagacatcacctagctctacccccgttgccggtagaagaggtcggcagctcccacagctgccaccaaagggcaccctggataggaaagctggcggaaagaagctccggtcaaccgtccagcgcagtacagaaacaggcctggccgtggaaatgagaaactggatgactcgtcaagcaagtcgagagtcaaccgatggatctatgaactcttatagcagtgaaggcaacctcatttttccaggtgtgcgcctggcatccgattcccagttcagcgattttctggacggtctcggacccgctcagctggttgggcgacagacactggcaactcccgctatgggggatattcaggtaggcatgatggacaagaaaggacagctggaagtggagattattcgtgcacgcggactggtagtgaaacccggaagtaagaccctgccagcaccctatgtgaaggtatacttgcttgataacggagtgtgcattgccaaaaaaaaaaccaaggtggcaaggaaaactctggagccgctgtatcagcagctgctctcgttcgaagaaagcccccagggtaaggtgctccagattatagtgtggggggactatggcagaatggatcacaagagctttatgggagtggcgcagatccttctggatgagctcgagctctctaacatggtgattgggtggttcaaactctttccaccctcctctctcgttgatcccacactagctcctctcacacgaagagctagccagtcaagcctggaatctagtaccggcccatcgtactctagaagttag

SEQ ID NO: 238222 - DNA, 4050 bp, synthetic construct
  misc_feature 1..4050: note = Description of Artificial Sequence: Synthetic coding sequence
  source 1..4050: mol_type = other DNA
atgtctgcaccggttggacccaggggacgcctggcacctattcctgcagcttctcagcctccactccaaccagaaatgcctgacctcagccatcttactgaggaggaacggaaaattattctggctgttatggaccgtcaaaagaaggaagaggaaaaggagcagagcgtcctcaagaagctacatcaacagtttgaaatgtataaggaacaggttaagaaaatgggcgaggagtcccagcagcagcaggaacagaagggtgacgcaccgacatgtggaatatgtcataaaaccaagtttgccgacggttgcggacacaattgcagctactgccagaccaaattctgcgcccgatgcggaggacgagtttctctgcgcagcaataaggttatgtgggtctgtaacctgtgcaggaaacaacaagagatcttgacgaagtcaggtgcgtggttctataattccggttctaacaccccacagcaacccgatcagaaggtgttaagggggctgagaaacgaagaggccccacaagagaagaagccaaagcttcatgagcagactcagttccaggggcctagcggagacctctccgtgcctgccgtcgagaaatccagaagccacggactgacacgccagcactccatcaaaaatggttcaggcgtaaagcatcatattgcctctgacatagcatctgaccgaaagaggtccccatcggttagtcgcgatcagaatagaagatatgaccagagggaagaacgggaagagtatagtcagtacgctacatccgacactgcaatgcctcgtagtccttcagattacgcagataggagatctcagcatgagccacaattttacgaagactctgaccatttatcataccgggatagcaatcgcaggtcccacaggcattccaaggagtacattgtcgatgatgaggatgtggagagtcgggacgagtacgagcgacagcgcagagaagaggagtaccagagcaggtacagaagcgatcccaatctggctcgctacccagttaagccacagccgtacgaagagcaaatgcgcatccacgcagaggtgagcagagcccgtcacgaacgaagacattctgacgtgtctctggcaaatgcagatttagaggatagtcgtatctcaatgctgaggatggaccgacccagtcgccaacgttctatttccgagcgccgtgctgcaatggagaatcaacggtcctactccatggaacggacacgggaggcacaaggacctagctcatacgcccagaggaccaccaatcattcgcctccgacacctcggcgaagccccctccctattgataggccagatctgcggaggaccgactcattacgaaaacagcatcatcttgatccctcaagcgccgtcaggaagacaaagcgggaaaagatggagactatgctacgcaacgactctctgagcagcgaccagagcgagtctgtgcggccacccccaccaaaacctcataagagcaaaaagggcggaaaaatgcgccaaatctctctgtcttcatcagaggaggaactggcatctactcctgaatacacaagctgtgacgatgttgaaatcgaaagcgaaagcgtcagcgagaagggcgacatggactacaactggctggatcacacatcctggcacagttctgaggcttctccgatgagtctccatccggtgacctggcagcctagcaaggatggggatcggcttattggaaggatactgcttaataagcgcctgaaggacggatcggtccccagagatagcggggcaatgctcggtctcaaagttgtgggtgggaaaatgaccgagtcgggacgtttgtgcgccttcattacaaaggtgaaaaaaggtagcctggctgatactgtgggccatctgagacctggagatgaggtgcttgaatggaacggcagactgctccagggggcaacctttgaagaggtgtacaatatcatcctcgagtctaaacccgaacctcaagtcgaactcgtcgtgtcccgacctataggtgacattcctaggattcccgattcgacgcatgcacagcttgagtctagctcgtcctcattcgagtcacaaaaaatggatcgtccatctatctcagttacatctccaatgagccctggcatgctccgagacgttcctcaattcctgtccgggcagctttctagtcaatccttgtctagacggactaccccattcgtgccacgagttcaaatcaagctctggtttgataaggtgggacaccagttgatagtgacaattctgggcgctaaggacctacccagtagagaagacggcagaccacggaatccctacgttaagatttacttcctacccgacaggtcagataagaacaagagaaggaccaagactgttaagaagaccctggaacccaaatggaatcagacgtttatatacagccctgtacacaggagggaatttagggagcggatgctggaaattactctgtgggatcaggctcgcgttcgggaggaagagtccgaatttctgggcgagatccttattgaattggaaaccgcactgctcgatgatgaaccccactggtacaagctgcaaactcacgatgtatcaagcctgccactcccccatccgtctccatacatgcctcgcaggcagttacacggcgagtcccccaccaggcggctgcagcgaagcaaaaggatctcagacagtgaagtcagtgattatgattgcgacgatgggattggggtcgtttctgattaccggcatgacggacgcgatttacagtcttccaccctctccgtgccagaacaagtgatgtcttcaaatcactgctcaccgtcaggttcaccccatcgcgtggacgttattgggagaactaggtcatggtccccaagcgtgcctccaccgcagtcgcgaaacgtcgagcaggggttgcgaggcaccagaacaatgacaggccactacaacactatcagccgcatggacagacacagggtcatggatgaccattactcccccgatcgggacagagattgtgaagcagcagacagacaaccttaccacaggtcaaggagcactgaacagaggcctctgctcgagagaaccacaaccaggtcaaggtcaactgaacgacctgacacaaatctgatgaggagtatgccttctctgatgaccgggagaagtgcacccccttcccccgctctgagccgctctcacccacgaaccggttccgtccagaccagtccttcaagcacccctgtggctggaagacgcggacggcagctcccccaacttccccctaagggcaccctggaccgcaaggccggaggcaaaaagttgagatccacagtgcagcggtccacggagaccggactagctgtagagatgcgtaactggatgacaaggcaggcttctagagaatctactgacggctctatgaacagctattcctccgaggggaacttaatttttcctggtgtccgtctggcttcagatagccaattctctgatttccttgacggcctcggtccagcgcagctcgtgggtaggcagaccctagccacaccggctatgggggacattcaagtcggaatgatggacaaaaagggccagctggaagtagagattatccgcgcacgtggactcgtggttaaacccggatctaagaccctcccagccccatacgtcaaagtctacctgctcgacaatggagtctgcatagcaaaaaaaaaaaccaaagttgccagaaagaccctggagcccctgtaccaacagctcctctctttcgaagaatctcctcagggtaaagtgctgcagattatcgtgtggggcgattacggcaggatggatcataagtcatttatgggagtcgctcagattctacttgacgagctggagctatccaacatggtgataggatggttcaagttattccctccgagcagtctggtcgaccctacactcgcgcctctcaccaggagagcttcccaaagttctttagagagctctacggggccttcctattcacgcagttag

SEQ ID NO: 238223 - DNA, 3492 bp, synthetic construct
  misc_feature 1..3492: note = Description of Artificial Sequence: Synthetic coding sequence
  source 1..3492: mol_type = other DNA
atgcagtttgagactttgaggcaggtgtgtaactccgttctctctcacttccatggagtcttctcctcaccccctaacattctgcagaacgagttattcgggcagacactgaacaatgctcgcaagcgtagcccatcagtttctcgggaccagaataggagatacgatcagcgagaggaaagagaggagtatagtcagtatgcgacatctgacacagccatgccacgcagcccttccgactatgccgataggcgctctcagcacgaacctcagttctacgaggatagcgaccatctctcctaccgtgacagcaacaggagaagtcaccgccactctaaagagtatattgttgacgatgaagacgtggagagtcgcgacgagtatgaacgccagcgccgagaagaggagtaccagtctcgttatagatctgaccccaacctcgcgaggtatcccgtaaaaccccagccttacgaggagcagatgaggatacacgcagaggtgtctcgagccaggcacgagcggagacacagtgacgttagtctcgccaatgctgacctggaggactctcgtattagcatgctacgcatggacaggcccagccggcagcgatccatctcagagcgtcgggcagctatggagaatcaacgctcgtattccatggaacgaaccagggaggcccagggaccaagcagctatgctcagcgcacaactaaccacagccccccaactccacgccgtagcccgttgcctatcgatcgtcccgacctccgtcggaccgacagtctgcgcaagcagcatcacttggacccctcgtccgcagtgcgcaagacaaagagagaaaagatggaaactatgctgcgaaacgactccctgagctctgatcagtccgaatctgtgcgccctccccctcccaagcctcataaatcaaagaaaggcggtaagatgcgtcagatttccctttcctcttccgaagaagagttggcctctaccccggagtatactagctgtgacgacgtggaaattgaatctgaatcagtttccgaaaagggggacatggactacaactggctcgaccacaccagctggcactcgagtgaggcatccccaatgagcctgcatccggtgacctggcagcccagtaaggacggagaccgccttattggcaggatcctactgaataaacgactgaaagatggttctgtgccccgtgattctggggctatgctggggcttaaagtcgtgggcggaaaaatgacagagagcggcagactttgcgccttcatcacaaaggttaagaagggcagtttagcggatacagtcggacacctccggcctggtgatgaagtgttggagtggaatggaagactgttgcagggtgccaccttcgaggaggtgtacaacatcattctcgaaagcaagcccgagccccaagtggagctggtggtcagcagaccgataggtgacattccacgcattccagactcgactcatgcgcaacttgagtcctcttcttcttcttttgagtctcagaagatggacaggccttccattagtgttacatcgccgatgtctccaggcatgctccgagatgtccctcagtttttgagcggccagctgagtataaagttatggttcgacaaagtcggccaccaactgatcgtcacgatactgggagctaaggatcttccttccagagaggatgggagaccacggaatccatacgtgaagatctactttctaccagatagaagtgataagaataagcgtaggaccaagaccgtcaagaagacgttagagcccaaatggaaccagaccttcatttactccccggtgcaccgaagggaattccgtgagcgcatgcttgagatcacactgtgggaccaagcacgggttcgagaagaggagtccgaatttctgggggagatccttatcgagttggagacggcccttctcgatgatgagccccactggtataagttgcagacccacgacgtgtcttccctacccctacctcacccctcaccttacatgccaaggaggcagctgcacggtgaatcacctactaggcgactgcagagatcgaagcggatcagcgattctgaagtgtctgattacgactgcgacgatgggattggcgtggtttcggactaccggcatgacggtagggaccttcagtcttcaacactgagcgttcccgagcaagttatgagctctaaccactgtagcccctccggcagtccacaccgggttgacgtgattggacgtacacgcagttggtcaccatccgtccctccaccccagagccggaacgtcgagcagggactccggggaacacgtactatgactggccattataacaccataagcagaatggacaggcaccgggtgatggatgaccactacagtccagatcgcgacagtcacttccttactctccctcggtcccgatatagccagaccatcgaccaccaccaccgcgatggcagggattgtgaggcggctgatagacagccataccacaggagtaggtctaccgagcaaagaccgttgcttgagaggacgacaactcgttcgagatccaccgaacgcccagatacgaacttgatgcgaagtatgccctctctgatgacgggcagaagtgcccctcctagccccgctctttcgcgaagtcaccccaggactgggtccgttcagaccagcccttccagtacccccgtagcagggaggcgcggaagacagctgccccaactccctcctaaggggaccctagacagaaaagccggtgggaagaaactgcggagtacagttcaacgatctaccgaaactggcttagctgtggagatgcggaattggatgacaagacaagccagccgcgaatccacagacggctccatgaatagctactctagtgaaggcaatcttatcttcccaggggttcggttggcttcagactcccagttcagtgattttttggacgggttagggcctgctcagctggtcggcaggcaaacactggccaccccggcaatgggcgacatccaggttggtatgatggacaagaagggccagctggaagtcgaaattattcgggctcggggactggtggttaagcccggttctaagacgctgccagcaccctatgtaaaggtttacctgctcgacaatggtgtctgtattgccaagaagaagaccaaggtcgcccgaaaaacactagagcccttgtaccagcagttgctgtctttcgaggaatcaccacaggggaaggtgctccaaatcatagtctggggagattacggtcgaatggaccataagagcttcatgggcgtggcgcagatcctgttagatgagcttgagctgtccaacatggtgatagggtggttcaaactcttcccccctagctccttggtcgacccgacactcgcacctcttacaagaagggcctcacagagcagtctggagagttcgacaggcccatcctattcaaggtcttag

SEQ ID NO: 238224 - DNA, 927 bp, synthetic construct
  misc_feature 1..927: note = Description of Artificial Sequence: Synthetic coding sequence
  source 1..927: mol_type = other DNA
atgttcaatggagaacccggtccagcctcctccggagcatctcgcaatgttgtgcggagctcctcaatttctggggaaatctgtggcagtcagcaggccggtgggggtgccggaacgaccacagccaagaaacgccgaagctccctgggtgccaagatggtggcgatcgtgggtctgactcagtggtctaaaagcactctccagttgccacagcctgagggagctaccaagaagctgcgcagcaatattcgtaggtctactgagactgggatagcagtcgagatgcgcagcagggtgacaagacagggcagcagggaatccacagacggctcgactaattcaaatagtagcgatggtacttttatctttcccacgacaagactcggtgccgaaagtcagttctcagacttcctcgatgggctggggccagcacagatcgtgggcagacagacactggcaactccacccatgggtgatgtacatattgctatcatggataggtccgggcagctggaggtggaggtgattgaggctagaggcctaaccccaaagcctggttccaaatcactgcccgcaacatacatcaaagtttacttgctcgagaatggcgcttgcctcgccaagaaaaaaacaaaaatgaccaaaaagacatgcgatccactgtaccagcaagccctcctctttgacgaaggcccacagggaaaggtcttgcaggtgatcgtatggggcgattacggtcgcatggaccacaaatgctttatgggcatggcacagattatgctggatgagcttgatttgtcagctgcagtaactggatggtataaactgtttcccacctcctctgtggccgacagcacactcggatccctgacccgacgcctttcccagtctagcttagaatcagcaacctccccaagctgcagctag

SEQ ID NO: 238225 - DNA, 927 bp, synthetic construct
  misc_feature 1..927: note = Description of Artificial Sequence: Synthetic coding sequence
  source 1..927: mol_type = other DNA
atgttcaacggcgaaccgggacctgcctcctctggtgctagtaggaatgttgtcaggtcgagctccatctctggagagatctgtggatcccagcaggcagggggtggagccggtaccacaaccgctaaaaaaaggagatccagcctgggggctaaaatggtagccattgtaggactaacgcagtggtcaaaatctacattacagctcccccagcccgagggtgctaccaagaagttgaggtccaacatccgtcgctctacagagaccggcatcgccgtcgaaatgcgatcacgagtgacacgtcagggctcgcgtgaaagcactgacggctccaccaacagcaactcttcagacggcacgttcatatttccaaccactagactgggagccgaatcccagttttccgactttcttgacggcctgggcccagcccagattgtgggcagacagactttagccacaccaccgatgggggacgtccatatcgctataatggacaggtcgggtcagctggaagttgaggtgatcgaggcccgaggcttgactcctaagccaggcagtaagtcgcttcctgctacctatattaaagtgtatcttctagaaaatggagcctgtctggcaaaaaaaaaaaccaagatgaccaaaaagacatgtgaccccttgtatcagcaggcgctcctgttcgacgaaggccctcagggaaaagtgcttcaagtcatcgtgtggggagattatggcagaatggatcacaagtgtttcatgggaatggcacagatcatgcttgacgagctcgatctgtccgcagccgtgactggatggtacaagctgtttcccacttctagtgtggccgacagtactctcggctctctgacacgtcgtctgtcacagagctccctcgagtccgcaacctctccctcttgttcatag

SEQ ID NO: 238226 - DNA, 810 bp, synthetic construct
  misc_feature 1..810: note = Description of Artificial Sequence: Synthetic coding sequence
  source 1..810: mol_type = other DNA
atggagcgttcacagagtcggctcagtctgagcgcaagtttcgaagcgctcgccatctacttcccttgcatgaattctttcgacgatgaagatgccggtgattctcggcgtttgaagggagctatccagaggagtacagagaccggccttgcagtggagatgcctagtagaactctgcggcaggcctctcacgagtctattgaggattctatgaactcctatggatcagaaggcaacttgaattacggcggtgtatgtctcgctagcgacgcccagttctccgatttcctgggctcaatgggacccgcacaatttgtcggtaggcaaaccctcgcgaccacacccatgggggacgtggagattggcctgcaggagaggaatgggcagctagaggtggacataatccaggcaagaggcctgacagctaagcctggatccaagaccttgccagcagcctacattaaagcctacttgctggagaatggaatctgcattgccaagaagaagactaaggtcgcacggaaatccctggatccactgtacaatcaggttttactctttccagagagtccccagggaaaagtcctgcaggtcatagtgtggggaaattacggcaggatggagaggaaacagttcatgggggtggccagagtgctgctggaggaactggaccttaccactcttgccgtgggttggtataagctgtttcccacttcctctatggtcgacccagccactggcccactgctccggcaggcttcacagttatccctggagagcactgtgggtccttgcggcgagaggagttag

SEQ ID NO: 238227 - DNA, 813 bp, synthetic construct
  misc_feature 1..813: note = Description of Artificial Sequence: Synthetic coding sequence
  source 1..813: mol_type = other DNA
atggaacggtcccagtcaaggttgtctctatcagcttccttcgaagcactcgccatctatttcccgtgtatgaacagcttcgacgatgaggacgccgagggggattcccgacgcttgaagggggcaattcaacggagcaccgaaacaggcttggcagtggagatgccttctaggacactgaggcaagccagtcacgagtccatcgaggactcaatgaattcgtacggaagcgaaggcaacctcaattatggaggtgtgtgcttagcctccgacgcacagttctctgattttttggggtcaatgggaccagcccagtttgtgggtagacagaccctggcaactactcccatgggagatgtggagatcggcctgcaagagcgaaacgggcagctggaagtggacatcattcaggccaggggtctcactgccaaaccaggttcaaaaactctgccagccgcttatatcaaggcttacttgctggagaatggcatttgtatcgctaaaaagaagacaaaagtggctaggaagtcactggaccctctctacaaccaagttcttctatttcctgaatctcctcagggcaaagttcttcaagtcatcgtttggggtaattatgggagaatggagcgcaaacagttcatgggggtggccagggtcctactggaggaacttgaccttacaacattggcagtgggatggtacaaactgttcccaacatcttcgatggtggatcctgccaccggccctctgttgaggcaggcctcgcagttgtccttagaaagcactgtgggcccttgcggagagcggtcatag

SEQ ID NO: 238228 - DNA, 759 bp, synthetic construct
  misc_feature 1..759: note = Description of Artificial Sequence: Synthetic coding sequence
  source 1..759: mol_type = other DNA
atggaagacggagtcgccggacctcagcttggcgctgcagcggaggcagccgaagctgccgaagcacgggctaggcccggagtaacgttacgcccttttgccccactgtcaggtgccgcagaggcggatgaggggggtggcgactggtcattcatcgactgcgaaatggaggaagtggatttgcaggatcttccatcggcaactattgcttgtcatcttgatccccgagtatttgtggatggcctctgcagggccaagtttgaaagcctctttcgaacatatgataaagatattacattccaatattttaagtcttttaaacgggtgcggattaacttcagtaatccattctcagcggctgacgctcgcctgcaactgcataagactgaatttttgggaaaggaaatgaagctctacttcgctcaaaccttacacatcggaagtagtcacctcgccccaccgaatcctgacaagcagttccttatcagcccgccagccagcccaccagtgggctggaagcaagtggaagacgcaacaccagtgataaactatgatttactgtacgctatttcaaagctggggcctggggagaaatacgagctccacgccgctactgacaccaccccctctgtggttgtgcatgtgtgtgagtccgatcaagaaaaggaagaagaggaagaaatggagcgcatgaggcgaccgaaacctaagataatacagacaagaagacccgaatatacccctatccatctgagttag

SEQ ID NO: 238229 - DNA, 594 bp, synthetic construct
  misc_feature 1..594: note = Description of Artificial Sequence: Synthetic coding sequence
  source 1..594: mol_type = other DNA
atgcactttcgaaactttaattatagcttctctagtctcatagcttgtgtagcgaactctgacatctttagtgagagcgaaacacgcgcaaagtttgaaagtctttttaggacatatgacaaggacataacctttcagtactttaaaagcttcaagcgagtcaggattaacttttccaaccccttttctgccgctgatgctagactgcagctccacaagaccgagttcctgggcaaagaaatgaagttatacttcgcccagacactgcatattgggagctctcacctcgctccaccgaatcctgacaaacaatttctgatctcacccccagcttctcctcccgttggctggaagcaggtggaagacgccacacccgtcatcaattatgacctgctgtacgcgatttctaagctggggcctggagaaaagtatgaattgcacgctgcaacagataccacgccttctgtggtggtacatgtgtgtgaaagcgatcaagagaaagaagaggaagaggaaatggagcggatgcgaaggccaaagcctaagattatacagacacggaggccggagtacacccccattcacttgtcgtag

SEQ ID NO: 238230 - DNA, 729 bp, synthetic construct
  misc_feature 1..729: note = Description of Artificial Sequence: Synthetic coding sequence
  source 1..729: mol_type = other DNA
atgcagggagagcagggcagacggctgttcaggctgttgctgaatgacctccccggaagggaccggctgccttgcagctatcctcagcctcacgtggaacaggcatccactagcgcgtccccccgtctcctggctgtcaacatccccgaagatacactgctcagttacccggaatcgtccctccccctgcagaggcactgtgcattccatcgattctccaaagccaagtttgagtccttgttccgcacctatgacaaagatatcactttccagtacttcaagtcgttcaagcgggtgcgcatcaatttctcaaacccattctccgctgccgatgcccgtctgcagcttcacaaaaccgaatttcttggtaaggagatgaagctttacttcgcccagaccttacatatcggcagttctcacctggccccacctaacccagataagcaatttttgatttctccccctgcgagccctcccgtcgggtggaagcaagttgaggatgcgacgcccgtcatcaactatgaccttttgtatgccatttccaagctggggccaggtgaaaaatacgagttgcacgccgcaactgacactaccccgagcgtggttgtacatgtgtgtgaaagcgatcaggaaaaagaggaggaggaagaaatggaaagaatgaggcgacccaaaccaaagataattcagacgaggcggcctgagtatacgccaatccacctctcatag

SEQ ID NO: 238231 - DNA, 354 bp, synthetic construct
  misc_feature 1..354: note = Description of Artificial Sequence: Synthetic coding sequence
  source 1..354: mol_type = other DNA
atgaagttgtatttcgctcagacattgcacattggctcctctcatctggcgcctccaaaccctgacaagcagtttctgatctccccccctgcttcacctccagtgggctggaaacaggtcgaggatgccacacccgtcattaactacgaccttctatatgccattagcaaactagggcctggtgagaagtatgagctgcacgccgctactgatacaactccatccgtagtggtccacgtgtgcgaatccgatcaagaaaaggaggaagaagaagagatggaaaggatgaggcggccaaagcccaaaataattcagacccgtagacccgagtacacccctatccatctgtcctag

SEQ ID NO: 238232 - DNA, 354 bp, synthetic construct
  misc_feature 1..354: note = Description of Artificial Sequence: Synthetic coding sequence
  source 1..354: mol_type = other DNA
atgaaactctactttgcccaaacgctgcacataggaagttctcatctggccccacctaaccctgataaacagttcctaatatcaccaccagcaagccctccagtgggctggaaacaagtggaggatgctaccccagttatcaactatgacttgctttacgcgatatccaaactgggcccaggcgaaaagtatgaactgcatgccgcaactgacacgacaccatctgttgtcgtgcacgtgtgtgagtcagatcaggagaaagaggaagaggaggagatggagagaatgaggcggcctaagccaaaaattattcagacccgcagacctgaatacacccccattcacctgagctag

SEQ ID NO: 238233 - DNA, 354 bp, synthetic construct
  misc_feature 1..354: note = Description of Artificial Sequence: Synthetic coding sequence
  source 1..354: mol_type = other DNA
atgaagctgtattttgcccaaactcttcacatcggcagctctcatcttgcgccaccgaaccctgacaaacagtttcttatttctccaccagccagtccccctgtaggctggaagcaagtggaagacgccacaccagtaatcaactatgacttgctgtatgccattagcaagctcggccctggagagaaatacgaactccacgctgctactgacacaacaccatcagtggtggttcacgtttgtgagagcgaccaggaaaaagaagaggaagaggaaatggaaagaatgagaagaccaaagcccaaaataatccaaactagaaggcctgagtatacacctatccacttgagctag

SEQ ID NO: 238234 - DNA, 732 bp, synthetic construct
  misc_feature 1..732: note = Description of Artificial Sequence: Synthetic coding sequence
  source 1..732: mol_type = other DNA
atgagaggtgagtcttatttcattggaatgaggtcacccggacaacaggggcacgttcccgaggacggaggtctgttccttctctgttgtattgacagagattgggccgttacgagatgttttgccgaggaggcattccaagccataaccgatttcaacgatctgcctaacagcctgttcgcctgcaatgtgcatcagtctgtgttcgagggcgaggagtcgaaggaaaagtttgaaggcttgttcagaacctatgacgactgtgtgacttttcaactgttcaagtccttccgcagggtccgcatcaacttctcaaacccaaagagcgcagcgagagcgagaatcgaattgcacgagacccaattccgaggtaagaaattgaaactctattttgctcaagtgcagacccccgagaccgatggtgataaactccacctggcccctcctcagccagcgaaacagttcctgatatctccgccttccagccccccagtcgggtggcagcccattaacgacgccactcctgtgcttaactacgatcttctgtacgccgtcgctaaactcgggccaggggaaaagtacgaacttcatgcgggtactgaatctacacccagtgtggttgtgcatgtctgtgacagcgatatagaggaggaagaggacccgaagacatcccctaagccaaagattattcagacacgaaggccaggccttcctccaagcgtcagcaactag

SEQ ID NO: 238235 - DNA, 594 bp, synthetic construct
  misc_feature 1..594: note = Description of Artificial Sequence: Synthetic coding sequence
  source 1..594: mol_type = other DNA
atgcccgcaccctccatggattgcgatgtctcaacactcgtagcatgcgtggtggatgtcgaagtcttcaccaatcaagaagtcaaagagaagtttgaaggattgtttcgcacttacgatgattgtgtgactttccagttgtttaaatctttccgcagagtcagaattaattttagcaatcccaaatctgcggcaagggctcgaatcgaactacacgaaacccagttcagggggaagaaactcaagctttacttcgcacaggtgcagactccggaaacggacggcgacaaactgcatctggctcctccccaacctgctaaacaattcctgatctctcccccttcctctccacccgtaggctggcagccgattaatgacgcgacccccgttttgaactacgatttgctctacgccgtggctaagttggggccaggcgaaaagtacgaactgcacgcagggaccgagtctacaccaagcgtcgtcgtacacgtctgcgattcggatatcgaggaggaggaggatcccaaaacgtcacccaagcctaagattatacagacacggaggccaggactcccgccaagcgtgtcaaattag

SEQ ID NO: 238236 - DNA, 732 bp, synthetic construct
  misc_feature 1..732: note = Description of Artificial Sequence: Synthetic coding sequence
  source 1..732: mol_type = other DNA
atgcgaggcgagtcctactttataggcatgaggagccctggacagcaaggtcacgttccagaggacgggggactctttctgctgtgttgtattgatcgtgattgggccgtcactcgctgctttgctgaggaagcctttcaggccatcactgactttaatgacctcccaaactcacttttcgcctgtaatgtgcaccagtcggtgtttgagggagaagaaagtaaggaaaaattcgagggcctgttccgcacatatgacgattgcgtcacctttcagttgttcaaatcttttagaagagtgcgaattaacttctccaacccaaagtcagcagccagagcacgtatcgaactgcacgaaactcagttcagaggaaagaaactgaagctgtatttcgcccaggtgcaaactccagaaactgacggtgataagctgcacctcgcccctcctcagccggctaaacagttcctcataagtcccccttcctctccccctgttggttggcagccgatcaacgacgctactcccgtactaaactacgacctgctgtacgcagttgcgaagctgggtccaggcgaaaaatatgaactccacgcaggcacagagtctacgccaagcgtggtggtccacgtatgtgattcagatattgaggaggaggaggatcccaagactagcccgaaaccaaagattattcagaccaggaggcctgggctcccgccatctgtctccaactag

SEQ ID NO: 238237 - DNA, 732 bp, synthetic construct
  misc_feature 1..732: note = Description of Artificial Sequence: Synthetic coding sequence
  source 1..732: mol_type = other DNA
atgcgaggcgaatcatatttcattggtatgcggtcccccggacagcagggacacgtgccggaagacggcggtctgttccttctctgctgtatcgaccgtgattgggccgtcacccgctgcttcgcagaggaggcatttcaggctatcactgattttaatgaccttccaaactctctgttcgcatgcaacgtgcaccaatccgtgttcgagggcgaagaaagcaaagagaagttcgaggggctatttaggacctacgatgactgcgtgacctttcaattgtttaagagtttcaggcgagttagaataaacttcagtaaccctaagtcagccgctcgagcccgaatcgaactacacgaaactcagttccgcggaaagaagttgaagttatatttcgcacaggtacagaccccagaaaccgatggagataaactgcatcttgcaccgccacagcccgcaaaacagtttcttatttcacctccaagctctccacctgtcggctggcagccaatcaatgatgcgactccggtccttaactacgatttgctctatgctgtagcgaagctcggtccgggtgaaaagtacgagcttcatgcaggcacggagtctaccccctctgtcgtggtacatgtgtgtgactccgacattgaggaagaagaagatcccaagacaagcccgaagccaaagatcattcaaacgcggagaccaggcctcccgccttctgtgagcaattag

SEQ ID NO: 238238 - DNA, 1596 bp, synthetic construct
  misc_feature 1..1596: note = Description of Artificial Sequence: Synthetic coding sequence
  source 1..1596: mol_type = other DNA
atggtggacgttggaaagtggcctatttttaccttgctgtccccgcaggaaatcgcatccattagaaaagcgtgcgtcttcggcacgtctgcatcagaggcgctctatgtaaccgacaacgacgaggtttttgtgtttggattgaattactcaaattgcctggggaccggggacaaccagtccaccctagtgcctaaaaaactggagggcctatgcgggaaaaaaatcaaatccctctcctacggcagtggaccgcacgtccttctgtcgacagaggatggtgtggtttacgcgtggggccataacgggtactcccagttgggtaacggcaccaccaaccaggggatagcaccggtgcaggtttgcacgaatctgttgatcaaacaggtggtggaggtggcttgcgggtctcatcactcgatggcactggctgcggacggggaagtgtttgcttggggctataacaactgcggccaggttgggtcaggaagcaccgctaatcagccaacccccagaaaggttacaaactgcttgcacattaaacgggttgtgggtattgcctgcgggcagacgagttcaatggccgtgcttgacaacggcgaagtgtatggttggggatacaacggcaatggtcaattaggcttgggcaacaacggcaatcagttgacacccgtacgggttgcggcattgcactctgtgtgcgtgaaccagattgtctgcgggtatgctcacaccctggccttgactgacgagggtctcctgtatgcttggggtgccaacacatatggacaactcggcaccggaaataaaaataacctcctgtcacctgcccatatcatggttgagaaggagcgagtcgtggaaatcgccgcatgccattcagcgcatactagtgccgctaaaacccaagggggtcatgtttacatgtggggccagtgccgaggccagagtgtcattctgccacaccttacacatttttcttgcacggatgacgtctttgcctgtttcgcaacaccggctgtcagttggcgtctgctctcagtggaacacgaggacttcctgacggtagctgagtcgctaaagaaagaattcgattcacccgagaccgcagatctgaaattccggattgatgggaaatacattcacgtgcataaggcagtgttgaagatccgttgtgaacactttcggtctatgttccagagttactggaacgaggatatgaaagaggtgatagaaatagatcagttcagttatcctgtgtatcgcgcatttctgcagtacctgtatactgatactgtggatttacccccagaggacgccattgggctgctggacctggcgaccagctactgcgagaaccgacttaagaagctgtgccaacatataatcaagcggggaattactgtggagaacgcatttagtctcttcagtgcagcggttcggtatgacgctgaggatctggaagaattttgtttcaaattctgtataaatcacctgactgaagtgacccaaacagcagccttttggcagatggacggaccgctgctcaaggagtttattgcgaaagcatccaaatgcggggctttcaagaattag

SEQ ID NO: 238239 - DNA, 1596 bp, synthetic construct
  misc_feature 1..1596: note = Description of Artificial Sequence: Synthetic coding sequence
  source 1..1596: mol_type = other DNA
atggtcgacgtcggtaaatggcctatttttactttgttaagcccccaggaaattgcatctatacggaaagcctgtgtatttggaacttcagccagcgaggccttgtacgtgactgataatgatgaagtgttcgtctttggactgaattattcaaactgtctggggaccggagacaaccagagcaccctcgtgccaaaaaaactcgaagggctgtgtggtaaaaagatcaaatccctgtcctatggatctgggccacatgttctgctgagtacagaggatggtgtggtgtatgcttggggacacaacgggtactctcagttgggtaacggcaccaccaaccagggcatagctccagtccaggtgtgcacaaatctgctgatcaaacaggtggtcgaggtcgcttgcgggagccaccactcaatggcactggcggcagacggtgaagttttcgcctggggctataacaactgtgggcaggtgggctctgggagcaccgccaaccagcccacacccagaaaggtcactaattgtttacatattaagagagtggtgggaatcgcctgcggccagacttcctctatggccgtgctggacaacggagaagtgtatggatgggggtataacgggaacggccagctcggcctcggcaataatggcaatcaattgactcccgtgcgggtcgctgccctgcatagcgtgtgcgtgaaccagatcgtttgcggatacgcgcacacacttgctcttaccgacgagggactgctttacgcatggggcgcaaacacctacggtcagctgggtacgggcaacaagaataacctgctgagtccggcacacattatggtagagaaagaaagggtcgtagaaatagcagcgtgccactcagctcatacgagtgctgcaaaaactcaagggggacatgtgtacatgtggggacagtgcagggggcaatctgttattttgccgcatttaacacacttttcctgtactgacgacgtattcgcctgttttgccaccccagcggtttcctggagactgctttcagtggaacacgaggattttttgacagtggccgaaagtctgaagaaagagttcgacagccccgagacagctgacctcaagttcagaatagacggaaaatacattcacgtgcataaagcggtcctcaagattcgctgcgagcacttcagatccatgtttcagtcctactggaatgaagacatgaaggaggttattgaaatagaccagttctcctacccagtgtatagagctttcctacagtacctatatacagatacggtcgaccttccgcctgaagatgcgatcgggctcttggacctagcaaccagctattgcgaaaatcggctcaagaaactttgccaacacatcatcaagagggggatcacagtcgaaaatgcattcagtctgttctcagcagctgtccgatatgacgccgaggacctggaggaattctgctttaagttctgtatcaaccatctgacagaggtcacccaaaccgctgcgttttggcagatggatggaccattactcaaggagttcattgccaaggcaagcaaatgcggggcattcaaaaactag

SEQ ID NO: 238240 - DNA, 1068 bp, synthetic construct
  misc_feature 1..1068: note = Description of Artificial Sequence: Synthetic coding sequence
  source 1..1068: mol_type = other DNA
atggtagacgtgggcaagtggccgatctttactctcctgtcgccacaggaaattgcaagtatccgcaaggcctgcgttttcggaacctccgccagcgaggctttgtatgtgaccgataacgacgaagtctttgtcttcggtctgaactactccaactgtctgggcacgggcgacaaccaatcaactctagtgccaaaaaaactggagggcctgtgtggcaaaaagatcaagtctttatcatacggaagcggcccacacgtgcttctctccacagaggacggcgtggtgtacgcctggggtcacaatgggtattcccagttgggcaacggtaccactaatcagggaattgccccagtgcaagtctgcaccaacctgctgataaagcaggttgtagaggtggcatgtgggtctcaccattccatggcactagcggctgacggcgaggtcttcgcctggggctacaataattgtggccaagtaggcagcgggtcaacggcaaaccagccaactccacgaaaggtcactaattgtcttcacatcaagcgagtcgtgggcatagcgtgcggtcagacttccagcatggccgttctcgacaatggcgaagtctacggatgggggtacaacggcaatggacaactgggtctagggaacaatggtaaccagttgactccggtccgcgtagccgctcttcacagcgtatgcgtgaatcagatagtctgcggctatgcgcacactctggctttgactgacgagggcctcctgtatgcttggggggctaatacatatgggcaactcgggacaggtaacaaaaacaacctgctctcgccagctcacatcatggtcgaaaaggagcgagtggtagagattgccgcatgtcattccgcccacacaagcgctgctaagacccagggcggtcatgtgtacatgtggggtcaatgcaggggacagagcgtcattctgccacacttgactcacttttcatgtacagacgacgttttcgcttgcttcgcaacccccgcagtcagttggcggctgctgagcgtcgtgtccatagtcatcgggaaatag

SEQ ID NO: 238241 - DNA, 1656 bp, synthetic construct
  misc_feature 1..1656: note = Description of Artificial Sequence: Synthetic coding sequence
  source 1..1656: mol_type = other DNA
atggaggaggagctgccgctcttctccggagatagcggaaaacccgtacaggccaccctgagctctctgaagatgctcgacgtgggaaaatggccgatattttcactgtgctcagaggaggaattgcagcttatccgccaggcatgcgtctttggaagcgccggtaatgaggttctgtacacaactgttaatgacgagatttttgtgcttgggacaaactgctgcggctgtctgggactaggggacgttcaatcaacgatagagcctaggagactggacagccttaatggaaaaaaaatcgcatgtctcagctacgggagtggaccacatatcgtgctcgcgaccacagagggagaagtatttacatggggtcataacgcgtatagccaactcgggaacggcacaaccaatcacggcctggtgccctgtcacatttccacgaacctaagcaataaacaggtaattgaggtcgcttgtggttcataccactccctggtcctgacctccgacggcgaggtattcgcctggggatataataactccggacaggttggctccggatcaacagtgaaccagcctatcccccgtcgcgtcaccggctgtctccaaaacaaggtagtggtcacgatcgcctgcggccagatgtgttgtatggccgtcgtcgacacaggcgaggtgtacgtgtggggatacaacgggaatgggcagctgggattgggaaactctgggaatcaaccgacgccatgtcgcgtcgccgctttgcaaggtataagggtgcagagggtggcgtgtggctatgcgcacacattggtgctgaccgatgaagggcaggtatacgcctggggagctaattcatatggccagctgggaacaggcaataagtccaaccaatcgtaccctacccccgtgacagtggaaaaagaccggataattgagattgcagcgtgccattcaacccacacaagcgccgctaagacacagggcggacatgtgtatatgtggggccagtgcagaggacagtccgttatcttacctcacttgacccacttctcatgtaccgacgacgtgtttgcttgcttcgccacgcccgctgtcacctggagactcctttctgttgagccggacgaccatctaaccgtggccgaatctctgaagcgggaatttgacaatccggacacagcggatctaaagttcctggtggacggcaagtatatatacgcacataaggtgctgttaaagattcggtgtgagcatttcaggtcctcattagaagacaacgaagacgacattgtcgaaatgtctgaattttcataccccgtgtatagggcctttctggagtatctttacaccgattctatttctctaagcccagaagaagccgtcggactgctggatctggccaccttctaccgagagaaccgactgaagaaactgtgtcagcaaaccataaagcagggcatatgcgaagaaaacgccattgccctgttaagcgcagccgttaaatacgatgctcaggatttagaagaattctgttttcgattttgcataaaccatctcactgtggttacccagacaagtggattcgcggagatggatcatgacctattgaagaacttcatctccaaagcctcacgggtcggcgcatttaaaaactag

SEQ ID NO: 238242 - DNA, 1671 bp, synthetic construct
  misc_feature 1..1671: note = Description of Artificial Sequence: Synthetic coding sequence
  source 1..1671: mol_type = other DNA
atgtccgccttaccgagggacttggaactttcaaacccacgagagaagttgaccaaaccagtgcaggccacactttcgtctctgaagatgctggatgtgggcaagtggcccattttctccctctgcagcgaggaagagctgcagctgatcagacaagcctgtgttttcggaagcgcagggaatgaagttttatatacaacagttaacgatgagatttttgtccttgggaccaactgctgtggttgcctggggctgggcgacgtgcagtccactatcgaacctcggcgactcgactctctcaacggcaagaagattgcgtgcctctcttatggtagcggcccacatatcgtccttgctaccacagagggcgaagtctttacctggggacacaatgcctattctcagttgggaaacggaaccacaaatcacggtctagtcccatgccatatctctacaaatctgtccaacaaacaggtgatcgaagtcgcctgcggaagttatcattcactggtgctcacttctgatggcgaagtgttcgcctgggggtacaacaactctggccaggttggcagcgggagcacggtgaatcagcccatccctcgtagggtgaccgggtgcttacaaaacaaggtcgttgtaacaatcgcctgcgggcagatgtgctgcatggcagtggtggatacaggggaggtctatgtgtgggggtacaacggtaacggccagcttgggcttggaaacagtggcaatcagccgacgccatgtcgagtagccgcattgcagggaatacgcgtccagagagtggcttgtgggtatgcccacactctcgttctgaccgatgaggggcaggtgtatgcctggggggctaatagttatggccagctgggaacagggaacaaatctaatcaaagctacccgactcccgtcaccgtcgaaaaggataggatcattgaaattgccgcatgccactcaacccatacatcagcagccaaaactcagggcggacacgtgtacatgtggggacaatgcagggggcagtccgtaatactgccacacctgacgcactttagttgtactgatgatgtgttcgcctgttttgccacacctgccgtcacatggcgcttgttgtccgtggagccggatgaccaccttactgttgcagagtctctcaaacgggaatttgacaaccccgatacggcagacctcaaatttttagtggatggcaaatacatctacgcacataaggtccttttgaagattagatgcgaacattttcggtccagtttggaggacaatgaagacgacatagtcgaaatgagtgagttctcctacccagtgtacagggcatttcttgagtatctatatactgacagcatttctctgtctccggaggaggccgtcggcctcctggacttggccacattttatcgggagaaccgactcaaaaagctctgtcagcagacaatcaagcaggggatctgcgaggagaacgccatcgcattgctgtcagcagccgtgaaatatgacgcccaggacctagaagagttttgcttcagattttgcatcaatcatctgacagtggtgacacagacatcagggtttgcagagatggaccatgacctcctcaagaacttcatcagcaaagccagccgggtgggggcttttaagaactag

SEQ ID NO: 238243 - DNA, 1512 bp, synthetic construct
  misc_feature 1..1512: note = Description of Artificial Sequence: Synthetic coding sequence
  source 1..1512: mol_type = other DNA
atgctccaggatgggagctgtaaacagatgctgttaatgctgcttattgtgcagcccgtgcaggccactctttcttctctgaagatgctggacgttgggaagtggccaatatttagcctgtgtagtgaggaggaactgcagctcatccggcaggcatgcgtgtttggatcagcgggtaacgaggtgctgtacactacagtcaacgacgagattttcgtcctggggactaattgttgcggctgtctgggcttgggagacgtacagtccactattgaacccaggaggctcgactcactcaacggaaagaagattgcatgtctctcttatggaagcggaccccacatcgtgcttgctaccaccgagggggaggtgttcacatgggggcacaacgcctatagtcaactcggcaatggcaccaccaatcatgggttggttccatgtcacataagcacaaatctttccaacaaacaagttattgaagtcgcctgtgggtcctatcactctctagtcctgacatcagatggtgaggtctttgcttggggctacaacaactctggccaggtggggtcaggatcaactgtgaaccagccaattccacgtagagtgactggctgtctccaaaacaaggtagtcgtgactattgcctgcggccagatgtgctgcatggcagtggtggataccggtgaggtatacgtgtggggctacaacgggaatggccagttgggactggggaactccggaaatcaacctactccctgccgagtggctgctcttcaggggattagggtgcaacgtgtggcttgtggctatacacacacgtccgctgccaaaacacaaggaggtcatgtttatatgtggggacaatgtcggggacagtctgttatactcccccatcttacccattttagctgcacagatgatgtgtttgcgtgcttcgccaccccagccgttacatggcgcctactgagtgtggaacctgacgatcacctcaccgtggctgagagccttaaaagagaattcgacaatcccgatacagccgatctgaaattcttggtggatggcaaatatatatacgctcacaaagtgctcctcaaaatacgatgtgaacactttcgctccagcctcgaagataacgaagatgacatagtcgagatgagcgaattctcatatcccgtgtatcgcgcatttctcgaatacctgtatacagactccataagcctatcccctgaggaggccgtgggtttgctcgacctcgctacattctatcgggagaaccggctcaaaaaactgtgtcagcagacgattaaacaaggcatttgcgaagagaacgcgattgccctgctctctgccgctgtgaagtacgatgctcaggatctcgaggagttctgctttcgtttctgcatcaaccacctgactgtggtgacacagactagtggctttgccgaaatggaccatgacttgctgaaaaactttatcagcaaagcgtctcgcgtgggagcgttcaaaaactag

SEQ ID NO: 238244 - DNA, 1671 bp, synthetic construct
  misc_feature 1..1671: note = Description of Artificial Sequence: Synthetic coding sequence
  source 1..1671: mol_type = other DNA
ccgtgtagcaatcggtaccccggaggcggagctgataaggcccctgcatgcgaggaacccgtgcaggcaacactttcttccctcaaaatgttggatgttggcaagtggcctatcttctctctgtgcagcgaagaggagctccagttaatacggcaggcatgtgttttcggatccgccggtaatgaggtcctatacaccactgtgaacgatgaaatcttcgtgcttggcacaaactgttgcgggtgtctgggacttggcgacgtccagagcacaatcgagccacggaggctggactccctcaacggaaagaagatcgcatgcctgagttatggatcaggtccccacatagttctggcgaccactgaaggggaggtgttcacctggggtcataacgcgtactctcaactaggcaatggaacaacaaaccatggcctcgtgccctgtcacattagtaccaacctctccaacaagcaggtgatcgaggtggcctgtggcagttatcattctcttgttttaacctcggatggcgaggtgttcgcatggggatataataatagcggacaagtgggctcaggaagcaccgttaaccaacccataccccgtagggtgaccggttgcctacagaacaaggtggtcgttaccattgcttgtggtcagatgtgctgtatggcagtcgtggataccggcgaagtgtacgtatgggggtataacggcaacggccagttgggtctgggcaacagtggcaatcagccaaccccatgccgggtggctgcattacagggaattagggtgcagagagtagcttgcggttacgcccacacattggtgttaaccgacgaaggacaagtctacgcttggggagccaattcatatggccaattggggactggaaacaaatctaatcaatcttatccaactcccgtgacggttgaaaaggatcggattatcgaaatcgcagcctgtcacagcacgcataccagtgcagcgaaaacgcaaggcggacatgtgtatatgtggggacagtgtaggggacaatccgtcatcctcccacatctgacacatttctcttgcaccgatgacgtatttgcttgcttcgccacacccgctgtaacctggaggcttctctcggtcgaaccagacgaccacctgactgtcgccgagtcactaaagagggagtttgacaatccagacacggccgatctaaagtttttagttgatggcaaatatatatatgctcataaagtgctgctgaaaatccgttgtgaacattttcggagttctcttgaagataacgaggacgatatcgtcgaaatgtcagagtttagttaccccgtctatcgtgccttcctggaatacctctacactgactctataagtctgagccccgaagaagctgtgggactacttgatctggcgactttctacagggagaacaggctgaaaaaactttgccagcagacaattaaacagggcatctgcgaagaaaacgccattgccctgctgagtgccgcagtgaagtacgacgcgcaagacctggaggagttttgttttagattttgcatcaaccacctgacagtggtcacccagaccagcggattcgctgagatggaccacgatttactgaagaacttcatcagcaaggctagcagagtgggagccttcaagaactag

SEQ ID NO: 238245 - DNA, 834 bp, synthetic construct
  misc_feature 1..834: note = Description of Artificial Sequence: Synthetic coding sequence
  source 1..834: mol_type = other DNA
atgagtggtgtaacgaccgagactgggagcttggactctgccaccgtggcaaccagtcagcccctggctgaatggcagctgtgcaaagcaagcgtgtcccgaggtatcatcgagatcgccgcttgccattctacccacacgtccgccgcaaagacccagggtggacacgtctatatgtggggacaatgccgagggcagtctgtaatcctaccccatctcactcattttagctgcacagatgacgtgttcgcctgcttcgccactccggctgttacatggcgcttactgagcgtggaacctgacgatcacctcactgtggcagagtccctcaagagggaatttgataatccagataccgccgacctcaagtttttagtggatgggaaatatatttatgcccacaaggtgcttcttaagattcgttgtgagcacttcagatcatccctggaggacaatgaggacgatattgttgaaatgtcagaattttcttacccagtgtacagggccttcttggaatacttatacactgactcaattagcctcagcccagaggaggctgtgggccttctggatctcgctaccttctatcgagaaaaccgactgaagaaactctgccaacagaccattaagcagggtatttgtgaagaaaatgccatcgctctgctatctgcagcagttaagtatgacgcacaagacctggaagaattctgtttccgcttctgtatcaatcacttaactgtcgtgacccaaacgagcggatttgccgagatggatcatgatttgctgaaaaattttatcagtaaggcctctcgggtgggagcctttaaaaactag

SEQ ID NO: 238246 - DNA, 846 bp, synthetic construct
  misc_feature 1..846: note = Description of Artificial Sequence: Synthetic coding sequence
  source 1..846: mol_type = other DNA
atgctggacgtgggaaaatggccgattttcagcttgtgctcggaagaggaattgcaacttatccgtcaggcctgcgtcttcgggtctgccggaaacgaagtcctatacacaacggtgaacgatgaaatttttgtgctggggacaaattgttgcggatgcttaggactcggtgatgttcaatccacaatcgagccccgaagactggattctctcaacgggaagaagatcgcttgtctctcatatgggagcgggccacatatcgtgcttgctacgaccgagggggaggtcttcacatggggccataacgcttactcccagctggggaatggcaccaccaaccacgggctggtcccctgccatattagcacgaacctttctaataaacaggttattgaggtcgcctgcggaagctaccactcacttgtgctcactagtgatggagaggtgtttgcctggggatacaacaattcgggccaggtgggctctggttcgacggtaaaccagccaatacctcgacgagtaactgggtgtctgcagaataaggtcgttgtcaccattgcctgcgggcagatgtgttgcatggcagtggttgataccggggaggtgtatgtgtgggggtacaacggcaatggacagctgggcctggggaacagcggcaaccagcctaccccttgtcgggtggccgctcttcagggcataagggtgcaaagagattacagagactgctcgcttagcctccacacccatgtttgcggacaagatgcagggtgggcgcgagttcacgttggtcccgtacctggatctgtgcgagatccccctgccccacacccgctcctgctgcactag

SEQ ID NO: 238247 - DNA, 1359 bp, synthetic construct
  misc_feature 1..1359: note = Description of Artificial Sequence: Synthetic coding sequence
  source 1..1359: mol_type = other DNA
atgtcaccaaaacgcatcgccaagcgcaggagccctcctgcagatgccattcctaagagcaagaaagtcaaggacacacgcgcagcggcttccaggagagtgcctggggctagatcttgtcagggcgcttgtggaccgagtccacctgaccaaaaaacgcgcccagtaagccataggtcgcacagtaccgaacctggtcttgtcctgacactcggtcagggagacgttggccagctgggtctcggcgagaacgtgatggagagaaaaaaacccgcattggtttctataccggaggatgtggtccaggccgaggccggaggaatgcacacggtgtgtctgagcaagtcaggacaagtctacagcttcggctgtaacgacgagggtgccctcgggcgagacacatctgtggaagggagcgaaatggtacctgggaaagtggaattgcaggaaaaagttgtccaggtgtctgccggtgatagccacacagccgctttaaccgacgatggacgggttttcctgtggggttcattcagagataacaatggggtgattgggcttctggaacctatgaagaagtcaatggttcccgttcaagtgcaattagatgtaccggtggttaaggtggccagcggaaatgatcatctggtcatgctgacagctgacggagacctctataccctaggctgtggggaacagggacagctgggcagagtgcccgagctgttcgctaaccgcggtggcagacagggactggagcggcttttggtccctaagtgcgttatgctgaagagtcgcggatctcggggacacgtaagattccaagatgccttctgcggggcttacttcacctttgcaatcagtcacgagggccatgtgtatgggtttggtctaagcaattaccaccagctcggtactcctgggacagagagctgttttatcccccagaacttgacatcctttaagaatagcaccaaatcctgggtgggcttcagcggtgggcagcaccatactgtgtgcatggacagcgagggaaaagcatactcactggggcgagccgagtatgggaggctgggtctgggagagggggcagaggagaagtccatccctaccctgattagtcgtctgcctgccgtgagctcagttgcgtgtggggcatccgtggggtacgccgtgactaaggatggcagggttttcgcgtggggaatgggtacgaattatcagctaggcaccgggcaggatgaggacgcttggtctccagtggaaatgatgggtaagcaattggaaaatagagtggtgttaagtgtgtcgagtgggggtcaacacaccgttctgcttgtcaaggacaaggagcaaagttag

SEQ ID NO: 238248 - DNA, 1266 bp, synthetic construct
  misc_feature 1..1266: note = Description of Artificial Sequence: Synthetic coding sequence
  source 1..1266: mol_type = other DNA
atgtcacctaaacggattgcgaaacggaggtcccctcccgctgatgccattcctaagagcaaaaaggtcaaagtgtcacaccgtagccatagcaccgagcccggtctggtgcttacactgggtcagggggatgtggggcagctcgggttgggcgaaaatgtaatggagcgcaagaaacccgctctcgtgagcatacctgaggatgtggtccaggctgaggcaggtggaatgcacacggtgtgcctgtccaaaagcggtcaggtctattcattcggctgtaacgacgagggggctctgggtagggatacctctgtcgaaggctccgaaatggtccccggaaaggtggaactccaagagaaagtggtgcaggtcagcgcaggcgacagccacacagccgctctcactgacgatggccgagtcttcttgtgggggtcattcagggataataatggagttatcggcctacttgagcccatgaaaaaatctatggtgccagtccaggtgcagctggatgtgcctgtcgtgaaggtcgcaagcgggaatgatcacctggtgatgctcaccgcagatggcgacctgtataccctcggctgtggtgagcagggacagctcgggagagttccggagctgtttgcaaatagagggggaaggcaaggtcttgaaagactcctagtgccaaaatgcgtgatgttaaaaagtcggggatcacgcggtcacgtaagatttcaggacgcattttgcggagcctacttcacgttcgctatatcccatgaaggtcacgtctacgggttcggcttatctaactaccaccaactaggtactcccggaaccgagtcctgcttcatcccgcaaaacctaacttcattcaagaatagtacaaagtcctgggttggcttcagtggcggacagcaccacacagtgtgcatggacagtgagggcaaggcttacagtctgggacgcgcagagtacggccgattggggctgggagaaggcgctgaggagaagtccattccaactctcatctcacggcttcctgctgttagcagcgttgcctgtggagcttctgtaggctacgccgtgacaaaggacggcagagtgttcgcttggggtatgggcacaaattaccagctcggcactggccaggacgaggacgcatggtcaccagtggaaatgatgggcaagcagctagaaaatcgggtcgtgctgagtgtgtccagcggcggacagcacacagttctgctggtcaaggataaggaacagtcttag

SEQ ID NO: 238249 - DNA, 1266 bp, synthetic construct
  misc_feature 1..1266: note = Description of Artificial Sequence: Synthetic coding sequence
  source 1..1266: mol_type = other DNA
atgagtcctaaacgcatcgctaaacgtcggtccccacccgctgacgccatcccaaagtcgaaaaaagtgaaggtgagccacagaagccactccactgagccaggcctggtcttaaccctgggacagggcgacgtcgggcaactcggtctaggcgaaaacgttatggagcgcaagaagcctgccttggtttctattccggaagatgtggtccaggctgaagcaggcggaatgcacaccgtgtgtctgtccaaaagcgggcaagtgtactctttcggctgcaatgatgaaggagccctgggccgagataccagcgtcgagggatcagaaatggtgccaggtaaagtcgaactccaggagaaagtggtccaggtgtccgccggagactcacacacagcggctctgactgacgacggacgtgttttcctgtgggggagcttcagagataataacggagttatcgggctgttagagcctatgaaaaaatctatggtgccagtgcaagtgcagctagacgtgccagttgtcaaggtcgccagtggaaacgatcatctggtcatgctgacagccgacggggatttgtatacgttggggtgtggcgaacaggggcaattaggccgagtgccagagttgttcgccaatagaggcggtcgccaagggctagagcgcttacttgtaccaaagtgcgtcatgctgaaatcccggggaagtcggggacacgtgagatttcaggacgctttttgcggagcctacttcacgttcgcaatttcacacgagggtcacgtgtatgggttcggtttatcaaattatcatcagctagggactcccggaaccgagtcctgctttatacctcaaaaccttaccagttttaagaattctaccaaaagttgggtgggctttagcgggggtcaacatcacactgtgtgcatggattccgaaggtaaagcctattcactaggccgagctgagtacggcagattagggctgggagaaggtgcagaagagaagagcatccccaccttgatctccaggctccccgctgtgtctagcgtggcatgtggggcaagcgtgggctacgcggtgactaaagacgggcgagtgttcgcatggggcatggggaccaattaccaactggggacagggcaggacgaagatgcatggtctccagttgaaatgatgggtaaacagctggagaacagagtggtgttatccgtgtcttcaggcggtcagcacacggtactgcttgtgaaagataaggaacagagctag

SEQ ID NO: 238250 - DNA, 1266 bp, synthetic construct
  misc_feature 1..1266: note = Description of Artificial Sequence: Synthetic coding sequence
  source 1..1266: mol_type = other DNA
atgtcgccaaagcggatagcgaagcgtcggtcccccccagcagacgccattcccaagtccaagaaggtaaaagtcagccatcgtagccattctactgagcctggacttgtactgaccctgggtcaaggtgatgtgggccagctcggtctgggtgaaaatgtaatggaacgtaaaaaacctgctttggtatccatcccagaagatgtggtacaggctgaggcgggagggatgcatacggtctgcttaagtaagtcgggccaagtgtattcctttgggtgcaatgacgagggtgcgttgggcagggatacctcagtggagggcagtgaaatggtacctggcaaagttgagctgcaagaaaaggttgtccaagtgtccgccggagacagtcacactgctgcgctgactgacgatggacgagttttcctctgggggtcattccgtgacaataacggcgtcataggcttactggagccaatgaagaagtcgatggttccggtgcaggtgcagttggacgtgccagtggttaaggtggcctccggcaacgatcacctggtgatgctgaccgctgatggcgacctgtacaccctgggttgcggtgaacaaggtcagctgggccgtgtgccagaattatttgccaacaggggtgggagacagggactggagcggctgctggtgcctaaatgcgttatgctgaagagccggggttcacgcggtcacgtgcgttttcaggatgccttttgtggggcatacttcactttcgcaatatcacatgaggggcatgtatacggatttggacttagtaactaccaccagctcggtacccccggaaccgagagctgcttcattccccaaaacctcacaagctttaagaactccacaaagtcctgggttggattcagcggcggtcaacatcataccgtgtgtatggattcggaagggaaggcttacagtctgggacgcgctgagtacgggagactgggattgggcgagggggcagaagagaagtctatccctaccctcatcagtagacttcccgctgtgtcaagtgtagcttgtggggcttctgttggttacgcggtgacaaaagacgggagggtgtttgcctgggggatgggtactaattatcagctgggtaccggtcaggatgaggacgcttggtcccccgtcgagatgatgggcaagcaactggagaacagagtggtcttatccgtgtcatccggcggtcagcacacagtgctcctcgttaaggacaaagaacagtcctag

SEQ ID NO: 238251 - DNA, 693 bp, synthetic construct
  misc_feature 1..693: note = Description of Artificial Sequence: Synthetic coding sequence
  source 1..693: mol_type = other DNA
atgtcaccaaagagaatcgctaaacgccgttctcccccagcagatgcaattccaaaatcgaagaaagtcaaggtgtcgcacagatcccattcgaccgaaccaggactcgtactaacacttggacagggcgacgttggacaactaggtttgggggaaaacgtgatggagcgaaagaagccagccctcgtttccatcccggaggacgtagttcaagcggaagccggaggaatgcacaccgtatgtctatccaagagcggacaagtgtattcctttggctgtaatgatgagggcgctctgggccgagacacaagcgtggaaggctccgagatggtgccgggaaaagtggagctccaggaaaaagtggtgcaggtctcagctggggattcacacaccgctgcacttaccgacgatggcagagtttttctgtggggctcctttagggacaacaacggggtaatcggcttgttagagcccatgaaaaagtccatggtgcccgtgcaagttcagttggacgttcccgtggtgaaagtggcatctggcaatgatcaccttgtcatgctaaccgcggacggcgacctgtacactctgggttgtggcgagcaggggcagctgggcagggtcccggagctcttcgcgaaccgcggtggaagacaagggctggaaaggcttctggttcccaaatgtgtcatgtag

SEQ ID NO: 238252 - DNA, 852 bp, synthetic construct
  misc_feature 1..852: note = Description of Artificial Sequence: Synthetic coding sequence
  source 1..852: mol_type = other DNA
atgtctcccaagagaatcgcaaagcggaggagtcctcctgcagatgccatccccaagtcaaagaaggtgaaagtgagccaccgctcacacagcacggagccaggactagtgctgacactcggtcagggcgatgtgggacagctgggactcggggaaaatgtaatggagaggaagaagccggcactggtgtcaatccctgaggacgtagttcaagctgaagccggtgggatgcatactgtgtgtttgtcaaagtcaggccaggtttactcttttgggtgcaacgatgagggagctttggggagagacacttctgtcgaagggtccgaaatggtgccgggaaaagtggagctgcaggagaaagtggtacaggtgagtgcgggagacagccacacagcagccctgaccgacgatggacgggtgtttctttggggaagttttagagataacaatggagtcataggattactggaacccatgaaaaagagtatggtccccgtccaagtccagctcgatgtcccagttgtaaaggtcgcctccgggaacgaccaccttgtgatgcttaccgccgacggtgacctgtacacgctgggctgcggcgaacagggtcagctggggcgagttcctgagctgttcgccaaccgtgggggacgacagggactagagcggctacttgtcccaaagtgtgtgatgttaaaatcaaggggttctaggggacacgtccggtttcaggatgccttttgtggcgcttattttacattcgcaatttcacacgagggacacgtatacggatttggcttgagcaattaccaccaattggggactccagggactgagagctgttttatcccatag

SEQ ID NO: 238253 - DNA, 708 bp, synthetic construct
  misc_feature 1..708: note = Description of Artificial Sequence: Synthetic coding sequence
  source 1..708: mol_type = other DNA
atggccagggaggagtgcaaggccttgctcgacggtctgaacaagacgacggcgtgttaccaccatttagtgctgacagtggggggatccgctgacagtcaaaatctccgccaggagctgcagaaaacccggcagaaggcacaggagcttgcggtgtcaacatgcgccagattaaccgctgtactgcgagataggggtctcgcagccgatgaacgggcagaatttgaaaggctgtgggtggctttctcgggctgcctcgatctactagaagcagacatgagacgggctctggagctaggggcagcctttccactacacgctcctcgacgaccgttggttaggaccggggtggctggcgcatccagcggggtagcggcaagggctctgtccacgcggagcctgagactggaggccgaaggagacttcgatgtggccgatttgagggagttagagagagaagtcctacaagttggcgaaatgatcgacaacatggaaatgaaagtcaacgttcctaggtggacagttcaggccagacaggccgcaggtgccgagctcctttccacagtatccgcgggacctagcagtgtggtaagtttgcaggaacgcggagggggttgtgacccgcgtaaggccctagctgctattctattcggcgctgtactgttagccgcagtggccctggctgtgtgcgtcgctaaactgtcttag

SEQ ID NO: 238254 - DNA, 630 bp, synthetic construct
  misc_feature 1..630: note = Description of Artificial Sequence: Synthetic coding sequence
  source 1..630: mol_type = other DNA
atgcgcgctgcagccatatccaccccaaaactggacaagatgcctgggatgttcttctctgccaatcctaaggaactcaagggaaccacccattccctcctggacgataaaatgcagaaacgccgacccaaaacatttggtatggatatgaaagcatacctgaggtcaatgatcccacacttggaatccggcatgaagagtagtaagagtaaagacgttctgagtgcagccgaagtaatgcaatggtcgcaatctctggaaaaactgctggctaatcaaaccggacagaatgtgttcgggtccttcctaaaaagcgaattcagtgaagagaatatcgagttttggttagcctgcgaggattataaaaagactgagtctgatctcctgccctgcaaagccgaggagatctataaagcctttgtgcactcagacgcagctaagcagatcaatatcgattttaggacccgagaatcaactgccaagaagatcaaagctcccacgccaacctgcttcgatgaagcccagaaagtcatttacacactcatggagaaagactcttaccccagattcctgaagagtgatatatatctcaatctgctgaacgatctgcaggccaatagcctcaaatag

SEQ ID NO: 238255 - DNA, 1044 bp, synthetic construct
  misc_feature 1..1044: note = Description of Artificial Sequence: Synthetic coding sequence
  source 1..1044: mol_type = other DNA
atgcccggtaagcccaaacaccttggagtgcctaacggccgtatggttctggccgtcagtgacggggaattaagcagcaccaccggtccgcagggtcaaggggaaggtaggggctccagcttaagcatccacagtcttccgtctggaccatcaagcccgttccccacctttgtgagctctaagtctgagagtcacagaaagagcctgggttccacagaaggcgagagcgaaagccgcccaggaaaatactgttgtgtatatcttcccgatggcacggcctctctggccctggctcgcccagggctgacaatccgcgacatgctcgctggcatttgtgagaaacgcggactgagcctccctgatattaaagtatacctggtcggcaacgagcaaaaggcgctcgtcctggatcaggattgtacagttctggctgatcaggaggtgcgacttgaaaaccggataaccttcgaactggagctgactgccctggagcgggtcgtgaggatctccgccaagccgacgaagcgtctccaggaagccctgcagcctatcctggaaaagcatggcctcagccctcttgaagtcgtgcttcataggccaggcgagaaacaacccctcgaccttggcaaactggtctccagcgtggccgctcagaggcttgtgctggatactctaccaggagtcaagataagcaaggctcgtgacaagagcccttgcaggagtcaggggtgcccacctcgaacccaggacaaagcaacccatcccccaccggctagccctagtagcttggttaaagttccgtcatccgccactggcaagcggcagacttgcgatatcgagggcctcgtagaattactcaatcgggtgcagagctctggcgcacacgaccagcgcggactgctccgcaaggaagacctagttttaccagagttcctgcagctcccagctcagggacctagctcagaggaaacaccacctcagacaaagtcggccgctcagccaataggaggctctttgaattccacaacagactcagccctttag

SEQ ID NO: 238256 - DNA, 1701 bp, synthetic construct
  misc_feature 1..1701: note = Description of Artificial Sequence: Synthetic coding sequence
  source 1..1701: mol_type = other DNA
atgccgggtaagcctaagcacctgggtgtgcctaatggtcggatggtcttggccgtcagcgacggggagctctccagcacaaccgggcctcaaggccagggtgaagggagagggtcctcactaagtatacacagcctgccttcaggaccctccagtccattccctacagaagagcagccagtcgctagttgggccctctctttcgagaggttactccaagatcccctcggcctcgcctactttaccgaatttctcaaaaaagagtttagcgccgagaatgttacattctggaaagcttgcgagcggtttcagcaaatccccgcatccgatacccaacagctggctcaagaggcacgaaatatatatcaagaattcctctctagccaggctttgtcaccggtaaatatcgaccgccaagcatggctgggggaagaagtgttggcagaacccagacccgacatgtttcgagcccaacaactgcagatctttaacctcatgaagttcgattcatacgcccgttttgttaaaagtcccttgtaccgggagtgccttttggccgaggccgaggggaggccgctcagagagccaggaagctcccgacttgggtcccctgacgctacccgcaagaagcccaagctgaagcccggtaagagcttacccctgggggttgaagaattgggccagctaccaccagttgaggggccaggaggacgaccattgagaaagtccttcagacgtgagctcggtggaacagcgaacgcagctctccgccgagaatctcagggctctctcaattcctcagcctctcttgacctgggcttcctggctttcgtctcatctaaaagcgagtcccacaggaaatccctgggttctaccgagggagaatcagaatccagacccggtaagtactgttgcgtctacctgcccgacgggaccgcctcactcgcccttgctaggcccggacttaccatcagggacatgttggctgggatctgcgaaaagcgcggactttcattgcccgatattaaagtgtacctggtaggtaacgaacaggcgctggtgctcgaccaggattgtacagttcttgctgatcaggaagtgagactggagaacaggattacgtttgagctggaactaactgccttggaaagggtggtccggattagtgccaaaccgacaaagcgtctccaggaggccctgcagcctatcctggaaaagcacggcctgtcacctctggaggtggtcttgcatcgacccggagaaaagcagcctctagacctgggcaagcttgtgagttcggttgccgcacagagacttgtgctggatacgttgccaggggtaaagatctctaaagctcgtgacaaaagcccatgccggtcacaaggctgtccacccagaactcaggacaaagctacccaccccccacccgctagcccttcatccttggtcaaggtgccatccagtgcgacaggtaaacgacaaacttgcgacattgaagggctggtagagttattaaaccgcgtccagagcagcggcgcacatgaccagaggggtctgctgcggaaggaggatctggtcctgccagaattcctccagctgccggcacaggggccatctagcgaggagaccccaccccagaccaagtcggccgctcagccgattgggggatccctgaattcaaccaccgacagcgcactgtag

SEQ ID NO: 238257 - DNA, 1314 bp, synthetic construct
  misc_feature 1..1314: note = Description of Artificial Sequence: Synthetic coding sequence
  source 1..1314: mol_type = other DNA
tgatcaccagtcaatatcgaccgccaagcttggctcggcgaggaggtactcgcggagccaagacccgatatgtttcgcgctcagcaacttcagattttcaatctgatgaagtttgacagctatgcccgattcgtgaaatccccactttatagagaatgcctcctggcagaagcagagggcaggcctctgagagaacctggttcgtctcgccttggatccccagacgccacccggaagaaaccgaagctgaagcctggaaaatcgctccccttaggggtcgaggaactaggccagcttccacctgtcgaaggacctgggggtcgaccacttcggaaatcattccggcgagaactgggcggtaccgccaatgcagcattaaggagagaatctcagggaagcctgaactcctccgccagcttagatttaggatttctggccttcgtgagctctaagagtgagagccaccggaaatctctgggtagcacagaaggcgagagtgagagcagacctggcaaatactgctgcgtgtaccttccggatggaaccgcatccctcgctttagcccgaccaggcttaaccattcgggacatgctagcgggaatctgtgagaaacggggactgtcacttcctgacatcaaagtttacctggtcggtaatgagcagaaagctctggtgctggatcaggattgcacggtcctcgctgaccaggaggtcagattagaaaacaggattacttttgaactcgaacttacagcactggaaagggtggtgcgcatttctgcgaaaccaaccaaacgtctgcaggaggctctccaacccatcctggagaagcacggtctgagccccttagaggtcgtgctgcaccgtcccggtgaaaagcaacctcttgacttagggaaactggtctcctctgtcgccgcacagcgcttggtcctggatactcttccaggagtcaagattagcaaagcacgggataagtcaccgtgcagaagccaaggttgcccgccacgtacccaggataaagcaacccacccaccacccgcttcgccatcctcgctggtgaaagtgccgagttcggccactggcaagaggcagacatgtgacatagagggactggtcgagcttctcaatcgcgtacagtcaagcggcgctcacgatcagaggggcctcctaaggaaagaagacttagttctgcctgagttcctgcaactccccgcacagggcccttcaagcgaagaaactcctccacagactaagtctgccgctcagccaatcggtggcagcctcaacagcaccaccgattccgccttgtag

SEQ ID NO: 238258 - DNA, 609 bp, synthetic construct
  misc_feature 1..609: note = Description of Artificial Sequence: Synthetic coding sequence
  source 1..609: mol_type = other DNA
atgtgccgtacactggctgcgttccctaccacatgcctggaacgagccaaggagttcaaaacgcgtctcgggatctttctgcacaagtcagaacttggttgcgatacaggatcaaccggcaagttcgagtgggggtcaaagcacagtaaagaaaaccgcaattttagtgaagatgtgctgggctggcgggaaagcttcgacctgcttttaagttctaagaatggagtggctgccttccacgcttttctgaaaaccgaattcagcgaggagaacctcgagttctggttggcttgcgaagagttcaaaaagatccgctcagccacgaaactggcttcaagagctcaccaaatctttgaagagtttatctgcagcgaggcccctaaggaagtcaacattgatcatgagacgcacgaactaactcggatgaacctccagacagccactgccacttgtttcgatgctgcccaggggaagacgcgcactctgatggaaaaggacagttacccaaggtttttaaagtcccctgcttaccgagacctagctgctcaggccagcgccgcatcagccaccctgagcagctgcagtttggatgaacccagtcatacttag

SEQ ID NO: 238259 - DNA, 459 bp, synthetic construct
  misc_feature 1..459: note = Description of Artificial Sequence: Synthetic coding sequence
  source 1..459: mol_type = other DNA
atgccagtgaaatgctgcttctaccgatcgccaacggccgaaacgatgacctggtctgaaaacatggataccctgctggccaaccaggccggactcgatgctttccgcatcttcctgaagtcagagttcagcgaagagaacgtcgaattttggttggcctgcgaagacttcaagaaaacaaagaacgccgataaaatcgcatctaaagctaagatgatttactccgaattcatcgaggcagatgcgccaaaggaaatcaacattgattttggtacccgcgacttaatttcaaagaacattgccgagcccaccctcaagtgctttgatgaggcccagaagctaatctattgccttatggcgaaggacagtttcccccgatttctcaaatccgaaatttacaagaagctggtcaactctcaacaagtacctaatcataagaagtggctacctttcctttag

SEQ ID NO: 238260 - DNA, 1809 bp, synthetic construct
  misc_feature 1..1809: note = Description of Artificial Sequence: Synthetic coding sequence
  source 1..1809: mol_type = other DNA
atggagcgttcattgcacagggtgagtcttggcagccggagggctcatcccgatctgtctttctacttaaccacgtttggtcagctaaggctatccatcgatgcgcaggatcgtgtacttctgttacacatcatcgaggggaaaggcctcatttcaaaacagcccggtacatgtgacccttatgtcaagatatctctcattcccgaggattctcggcttcgacaccaaaaaacacagaccgtgccagattgccgagatcctgcgttccatgaacacttcttcttcccggtgcaggaagaggacgatcagaagcggctactcgtgactgtatggaatcgcgctagccagtcccgccagtccggcctgataggttgtatgtccttcggtgtgaaatccctgctgacccctgataaagaaatctctggatggtattaccttctgggcgagcatcttgggcgtaccaagcacctaaaagtggccaggaggcgtctgaggcccttgcgggatcctctgcttcggatgccaggagggggagatactgagaacgggaaaaagcttaagatcactatacccagaggaaaggacggctttggattcacaatctgctgtgattccccagttcgcgtgcaggccgtggacagcggaggcccagctgagagagcaggcctgcagcagctcgataccgttctccaactcaacgagagacctgtggagcactggaagtgcgttgagctggcccacgaaatacggagttgtccttcggagatcatcctgctagtctggcggatggttccccaggtgaaaccagggccagacggtggcgtgctgcgtagagcctcctgtaaatccacacatgatctgcagtcccccccaaacaagagggaaaagaactgcacacatggtgtccaggcgaggcccgagcagcgacactcatgtcacctggtctgcgactcgagcgacggcttgctacttggcggatgggagagatatactgaggtcgctaaacgcggaggacagcatactttacccgctctgtctagggcaactgcccctacggacccgaattacatcattttggcacccctgaatccaggctcacagctccttaggcccgtttaccaggaagacaccattcccgaggagtccggcagcccctccaaaggaaagtcgtacactgggctgggaaagaagagccggttaatgaaaacggtgcagactatgaaaggtcacggcaactatcaaaattgtccagtggtccgcccacacgcgacgcattcgagctacggaacctacgtaacccttgcacccaaggttctggtcttccctgtgttcgtgcaaccgctggatctctgcaatcctgcacgtaccctgctgctgtccgaagagttactcctgtacgagggaaggaataaggctgccgaagtgacattattcgcctatagcgatctgctgctgtttaccaaggaagacgagccaggtcggtgcgacgtgttgaggaaccccctctatctgcagtccgtcaagctacaggaggggagctcggaagacctgaagttctgtgtgttataccttgctgagaaagccgaatgtctgttcacactcgaggcacactctcaagaacagaaaaaaagagtgtgctggtgtctgtcagagaacatcgctaagcagcaacaactagccgcttctccccctgacagtaaaaagctacacccttttggctcactgcaacaagagatggggcctgtgaacagcacaaatgcgacccaagacaggtcctttaccagccctggacagactcttattggttag

SEQ ID NO: 238261 - DNA, 507 bp, synthetic construct
  misc_feature 1..507: note = Description of Artificial Sequence: Synthetic coding sequence
  source 1..507: mol_type = other DNA
atgaaaaacaaactgggtatattccggaggcgcaatgagagtccaggggcacctcccgcaggcaaagcggacaaaatgatgaagagctttaagcctacaagtgaggaagccctgaagtggggggagagtcttgaaaagcttttggtgcacaagtacgggcttgctgtattccaagcctttcttcggacagaattctccgaagaaaacttagagttctggctggcatgtgaggacttcaaaaaggttaagtctcagtcaaagatggcctcgaaggcgaagaaaatttttgccgagtacatcgcaatacaggcctgcaaggaagtgaatttagactcctatacaagagagcataccaaggacaatctccaatctgtgacccgcggatgctttgacttggcacaaaaacgtatttttggcctgatggaaaaggatagttatcctcgttttttaaggtccgatctctatctggatctgattaaccagaaaaagatgagccctccactgtag

SEQ ID NO: 238262 - DNA, 2754 bp, synthetic construct
  misc_feature 1..2754: note = Description of Artificial Sequence: Synthetic coding sequence
  source 1..2754: mol_type = other DNA
atgaatcgcttcaatgggctgtgcaaggtgtgctcagaaaggcggtaccgccagatcactattcctagggggaaagatggattcgggtttaccatctgctgtgacagcccagtgagagtgcaggcagtcgatagcggcggaccagccgaaagagcaggcctgcagcagctggataccgtccttcagctcaacgaaaggccagtggaacattggaagtgcgtcgagctcgcccacgagatcagatcttgcccatccgagatcatcttactggtgtggaggatggtgccacaggtgaagcccggtcccgacggaggtgtccttcgcagggcgagttgcaagagcactcacgacctgcagtcacccccaaacaagagggaaaagaattgtactcacggcgtccaggccagacccgaacagcgccattcctgccacttagtgtgtgactcctcagacggactccttctcggcggatgggagaggtacacggaagtagctaagagaggaggacagcatacacttcccgctctaagcagagccaccgctcctaccgatcccaactacatcatccttgctcctctgaacccaggcagccagctgctgcggcctgtgtatcaggaagacacaatcccagaggagtcaggatctcccagtaaaggcaagtcatacactggcctgggaaagaaaagtagactgatgaaaacggtccagactatgaaggggcacggcaactaccaaaattgtcccgtggtacgtccacacgccactcattctagctatgggacatacgtgacgttggcacccaaagtcctggtgtttcccgtcttcgtccagcccctcgatctgtgcaaccccgcacgcacactgcttttaagcgaagagctgctcctgtacgaaggtaggaataaggctgcggaagtgacactgttcgcctacagcgatctgttgctgttcacaaaggaagacgaaccaggcaggtgcgacgtgctcaggaatccgctatacctgcagtccgtgaaactgcaagaaggatccagcgaagacctgaagttctgtgtgctgtatcttgccgaaaaagctgagtgcctgttcacactcgaagcccattcgcaggagcagaagaagcgggtgtgttggtgtcttagtgagaatatcgccaaacagcaacagctcgccgctagccctccagacagcaaaatgtttgaaactgaggctgatgaaaaacgggagatggctttagaggaaggtaagggcccaggcgcagaggacagtcccccttccaaggaaccctcccccggacaagaacttccccctggacaagacttacctcctaataaggactcaccttcggggcaggaaccagccccatctcaggagccactgtccagcaaagattcagccacttccgaaggcagccccccaggtccagacgcacccccttccaaggatgtacctccatgccaagaacccccaccagcacaagacttgtccccctgtcaggatctccccgcaggccaggagccgctgccacaccaggatcctctcctgacaaaggaccttcctgctattcaggagagtccaactcgtgacctgccaccttgccaggatttgcctccaagccaagtctcgctacccgctaaggcgttgaccgaggatactatgagctccggcgatctgctggcagccaccggcgatccgcctgctgcaccacgacctgccttcgtcattccagaggttcgtctggacagtacttatagccagaaagcgggagccgaacagggttgttccggagatgaggaggacgctgaagaggctgaagaagtggaggagggcgaggagggggaggaggacgaggatgaggacacatctgacgacaattatggagagaggtccgaggccaagcggagcagcatgattgagaccggccaaggggcagagggcggtctctccctgcgagtacaaaacagcctccggagaaggactcacagtgaaggctcattgcttcaagagcccaggggcccttgcttcgccagtgacactacgttgcactgttccgacggagaaggtgcggcaagcacttgggggatgccctctccctccaccctcaagaaagagcttgggcgaaatggcggatctatgcaccatctgtccctattcttcactggacaccgaaaaatgtccggcgctgatactgtgggggacgacgatgaagctagtagaaagaggaaaagcaaaaaccttgctaaggacatgaaaaataaacttgggattttcagaaggcggaacgaatccccaggtgctccacccgcaggtaaggccgataagatgatgaagagctttaaacctacaagtgaagaagccttgaaatggggggaatccctggaaaagctcctggttcacaagtacgggctggccgtattccaagccttcctgcgcacagagttctccgaagagaatctagagttttggcttgcttgcgaggacttcaagaaggtgaagtcacagagtaaaatggcgtctaaggctaaaaagatcttcgctgagtatattgctatccaggcatgcaaggaggtcaacctggatagctatacaagggagcacactaaggacaacctccagtcagtgacgcgtggctgttttgatcttgcccaaaagcggatcttcggtttgatggaaaaggactcctatcccaggttcttacggagtgatctgtaccttgaccttataaaccagaagaagatgtcacctcctctgtag

SEQ ID NO: 238263 - DNA, 3597 bp, synthetic construct
  misc_feature 1..3597: note = Description of Artificial Sequence: Synthetic coding sequence
  source 1..3597: mol_type = other DNA
atgcccgttatccccgcactttgggaggtggagatgggtagaagccagggacaggaaatcgaaaccatcctggctaacagatcacactctgactctacccccctgccaaattttctaagtggcagccatagaccagagtgctgcacttgtagactgctcactgcatcaggggcacaggatagcctgccctttggcagacgtctttacagtggcccttggagatcctgtgaagaagtctgtcatgtgtcggtcctctcagtactctcgaccagctgtggtttgtctctcagcctcccaatattccccggatggatggagtggctgagcccagacattgcgctgcccagaagagatgaatggactcagacatcaccagcccgtaagcggataacgcacgccaaagtccagggagctggtcagctcaggctgagcatagatgctcaggacagagtcctactcctgcacataatcgagggtaaaggtctgatctccaagcagccgggaacgtgtgacccttacgtgaagatatccctaatccctgaagactcccggctacgtcaccagaagacacagaccgtgccggattgtagggatccggcatttcatgagcatttcttcttcccggtccaggaggaggacgatcagaaacggctgcttgtgaccgtttggaatcgtgcctcccaatcgcgccagtctggcctgattggctgcatgtcctttggcgttaaatccttactgactcctgacaaggaaatttcgggatggtactacctcttgggcgagcacctgggacgcaccaagcatttaaaagtcgcacgccgtagactgagacccctgagagaccccctcctgcggatgcccggtggcggagatactgagaacggcaaaaagctgaagattaccattcccaggggaaaggatgggttcggctttactatttgttgcgatagcccagttagagtacaagcggtggatagtggcggtccagcggagcgagctggattacaacaactggatacagtcctgcagctaaacgagagaccggtagagcattggaagtgtgttgagttagctcatgagatcaggtcatgtccaagcgagatcatcctgttggtctggcgcatggtcccacaggttaaaccgggaccagatggcggtgttctgagaagggcaagttgtaagtccactcatgacctccagagtccgcctaacaaaagagagaaaaactgcacccacggcgtgcaggcacgtcctgagcagaggcattcatgtcatctggtatgcgattcatctgatggactgttgttgggtgggtgggagaggtacacggaggtcgcaaagaggggcggacagcacacactgccggctttgagtcgggctactgcacctaccgatccaaactatattatactggccccacttaatcccggaagccaactgctgcgcccagtgtatcaagaagacaccatcccggaagaaagcggctcccctagcaagggcaaatcatacactggacttggcaaaaagagtaggttgatgaaaacagtgcagaccatgaaaggacacggaaactaccaaaattgcccggtggtccgacctcacgcaacccactcctcctatggcacctatgttaccctggctcccaaggtcctcgtgttccctgtgtttgtgcagcccttggacctgtgcaatcccgctcgcacactgctgctcagcgaggagttgctgctctatgagggacgcaacaaggcagccgaggtgacattgttcgcttattccgacctgctgctgtttacaaaggaggatgaacccggaaggtgtgacgtgctgcggaaccctttgtatttgcagtcagtcaagttacaagaaggatccagcgaggacctaaaattttgtgtgctctacttagcggagaaggctgaatgcctcttcaccctggaggcacattcgcaggaacagaagaagcgggtgtgctggtgtctgtcggaaaacatcgccaagcagcagcagctggccgcaagtccccctgactccaaaatgttcgaaactgaggccgacgagaagcgcgaaatggccctggaagagggcaagggcccaggcgctgaagattctcccccttcaaaagagcccagtccaggccaggaattgcctccaggtcaggatctgccgccaaataaggattccccgtccggccaggaacccgcacctagccaggagccactgtctagcaaagactccgctacgagcgagggctctccccctggccctgatgcacccccatcaaaagacgtgcccccatgtcaggagccaccccctgcccaagatctctcaccttgccaggacctccctgcgggacaggagcccctgccacaccaagacccactgctgactaaagaccttcctgccatccaggaatcgccgacccgcgacttgccaccatgccaggacctgccacccagccaagtgtcccttccagcaaaggcccttacagaggatacaatgtcttcgggcgatctgctcgcagccaccggcgatcccccagcggctcctcgaccggcttttgttatccccgaggtccgtcttgattctacttacagccagaaggctggcgcagagcagggctgttccggcgatgaagaggacgccgaggaagctgaagaagtcgaggaaggtgaagaaggggaagaagacgaggatgaggatacctccgacgacaactatggggagaggtcggaagccaagaggagtagcatgatcgagaccgggcagggggctgaaggcggtttgagccttcgggtacaaaactccctgcgcaggcgaacacactctgaaggcagcctcctccaggagcctcgcggaccatgctttgccagtgataccacccttcattgttcagatggagagggggctgcctccacatggggcatgcctagccctagcaccctcaaaaaagagctgggtcgcaatgggggaagcatgcatcacctgtctttgtttttcaccggtcataggaagatgtcaggcgctgatactgtgggcgacgatgacgaggcctcccgtaaacgcaagtcgaaaaatctggcgaaggacatgaaaaataagctgggcatatttcgcaggagaaatgagtcacccggagcccctcctgctggtaaagcggataagatgatgaaaagcttcaaacctacatctgaagaagccttgaagtggggtgagagccttgaaaaacttctcgtgcataagtacggccttgcagtctttcaggcctttctgaggaccgaattctccgaggaaaacttggaattttggctcgcctgtgaggactttaagaaggtgaagtctcagtccaagatggcctctaaggccaaaaaaatcttcgcagaatacattgcaattcaagcctgtaaagaggttaatctggacagctatactcgtgagcacaccaaggacaacctgcagagcgttacaagggggtgcttcgacctagcccaaaaaagaatatttggcctgatggagaaggattcctatccaagatttttacgcagtgatctttacttggacttgataaaccagaagaagatgtccccgccattatag

SEQ ID NO: 238264 - DNA, 1560 bp, synthetic construct
  misc_feature 1..1560: note = Description of Artificial Sequence: Synthetic coding sequence
  source 1..1560: mol_type = other DNA
atgtttgagaccgaagccgatgagaagcgtgagatggcactggaagagggcaagggccctggagccgaagattctccacccagcaaagagcctagtccaggtcaggagcttccgccaggacaggatttgcccccaaacaaggacagcccttctggacaagagcccgcacctagtcaggaacctttgtcatcaaaggattccgccacctccgagggcagccctccaggaccggatgccccacctagcaaagacgtccctccatgtcaggagccacccccagcacaggatctttcaccttgccaagatctgccagccggtcaggaacctttgcctcaccaggacccactgctgacaaaagacctgccagccattcaggagagccccacccgggacctgcccccttgtcaagatctgccaccgtcccaggtgtccctgcctgctaaggctcttaccgaagacacgatgagtagtggcgaccttcttgctgccacaggcgatccacccgctgcaccgcgtcctgccttcgttatccccgaggtgcggctcgactccacttactcccagaaagcaggagcagagcagggctgcagcggggatgaggaagatgccgaggaggctgaggaggtagaggagggggaggaaggagaagaggatgaggacgaggatacttccgatgacaattacggggagaggtctgaggccaagcggagcagcatgatcgagaccggacagggcgctgaagggggactgtccttgagagttcagaatagcttaagaagacgcacacatagcgagggctcactgctgcaggaaccgaggggcccatgctttgcaagtgatacaacgcttcattgcagcgatggagaaggtgcagctagtacttggggcatgcccagtccctccacccttaagaaggaattgggcaggaatggcggatcaatgcatcacctttcactgttcttcaccgggcacagaaagatgtcaggcgctgataccgtcggagatgatgacgaagcctcaagaaagaggaaatccaaaaacctggctaaggacatgaagaataagctggggatatttcggcgacggaacgagtctccgggagcgcctcccgcagggaaggccgacaagatgatgaaatctttcaaaccaacttccgaagaggccttgaaatggggcgagtcgctggaaaagttgttagttcataagtacggccttgccgtgtttcaagcattcctgcgaaccgagttctccgaggaaaatttggagttctggcttgcatgcgaggactttaaaaaggtaaaatcgcaatccaaaatggcctcaaaagctaaaaaaatcttcgcggaatacatcgccatacaggcctgcaaggaggtgaaccttgatagctatacaagagaacacaccaaggacaatctgcagagtgtgacgcggggatgttttgatctggctcagaagcgtatcttcgggctcatggagaaggatagctatcctcgcttcctccggtcagatttgtacctggacctgattaaccaaaaaaaaatgtctccacccctgtag

SEQ ID NO: 238265 - DNA, 3597 bp, synthetic construct
  misc_feature 1..3597: note = Description of Artificial Sequence: Synthetic coding sequence
  source 1..3597: mol_type = other DNA
atgccagtgatccccgcactgtgggaggtcgaaatggggaggtcacaaggacaggaaatcgagaccatactcgctaacaggtcacatagcgattcaacaccattaccaaacttcctgtctggctctcaccgacctgagtgttgcacatgtcgcctgctgacagcttcaggggcacaggactctctgcccttcggacggagactttacagcggcccttggcggtcctgtgaggaggtatgccatgttagcgtgttgtcagtgttgagtacctcgtgtggattaagtctaagtctccccattttccctggctggatggagtggctttcaccagacattgcccttccaaggagagacgaatggacccagacatcccctgcccgaaagcggattacccatgctaaggtccagggggctggacagttgaggctgagtatcgacgcccaggaccgcgtgcttttgctgcacatcatcgagggcaaaggattgatctcaaaacagccgggaacctgcgacccctatgtgaaaatatcccttatccccgaggattcccgactgcggcaccaaaagacgcagaccgtgccagattgcagagatccagcctttcatgaacatttcttcttccctgtgcaagaagaagacgaccaaaaaaggctcctagttactgtatggaacagagcctcacagagccgccagtccgggctgattggctgtatgtccttcggagtcaagagcctgctgacgccagacaaagagatctcaggctggtactacctgttgggagagcacctgggccgtactaaacacctgaaggtggcacgcagacgcttgaggccgttgagagatccgcttttgcggatgcctgggggtggggacactgaaaatggaaaaaagctcaagataaccattcctcgaggcaaagacgggttcggcttcaccatttgctgtgactcccccgttagagtgcaggctgttgattcgggagggcctgcagagagagcagggctgcagcaactcgacaccgtacttcagctgaacgaacgcccagtggagcactggaaatgcgtcgagcttgcccacgaaatcagatcatgcccgagcgagattatcctgctcgtatggcggatggtgccacaggtaaagcctggacccgacggaggggtgctcaggcgtgcatcctgtaagtctacccacgacctccagtcaccccctaacaaaagggagaaaaattgtacgcacggtgtccaagccagacccgagcaaagacactcttgtcacctggtgtgcgactctagtgatggtctactactgggcggttgggaaagatacaccgaagtggccaagagaggtggccagcacaccctgcccgcattaagccgcgcaactgccccaacagaccctaactacattatcctggccccactgaacccgggtagtcagctccttaggccggtttatcaggaggataccattccagaggaatcaggctcaccttccaaagggaaatcctacaccggtttaggcaaaaagtcgcgcctcatgaaaacagttcaaaccatgaaagggcacggcaactatcagaattgcccggtggtgcgtccccatgccacacatagcagttacggcacatatgtaaccctggctccaaaggtgttggtgttccctgtctttgtgcaaccacttgacctatgtaaccctgcgagaacccttctgctttccgaggaactgttactgtacgaagggagaaataaggcagccgaggttacattattcgcctactcagaccttcttttgtttaccaaagaggatgagcctggaaggtgtgacgtccttcggaaccctctgtatctgcagtcagtgaagctgcaggaagggagttcagaagacctcaaattttgcgtactttacctagccgaaaaggcagaatgcctgtttactctggaagcgcattctcaggagcagaagaaacgggtctgctggtgtctcagcgagaatatcgctaaacagcagcagcttgccgctagtccccctgacagcaagatgtttgaaacagaggccgatgagaagagagagatggcactggaagaagggaagggtcccggagccgaggatagtccgccatctaaagagccgtcccccggtcaagagcttccacccggtcaggatctgccccctaataaagattcaccatctggccaagaacctgccccttcacaggaaccgctgtcttccaaggactcagctacaagtgaggggagtccgcctggccctgatgcccctccttcgaaagacgtgccaccatgccaagagcccccaccagcccaagacctcagcccctgccaggatctgcccgcaggacaggaacctctgcctcatcaggaccccttactcacaaaggacctgccagcgattcaggaatcccccacccgggatctgcccccatgtcaggatctgcccccatctcaggtatccctgcctgctaaagcacttaccgaagacacgatgagttccggggatctccttgcggcaaccggtgacccacccgctgcgcctcgaccagcatttgtcatacctgaggtgagactggactccacttacagtcaaaaggccggtgccgagcaagggtgttctggggacgaagaggatgccgaggaggcagaagaagtggaagagggagaagaaggtgaagaggacgaggacgaggatacctccgacgacaattacggggaaagatcagaggcaaagcgtagctccatgatcgaaacagggcagggagcggagggcggtttaagcctccgagtgcaaaattccctgcgcagacgcacccactccgaagggtcattgttgcaggagccgaggggaccgtgttttgcatcggacaccactctgcactgtagcgacggagaaggtgctgcctctacgtggggcatgccatcgccttctacactgaaaaaggagctgggtaggaacgggggtagtatgcatcatttgagtctcttttttacagggcacaggaagatgagtggggcagacaccgtaggggatgatgacgaggcctcaagaaagcgtaagtctaaaaatctcgccaaggatatgaagaacaagttgggcatcttcaggagacgcaacgagtcccccggagccccacccgcaggcaaagctgataagatgatgaaaagctttaaacctacctccgaggaggctttgaagtggggtgagagccttgaaaaactgctcgtccataagtacggattggcggtgtttcaggccttcctccgaactgaattttctgaagagaacctggaattctggttagcatgcgaggactttaagaaggtgaaaagtcaatccaaaatggcctctaaggctaagaagatctttgctgaatatattgctattcaggcttgcaaagaagttaacctggactcttatactcgcgaacacaccaaagacaatttacagtccgtgacccgtggctgctttgatcttgctcagaagaggatctttggtctcatggagaaggacagttacccacgcttcctgcggtcggacttgtaccttgacctgatcaatcagaagaagatgtctccgcctctgtag

SEQ ID NO: 238266 - DNA, 1776 bp, synthetic construct
  misc_feature 1..1776: note = Description of Artificial Sequence: Synthetic coding sequence
  source 1..1776: mol_type = other DNA
atgaatcgtttcaatggtctgtgcaaggtgtgctctgaacggcgatacagacaaattacaatccctaggggaaaagacggattcggttttaccatctgttgtgattccccggtgagagttcaggccgtagacagtgggggacctgcggaacgcgcagggctccagcagctggacacagttctccaattgaacgagcgaccggtggagcactggaaatgtgttgagctggcacacgaaattcgaagctgcccgagtgagataattctattggtctggcgtatggtcccccaggtgaagcctggccctgatggcggtgtcctgcgtcgggcatcgtgtaaatctacccacgatcttcagtccccaccaaataagcgggagaagaactgcactcacggcgttcaggctcggcctgaacaacgtcactcgtgccatctggtgtgcgacagttcagacggcctcttgctgggtggttgggagcggtacacagaagttgccaaaagaggcggtcagcacacacttccagcactatctagagcaaccgctcccaccgatcctaattatatcatattggctcctctgaaccctggttcgcagttgctgcggcctgtgtatcaagaagacaccattcctgaggagagcggatccccgagtaaggggaagtcctacaccgggctgggaaagaagtcaagactgatgaaaaccgttcagaccatgaaaggccacggaaactatcaaaattgccccgtggtgagacctcatgccacacacagctcatacggtacctatgttactctggcccctaaggtactcgtctttcctgtgttcgttcaaccgctggatctgtgtaacccagcccgaacactgcttttgagtgaggagctgttgctatatgagggcagaaataaggcagctgaagtgacgctgtttgcgtactcggaccttctcctctttaccaaggaagacgaacccggacgatgcgacgtgcttcgaaacccgttatacctgcaaagtgtcaagcttcaagaagggagttcagaggatttaaaattctgtgtgctctatctcgccgagaaggccgagtgcctgtttacactggaggcacacagtcaggaacagaaaaaacgcgtgtgctggtgcctctctgagaatattgctaaacaacagcaactagccgctagtccgcctgatagcaaaatgagtggtgccgacacagtcggcgacgatgacgaggccagccgaaagaggaagtctaagaatctggctaaggacatgaagaataagttggggatctttagaagacgcaacgagtctcccggtgccccaccagccggaaaagcagacaagatgatgaaatctttcaagcctacttccgaagaagctctgaagtggggcgagagtctggagaaattactcgtccataagtacggcctcgctgtctttcaggccttcctgcgtactgaattctcggaggagaacctagagttctggctcgcttgcgaggatttcaaaaaggtgaagtcccagagcaagatggcgtcaaaggcaaagaaaatcttcgctgaatacatcgcaattcaggcctgtaaggaggtaaatcttgactcctacacacgtgagcacacaaaggacaacctacagtcggtaactaggggatgctttgatctggctcagaaacggattttcggcctaatggaaaaagacagctatccaaggtttctcagaagcgacctgtacctggatctcattaatcaaaagaagatgtccccacctctgtag

SEQ ID NO: 238267 - DNA, 1560 bp, synthetic construct
  misc_feature 1..1560: note = Description of Artificial Sequence: Synthetic coding sequence
  source 1..1560: mol_type = other DNA
atgttcgaaaccgaggctgacgaaaagcgggaaatggccctcgaggagggcaagggacctggggcagaggatagtcccccatctaaagagccgtccccaggccaggagctgcccccaggacaggatttgccacctaacaaggattctcccagcggacaagaacctgcccctagccaggaacctctgagctcaaaggacagcgccactagcgagggctcgcctccaggtccagacgctcccccatccaaagatgtaccaccctgccaggagcccccacctgcccaggatctgagcccctgtcaggatctgccagctggccaggagcccctccctcatcaagacccgctcttgaccaaagatctccccgcaatccaagagtctcccactagagacctgcccccatgtcaggacctgcctccatcgcaggtatctttacccgcaaaagctctcactgaagacaccatgtctagtggggatcttctcgcagccaccggcgaccctccagcggctcctcgccctgctttcgtgattccagaggtgcggctggatagtacttactcccagaaggctggcgcagaacaggggtgtagcggcgatgaagaagatgccgaggaagccgaggaggtggaggaaggagaggagggtgaggaggacgaagacgaggacactagtgacgataactacggggagcgttccgaggcaaagagatcgtctatgatcgagacgggtcagggcgctgaaggtggcctttcgctgcgcgtgcagaactcactcaggaggagaactcacagtgaaggaagtctgctgcaagaacctaggggcccatgttttgcatctgatacaactttgcattgttccgacggagaaggggcagcttctacttggggcatgccttctccctcaacccttaagaaggaactgggccgaaatgggggatctatgcatcacctttctctttttttcaccggacatagaaagatgagcggcgcagataccgtaggggacgacgacgaagccagccggaagaggaaatccaagaatcttgcaaaggatatgaagaataagctgggaatctttcgcagaaggaacgagtcccccggagcacctcctgctggtaaggctgacaagatgatgaagtcatttaagcccacctccgaggaagcccttaaatggggggagagccttgagaaactgctggtccacaaatatggactggccgtctttcaggcattcctccgtacagaattctccgaggagaatctcgaattttggctagcctgtgaagattttaagaaagtgaagagccagagcaagatggcatcaaaggctaaaaagatcttcgcagaatatattgctatccaggcttgtaaggaggtaaatctggattcctacacgagagaacatacaaaagataatttgcaatccgtcaccagagggtgctttgacctggcccaaaaacgaatcttcggcctgatggagaaagacagttatccccgattcctcagaagtgatctctacttggacctgatcaatcagaagaagatgtctcccccactgtag

SEQ ID NO: 238268 - DNA, 936 bp, synthetic construct
  misc_feature 1..936: note = Description of Artificial Sequence: Synthetic coding sequence
  source 1..936: mol_type = other DNA
atggtcactaggcggcctgtgactaattcctgggactggctgccagccggtgccgctcctgaagccgtcccctgtcgccacatgcctttaagtagactgccactgcgggttggacagaaagaatttttttttcccctgccacttctggtgccgcctataagttggctcctgttatctgagtcccagccccgattagtacctgggtcgcctgtgatcaggcctggtttccagagggcgtgtgtggccgctgcctgtacagttgctgccagatgtccagggaggggggtgggtgaccgctcacaaagtggagcatcctaccgccctatatgcgggccaaaagtcggaggcccaactgaaatgctacgcggaatgtacttgactagaaacggaaacctccagaggcggcatacaatgaaagaggccaaggatatgaagaataagcttggaatctttaggcgaaggaacgagagcccgggagctccccctgcagggaaagcagataagatgatgaaatcatttaagcccacatccgaggaagctctaaagtggggtgagtccttagagaaattgttagtccacaagtacggcctcgcagtgtttcaggcatttctacgaactgaattcagcgaagaaaacctagagttctggctggcgtgtgaagattttaaaaaggttaagtcacagagtaagatggcttctaaagcaaagaagattttcgctgaatacatcgccatccaggcttgtaaagaggttaatctggactcatatacacgtgagcatacaaaagacaacctgcagagtgtaacgagggggtgtttcgatctggctcaaaagagaatctttggacttatggagaaggatagttaccccaggtttcttcgcagcgatctgtacctggaccttataaatcagaagaaaatgagtccgcctctttag

SEQ ID NO: 238269 - DNA, 564 bp, synthetic construct
  misc_feature 1..564: note = Description of Artificial Sequence: Synthetic coding sequence
  source 1..564: mol_type = other DNA
atgaagcacaggctcggctttcttctccagaagtctgacagctgtgagcacaatagttcacataataaaaaggataaggtcgtcatctgccagagggtgtcccaggaggaggtgaagaagtgggccgaaagtctggagaatctgatttctcacgaatgcggtctggcagcattcaaggcattcttgaagtctgagtattccgaagagaatatcgatttttggatctcatgtgaagagtacaagaaaatcaagtctccatcaaagctgtcaccgaaggccaaaaagatctacaacgagttcattagcgttcaggcaaccaaagaggtgaacctggactcctgtacccgcgaagagacgtcccggaatatgctggaacctacaattacttgcttcgacgaagcccagaaaaagatattcaatttaatggagaaagatagctatcggcgatttctgaagagccggttctatctcgatctggtgaacccatcatcttgcggcgctgagaaacagaaaggcgctaagagctccgccgactgcgccagcctcgtgccacagtgcgcctag

SEQ ID NO: 238270 - DNA, 282 bp, synthetic construct
  misc_feature 1..282: note = Description of Artificial Sequence: Synthetic coding sequence
  source 1..282: mol_type = other DNA
atgtgtaaagggctagccggtttaccagcctcatgcctacgctctgccaaggatatgaaacacagactgggcttcctcctccagaaatcagatagctgcgagcacaactcatcccataataagaaagataaagtggttatttgccaacgggtgtcacaggaggaggttaagaagtgggccgaaagcttagaaaacttgattagccatgagtgtgaacccggttttttgcaccagggacgggataagcccgagcatgccagggcctacaacaacctcctctag

SEQ ID NO: 238271 - DNA, 618 bp, synthetic construct
  misc_feature 1..618: note = Description of Artificial Sequence: Synthetic coding sequence
  source 1..618: mol_type = other DNA
atgtgtaagggcttggccggtctgcctgcgagctgcctgaggagtgccaaggatatgaagcacagattgggctttctgttacaaaaaagtgacagctgtgagcacaactctagccataacaagaaggataaagttgtgatttgccagcgggtttcccaagaggaggtcaagaagtgggccgagtccctggaaaacctcatctcgcacgaatgtggtctggctgcttttaaggcattcttaaaatcggagtactcagaagaaaacattgacttctggatttcatgcgaggaatataagaaaataaagagcccctctaaactctcccccaaggcaaagaagatttacaatgagtttatcagtgtgcaagcaactaaggaggtgaatttggattcctgcacgcgcgaagaaacgagcaggaatatgctggaacccactattacctgcttcgacgaagcccagaagaagatatttaatctgatggagaaggacagctataggcggttcttaaaaagccggttctacctggacctcgtgaaccctagtagttgtggcgctgagaaacagaaaggagctaagtccagcgcggattgcgcctcattagtgccccagtgcgcgtag

SEQ ID NO: 238272 - DNA, 909 bp, synthetic construct
  misc_feature 1..909: note = Description of Artificial Sequence: Synthetic coding sequence
  source 1..909: mol_type = other DNA
atgtacaacatgatgctgcttattcagaaaagaaaagggatcgggtcccaactcctcagggccggagaagccgagggggacagaggggcaggcacagccgagaggtcgtctgattggcttgatgggaggagctgggcgatcaaggaaactcccactgggctcgccggtaggcgcagcgaggattccgacaatatcttcacaggagaggaagccaaatacgcccagtcgagatcacattccagctcatgtcggatcagttttttgttggcaaatagcaagctcctgaacaagatgtgcaagggcctcgccggattgccggcatcatgtctgcggagtgccaaggacatgaaacatcgtttagggtttctgctgcagaaaagtgacagctgtgagcacaactcctctcataataaaaaggataaagtcgtgatctgtcaaagagttagtcaagaagaggtaaagaaatgggccgaaagtctggaaaatctgatttcacatgaatgcgggctggccgcttttaaggcattcttaaagagcgagtactctgaggagaatatcgacttctggatttcttgtgaggagtataagaagatcaagagtccaagtaaattgagtccgaaagccaaaaaaatatataatgagtttatcagtgtgcaggctactaaggaagtgaatctcgactcctgtactcgagaagaaaccagccgcaatatgcttgaaccgaccatcacatgtttcgatgaagcccagaaaaagattttcaatttgatggaaaaggatagctacagacgttttcttaaatcccgcttctacctggatcttgttaatccttctagctgtggcgcagaaaagcagaaaggagctaagtcttctgccgattgtgcctctttggtcccacagtgtgcctag

SEQ ID NO: 238273 - DNA, 564 bp, synthetic construct
  misc_feature 1..564: note = Description of Artificial Sequence: Synthetic coding sequence
  source 1..564: mol_type = other DNA
atgaagcacagactgggcttcttactgcagaaatccgactcatgcgagcataactcatcccacaacaaaaaggacaaggtggtcatctgccagcgtgtgagccaggaagaagtcaagaagtgggcggagtctcttgagaacttgatttcacacgaatgtggcctggcggcattcaaggccttcctcaagagcgagtatagcgaggaaaacatagacttttggatctcatgtgaggagtataagaaaatcaagtccccatccaaattgtctccaaaggcaaaaaagatttacaacgaatttatatccgtgcaagctaccaaggaggtgaacctagacagctgcacaagggaggaaacctcacgcaacatgctcgagccaaccattacatgtttcgacgaagctcaaaagaagatctttaacttaatggagaaggactcctaccgcaggttcttgaaatcccgattctatctggacctggttaacccatccagttgcggagcagaaaaacagaaaggagccaaaagcagtgctgactgtgcatcgttggttccccaatgcgcgtag

SEQ ID NO: 238274 - DNA, 432 bp, synthetic construct
  misc_feature 1..432: note = Description of Artificial Sequence: Synthetic coding sequence
  source 1..432: mol_type = other DNA
atgaagcatcggctgggtttcctcttacagaagagtgattcttgcgagcacaactcttctcacaacaagaaagacaaagtcgtgatatgccagagagtctctcaggaggaggtgaaaaaatgggcagagtccctggagaatttgatcagtcatgagtgtgggcttgccgcattcaaggctttcttaaaatccgaatattctgaggagaatattgacttttggatttcatgtgaagagtacaaaaagatcaagagtcccagcaagttgtcccccaaggccaagaagatttacaacgaattcatcagcgtgcaggctactaaggaggtcaaccttgacagttgtaccagagaagagacaagtagaaatatgctcgagccgacgattacgtgcttcgacgaagcacagaagaagatttttaacctgatggagtag

SEQ ID NO: 238275 - DNA, 546 bp, synthetic construct
  misc_feature 1..546: note = Description of Artificial Sequence: Synthetic coding sequence
  source 1..546: mol_type = other DNA
atgtgcaaagggctcgcggctctacctcatagctgcctggaaagagccaaagagatcaaaatcaagttggggatcctgctgcagaaacccgatagcgttggagatctggtgatcccatataatgagaagccagaaaaacccgcaaaaacccaaaaaacttcactcgacgaggcactgcaatggagggactctttagataaattactccagaacaactacgggctggcctcctttaaaagctttctgaagtctgaattttcagaagagaacctggagttctggattgcatgcgaagactacaaaaagatcaaatcacctgctaagatggctgaaaaggccaagcagatatacgaggagtttatccagactgaggcacctaaggaagtgaatatagatcatttcaccaaagacatcaccatgaagaatctggtcgaacctagtttatccagctttgacatggcacagaaacgaattcatgctctaatggagaaagattctctgcccaggttcgtccggtccgagttctaccaggagctgattaaatag

SEQ ID NO: 238276 - DNA, 606 bp, synthetic construct
  misc_feature 1..606: note = Description of Artificial Sequence: Synthetic coding sequence
  source 1..606: mol_type = other DNA
atgtgcgccagaaacattagtcaagatatcctgattctgcagatgcacagcgcacattggcatatcaatggcaagtacgaggagaaatccaacctgatgttctgggctaaggaaatcaagatcaagttgggtatcctcctgcagaagccagattcagttggtgatctggtgataccatataacgagaagcccgagaaacctgccaaaactcagaagacttccctcgatgaggcactgcaatggagggatagtctcgacaaattactgcagaacaattacgggcttgctagctttaaaagctttctcaagtctgagttctccgaggagaatcttgagttctggatagcttgcgaggactacaaaaaaatcaagtctccagccaaaatggcagagaaggcgaaacagatctatgaggaatttatccagacagaagcccctaaggaggtgaatattgatcatttcaccaaagacatcactatgaaaaatctggtggagcccagccttagctcattcgacatggctcagaagcgcatccacgctctcatggagaaggactccctgccccgtttcgtccgctccgagttttaccaggaactgataaagtag

SEQ ID NO: 238277 - DNA, 222 bp, synthetic construct
  misc_feature 1..222: note = Description of Artificial Sequence: Synthetic coding sequence
  source 1..222: mol_type = other DNA
atggcggagaaggcgaagcaaatctacgaggaatttatccaaaccgaggcccctaaagaggtgaatatcgatcacttcaccaaagacatcaccatgaaaaacctcgtggaaccgtctctgagctcctttgacatggcgcagaaacgcatacatgccctgatggagaaggattcactacctagatttgtgaggagcgagttctaccaggaactcattaagtag

SEQ ID NO: 238278 - DNA, 1362 bp, synthetic construct
  misc_feature 1..1362: note = Description of Artificial Sequence: Synthetic coding sequence
  source 1..1362: mol_type = other DNA
atggcccagggtagcggggaccagagggcagtgggggtagcagaccctgaggagagctcccccaatatgattgtttattgcaagattgaggacattataaccaagatgcaggacgacaagacaggcggagtacccatcagaacagtcaagagctttcttagtaaaatcccaagcgtggttaccggtacagacatcgtacaatggctcatgaagaacctctcaatcgaggatccagttgaggctattcatctcgggtccctcattgcggctcagggatacatctttccgattagcgatcatgttttaactatgaaggatgatgggactttctaccgattccaggcaccctacttttggccaagcaactgctgggaacctgaaaatacggactacgccatttatctttgtaaacgcaccatgcagaataaagccagacttgaactggccgactacgaagccgaaaacttggcaaggttacaaagagcgtttgcccgaaaatgggaatttatattcatgcaggcagaagcccaggttaagattgatcggaagaaggacaagactgagcgcaaaatcctcgatagccaagaacgggctttttgggatgtgcaccggcctgtcccaggttgcgtcaacacgaccgaaatggacattcgcaaatgcagacgactgaagaacccacaaaaggttaagaagagcgtctacggagtaacagaagaatcccaagcgcagtctcccgtgcatgtactttcccaaccaattagaaagactactaaggaggatatccggaagcaaatcacattccttaatgcacaaattgatcggcattgtctgaagatgtcaaaagtggctgagtcaaaggagcccagccagcagcgcgtgaagcgttggggattctcctttgatgagattctgaaggatcaagtgggaagagaccagttcctgcgattcctggaaagcgaatttagctcagagaacctgcggttctggctggctgtgcaggaccttaaaaagcagcccttacaggatgttgccaagcgcgtggaggaaatttggcaggagtttttggctcctggcgctcccagcgcaattaatctagattctcactcttacgagatcaccagccagaatgtgaaagatggaggcaggtacactttcgaggacgcccaggagcatatctacaagctcatgaaatccgattcctacgccagatttctgcgcagtaacgcttatcaggatctgctgctcgcaaaaaagaagcctgagtccgaacagggcaggagaacaagcctggagaaattcacccgctctgtcggcaaatcactagctggaaaacgactcacaggtttgatgcagagttcctag

SEQ ID NO: 238279 - DNA, 1383 bp, synthetic construct
  misc_feature 1..1383: note = Description of Artificial Sequence: Synthetic coding sequence
  source 1..1383: mol_type = other DNA
atggcacagggatccggtgaccagcgggctgtcggggttgccgaccctgaggagtccagtccaaacatgatcgtatactgtaagattgaagatataataacaaaaatgcaggacgacaaaactggaggtgtcccaatccgaacagtcaagtcatttcttagtaaaattccaagcgtggtaacagggaccgacattgtgcaatggctgatgaaaaatctgagtatagaggacccggttgaggctatccatctaggtagcctgattgctgctcagggctatatctttcctatctccgatcatgtgctgactatgaaggatgatgggacattctaccgcttccaggctccatacttctggccttccaattgctgggagcccgagaacacggattatgccatctatttgtgtaaaagaacaatgcagaacaaagcacgactagaactggctgactacgaagctgagaatctggccagactgcagagagcctttgctcgaaaatgggagttcatcttcatgcaggcggaagcgcaagttaaaattgataggaagaaggacaagacagaacggaaaattctcgattctcaggagagagccttctgggacgtgcaccggccagtccctgggtgcgtgaacacaactgagatggatatccggaaatgtagacgccttaagaatccacagaaggtgaagaagagcgtttatggggtgaccgaagaatcacaggcccagtctcctgtgcacgtgttgagccagcctatccgcaagaccaccaaagaagacattaggaagcagattacattcctgaacgcccaaattgataggcactgcttgaaaatgtcaaaggtagcggagtcccttatcgcttataccgagcagtatgttgagtacgaccctctgatcacccctgccgagcctagcaatccctggatcagcgacgatgtggccctgtgggacatcgagatgagcaaagaacctagtcagcagcgggtcaagaggtggggattcagcttcgatgagatactcaaagaccaggtggggagagaccagttcctgagatttttagagagcgagttctcctcagaaaatctcaggttttggttggccgttcaggatcttaaaaagcagcctctccaggacgttgccaagagggtggaagagatctggcaggaattcctggcccctggcgctccttctgcaattaacctggatagccactcatatgaaataacatcccagaatgtgaaggacggcggacgatatacttttgaagacgcacaggaacatatatataaattaatgaagagcgactcttatgcacggtttctgcgctccaatgcctaccaggacttgttactcgccaagaaaaaagtctggctgttgtag

SEQ ID NO: 238280 - DNA, 1419 bp, synthetic construct
  misc_feature 1..1419: note = Description of Artificial Sequence: Synthetic coding sequence
  source 1..1419: mol_type = other DNA
atggcccagggatcgggggatcagcgagccgttggcgttgccgatcctgaggagtcctctccgaatatgattgtgtattgtaagatcgaggacattatcacgaagatgcaagacgacaagacaggcggtgtgcccattcgcaccgtcaagtcctttttgtcgaaaattccatcagtggtgaccgggaccgacatcgtacagtggctgatgaaaaatctcagcattgaggatccagtagaggcaatccacttaggtagtctgattgcagctcaaggctatattttccccataagtgaccacgtgctaacaatgaaagacgacggcactttctatcggttccaggctccttatttttggccatccaattgttgggaacccgaaaatacagactacgccatctatttgtgcaaaagaacgatgcaaaacaaagcacggcttgaactggccgactacgaagcagagaatctcgcaaggctgcagcgggctttcgcccgtaagtgggagttcatctttatgcaggcagaggcacaggttaaaattgatagaaagaaggataagaccgaaaggaagattctggacagccaggagcgagcattctgggatgtgcatcggcctgtgccaggatgtgtgaatactacggaaatggatatacgcaagtgtaggcgcctcaaaaatccccaaaaagtcaaaaagtcggtgtatggcgtaaccgaggagtctcaggctcagtctcccgtgcacgtactgtctcagccgatacggaaaacaaccaaagaggacataaggaaacaaatcaccttcctgaatgctcaaattgaccgccactgtctgaagatgtccaaagtggccgagtcacttattgcctatactgaacagtacgtagagtacgacccactcattacgcctgcagagccatccaatccttggatcagtgatgacgtagccctgtgggacatagaaatgagcaaagagcccagccagcaacgcgtgaaaaggtggggtttcagtttcgacgaaattctgaaagatcaagtcgggagggatcagtttcttagattcttggagtcagagttttcgagcgaaaacctgcgattttggttagctgttcaggacctgaaaaaacagccactgcaagatgtagcgaaacgcgtggaagagatctggcaggaattcctcgcccctggagcaccctcggctatcaatctggattcgcacagctatgaaatcaccagccagaacgtgaaggacggaggacggtacacctttgaggacgcacaagaacacatctataagctcatgaagtctgactcgtatgccagatttcttaggtctaatgcctatcaagacttacttctcgccaagaaaaaagggaagtcgttggccggtaaaaggctgacgggtcttatgcagtcttcatag

SEQ ID NO: 238281 - DNA, 1443 bp, synthetic construct
  misc_feature 1..1443: note = Description of Artificial Sequence: Synthetic coding sequence
  source 1..1443: mol_type = other DNA
atggcacagggatcaggcgaccagagggccgtgggtgtggcagaccctgaggaaagcagccctaacatgatcgtgtactgcaagattgaagacataataaccaaaatgcaggacgacaagacaggaggagttcctatccgaactgtgaaatcttttctctctaaaatcccctcagtggtgactggaacggacatcgtgcagtggttaatgaaaaacctctccatcgaggaccccgtcgaggcgattcatctgggatctctaatcgccgctcagggatatatcttccccatatccgaccatgtcctgacaatgaaagatgatggcactttttataggtttcaagcgccttacttctggccatctaattgttgggaaccagaaaacactgattacgccatctatttatgtaagcgcaccatgcagaacaaagcgaggctggagctggctgattacgaagccgaaaacctcgccagactgcagcgggcattcgctaggaagtgggaattcatattcatgcaagcagaagcacaggtgaaaattgaccgcaaaaaggataagacggaacgcaagattctggatagtcaagagagggccttctgggatgtccataggcctgtgcctggttgtgtgaacaccacagaaatggatatcaggaagtgccggcgtctcaagaatccacagaaggttaagaaaagcgtctatggggtgacagaggagtcccaggcacaaagtcccgtccacgttctcagccagccaatacggaagacaactaaggaagacatccgtaagcagatcacgtttctgaacgcgcagatcgatcgacactgtctgaaaatgagtaaagtcgccgagagtctaattgcctacacggagcagtatgtggaatatgacccgctgattacaccagccgagcccagcaatccctggatctccgacgacgtggccctctgggacatcgaaatgtctaaagaaccatctcagcagcgggtgaagcgttggggcttttctttcgacgagattctaaaagatcaagtcggtcgcgatcaatttttaaggtttcttgagagtgaattttcgtcagaaaaccttcgattctggctggctgtccaagatcttaaaaaacaaccactgcaggacgtagccaagcgtgtcgaagaaatctggcaggagtttctggcccctggggcaccctctgctattaatctggactcacactcttacgaaattacttctcagaacgtgaaagatggtgggaggtatacatttgaagacgcccaagagcacatctacaaattgatgaagtcagacagctatgccagattcctgcgatcaaacgcataccaggacctgttgctggccaagaagaagcctgagtcagagcagggcaggcgaacctcattggagaagttcacaaggtccgtgtgcctgcagcttcttttttag

SEQ ID NO: 238282 - DNA, 1428 bp, synthetic construct
  misc_feature 1..1428: note = Description of Artificial Sequence: Synthetic coding sequence
  source 1..1428: mol_type = other DNA
atggcacagggttctggagatcagagggcagtaggtgtcgcagatcccgaagaaagcagtcctaatatgattgtctactgcaagattgaggatattattacaaagatgcaagatgataaaacgggaggtgtgcctatcaggactgtgaaaagcttcctcagtaaaattccatctgttgttaccgggacagacatcgtgcagtggctgatgaagaacctgagtatcgaggaccccgttgaggccatccatttgggaagcttaatcgccgctcagggctatatcttccctatctctgaccatgtgttaacaatgaaggacgatggtaccttctacaggttccaggcgccttatttctggcctagcaattgctgggaacccgaaaatactgactacgccatttatctctgtaagcgaacaatgcagaataaagctaggctggaactggctgactacgaggcagagaacttagcgcgattacaacgcgcattcgctcgtaagtgggaatttatctttatgcaagcagaagctcaagtgaagatagataggaaaaaagataaaactgaaagaaagatactggattcccaggaacgggcattttgggacgtgcatcgtcctgtcccgggatgtgtcaacaccactgagatggacatccggaagtgtcgtcggctgaagaatccacagaaagtgaagaagtctgtctacggagttaccgaggagtcacaggctcaatccccagtgcacgtgctctcccagcccatcagaaagaccactaaagaagatataagaaaacagattaccttcctgaacgcgcaaatcgaccgccactgccttaagatgtcaaaagtggcagagagtctcatcgcgtatactgaacagtacgtggaatacgatcccctgattactccggcagaacccagtaatccgtggatttccgacgacgtcgcgctttgggacatcgaaatgtcgaaggaaccttcgcagcagcgagtgaaaaggtggggtttttcctttgatgagattcttaaagaccaggtggggagggatcagttcctgcggtttctggagagcgaattttctagcgaaaacctccgattttggcttgccgttcaggatctcaagaaacaaccgttacaggatgttgccaagcgggtggaggaaatctggcaggagtttttggccccaggcgcacctagcgcaatcaaccttgactcacacagttacgagattacgtcccaaaacgtgaaggatggaggacgctacacttttgaagatgcgcaggagcacatctataagctgatgaaaagcgatagctacgcgagattcctaagatcaaatgcttaccaggatctgttattagccaaaaaaaagcccgaatcggaacagggccgtagaacttccctggagaagttcactcgctcagtgggttag

SEQ ID NO: 238283 - DNA, 1434 bp, synthetic construct
  misc_feature 1..1434: note = Description of Artificial Sequence: Synthetic coding sequence
  source 1..1434: mol_type = other DNA
atggcccagggaagcggggaccagagagccgtgggcgtggccgaccccgaggaatcgtcacctaatatgattgtgtattgtaaaatagaggacattatcactaagatgcaggatgacaaaacgggcggagttccaatcagaactgtcaaaagcttcctttccaaaatccctagtgtggtgacgggcactgatatcgtgcagtggctcatgaagaacctttccatcgaagaccctgtcgaggccatccatctggggagtcttattgccgcacaggggtatatttttccgatttctgaccacgtacttacaatgaaggacgatggcacgttttataggttccaggcgccatacttctggccgagcaactgttgggaacccgaaaacactgattacgccatctatctgtgtaaaagaactatgcagaataaagcgagacttgaactagctgattatgaggcagaaaatctcgcgaggcttcagagggcctttgcccgtaagtgggagttcatctttatgcaggctgaggcacaggttaagattgatcgtaagaaggacaaaacagagcgcaagattctcgatagccaggagcgcgctttctgggacgtgcatcgtcccgttcccggatgcgtaaacacaacagagatggacattcgcaagtgccgccgattaaaaaacccccagaaggttaaaaaatctgtgtacggcgtcacagaagagtcccaggcccagtccccagttcatgtgttgtcacagccaataaggaagaccaccaaagaggacattcgcaagcaaattacttttttgaatgcacagattgacagacattgtttaaaaatgtcaaaggtcgcggaaagcctaatagcgtataccgaacagtatgtcgagtatgatccattgataacccccgcagagccatctaatccttggattagcgacgacgtcgcactgtgggatattgaaatgagcaaagagcccagtcaacagagagtaaagcgctggggattttcttttgatgagattctcaaggatcaggtcggaagggaccagtttctgaggtttctggagtcagagttctcgtcagagaatttgaggttctggctggccgtccaagacttaaaaaagcagccactgcaggacgtagctaagcgagtcgaagagatttggcaggagtttctggcgcctggggctccatctgcaattaacctggacagtcactcatacgaaatcacaagtcagaacgtgaaggacgggggacggtatacatttgaggatgcccaagagcacatctataaactgatgaagtctgactcctacgccaggttcctgcggagtaacgcttaccaagacctgcttctggcgaagaaaaagcccgaaagcgaacagggtcgcaggacctctctggagaaatttactagaagcgtcctgttgttctag

SEQ ID NO: 238284 - DNA, 1620 bp, synthetic construct
  misc_feature 1..1620: note = Description of Artificial Sequence: Synthetic coding sequence
  source 1..1620: mol_type = other DNA
atgaagaacctgagtatcgaagatccggtcgaagcaattcatcttggaagcctgatagccgctcagggctatatttttcccatcagcgaccacgtgctcacaatgaaggacgacggcacattctatagattccaggccccttacttctggccttctaactgctgggagcccgagaacacagattacgctatatacctctgtaaacgcaccatgcagaacaaggcaaggctggaactggccgactacgaggccgagaacctggcaagactgcaaagagcctttgcacgcaagtgggagtttatattcatgcaggctgaagctcaggttaaaatagatcgaaaaaaagacaagacggagcgaaagatcctggattcccaggaacgcgctttctgggacgtacatcggcctgtgcccggttgcgtgaatactactgagatggacataaggaagtgccggagactaaaaaacccacagaaagtgaaaaagtccgtttacggagtcacagaagagtctcaggcgcagtcgccagtgcacgtgctctcccagcccatcagaaaaaccactaaggaggacattagaaaacaaatcacctttctgaatgcacagattgatcggcattgtctaaaaatgtctaaagtggcagaaagtctgatcgcctatacagagcagtacgtcgagtatgatccactgattactccagctgagccaagcaatccatggatcagcgacgatgtggcattgtgggatatcgaaatgtccaaggaaccctctcagcagcgggtgaaaagatggggcttcagtttcgatgaaatcctaaaagatcaggtggggcgagaccaatttctgaggtttctcgaatctgaattttcaagcgaaaacctccggttttggctcgcggtgcaagacttgaaaaaacaacccttgcaagacgtggccaaacgcgtggaagaaatttggcaggagtttttagctcccggagccccttctgcaatcaaccttgatagccacagttacgagatcacttcacagaatgtgaaggacggaggaaggtacacctttgaggacgctcaggagcatatttataagctcatgaagtctgactcatacgctcgttttttaaggagtaatgcttatcaggatttgctgctggcaaagaaaaaaccagaatccgaacaaggtaggcgaacatccttggaaaaattcactaggtcggtaaacgtgcagaacacgcgacctgccggagcatggagcatattcatggccgcactccccatggctgtgtggttaagaacacccagatcctgccatggactgtctgaatcaagacttctgggcctgccgagcctgcacgatggcttacgggaaggccaatcgctacctcagagctgcccaggatcctcttcgacggcggcagagggagctcgggagcgagcaagtaacggacggtcacttgcacgaaggcagcactgtcagtgtcacgggcagggagaggagacacagctttgcctttggagccgtctcgagtcatctaagcgttcccagagggcctcctccctgaggactagcaaagccaagaaaaaaagacagacagtgaaacagggacccaaggcctggccatag

SEQ ID NO: 238285 - DNA, 1299 bp, synthetic construct
  misc_feature 1..1299: note = Description of Artificial Sequence: Synthetic coding sequence
  source 1..1299: mol_type = other DNA
atcgaggatatcatcactaagatgcaggatgataagacggggggagtgccaattcgtacagtgaaaagcttcttgagcaagattcctagcgtggtgacaggtacggatatcgtgcagtggttgatgaagaacctgtccatcgaggaccccgtggaggccatccacctcggtagcctgattgccgcacaaggctatatatttccaatatccgatcacgtcctgaccatgaaagacgacgggaccttttatcgcttccaagccccatacttctggccatcgaactgctgggagccagagaatactgattacgccatctatctgtgtaagcggaccatgcagaacaaagctagacttgagctggctgattacgaggcagagaacctagccagacttcagagggcatttgcgcgaaagtgggagtttatctttatgcaagctgaggctcaggtgaaaattgatcgtaagaaagacaagaccgagagaaaaatccttgattcacaggaaagggcattctgggacgtgcacaggccagtgcccggatgcgttaacacaactgagatggacatcaggaaatgtagaaggctgaaaaatccgcagaaggtgaagaagagcgtctatggcgtcacggaggagagccaggcacaatccccagtgcacgtcctttcccaaccaatcagaaaaactaccaaggaggacatccgcaaacaaatcaccttccttaacgcccagatcgacaggcattgcctgaagatgtccaaggtcgccgaatcactgatcgcctacaccgaacaatacgtggaatacgatcccctgattacccccgctgagccctcgaacccatggattagcgacgatgtagcactatgggatattgagatgtcaaaagagccatcacagcaacgcgtcaagcgatggggcttttctttcgatgagattctgaaagaccaggtgggcagagatcagtttctgcgttttttagagtctgagttctcatctgaaaacttacgcttttggctggctgtgcaggatctgaagaaacaacccctgcaggacgtggccaagcgcgtggaggagatttggcaggagttcctggcgcctggtgctcccagtgccattaatttggacagccacagttacgagataacctcccaaaatgtcaaggatggtggcagatacacctttgaggatgcccaagaacacatttacaagctgatgaagagtgactcttacgctcggttcctgcggtccaatgcatatcaggacctgttactcgcaaaaaagaaggtttggctgctatag

SEQ ID NO: 238286 - DNA, 1041 bp, synthetic construct
  misc_feature 1..1041: note = Description of Artificial Sequence: Synthetic coding sequence
  source 1..1041: mol_type = other DNA
atgcagaataaggctcggctcgagctcgctgattacgaggccgagaatcttgcccgactacagcgggctttcgccaggaagtgggagttcattttcatgcaggccgaagctcaggtgaaaatcgacaggaagaaggacaagactgagagaaagatccttgactcacaagaacgggctttttgggatgtgcacaggccagtccctggctgcgtcaatacgaccgaaatggacatccggaagtgcaggaggttaaagaacccacagaaagttaaaaaaagcgtttatggggtcacggaggaaagtcaggctcagtctcccgtgcatgttctttcgcagccaattcggaaaactacaaaagaagatattcgcaagcagattacattcctgaatgcacagatcgacaggcactgcctcaagatgagcaaggtggccgagtccctgatcgcttacacagaacagtacgtcgagtacgatcctctgatcacgcctgctgagcctagtaacccttggatctccgacgacgtggcactttgggatatcgagatgtcaaaggagccctcacagcagagagtcaaaagatggggattctctttcgacgaaatcctgaaagaccaggtggggagagatcagttcctaaggttcctggagagtgaatttagttctgagaatctgaggttctggttggccgtgcaggatctcaagaagcagccgttgcaggatgtagcaaagcgagttgaagagatctggcaggagttcctggcccctggtgccccttctgcaataaacctcgactcccattcgtacgagatcacatcccagaatgtcaaggatggtggcagatacaccttcgaggacgcacaagaacacatctacaaactcatgaagtccgacagctacgccagatttctgcgctctaacgcctaccaggacttgctgctggcaaagaagaaacccgagtctgaacagggcaggcggacttctctcgaaaaatttactcgatctgtgctgtggctgttatttcctcttgggaagaggccttag

SEQ ID NO: 238287 - DNA, 1473 bp, synthetic construct
  misc_feature 1..1473: note = Description of Artificial Sequence: Synthetic coding sequence
  source 1..1473: mol_type = other DNA
atggctcagggctccggtgaccagcgtgcagttggcgtagcagatccggaagagtcttccccaaacatgatagtgtattgcaagattgaggacatcattacaaaaatgcaggatgataagacgggtggcgtgccaatccgaactgttaagtcttttctgagcaagatcccctccgtcgttaccggcacagacatcgttcagtggttaatgaagaatctgtctattgaagaccccgtggaggcgatccatctgggctcactgatagcagcccagggttacattttcccaatctccgatcacgtactgacaatgaaggatgacggaacattttacagattccaagctccatacttctggccgagtaattgttgggaaccggaaaataccgactatgctatctatctgtgcaagcggacaatgcagaacaaggccagactagaactggctgattacgaggccgagaacctcgcaaggttgcagagagccttcgctcgcaaatgggaatttattttcatgcaggccgaagcccaggtcaagattgaccgcaagaaagacaaaacagagagaaagatcttagattctcaggagcgtgctttctgggacgtgcacagaccggtcccgggatgtgtcaacacaaccgaaatggatatcaggaaatgccgcagactgaaaaaccctcagaaagtcaaaaagtccgtctacggcgttactgaggaaagccaagcccagtcacccgtgcatgttctcagtcagccaataaggaagactacaaaagaagatattcgtaagcagatcaccttcctgaatgcgcagatcgataggcactgcctgaagatgtctaaagttgccgagtcactcatagcatacactgagcagtacgtggaatacgatcctctcattacacctgccgagcccagcaatccctggatctctgatgatgtggccttatgggacatagagatgagcaaggaaccatctcagcagagggttaagaggtgggggttttcatttgatgaaatcctcaaggatcaggtcggccgagatcaatttctccggttcctagagagcgaatttagtagtgagaaccttcgcttttggctagctgtccaagatctgaagaaacagccactgcaagacgtggcaaaacgggtggaagaaatttggcaagagtttctggctccgggtgccccatccgctattaacctagactcacactcgtatgagataacaagtcagaatgtgaaggatggaggcagatacacatttgaagacgctcaggagcatatctacaagttgatgaaatccgactcatatgccaggtttctgcgatccaatgcttaccaggatctgctcctcgccaaaaagaagcctgagagtgaacaaggacgtaggacaagcttggaaaagttcaccaggagtgtcggtaaatccctggctgggaaaagactcacaggcctcatgcaaagctcttag

SEQ ID NO: 238288 - DNA, 1419 bp, synthetic construct
  misc_feature 1..1419: note = Description of Artificial Sequence: Synthetic coding sequence
  source 1..1419: mol_type = other DNA
atggcccaaggaagcggagaccagagggctgtaggggtggctgacccagaagagagctctccgaatatgatcgtatactgtaagatcgaagatatcatcaccaagatgcaggacgataagacaggtggagtgcctatacgtaccgtcaagtcatttctttcaaagatcccttccgtggtgacggggactgatatagtgcagtggctaatgaagaacctgtccatcgaggatccagtggaagccattcatctgggtagccttatcgccgctcaagggtatatcttccctatcagcgatcatgtcctcacaatgaaagatgatggcaccttttatcgttttcaggccccatacttttggccatccaactgttgggagcctgaaaatacagattatgcgatctatctttgcaaacgcacaatgcagaacaaagcaaggctggaactggcagattacgaagctgaaaatctggctcgactacagagggctttcgcgcgtaagtgggaatttattttcatgcaggctgaagcccaagtcaagatagacaggaagaaagacaagacggagcgcaaaatcctagatagccaagagagagcgttttgggacgtacaccggccagtaccaggatgtgtgaataccaccgaaatggatattcggaagtgcaggcgtctaaagaacccccagaaggttaagaaatcagtctatggcgttaccgaagagtctcaggctcaatctccagtacacgtccttagtcagccaattcgcaaaactactaaggaggatatccggaagcagattactttcctgaatgcacagatcgaccggcattgcctcaaaatgtcaaaggttgctgagtctctgatagcatacaccgagcagtacgtggagtacgaccctcttatcactcccgctgagccctccaacccctggataagtgatgacgtggccctgtgggatatagagatgtccaaggagccttctcagcagagagtaaaacgctggggtttttctttcgatgaaattttgaaagaccaggtcggacgcgatcagttcctaagattccttgagtccgagttttcctctgagaatttgagattctggctggccgtgcaggacttgaaaaaacaaccactccaagacgttgcaaaacgtgtcgaggagatctggcaggagttcttggcccctggcgcaccttccgctataaacttggactctcactcgtacgagatcaccagccagaatgtaaaggacggtggccgttatacattcgaagatgcccaagaacatatatacaaactgatgaaatctgatagttatgccagatttttacgaagcaacgcctaccaggaccttctactcgcaaaaaagaaaggcaagtcactcgctggaaaaaggctgaccggcctgatgcagagcagctag

SEQ ID NO: 238289 - DNA, 1041 bp, synthetic construct
  misc_feature 1..1041: note = Description of Artificial Sequence: Synthetic coding sequence
  source 1..1041: mol_type = other DNA
atgcaaaataaagcccgactggaactggccgattatgaagcagagaatttagctcgactgcagcgagcttttgcaagaaagtgggaattcatttttatgcaggctgaggcacaggtcaagattgatcgaaagaaagataaaaccgaacgtaagatactagactctcaggaacgggctttttgggatgtgcatagacccgtcccaggatgcgttaacaccaccgagatggacattagaaagtgcagacgcctcaaaaatccacagaaagtgaagaagtccgtgtatggagttactgaagaatcccaggcccaaagtccagtccacgtgcttagtcagccaatccgtaagaccacaaaggaggacattaggaagcagattacgtttctcaacgcccaaatcgatagacattgtttgaagatgtctaaagtagcagagagcctcatcgcatatactgaacagtacgtagaatacgatcccctcatcaccccagcagagcccagcaacccatggatctcagatgacgtggcgctatgggatatagaaatgtcaaaagaaccttcccagcaacgagtaaagagatggggtttctctttcgatgaaatactgaaagaccaagtcggacgcgaccagtttctaagattcctggaatctgagttcagttctgaaaacttacggttctggctggcagtgcaggatctgaagaagcaaccactgcaagatgtcgcaaagagagttgaagagatttggcaggagtttctggcaccaggcgctccctccgccataaacctcgatagtcattcgtacgaaattacgagtcagaatgtgaaggacggcggtagatacacgtttgaggacgcccaagaacacatctataagctgatgaaaagcgattcctacgcccgattcctgcgatctaacgcatatcaggaccttttactcgcaaagaaaaagccggagtccgagcaaggcaggcgcactagtttggagaagtttacaagatctgtgctctactctaacactcctctcgcaaagcgaccctag

SEQ ID NO: 238290 - DNA, 1419 bp, synthetic construct
  misc_feature 1..1419: note = Description of Artificial Sequence: Synthetic coding sequence
  source 1..1419: mol_type = other DNA
atggcccaaggatccggcgaccagcgtgctgtcggagtagcggaccccgaggagagcagcccaaacatgatagtttactgcaaaatcgaggacatcatcactaagatgcaggatgacaaaacggggggagtccccatcaggaccgtgaagtcctttctaagtaagattcccagtgtggttaccggcaccgatatcgtccagtggctcatgaagaatctctctatcgaagaccctgtggaagccatccatttaggatctctcatcgccgctcaaggctatatcttcccgatcagcgatcatgttctcacgatgaaagatgacgggaccttctatcggttccaggccccttatttctggccctctaattgctgggagccggaaaacaccgactatgctatctacctgtgcaaacggacgatgcagaataaagcccgactggaacttgcggactatgaagccgaaaatctcgcccgactccagcgagcattcgcgcgtaaatgggagtttatcttcatgcaggccgaggcccaggttaaaattgacagaaagaaggacaagactgaacgtaagattctggactcccaagagcgggcattctgggacgtccataggccagtgccagggtgcgtgaatacaaccgagatggacatccgcaaatgccgccgactgaagaacccgcagaaggtcaagaaatccgtatatggcgttacagaagaatcacaggcccagtctcctgtgcacgtgctctcccagcccatcagaaaaactactaaggaagacatacgcaagcagatcacgttccttaatgcccagattgaccgacattgtctgaagatgtcgaaagtggcagagagtctcatcgcctacaccgagcaatacgtggagtacgatcctcttataaccccagccgaaccttccaacccctggatatccgatgatgtggctctctgggacattgaaatgtccaaggaaccctcacagcagagagtgaaaaggtggggcttctccttcgatgagattcttaaagaccaggtggggcgagaccagtttctccgctttctcgagtccgaattcagttctgagaatctgaggttctggctcgctgtgcaggatctaaaaaaacagccactccaggacgtggcaaagcgcgtggaagagatatggcaggagttcctagcacctggagccccttccgccataaacctcgatagccactcgtacgagatcacctcccaaaatgtgaaagacgggggaagatacacgttcgaggacgcacaggaacatatctacaaactgatgaaaagcgactcgtacgcccgatttctgcgatctaacgcctatcaggacctgcttctggctaaaaaaaaggggaaaagcctggccggaaaaaggctcaccggcttaatgcagtcatcttag

SEQ ID NO: 238291 - DNA, 1473 bp, synthetic construct
  misc_feature 1..1473: note = Description of Artificial Sequence: Synthetic coding sequence
  source 1..1473: mol_type = other DNA
atggcccaaggaagtggcgaccagcgagcagttggcgtcgccgatcccgaagagagtagcccaaatatgatcgtctactgtaaaattgaggatattataacaaagatgcaggatgataagacaggtggagtgcccatcagaactgtcaagagtttcctatctaagattcctagcgtggtaactggaacggacattgtccagtggctcatgaagaacctctcaatcgaggacccggtggaggcgatacacctgggctcactcattgcagctcaggggtacattttccccatctccgaccacgtattgacaatgaaggacgatggaactttctatcggtttcaagccccatatttctggccgtccaactgctgggagcctgaaaatacagactatgctatatacctgtgcaaacgaaccatgcagaacaaggctagactggagttagctgactatgaagccgagaatctcgcaagactgcagcgggcattcgccagaaaatgggaattcatattcatgcaggctgaagcgcaggtgaaaatcgacaggaagaaagacaaaacagaacggaaaattctggactcacaggaacgggctttctgggacgtgcatagaccagtgcctggttgtgtgaacactaccgagatggacatcaggaaatgccgtagactgaagaaccctcaaaaagtgaaaaagtccgtttatggcgtcacagaggaatctcaggctcagagcccagttcacgtcctgagtcagcccatacgtaaaacaactaaagaagatatccgaaaacagatcactttccttaatgctcagattgacaggcactgcctaaagatgagtaaggtggcagagagtctgattgcgtatacagaacaatacgttgagtacgaccccctgatcacacctgcagagccatctaacccatggatctctgacgatgttgcactgtgggatatagaaatgagtaaggagccatcccagcaaagggtcaagaggtggggattctcttttgacgagatactcaaggaccaagtcggccgagaccaattccttcgcttcctagagtctgaattttccagtgaaaacttgcgcttttggcttgcagtgcaagaccttaaaaagcagcctctccaagacgttgcgaagagagtagaagagatatggcaggaattcctggccccaggcgctccaagtgcaattaacttggatagccactcttacgagatcacaagtcagaacgttaaggatgggggacggtatacattcgaggacgcacaggagcacatctataagctcatgaaaagtgactcgtatgctcgtttcctcagatccaacgcctaccaggatttactgttagcaaaaaagaaaccagagtcagaacagggacgcagaacaagcctagagaagtttacacgttccgtcggtaagagcctggccggtaagcgcctgacggggctcatgcagtcctcgtag

SEQ ID NO: 238292 - DNA, 1398 bp, synthetic construct
  misc_feature 1..1398: note = Description of Artificial Sequence: Synthetic coding sequence
  source 1..1398: mol_type = other DNA
atggctcaaggaagtggggatcagcgggcagtaggcgtcgccgaccccgaagagtctagccccaacatgattgtgtattgtaagattgaagacatcatcacaaaaatgcaagatgacaagacgggtggtgttccaatacgcaccgttaagtctttcttgtcaaaaattccctccgtcgtgacaggcacagacattgtgcagtggcttatgaagaacttgagtattgaagaccctgtggaggcaatccatctaggcagcctaatcgcagcacaagggtacatctttccaatctctgaccatgttctcactatgaaagatgacgggaccttttacagatttcaggcaccttatttttggccatcgaattgctgggagcctgagaatacagactatgcgatttatctctgtaagcgaacaatgcaaaacaaagcccgattggagctagcagattatgaagcagagaacttagcaaggctgcagcgggcatttgctcgtaagtgggaatttatattcatgcaagctgaagctcaagtgaagatagaccgaaagaaagacaagaccgagagaaagatcttagactctcaggaaagggccttttgggacgtgcataggccagtgccgggttgtgtgaacactactgaaatggacatacgcaaatgtcggaggctgaagaatccccagaaagttaaaaagtctgtgtatggcgtcacagaggagtctcaggcccagagccctgtccacgtactcagtcaacccattcggaagactaccaaggaggatattcggaaacagattacattcctcaacgcacaaattgatcgccattgcttgaagatgagcaaggttgctgagtcactgatcgcatacacggagcagtacgtggagtacgacccgctgataacacctgctgaacctagcaatccctggattagcgacgatgtagcactgtgggacatcgagatgtccaaggagcccagtcagcagagggtgaaaagatgggggttttcctttgacgaaattttaaaagatcaggtgggcagggaccagttcctgcggtttttggagtcagaattttcaagtgagaacctgagattctggctggctgtacaggacctcaagaagcaacctctccaggacgtggccaagcgggtcgaggagatatggcaggaatttctagccccaggagcccctagcgccatcaatcttgattctcacagctatgagattacctctcagaatgtcaaggatggcggtcggtatacatttgaggatgctcaggagcatatctacaagctgatgaaaagcgatagctacgctcgctttctgaggagcaatgcctaccaggatctcttgcttgcaaagaagaagaaagtgtccaaagtcgtagagctaccgtag

SEQ ID NO: 238293 - DNA, 1356 bp, synthetic construct
  misc_feature 1..1356: note = Description of Artificial Sequence: Synthetic coding sequence
  source 1..1356: mol_type = other DNA
atggaggatgtgattgctagaatgcaggacgagaagaatggcatccccataaggaccgtgaaatcatttctcagtaaaattccctcagtgttttctggctcggatatcgtccagtggctaatcaaaaaccttaccatcgaagatcccgttgaagccctccacttagggacgctgatggccgctcacgggtatttttttcccatctcagatcacgtattgacactaaaggatgacggcaccttctaccgctttcagaccccatatttttggccaagcaactgctgggaacctgaaaacactgactacgccgtgtacttatgtaaacggaccatgcagaataaagcacgcctggagctggctgattacgaggcggagagtcttgcgaggctacagcgtgctttcgcgagaaaatgggaattcattttcatgcaggctgaagcgcaggccaaggtggataagaaacgggataagatcgagaggaaaatactggatagccaggagagggccttctgggatgtgcaccgtccagttcccggatgcgtcaacacaacggaggtggatatcaaaaaaagctccagaatgcggaacccgcataagactcgtaaatctgtgtatggattgcagaatgatatcaggtcacactcccccacacatacacccactcctgagacaaaacctcccaccgaggacgagctgcagcagcagattaagtactggcagattcagctggaccggcatagacttaaaatgtccaaagtcgcggactccctgctttcctatacagagcagtacctggaatacgacccctttctactgccccctgatccctcaaacccctggctcagcgatgatacaaccttctgggagcttgaggcctcaaaagaacccagtcagcagcgggtgaagcgttggggctttggtatggacgaggccctcaaagacccggtcggcagagaacaattcctaaaattcctcgagtccgaattctccagcgaaaatcttaggttctggctggccgtggaagacctgaagaaacgaccaattaaagaagtacccagcagagttcaggaaatttggcaggagttcttagctccgggagcacccagtgctatcaatcttgactcaaaatcttacgacaagaccacacagaacgtgaaggaacccggtcgctacacttttgaggacgcccaggagcacatttacaaactaatgaagtcagactcctatccccgatttatacgctccagcgcgtaccaggaattactgcaagccaagaagaaaggcagaaatatcccgatcttcccttgccacaaaaactgtactcctaccttgagggcctctaccaacctcctttag

SEQ ID NO: 238294 - DNA, 1275 bp, synthetic construct
  misc_feature 1..1275: note = Description of Artificial Sequence: Synthetic coding sequence
  source 1..1275: mol_type = other DNA
atggcccagggaaacaactacggccaaacctctaatggggtggccgacgaatcacctaacatgctcgtgtatagaaaaatggaggacgttatcgcacgaatgcaagacgaaaagaacggtattccaattcgaactgtaaaatcattcctgagtaaaatcccctccgtcttttcaggctcggacatagtccaatggttaattaagaacttgaccatcgaggatcccgctgtgtacctatgcaagaggaccatgcagaataaggcgagactcgaactcgcagattatgaagccgaatccctggcaagactgcaaagagcctttgcacggaagtgggaatttatcttcatgcaggcagaggcacaggccaaggtggataaaaaaagagataagatagagcggaagatcctcgatagtcaagaaagggcgttttgggacgtgcaccgacccgtacccggatgtgtcaacaccacagaggtcgacatcaaaaaatcctcccggatgcgaaacccccataagacccggaaatccgtgtacggactccagaacgatatccgatcacactcaccaacccatactcccactcccgagacgaagcccccaaccgaggacgagcttcaacagcagatcaagtactggcagatccagctggacaggcacagactcaagatgtcaaaggtggccgatagtctgctatcctatactgagcagtatctggaatatgacccatttttattaccaccagacccttccaatccctggctgtccgatgatactactttctgggagttggaggcttcaaaggaaccttctcagcagcgcgtcaaaagatggggctttggcatggacgaggctttgaaggacccggtcggcagggagcagtttctgaagttcttggagtccgaattcagtagcgaaaatctgagattctggctggctgtggaggatttgaagaaacgccctattaaagaagtgccgtctagagtacaggagatctggcaagagttcctggccccaggtgcccctagcgccatcaatctcgacagcaagtcttacgataagacaacccaaaacgtaaaggagcccggacgttatacatttgaagacgctcaagagcacatctataagctgatgaaaagtgactcctaccctaggttcatccgttctagcgcttatcaggagctgctgcaagcaaagaagaaggggcgaaatattccaatttttccttgtcataagaactgcaccccaacactgagagcctctaccaacctcctctag

SEQ ID NO: 238295 - DNA, 1410 bp, synthetic construct
  misc_feature 1..1410: note = Description of Artificial Sequence: Synthetic coding sequence
  source 1..1410: mol_type = other DNA
atggcacaggggaataactacggccaaacctcaaatggggttgccgacgagtctccaaatatgctagtataccgcaagatggaggatgtgattgcgagaatgcaggacgagaaaaacggtatcccaattcggacagtgaagagtttcctatccaagatccctagcgttttttctggttctgatattgtacaatggcttatcaagaacttaaccattgaagatcccgtggaagctctgcacctgggtactctcatggccgctcacggatacttctttcccatatccgaccacgtgttgactcttaaagacgatggcactttttataggtttcagaccccctatttctggccgagcaactgctgggagccggagaacaccgattatgcggtgtatctctgtaaaagaacaatgcaaaacaaggccaggctggaactagctgattacgaggctgaatctctggctcgccttcagcgcgctttcgcgaggaaatgggagttcatcttcatgcaggcagaggctcaagctaaagtcgacaaaaaaagagacaaaatcgaacgtaagatacttgactcccaggagcgagccttttgggacgttcataggcctgttcctggctgcgtgaataccacggaagtggatataaaaaagtcatccagaatgcgcaacccgcacaagactagaaagtcagtctacggcctccagaatgacattagatcgcacagtccaacccacactcccactccggagaccaagcccccaactgaagacgaactgcaacagcaaataaaatactggcagattcagctggatcggcatcgactcaaaatgtctaaagtggctgacagtcttctatcttatacggaacagtacctggaatacgacccattcctgttgccccctgatccgtccaacccttggttgtccgacgacaccacattttgggagctagaggccagtaaagagccctctcagcagcgagtcaaacgatggggctttggtatggacgaagccctgaaggaccccgttggtcgcgaacaattcctaaagtttctggagtccgaattctcgtctgaaaatctcaggttttggctggctgtcgaagatctgaaaaagagacctatcaaagaagtgcccagtcgggtgcaagagatatggcaggagttcctcgcccctggcgcaccaagcgccatcaacctcgattctaagagctacgacaaaaccacacagaatgtgaaggagcctggtcgctacacgttcgaggacgcacaggagcacatctataagctgatgaagagcgatagttaccccagatttatacgatcatccgcgtatcaagagctgctccaggccaagaaaaaagggaagagcctgacctccaaacggttgacaagcctggctcagtcctactag

SEQ ID NO: 238296 - DNA, 1434 bp, synthetic construct
  misc_feature 1..1434: note = Description of Artificial Sequence: Synthetic coding sequence
  source 1..1434: mol_type = other DNA
atggcgcaaggtaacaactacggtcagacatctaacggagtggctgacgagagcccgaacatgctcgtgtaccgaaagatggaggacgtgattgctaggatgcaggacgagaaaaatggtatccccatacgaactgtcaaatccttcttgtctaagatacctagcgtctttagcggatccgacatcgtgcagtggctgattaaaaacctaaccatcgaagatccagttgaggcactgcacctcggtaccctgatggccgctcatggatatttttttcccatctcagatcacgtactgactttgaaggatgatggcaccttttaccggttccagacaccatatttctggcccagcaattgctgggagccggagaacaccgattacgcagtctatctttgtaagcgcacaatgcagaacaaggccagattggagctagccgattatgaggccgagagtctggctcggctacagagagctttcgcacgaaagtgggaattcatatttatgcaggctgaagctcaggccaaagtggacaagaagagagataagatagagagaaagattcttgactcacaggaacgagccttctgggatgtgcaccgcccagtgccaggatgtgtgaacaccacagaggtggacataaagaaatcctctcggatgcgcaatccccataaaaccagaaagtcagtttatggcctgcagaacgatatccgcagccactcgcctacacacacccctaccccagaaaccaagccccctaccgaggacgaactacaacaacagattaagtactggcagatccagctggaccggcaccggctgaaaatgagtaaggtcgccgattcattgctgtcctatactgagcagtatcttgagtatgatccctttcttctgccgccagatcctagcaacccatggctttcggatgacactactttctgggaattagaggccagcaaggagccatcccagcagcgggtgaagcgttggggttttggtatggatgaagctctgaaagaccctgtcggcagggaacagtttctcaagtttctggaatctgagtttagcagtgaaaacctgcggttttggttggccgtggaagatctgaaaaagcgtcctatcaaagaagtccccagtagggttcaggaaatatggcaagaatttttggcgccaggtgccccatcagcaattaaccttgacagtaagtcctatgataagaccacccagaacgtgaaggaacctggtcgctacacctttgaggacgcacaagagcacatttacaaacttatgaagtcggatagctacccccgttttatcagaagcagcgcctatcaggaacttttacaggctaagaagaaaggacgaaatatacccattttcccctgccacaaaaactgcacaccgacattgcgagccagtacaaatctcctgtag

SEQ ID NO: 238297 - DNA, 1410 bp, synthetic construct
  misc_feature 1..1410: note = Description of Artificial Sequence: Synthetic coding sequence
  source 1..1410: mol_type = other DNA
atggcacaaggaaacaactacggccagacctctaacggcgtggctgatgaatcccccaacatgctggtctatagaaaaatggaagacgtcatcgctaggatgcaggacgaaaagaatggaattcccatacgcactgttaagtcctttctgagtaagatccctagcgtgttttcaggatctgatatcgtacagtggctgataaagaacctgaccatcgaggacccggtggaagccttgcacctcggtacactgatggcggctcatggctacttcttcccgattagcgatcacgtccttaccctgaaagacgatggtaccttttacagatttcaaaccccctacttctggccttccaattgctgggagccagaaaacacagattatgccgtttatctctgtaagcgcaccatgcagaacaaagcacgcctcgagttggccgattatgaagctgaatccctcgcgcgtcttcaacgagcatttgccagaaaatgggaattcatttttatgcaggcagaagcgcaggcaaaagtggacaagaaacgggacaaaatagaaagaaagatcctggactcccaggaaagagctttctgggacgtacaccggccagtgccaggatgcgtgaacacaaccgaagtggatatcaagaagagctcacggatgcgaaatccacataagaccagaaaatctgtctacggcctccagaacgatatcaggagccactcccccacacatacaccaacaccagaaaccaaacccccaaccgaagacgaattacagcaacagatcaagtattggcagattcagctggatcgtcaccgtctgaagatgagtaaggtggccgacagtctcctgtcatatactgaacaatacttagagtatgacccctttttgttgcccccagacccgagcaatccatggctgagcgatgatacaactttttgggagctggaagccagcaaagaaccatcccagcaacgggtgaagcgctggggctttggaatggacgaggcactcaaggacccagtcgggcgagaacaattcctgaaattcctcgaaagcgagttttcttccgagaacctgcgcttttggctggcagttgaggaccttaagaagagacccatcaaggaagtcccgagcagggtgcaggaaatatggcaagaattccttgctcctggcgctcctagcgctatcaacctggacagtaagagttatgataagaccacgcagaatgtgaaagagcccggacgatatacatttgaagatgctcaggagcacatctacaagctgatgaaatccgactcctacccacgttttattcgtagttccgcataccaagaactgctgcaggcgaagaaaaaaggtaagtccctcacctctaagcgcctcaccagcttggcgcaatcttactag

SEQ ID NO: 238298 - DNA, 1464 bp, synthetic construct
  misc_feature 1..1464: note = Description of Artificial Sequence: Synthetic coding sequence
  source 1..1464: mol_type = other DNA
atggcacaaggcaacaattatgggcagaccagcaacggggtggcagacgagtctcccaacatgctggtttaccggaagatggaggacgtaatcgcacgaatgcaggatgaaaaaaacgggatccctatccggacagttaagagcttcctctcaaagattccctccgtattttcaggaagcgatattgttcagtggctgataaaaaacctgacaatcgaagatcccgtcgaggctttacacctgggcactcttatggctgcccacggctacttttttcccattagcgaccacgttctgacactgaaagatgacggcacgttttacagatttcagaccccttacttttggcccagtaactgttgggagccagaaaacaccgattacgccgtatacttatgcaagcggacaatgcagaataaggcacgtctggagttggcagattatgaagccgaatcgctcgcgaggctccagcgtgcttttgctaggaagtgggagttcattttcatgcaagctgaagcacaggcaaaagtcgacaagaaaagagacaaaatagaaaggaagattctggattcacaggaaagggccttttgggacgtgcatcgcccagtaccaggctgtgtgaatacgactgaggtggatattaagaagtcaagccgcatgaggaatccacacaaaacaagaaagagcgtctatggcttacaaaatgacatccgttcacactcccccacccacactcctactcccgagacgaagcccccaactgaggatgaactgcaacagcagatcaaatattggcagatccagctggaccgccaccggctgaagatgagtaaggttgctgatagcctcctcagttatacagagcagtacctggaatatgacccattccttctccccccagatcccagcaatccatggctgtcggacgacaccaccttttgggagctggaagcatcaaaggagccgagtcaacagcgggtgaagcgttggggcttcggcatggatgaagccctgaaggatcctgttggaagggagcaatttctgaagtttctcgagagcgaattttcttcagaaaacctgcggttctggctggccgtggaagatcttaaaaagcggccaatcaaggaggtgccgagtcgcgtgcaggagatttggcaggagttccttgcccctggtgccccaagcgcgatcaatctagattcaaagtcgtatgacaagaccacccagaatgttaaggaaccagggcgatatactttcgaggacgcccaggagcacatctacaagttaatgaagagtgatagctaccccaggtttatacgctcttccgcctaccaggagctgctgcaggcgaaaaagaaatctggcaacagcatggaccggaggacaagcttcgaaaagttcgcccagaacgtgggcaaatctctcacatccaagcgcttaacctccttggcgcagagctattag

SEQ ID NO: 238299 - DNA, 1275 bp, synthetic construct
  misc_feature 1..1275: note = Description of Artificial Sequence: Synthetic coding sequence
  source 1..1275: mol_type = other DNA
atggcacaagggaataactatggacaaacatcaaatggcgttgctgacgaatctcccaatatgctggtataccgcaagatggaggatgtgatcgccaggatgcaggacgaaaagaatgggatccctatccggactgtgaagtctttcttgtcaaagattccatcggtgttctccggcagcgacatcgtccagtggttgatcaagaacctgactatcgaggatcctgctgtgtacctgtgcaagcgcacaatgcagaacaaggcgcgtcttgagctcgccgattatgaggctgaaagcctggcgcgtctacaaagggcgttcgctagaaagtgggaatttattttcatgcaagctgaggcccaagcaaaggttgacaagaaacgggataaaatcgaacgaaagatcctggacagccaagagagggcgttttgggatgtccaccggccagtgcccggatgcgtgaacacaacagaagtcgacattaagaagtccagtcgtatgagaaatccccataagacaagaaagagcgtgtatggcttgcagaacgacatccgttcccacagccccacgcatactcctacacccgagaccaaaccgccaactgaggacgaactgcagcagcaaatcaagtattggcagattcagctggatcggcacaggctgaagatgagtaaagtggcggatagcttattgtcttacacggagcaatacctggaatacgacccctttctgctgccgcctgacccaagcaatccttggcttagcgacgacacaacattttgggagctggaggccagcaaggagcccagtcagcagagggtcaaacgctgggggtttggtatggacgaggcgttgaaagacccagtgggaagggagcagtttttgaagttccttgagtccgagtttagctcggagaacctgcgtttctggctcgcagtagaggatcttaaaaaaagacccattaaggaggtgccatctcgggtccaagagatttggcaggagttcttggccccaggcgcacctagcgcgataaatctcgacagtaaaagttatgacaagaccacccagaacgttaaggaacctggccgatatacattcgaggacgcccaggaacacatctacaagctgatgaagagtgacagctaccccagattcattaggagctcggcttatcaggaactgctccaagccaagaagaagggacgaaacatcccaatctttccatgtcataaaaactgcacgcccacccttcgggcttccacaaacctcttgtag

SEQ ID NO: 238300 - DNA, 1488 bp, synthetic construct
  misc_feature 1..1488: note = Description of Artificial Sequence: Synthetic coding sequence
  source 1..1488: mol_type = other DNA
atggcccaggggaacaattacggacagacatctaatggagtggcggacgagagtccaaatatgcttgtgtacaggaagatggaggacgtaatcgcacggatgcaagacgaaaaaaatggtatccccattagaaccgtgaagtcttttctgagtaagattccgtccgtgtttagtggcagcgacatcgttcagtggctgatcaagaacctaactattgaagatccagttgaggcattgcatctgggcacactgatggccgcacatggctatttcttccctattagtgaccatgtcctgactttgaaagatgatggcacattttaccgattccagacgccttacttctggccatctaattgttgggaacctgagaataccgattacgccgtgtatctctgtaaacgcacaatgcagaacaaggccaggctggagttagccgactatgaggccgaatccctggcgagattgcaaagggccttcgcacggaagtgggaattcatatttatgcaggcggaggctcaggcgaaagtggataagaaacgagacaaaatcgaaaggaaaatactggatagccaggagagggccttctgggatgtgcaccggccagtgcctgggtgcgttaataccaccgaggtcgacatcaagaaatcatccaggatgagaaacccccataagacccgaaagagcgtctatggcctgcagaatgacattcgatctcattcccccactcatacccctacacccgaaactaagcctcccactgaggacgaactccagcaacagatcaaatattggcagattcaactggaccgtcacaggctgaagatgagcaaggtggcagacagcctcctctcctatacagaacagtaccttgaatacgatccgttcctattaccgccagacccgtctaacccttggctgtcagacgatacgacattctgggagctcgaggcgtcgaaggagcccagtcagcagagggtcaaacgatggggattcgggatggacgaagcactgaaggatccagtaggcagggagcagttcttaaagttcttggaaagtgagttctctagcgagaacttacgtttttggctggcagtagaagatcttaaaaagaggcccatcaaggaagtgccaagccgcgtgcaagagatctggcaggagtttcttgcaccgggtgcacctagcgccatcaatctcgacagtaagtcttatgacaagactacacagaacgtaaaggagcccggaagatatacgttcgaggacgcccaggaacacatatataaattaatgaagtcagattcataccctagatttatcaggtcaagcgcctaccaggagttgctacaagccaaaaagaaatcgggtaactcaatggaccggaggacatcttttgagaagttcgctcagaatgtggggcgaaacattcctatcttcccctgtcataagaattgcactccgactctcagggcctcaaccaatttgctgtag

SEQ ID NO: 238301 - DNA, 981 bp, synthetic construct
  misc_feature 1..981: note = Description of Artificial Sequence: Synthetic coding sequence
  source 1..981: mol_type = other DNA
caggctgaggctcaggcaaaagtggacaaaaaaagagacaagattgagcgcaaaattctcgactctcaggagcgcgcattctgggatgtgcacagacctgtccctggctgcgtcaatacaactgaggttgacattaagaagtctagccggatgagaaacccgcacaaaacaagaaagagcgtgtatgggctccagaatgatattagaagtcacagcccgactcatactcctacaccggagaccaagccaccaaccgaagatgaactgcagcagcagatcaaatactggcagatacagctggatagacatagattaaagatgtctaaagtggccgattctctgttgagttacaccgagcagtacttagaatatgacccctttttgcttccccctgacccaagcaacccgtggctgtcagacgatactaccttttgggagcttgaggcttccaaagagccctcacaacaacgagttaagcgctgggggttcgggatggatgaagccctgaaggaccccgtgggccgagaacaattcctgaaattcctagagtccgaattctcttccgaaaatctccgtttttggctcgcagtcgaggatctgaagaaacgtccaatcaaagaagtgccgagcagggtgcaggagatttggcaggagttcctagctccaggggctccttcagcaataaacctcgacagcaagtcctacgataagacaacccaaaacgttaaagaaccaggacgatacactttcgaggacgctcaggaacacatctacaaactcatgaaatccgattcctaccccagatttatcaggtcaagtgcctatcaggagctgctgcaggccaagaagaaatctggcaatagtatggaccgtaggacgagctttgaaaaatttgcgcagaatgtagggagaaacattccaatttttccctgccataaaaattgcacccctactcttcgcgcatcaaccaaccttctttag

SEQ ID NO: 238302 - DNA, 1182 bp, synthetic construct
  misc_feature 1..1182: note = Description of Artificial Sequence: Synthetic coding sequence
  source 1..1182: mol_type = other DNA
atggccgctcacggctattttttccccatctctgaccatgtcctcaccctcaaggacgatgggactttctaccgattccagaccccttacttttggccgtccaattgctgggagccagagaacaccgactacgccgtgtatctgtgtaaaaggacaatgcagaataaggctagactggaacttgcagactacgaggctgagtccctggccagactgcagcgcgctttcgcacgcaagtgggagttcatctttatgcaggcagaagcgcaggctaaagtggacaaaaagcgtgataaaatcgagcgcaaaatacttgactcccaggagagggccttctgggacgtccaccggcctgtccccggatgcgtcaacaccacagaagttgatatcaagaagagctcgcgcatgagaaacccacacaagacaagaaagtcggtgtatgggctgcagaacgacattaggtcacactcgcccacacatacgcccactcctgaaactaagccacctaccgaggatgaacttcagcagcagattaagtactggcagatccagctggataggcacagattgaagatgtctaaagttgcagatagtctccttagctacacagaacaatacttggaatatgatccgttcctgctgccacctgaccccagtaatccatggctctcagatgacaccactttctgggaactagaagcctctaaggagcctagtcagcagcgtgtgaagagatggggatttggaatggatgaagccctgaaggaccctgtcgggagggaacagttcttaaagttcctggaaagtgagttctcaagcgaaaacttaagattttggctagccgtggaagacttgaaaaaaagacccatcaaggaggttcctagccgagtgcaagaaatctggcaagagttcctggctccaggggcaccgtccgcaattaatctcgactctaaaagctatgacaaaacgacccaaaacgtaaaggagccaggcagatacaccttcgaggacgctcaggagcatatttataagctgatgaagtcagactcctaccctcggtttattcgcagtagcgcgtatcaagaactcttacaagccaagaaaaaaggtcgcaatatcccaattttcccatgccataagaactgcaccccgacactgagagcatcaacaaacctcctgtag

SEQ ID NO: 238303 - DNA, 774 bp, synthetic construct
  misc_feature 1..774: note = Description of Artificial Sequence: Synthetic coding sequence
  source 1..774: mol_type = other DNA
atgtcctccgcaccgaacggcagaaagaagcgccctagtaggagcacaagaagttctattttccagatctccaagccacctcttcagtccggcgattgggaacgcagaggctccgggtctgagagcgcccataaaactcagagagccctcgatgattgtaagatgctggtgcaggagttcaatactcaggttgccctgtacagagagctggtgatctccattggggacgtcagcgtgtcttgcccctcactgagagccgaaatgcacaagacccgtaccaaagggtgcgagatggcgaggcaggctcatcagaaactggcagcgatctctggacctgaagacggtgagatccacccagaaatctgtagactgtacatccagctgcagtgttgtcttgaaatgtacacgactgaaatgttaaagagcatctgtctcctcgggtcgctgcaatttcacaggaagggcaaagagcccggtggaggtacaaagagcctggactgcaagattgaggagtccgccgaaacccccgctttggaggattcatcctctagccccgtggacagccagcaacattcttggcaagtttccacggatatcgagaatacggagcgcgatatgagggaaatgaagaaccttttaagtaaactgcgagagacaatgccactgcccctgaaaaatcaggacgattcttccctattaaatttgactccctaccccctggtccgaagacggaagaggcgattctttggcctctgctgtcttatctcctcttag

SEQ ID NO: 238304 - DNA, 2025 bp, synthetic construct
  misc_feature 1..2025: note = Description of Artificial Sequence: Synthetic coding sequence
  source 1..2025: mol_type = other DNA
atgaccattagacaccagggacagcagtatagacccagaatggcttttcttcagaagatcgaggccctagtcaaagacatgcagaaccctgagaccggagtgcgtatgcagaatcaacgggtcttggtaacatcggtcccacatgctatgactggtagcgacgtcctgcagtggatagtgcagcggctgtggatcagctcattggaagcccaaaatctggggaatttcatcgtaaggtatggctacatttatccactgcaagatcccaagaaccttattcttaagcctgacgggtctctgtatagatttcagactccatacttttggcccacccaacagtggccagccgaagacacagattatgcaatatatctggccaaacgcaatattaaaaagaagggcatcctggaagagtatgagaaagaaaattataatttcctgaatcagaagatgaactacaaatgggatttcgtgattatgcaagcgaaagagcagtatcgggctggtaaggaacggaataaggccgatagatacgccctggactgtcaagagaaagcctattggctagtccaccgctgtccacccggtatggacaacgtgctcgactacgggctggatagggtaactaaccctaatgaggtcaaggtgaaccaaaaacaaaccgtggttgcagtcaaaaaggaaattatgtactaccaacaggcacttatgcgtagcacggtaaagtcttccgtgagcctcggagggattgtgaagtattctgagcagttctcctccaatgacgccataatgagcggctgtcttccctccaacccctggatcaccgacgatacccagttttgggaccttaatgctaagctcgttgaaatccccactaagatgagggtcgagcgctgggcctttaattttagtgagctaattagggatcccaaaggaaggcaatcttttcagtactttttaaaaaaagaatttagcggcgagaatttaggcttctgggaggcctgtgaagacctaaaatacggcgatcaatcaaaggtgaaggaaaaagccgaagaaatttacaaattgttcctggctcctggtgccagacggtggatcaacatagatggcaagacaatggacatcactgtgaagggcttgaaacaccctcaccggtacgtgttagacgccgctcagactcatatatacatgttaatgaaaaaagactcttacgcaaggtacctcaaaagccctatatataaggacatgctagcaaaggccatcgagccacaggaaactactaagaaatcttctaccttaccttttatgcgcaggcacctgcgctcgagcccatccccggtcatactgaggcagctcgaagaagaggcaaaggctagagaagccgcaaataccgtagatatcacacagcccggacagcatatggctccttcccctcatctgaccgtttatacggggacttgtatgccaccatcacctagctcacctttttccagtagctgtaggagtcccagaaaaccattcgctagccctagccgctttattcgccgaccatctacaactatctgcccttctcctatcagagtggcactggagtctagctccgggctggagcaaaaaggtgagtgcagtggctccatggcaccgagagggccaagtgtcactgagagcagtgaggcgagcctcgatacgagctggccaaggagtaggcccagggccccaccgaaagctagaatggccttgtcattctcccggttcctgaggcgcggttgtctggcctcacccgtgttcgcccgattatcccccaagtgtcctgctgtctctcacgggcgagtgcagcccttaggagatgtgggtcagcagttgccaaggttgaagagtaagcgtgtggccaactttttccagattaaaatggacgtcccaactgggtccggcacgtgcctgatggattctgaagacgctgggaccggcgagtctggtgatcgagcaacagagaaggaagtcatctgtccctgggaatcgctttag

SEQ ID NO: 238305 - DNA, 2016 bp, synthetic construct
  misc_feature 1..2016: note = Description of Artificial Sequence: Synthetic coding sequence
  source 1..2016: mol_type = other DNA
atgaccatcaggcaccaaggccagcaatatagaccccgtatggcgtttctgcagaagatcgaggctctggtgaaggatatgcagaaccctgagaccggcgtgagaatgcaaaaccaaagagtgctggttactagtgtaccccatgccatgactggatccgatgtactgcagtggatagtgcagcggctttggatttcttctttagaggctcagaatttgggcaacttcattgtgaggtacggctatatctatccattgcaggacccaaaaaatctgatattgaagccagacggaagcttgtaccgctttcaaacaccctatttttggcccacacaacagtggccagcggaagataccgattacgccatctatcttgcaaagcggaatatcaagaaaaaaggtatcttggaggagtatgaaaaggagaattataacttcctcaaccagaaaatgaactacaaatgggattttgttatcatgcaagccaaggagcagtacagagctgggaaggagcgcaacaaagcagaccgctacgccttggattgtcaagagaaggcatattggttagtgcacaggtgtcctcccggtatggataacgtcctggattacgggctggatagagtcaccaatcctaatgaggtgaagaagcaaacggtggtggccgtgaaaaaagaaatcatgtattatcagcaggcactgatgcggagcactgttaaaagcagtgtgtcattgggaggaatcgtcaaatatagtgagcagttttccagcaacgatgctattatgtctggctgcttgcctagcaacccttggatcacagacgatacacagttctgggatttgaatgctaagctggtggagatcccaaccaagatgagagtagagaggtgggcctttaacttttccgagctcattagggatccaaagggcaggcagagcttccagtacttcttaaagaaggaatttagtggggagaatctgggcttctgggaggcgtgcgaggacttaaaatacggagatcagtcaaaagtgaaagaaaaggcagaagagatctacaagctgtttctcgcccctggtgcaaggagatggattaacattgacgggaagaccatggatatcaccgtgaaaggcctgaaacatccccacaggtatgtgttagacgccgcacagacccatatctacatgttgatgaaaaaggacagttacgctaggtacctcaaatcacccatctataaagatatgctcgcaaaagctatcgagccccaggaaacaaccaagaaaagttccactcttccatttatgaggcggcacctacgcagctctccaagcccagtcattcttagacaattggaggaggaagctaaagcccgtgaagcagcaaatacagttgacataactcagcccggtcagcatatggctccctctcctcatcttactgtgtacacaggcacatgtatgcctccttctccttccagccccttctctagctcatgcagatccccacggaagccattcgcaagtcccagcagattcataagacggccttccacaacaatttgtccatcacctatccgtgttgcactggaatcatcttctggcctagagcaaaaaggagagtgtagcgggtccatggcccctcgcggtccatccgtcacagaaagttccgaagcatctctggacacatcgtggccgaggtcccgccctagggcccctcctaaggccagaatggctttgtcctttagtagatttcttagaagaggttgcctggcctctcccgttttcgctcgcctttctccaaagtgccccgctgttagtcacggacgagttcagcccctcggcgatgtcggtcaacagctgcctagattaaaatccaagcgggtggcaaacttctttcagataaaaatggacgtacctaccggctcaggaacatgcctaatggactctgaggacgcagggacaggcgagtccggagacagagccacggagaaggaagtgatctgtccatgggagtccctgtag

SEQ ID NO: 238306 - DNA, 4008 bp, synthetic construct
  misc_feature 1..4008: note = Description of Artificial Sequence: Synthetic coding sequence
  source 1..4008: mol_type = other DNA
atggagagtgagatgctccagagtccactccttggattgggggaagaggatgaagcggacctgacagattggaacctgcctttggctttcatgaagaagaggcactgcgaaaaaatcgaaggctccaaatcattggcgcaatcgtggagaatgaaggatcgaatgaagactgtatcagtggccctggtgctctgtctaaacgtgggggtggatcctccggatgtggtgaaaacaactccatgtgctaggctggagtgctggatcgacccattgtctatgggtccccagaaagcccttgagaccataggcgctaacctccagaagcagtatgaaaactggcaacccagagccagatacaagcagtcactggaccccacagtggacgaggtcaaaaaactgtgcacaagcctgagacggaatgcgaaggaggaaagggtgctttttcattataacggccatggcgtgcccagacctactgttaacggcgaagtgtgggttttcaacaaaaactatacccagtatatcccactgtctatttacgatctacagacatggatgggaagtcctagcatcttcgtatatgactgctctaacgccggactgattgtgaaatcctttaaacaattcgccctgcagcgtgaacaggaactagaagtggcagcgatcaatcccaaccaccccctggcacaaatgcccctccctccctcaatgaaaaattgtattcaattggccgcttgcgaggccactgagctgttgccaatgattccagatcttcccgcagacctctttacctcctgtctcacaacccccataaagatcgctctgaggtggttttgtatgcagaaatgtgtgtccctagtgcccggagtcacacttgacctgatcgagaaaatccccggacggctgaacgatcgacggacacctctcggagaacttaactggatcttcaccgccattaccgatacaattgcgtggaacgtcctacctagagatttgttccagaagctttttcgacaggaccttttggtagcgtccctgtttcgaaattttctgctcgctgagcggatcatgcgctcctacaattgcaccccagtgtcgagtcctcgattaccaccaacttacatgcacgctatgtggcaagcatgggatctagcggtagacatctgcctgagccaactccctacaatcatagaggaggggaccgcctttcgccactcaccctttttcgccgaacagcttacggcatttcaagtctggctgacgatgggggttgaaaatcgcaacccccctgagcagctacccatcgttctccaggtgctgctgtcacaggtgcacagacttcgggcacttgatctactggggagatttctcgacttaggaccctgggctgtgtccttagcactgtccgtgggcattttcccatatgtgctcaaactgctccaatcatctgctcgggaactgaggccgctgttggtcttcatctgggccaagatcctggccgtcgattcgtcctgccaagccgacttggtgaaagacaacggccacaagtactttttatccgtcctcgctgatccatatatgccagccgaacaccggactatgactgcattcatcctagcggtcatcgttaacagctaccacacaggacaggaagcatgtctgcagggaaacttaatcgccatctgcctggagcagctcaatgacccacacccacttcttcgccagtgggtggctatctgcctggggcgtatatggcagaatttcgattcagcacgctggtgcggtgtgagagacagcgcccacgagaagctgtacagcctgttaagcgatccaatccctgaggtgcggtgcgccgctgtgtttgccctaggaaccttcgtcggaaatagcgctgagagaactgatcactcgacgacaatagaccataacgtagcaatgatgctggcccaactggtgagcgatggcagtcccatggtgaggaaagaattggtggtcgccctgtcccatctggtggtgcaatacgagagtaatttctgtacggtcgctcttcagttcatcgaagaagagaagaactacgcactccccagtccggcaactactgaaggaggctccctcacaccagtgcgtgacagtccatgtacacccaggcttcgcagcgtgagtagttatgggaacattcgggctgtcgctaccgccaggtccctgaacaagtctcttcaaaatctgtcgcttacagaagagtctggaggcgctgtggcttttagtccagggaatcttagcacgagctcgtccgcctctagcactctagggtcacctgaaaacgaggagcacattctctctttcgaaaccattgataaaatgaggcgcgcatccagttattcctccctaaattcactcatcggggtgtcgttcaattctgtctatacccaaatatggcgggtgctgcttcatctcgcggctgacccataccctgaggtaagcgacgtggccatgaaagtgttgaattccatcgcctataaggctaccgttaacgcacgtcctcagcgcgtccttgatacctcttccttgacccaatcagcaccggctagccccacgaacaagggggtccacatccaccaggccggtggttctcctcctgcatctagcacatcgagcagcagcctgacgaatgatgtggccaagcagccagtgtccagagacctaccaagcggcagaccaggcactactgggcctgctggcgcacagtacaccccccattcccaccaatttcctcgaacccggaaaatgtttgacaaaggaccggagcagacagccgatgacgctgacgacgctgccggtcacaagagcttcatttccgccaccgtacagaccggcttttgtgattggtcagcccgttacttcgctcagcctgtcatgaaaatccctgaggaacacgatctggagtctcagatcagaaaggagcgcgaatggcggttcctccgcaattcaagagttaggcggcaggcacaacaggtgatccaaaagggcataacgcgtctcgacgaccagatctttctgaacagaaatccaggagtgccctctgtggtaaagttccacccatttactccatgtatagcagtagccgataaagactccatttgcttctgggattgggagaagggcgaaaagttagactacttccataatggcaacccaagatatactcgtgtgactgccatggaatacctcaacggccaggattgtagtctcctgcttaccgcgactgacgatggggcaatcagggtctggaaaaatttcgcggatctcgaaaaaaatcctgaaatggtgaccgcgtggcagggcctgtccgatatgctgcctactacgagaggcgctgggatggtcgtcgactgggaacaggaaaccggcctccttatgtctagtggcgatgttcgtatagtgcgaatctgggatacagacagagagatgaaggtgcaggatatccccactggagcagattcttgcgttacaagtttaagctgtgatagtcacaggtcgctcattgtagctggactgggtgacggctccattagggtgtatgataggcgcatggcgctgagtgaatgcagagtgatgacttaccgagaacacaccgcctgggtggtaaaagccagcctgcaaaagcgccctgacgggcatatcgtgtcagtctcggtcaacggtgacgtcaggatcttcgatcccagaatgccagagtccgtgaacgtgctgcagatcgtcaaaggcctcactgccctggacattcacccacaggctgatttgatagcatgcggtagcgtgaatcagttcacagccatctacaacagctctggggagctgattaataatataaagtattacgacggttttatggggcagagagtgggcgcaatctcttgccttgcctttcacccacactggccccacctagcggtgggaagcaacgactattatatcagtgtatacagtgtcgagaaaagagtccgatag

SEQ ID NO: 238307 - DNA, 990 bp, synthetic construct
  misc_feature 1..990: note = Description of Artificial Sequence: Synthetic coding sequence
  source 1..990: mol_type = other DNA
atgggatcaccctccatattcgtctatgattgtagcaatgccggtctgatcgtcaagagttttaagcagtttgcccttcagcgggagcaggagctagaggtggctgcgataaaccccaaccacccattggcccagatgcctctgcctcccagcatgaagaattgcatacagttggccgcttgcgaggctaccgagctgcttcctatgatacccgatctgcccgctgatctgtttacatcctgtcttacaaccccaataaaaatagctctacgatggttctgcatgcagaaatgcgtcagtcttgtgcctggagtcacactggacctgatcgaaaagattcccggaaggctcaatgatcggaggaccccacttggtgaactgaactggatattcaccgcgattacagacactattgcctggaacgtgctgccccgagatctgttccaaaagctcttccgacaagacctgctggttgcgtccctgttcagaaattttctgcttgccgagagaattatgagaagttataactgcacccccgtgagcagccctaggctgcctccaacatacatgcacgcaatgtggcaagcttgggacctggccgtggacatctgtctgagtcaactgccaacaattatcgaggaaggaacagcctttaggcatagtcctttctttgccgagcagcttactgcatttcaagtgtggctgacaatgggggtggagaaccgaaacccgccagagcagcttcctatcgtacttcaagttctgcttagccaagtgcataggctgagagctctggatctgctcggacggttccttgacctcggcccttgggctgtaagcctggccttgtctgtggggatttttccgtacgttcttaagttgctacaatcgtcagctcgggagttgcggcctttactggtgtttatttgggccaaaattttagccgtggactctgtttccatccctgctctgttaccacgcgtcatgtag

SEQ ID NO: 238308 - DNA, 3534 bp, synthetic construct
  misc_feature 1..3534: note = Description of Artificial Sequence: Synthetic coding sequence
  source 1..3534: mol_type = other DNA
atggaaagtgagatgctgcagtctccgttgctggggctgggagaagaagatgaagccgacctcaccgattggaacttgccactggcattcatgaagaagaggcactgtgaaaaaatcgagggatctaagtctctcgcccagtcatggcgcatgaaggaccggatgaaaacggtgagcgttgcgttagtgctgtgtttgaacgtgggcgttgatcccccagacgttgtgaaaacaacgccatgtgcaagacttgaatgttggattgatcccctctctatgggaccccagaaggcgctcgaaactatcggggcaaatcttcagaaacaatacgaaaactggcagccacgggctaggtataaacaatcgctggacccaactgttgatgaggttaaaaagctttgtacatctctaagacgaaatgcaaaagaggaacgcgtcctatttcactataacggccatggggtaccccgaccgacagtgaacggggaggtgtgggtctttaataagaattatacacaatatatcccattaagcatctatgatctgcagacatggatgggctcaccatccatttttgtatacgattgctccaatgccggattgatcgtcaaatcctttaaacagttcgccctgcaacgcgagcaggagctcgaagttgctgctatcaaccccaatcatccgctggcccagatgcctttgccacccagcatgaaaaactgtattcagctcgcagcctgcgaggccacagagctgctgccaatgattcctgacctcccggctgatctctttacatcttgtctgactacgcctatcaaaatcgctttgcgatggttctgcatgcagaagtgcgtgtccctagtgccaggcgtgacactcgaccttatcgagaagattcccggacggctgaacgacaggagaaccccactgggcgagttgaactggatctttaccgctatcacggatacaatcgcttggaacgtgctacctcgggacctgtttcagaagttattccggcaggatctgctagtggcatctttgttcagaaatttcctcctagctgagcggatcatgcgctcatataattgtacccccgtgtctagtcctcggctcccgccaacctatatgcacgcaatgtggcaggcctgggatctcgcagtggacatctgtttgagtcagctgcccacaattattgaggaaggtactgccttcaggcactcacccttcttcgcagagcagctaaccgcttttcaggtttggctgactatgggggtggagaaccgtaatcccccagagcagctcccaattgtccttcaggtcctcttgagccaggtgcatagattgcgcgcacttgacctgctgggccgattccttgatctgggaccctgggccgtatcgcttgctttatcagtgggcatattcccatatgtgctgaagcttttacaatcctccgccagagagctgcgcccactcctagtttttatttgggccaagattctggccgttgacagtgaactggtggtggctctgagtcatctggttgtccagtacgaatctaatttttgcacagtcgctctgcagttcatagaagaggagaagaactatgcgctacccagccccgcaacaaccgagggagggtctctcacacctgtccgagattctccatgtaccccacgactgcgttcggtgtcgtcttacggcaacatccgcgcagttgccaccgcacggtccctgaataaatctctgcagaacctctcgctgactgaagaatccggcggagccgtggcatttagccctggcaatttgtcaaccagcagctctgcttcctccactttaggatcccctgagaacgaggaacacatcctgagcttcgagacgatagacaagatgaggagagccagctcttactcttctctgaacagcctgatcggagtctcgtttaacagcgtctacacccaaatttggagagtcttgctacatctggcggcagacccctaccctgaggtttctgacgtcgccatgaaggtgttaaactccatcgcgtataaagcaactgtgaacgccaggccccagagggttctggacacgtccagcctgactcagtcagctcccgcttcccctaccaataaaggcgttcacattcaccaggctgggggtagtcctccggcatctagcacgtcctcatcctccctgactaatgacgttgcaaagcagccagtgagtcgtgacttaccaagcggaagacccggaaccaccgggcctgccggagctcaatacacaccccatagtcaccaatttccccgaactcgaaagatgtttgataagggtcccgagcagaccgcagacgatgctgatgacgccgcagggcacaagagctttatatccgccactgtgcaaaccggcttctgcgactggtctgccagatactttgcccagcccgtgatgaaaataccagaagagcacgatcttgaatcccagataagaaaggagagagaatggagatttctgagaaatagccgagtgcgcaggcaagcacagcaggtcattcagaagggtattactcgcctcgacgaccaaatcttcctgaacagaaaccctggagtgcccagtgtcgttaaattccatccttttaccccatgtattgctgttgccgacaaggacagcatctgcttctgggattgggaaaaaggagaaaaactggactactttcacaatgggaatcctaggtatacccgcgtgacagccatggaatacctcaacggccaagactgctcactgcttcttaccgcgaccgatgacggtgcaatccgagtatggaagaattttgccgacctcgaaaaaaaccctgagatggttactgcctggcaggggctatctgatatgctcccaaccactcggggtgcaggcatggtggtggactgggaacaggaaacaggcctgttgatgtcgagcggggacgtccgaatcgtccggatctgggacacggacagagaaatgaaagtgcaagacattcccaccggtgcagatagctgcgtgacaagcctctcttgcgactcgcacagatcgctgattgtagctgggctgggcgacggtagcatcagagtttatgaccgccgtatggccttatctgagtgtcgagtgatgacctacagggaacataccgcctgggtcgtgaaagcgtcattacagaaaaggcccgacggccatatcgtatctgtgtctgtcaatggtgatgtgcgtatattcgatccaaggatgccagagagcgttaatgtcctccagattgtaaagggtttaaccgcgctagacatacacccccaggcagatttgattgcatgcggatctgtgaaccaattcacggcaatttacaactcctctggagagttaatcaacaatattaaatattacgacggattcatggggcaacgggttggggcaatcagctgtctggccttccacccccattggccacacctggccgtgggaagcaacgattattatatatcagtgtactctgtcgaaaaacgcgtgcggtag

SEQ ID NO: 238309 - DNA, 2097 bp, synthetic construct
  misc_feature 1..2097: note = Description of Artificial Sequence: Synthetic coding sequence
  source 1..2097: mol_type = other DNA
atgcagaactcagagggtggagccgacagtcccgcatctgtagcccttcggccaagcgccgcagctccccctgtgcctgcctccccacagcgcgtattagttcaggcagcgtcctcaaacccaaagggggctcagatgcagccaatctccctcccacgggtgcagcaggtcccacagcaggttcagcccgtgcaacacgtctatcccgctcaagtccagtatgtcgaaggaggggacgcagtctatactaatggagctattaggacagcctatacctataatcccgaaccccaaatgtacgcaccttcttcgacagcttcttatttcgaggccccaggcggtgctcaggtcaccgtcgcagcgtccagccccccagcagtgcccagtcactctatggtcggaattacaatggatgtcgggggaagccctattgtttcctctgccggagcctacctgatccacgggggtatggatagtacacgtcatagcctggctcacacctcccgatcctctccggctaccctgcagtggctcctagacaactacgagactgccgaaggcgtgagcctcccccgtagttctttgtacaaccactatctacgccactgtcaggagcacaagctcgacccagtaaatgcagcttcctttggcaaattgattcgctcagtatttatgggccttaggacgcggcgtctcggaacacgaggcaattccaaatatcattactatggtataagattgaagcccgatagcccactgaatcggctacaggaagacacacagtatatggccatgcgtcagcagccgatgcatcagaagccgagatatcggccagcacagaaaactgactcactcggggattctggctctcattcgggtctccattccaccccggagcagactatggctgtccaatctcaacaccatcaacagtacattgatgtctctcacgtgttccctgagtttcctgctcctgatctgggcagtttcctgctacaggatggtgtgactcttcatgacgtgaaagctttacagctggtatacaggcggcattgtgaggctacagttgacgtcgtcatgaacctgcagtttcactacattgagaaactctggctgagtttttggaattctaaggccagctcttcggatggccctacttccttgcctgcatcagacgaggatcccgagggagcagtcctccctaaggacaagctgattagcttgtgtcagtgcgatcctatcctccggtggatgcggagctgtgaccacattctctaccaagctcttgtggagatcctgattccagatgttctgaggccagtgcccagcactctgactcaggcaatccgcaactttgccaaaagcttagagggctggctcacaaatgccatgagcgacttcccccagcaagtaattcagacgaaggtgggagtggtgtccgctttcgcccaaacccttcgccgatatacgagtttgaatcatttggcgcaggctgccagggccgtgttacaaaatacctctcagattaaccagatgctcagtgatctcaacagagtcgactttgcaaacgtccaagagcaggcttcctgggtgtgtcaatgcgaggaaagtgtggtgcagaggttagaacaggatttcaaactgactctccagcagcaatccagcttagatcagtgggcctcttggcttgatagtgtggtgacgcaggtgttgaagcaacacgcaggttctcctagtttcccaaaggccgcacgtcagtttctcctgaagtggtcattctactcaagtatggttataagagatcttacccttagatcagcggcatcatttggcagctttcaccttattcgactcttatatgatgagtacatgttctatctggttgaacatagggttgcagaggctaccggagagactcctatcgcagtaatgggcgagtttaatgatcttgcgagtctcagcctgacgctgttggacaaagacgatatgggggatgagcaaagaggttcagaagccggtcccgatgctagaagcctcggcgagccccttgtcaagagagagcggagcgaccccaatcattctctgcagggaatctag

SEQ ID NO: 238310 - DNA, 2940 bp, synthetic construct
  misc_feature 1..2940: note = Description of Artificial Sequence: Synthetic coding sequence
  source 1..2940: mol_type = other DNA
atggctacccaagcatatacagagctccaggctgccccacccccttcccaaccccctcaagcccctccccaagcacagccacagcccccaccccctcctccccctgccgcaccccagcctccccagccacccacagcggctgctacaccacagccgcaatatgtgaccgagctgcagtccccacagccacaagctcagcctccagggggacaaaaacagtacgtcacagagctgcccgcagtgccagcaccatcacagcctaccggcgcacctactccttcgccagcacctcagcagtatatcgttgtcactgtaagcgagggagcaatgagagctagcgagactgtgagcgaggcctcaccaggatctactgcctcgcagactggagtcccaacccaggtggtccagcaggtgcaggggacccagcagagactcctggtacagacaagtgtccaagccaaaccgggtcatgtgagcccattacagcttaccaatatccaggtgcctcagcaggcccttccgacacaacgccttgtggtacagtccgcagccccaggctccaagggaggccaggtgagtttaaccgtgcacggaacgcaacaagtgcatagccccccagagcagagtccagtgcaggccaattccagctccagcaaaactgccggtgctcccaccggtactgttccgcagcagctgcaagtgcatggggtgcagcagagcgttccagtgactcaggagcgcagcgtggtgcaggctaccccccaggcccctaagcccggacccgtgcaacccctcacagtccaaggcctgcagccagttcatgttgcccaagaggtgcaacaactccagcaggtgccagtgccccacgtatatagctcacaggtccagtatgttgaaggaggtgacgcctcttatacagcctctgccattagaagctccacctactcttaccccgagacaccactgtatacccaaacggcctccactagctattacgaagccgctgggactgccacgcaggtatccacacctgctactagccaggctgtcgcaagcagcggctcaatgccaatgtacgttagcggttctcaggtcgtggcctctagcacgtccaccggtgctggggcttctaattcatccggtggagggggtagtgggggaggcggagggggaggcggaggcggtggtggcggtgggtcaggcagcaccggcggaggaggctcaggggctgggacttatgtcattcaaggtggatacatgctgggcagtgcctcacaatcttactctcacactacaagagccagccccgctacggttcagtggctactggacaactacgaaaccgccgaaggcgtctccttgcctagaagcacgctctactgtcactacctgctacattgtcaggagcaaaaactggaacccgtgaatgccgcttcttttggcaagctgattagaagcgttttcatgggcttgcgaactaggcgcctgggtacccgtggaaattcaaaataccattattatggcctacggatcaaagctagcagtcccttactgcgactgatggaggaccaacaacatatggctatgcgaggacagccgttttcccagaaacagagattgaagcctatccagaagatggaaggcatgaccaatggtgtggctgtcggacagcagccatccacagggctgtcggacatctccgcgcaggtgcagcagtatcagcagttcctcgacgcctcccgctctcttcccgattttaccgaactggacctgcaggggaaagtcctcccagaaggagttggccctggggatatcaaagcgtttcaagtgttataccgcgagcactgcgaagccatcgtggacgtgatggttaacctacagtttaccctcgtggagaccctgtggaagactttctggcgatacaacctgtcccagccgtcggaagcaccacccctcgccgttcacgacgaggctgagaagcgacttccgaaggctattttggtcctgctctcaaagttcgagcccgtgctgcagtggaccaagcattgtgataatgtgctgtaccaaggcctcgtggagatccttatccctgacgtgctgcggccaatccccagtgcccttacccaggccattagaaacttcgccaagagtttagagtcttggctcacacacgctatggtgaatattccagaagaaatgctgagggtgaaagtggccgctgcaggcgctttcgcacagaccctcaggagatatacttcactcaaccaccttgctcaggcggcaagggccgtgctccagaacacagctcagatcaatcaaatgctctccgacctgaacagggtggacttcgcaaacgtgcaggaacaagcctcctgggtgtgtcgctgcgaagatcgcgtggtccagcgactcgaacaggatttcaaggtcaccctgcaacagcaaaacagtcttgagcagtgggctgcttggctggatggagttgtctcccaggttctcaaaccttaccaggggtccgcgggattccctaaggctgccaagttatttctgcttaaatggagcttttactctagcatggtgattcgcgacttaacattgcgatccgctgccagcttcggcagcttccacttaatcaggctactgtatgatgaatacatgtactatttgatcgagcatcgagttgctcaggccaaaggagagacacccatcgcggtgatgggtgaattcgctaatctggctacctccctgaatcccctggacccagataaggatgaagaagaggaggaggaggaggagtcagaagatgagctcccccaagacatctctctggccgcagggggagaaagcccagctctgggaccggagaccctggaaccccctgccaaactcgctagaaccgatgccagagggctcttcgtgcaggccctcccgtcatcctag

SEQ ID NO: 238311 - DNA, 2172 bp, synthetic construct
  misc_feature 1..2172: note = Description of Artificial Sequence: Synthetic coding sequence
  source 1..2172: mol_type = other DNA
atgcagaatagtgaaggcggtgccgacagccctgcctccgtggccctgcgcccttccgcagccgcaccgcctgtgcctgcttcaccacagcgtgtactcgtccaagcagcttcctccaaccctaagggggctcagatgcaacccattagcctaccaagggtgcagcaggtgcctcaacaggttcaacccgtgcagcacgtttatcctgcccaggtccagtatgttgagggaggggacgcagtttacacgaatggtgccattcggactgcttatacatacaatccggagcctcaaatgtatgccccttcgagtaccgcctcctacttcgaggcccctggtggagctcaagttactgtcgccgcatccagcccgccagcagtcccatcccattctatggtgggtatcacgatggacgttggcggatctccaatcgtgagcagtgccggagcctacctaattcacgggggaatggatagcacccggcactctttggcccacacaagtcggagtagccccgctactctcgagatggcaatagaaaacttacagaaatctgaaggtatcacatcacacaaatctggactgctcaacagccacctacagtggctcctcgacaactatgaaactgcggaaggcgtgtccctgccgagatccagcctttacaatcactacctccgtcactgccaagagcataagctggaccccgtgaatgccgcttcttttggcaaattgattagatcagtatttatggggctgagaacacgtagactgggcactcgcggaaattcaaagtaccactactatggcatcagactgaagcctgactcccctcttaatcgacttcaagaagatacccagtacatggctatgcgccaacaacccatgcaccagaaacctaggtatcgaccggcacaaaagactgactccctaggggatagtggatcccactctgggttacattccactccagagcagaccatggccgtccaatctcagcaccaccagcaatatatcgatgtaagtcacgtgttccccgagttcccagcacccgatctcgggagtttccttctgcaggatggggtaacactgcacgacgtaaaagctctgcagttagtctataggagacactgtgaagcaacagtggacgttgtgatgaacctgcagtttcattacatcgagaaactttggttgagcttctggaattccaaagcatcttcctcagatggaccaacctcattacctgcctcagacgaggaccctgagggtgctgtgttaccaaaggacaaactaatctcgctttgccagtgcgacccaattctgcgctggatgcggtcctgcgatcacatcctttatcaggccctagtcgagatccttatccccgacgttctcaggccagttccctctactctgacacaggccatccgcaactttgccaaatctctggaaggttggctgacgaatgctatgtcagattttccccagcaggtgatccaaactaaggtgggcgtagtgagcgcattcgctcagacactgcgacggtacacttccttaaaccatcttgcccaggctgcaagggctgttctgcagaatacgtcccagatcaatcaaatgttatctgatctaaatagggttgattttgccaacgtgcaagagcaagctagttgggtgtgccagtgcgaggaaagcgtcgtacagaggttggaacaggacttcaagctgactttgcagcaacaatcctctcttgatcagtgggccagttggctagacagcgtcgttacacaggttctcaagcaacatgctggatctccttccttccctaaagctgccagacaatttctattgaagtggtccttctactcttccatggtaattcgggacctgacactgcgctcagcggcttcatttgggagctttcatctcattcgcctgctgtatgatgagtatatgttctatttagtcgagcacagggttgctgaggcaactggtgaaacccccatcgctgttatgggcgagttcaacgatttagcttctctcagcttaactttgctcgacaaggatgacatgggagacgagcaacgcggatccgaggctggtccagatgcccgatctctgggcgaacctttggtcaagagagagagaagcgatccgaaccatagcttgcaggggatctag

SEQ ID NO: 238312 - DNA, 2097 bp, synthetic construct
  misc_feature 1..2097: note = Description of Artificial Sequence: Synthetic coding sequence
  source 1..2097: mol_type = other DNA
atgcagaattctgaaggcggtgcggactctccagcgtctgtcgcacttcgtccaagcgctgctgcacccccagtgcccgcaagcccacaaagggtgcttgtgcaggcagctagctccaacccaaagggcgcacagatgcagcctattagcttgccgcgtgtgcagcaagtacctcagcaggtgcagccagtgcaacacgtctacccggctcaggtccagtacgtggagggcggagacgccgtctatacaaatggggctatcaggacagcttatacttacaatccagagccacaaatgtacgctccctccagcaccgcatcctactttgaagctccgggtggcgctcaggtgaccgtggcagcttccagcccccctgcggtccctagccactcaatggtcggtataactatggacgtggggggttccccaatagtgtcatccgccggagcctacctaatacatggtggcatggatagcactcgccacagtctggcccacacctctagaagctctcctgcaaccctacagtggctcctcgataattatgaaaccgctgagggagttagcctgcccagatcttctctttacaatcattatctccggcattgccaggagcataaattagacccggtgaatgccgcatcctttggcaaacttataagaagcgtcttcatgggacttcgaacaaggaggctggggaccaggggaaacagcaaatatcactattatggtattcggttaaaaccagatagcccgcttaacaggctccaggaagacacgcagtatatggccatgaggcaacagccgatgcatcagaaaccaaggtatagacccgctcagaaaaccgactccctgggtgactccggatcacatagtggactgcactccactcctgagcaaactatggcagtacagtcacagcaccatcagcagtatattgatgtttcacatgtgttcccagagttcccagctccagatctgggcagctttctgctgcaggacggtgtgaccttgcacgatgttaaggcactgcagttagtataccgcaggcattgcgaagccacagtggacgtggtaatgaatctgcagtttcattatatagagaaactctggttgtccttttggaactctaaagcaagctcttcagatgggcctacctccctgcctgcgagtgacgaggatcccgagggagccgtgcttcccaaggacaaactgatttccctgtgccagtgcgatccaatattgagatggatgcgctcatgcgaccatatcttataccaggctctcgtcgaaatcctgattccagacgtgctcaggccagttcccagcactcttacccaggctatccggaactttgccaagtccctggagggttggttaacgaacgctatgtctgatttcccgcagcaggtgatccagactaaggtcggcgtggtgtcggctttcgctcagaccttgcggaggtataccagcctcaaccatctggcccaagcggctagagccgtcctgcagaatacaagtcagattaaccaaatgctgagtgatctcaatcgagtcgattttgccaatgtgcaggagcaggcatcctgggtgtgccaatgtgaggagtccgtggtccagcggctggagcaagactttaagttgacactgcagcagcagagcagtcttgatcaatgggctagctggttggactcggtcgtgacacaagtcctcaagcagcatgctggttctccctctttccctaaggcagccaggcagttccttttgaaatggagtttttacagttcaatggttatcagggacctcaccctgcgctctgcggctagtttcgggtcttttcacttaatccgccttctctatgacgaatatatgttttatttggtggaacatagagtggctgaagcaaccggagaaacacccatagcagttatgggcgaattcaacgatctggcctctctctctttaaccctactggacaaggatgacatgggcgatgagcagaggggttctgaagccggaccagatgccaggagcctgggggagcccctcgtgaaaagagagcgctctgatcccaaccatagccttcaaggaatctag

SEQ ID NO: 238313 - DNA, 1851 bp, synthetic construct
  misc_feature 1..1851: note = Description of Artificial Sequence: Synthetic coding sequence
  source 1..1851: mol_type = other DNA
atggccgaggacgagccagacgccaagtccccaaagactgggggtcgcgctcctcccggaggtgctgaggccggagagccgaccaccctcctgcagagactccgcggaactatctccaaagcagtgcagaataaagtggaaggcattcttcaagatgttcaaaaattctccgacaatgacaagctttacttgtacctgcagctgcccagcggccctactactggggacaagtcctctgagccttctacattgagtaatgaggagtacatgtacgcataccgatggatacggaaccatctcgaagagcataccgacacctgcttacctaagcagtctgtttatgacgcatacaggaaatactgcgagagtcttgcttgttgtaggcccctctccacagcaaatttcggcaaaatcattcgggagatcttccctgacattaaagctaggaggttggggggaagaggtcagtcaaagtattgttattccggaattaggcgtaagacactggtgtccatgccccctcttcccggactcgacctgaagggcagtgagtcccccgaaatgggcccagaggttacccccgcacccagagatgagctcgtggaggccgcatgtgcgctgacgtgtgactgggccgaacggatcctaaagagaagcttcagcagcattgttgaagtagcaaggttcctcctgcagcagcatctcatatccgccagaagcgctcacgcccacgtcctaaaagccatgggattagcagaggaggacgaacatgcacccagggaacgttcaagcaagcccaaaaatggactggagaaccccgaagggggtgcacacaagaagcctgagcggctggcacagccacccaaagatctggaagcacgtacaggcgctggacccctggccagaggggagcggaagaaatccgtggttgagagcagtgcccctggtgccaataatctccaggtgaacgctctggtggcgaggttgcctctcctactccccagagctcccagatcactaatacctcccattccagtgagccctccgattcttgcgccacggctgtcctcgggtgctttgaaagtcgcaaccctgcctctgagttctcgagccggtgccccacccgctgctgtccctataattaacatgatcctacccacagtgccagcccttcccggaccgggacctgggccaggccgtgcccctcccggaggcctgacgcagcctcggggtacggagaatcgggaggttggcatcggcggtgaccaaggaccccacgataaaggcgtgaaacgcactgcggaagtgccagtttcagaagccagtggccaggcgcctccagccaaggcggctaagcaagatatcgaggacactgcctccgatgccaaaaggaagcggggacgtccgagaaagaaatccggagggagtggggaacgaaacagtactcctctaaagagtgccgctgccatggaaagcgcccagtcaagccgcttgccctgggagacttgggggtccggtggagaggggaactcagctggaggcgctgagcgtcccggtcctatgggggaggctgaaaagggggctgtgcttgcacaggggcagggggacggtaccgtatcgaaggggggtagaggtcccggaagccagcatacgaaagaagcggaggataaaattccactcgtgccgagcaaagtttcagtcatcaagggctcaaggtcccaaaaagaagccttcccactggcgaaaggggaggtggacacagccccacagggcaataaggacctgaaagagcacgtgctccaatcaagcctcagccaggaacataaagaccccaaagccacgcctccttag

SEQ ID NO: 238314 - DNA, 1851 bp, synthetic construct
  misc_feature 1..1851: note = Description of Artificial Sequence: Synthetic coding sequence
  source 1..1851: mol_type = other DNA
atggcagaggacgagcctgacgccaaaagcccaaagactggcggacgcgcaccgcctgggggtgctgaggcaggcgaaccgactactctgctgcaaagactgcgtggcaccataagtaaagctgtgcaaaataaagtggagggtattctgcaggacgtgcagaaattcagtgacaatgataaactgtacctatatcttcagcttccatctggcccaactacgggagataaatcaagcgagccctcgaccctcagcaatgaggagtatatgtatgcctatagatggatccggaatcaccttgaggaacatacggacacttgcctccccaaacagagtgtctacgacgcttataggaaatattgcgagtctttggcttgctgtaggcccctctcaactgccaacttcgggaaaatcatacgcgagattttcccggatataaaggccagacggctggggggtaggggccagagcaaatattgctactctggtatcagaagaaagaccctggtgtccatgcctcccctgccaggactggacttgaagggcagcgagtcacccgagatgggccctgaagtcactccagcccctagagatgagttggtagaggcggcatgtgccctgacgtgtgattgggctgagcgcatcctcaaacgctcattcagcagtatcgtggaagttgcaagattcctcctgcagcaacacctcatttccgcccgatccgctcacgcccatgttcttaaggcgatgggcttggcagaggaagacgagcatgccccacgagagaggagtagtaagcccaagaacggcctggaaaaccctgagggcggagcccacaaaaagccagaacggctagcgcagcctcctaaagatctggaggctagaaccggtgctgggccactcgcaaggggggaaagaaaaaaatccgtggtagaatcttccgcccctggggctaataacctgcaggtcaacgctctggtcgcacggctgcctctccttctgcctcgagccccacggtccttaatccctcccatccctgtgagcccaccaatccttgctccacgattgagcagtggcgcactcaaggtggcaaccctgccactgtcttctagagccggagcccctccagctgcagtgccgattatcaacatgatcctaccaaccgtgccagctctgcctgggcctggcccaggccctggaagagcaccacctggcggtttgactcagccccgtggaacggagaaccgagaagttgggattggtggagaccaagggccacacgataagggcgtgaagagaactgcggaagtaccagtatcagaggcatccggccaagcccctccagctaaggccgcaaagcaggacattgaagacacggcgtctgatgccaaacgcaagagggggagaccccgaaaaaagtctggaggctctggcgagcggaacagtacccctttgaagtccgcagccgctatggagtccgcccagtctagtcgtttaccctgggaaacatgggggtctggcggtgaaggaaacagtgctggcggtgcagagcgccctggccctatgggcgaggcggaaaaaggggctgtcttggcccagggacagggcgacggtaccgtatccaaggggggaagaggccctggctcccaacatacgaaggaagctgaagacaagatcccactcgtccctagcaaggtgagcgtcatcaaaggcagtagatcccagaaagaggcttttccccttgcgaagggtgaagttgatacggcaccccaagggaacaaagacctgaaggaacacgtccttcagtcatctctaagccaggagcataaagaccccaaggccacacccccatag

SEQ ID NO: 238315 - DNA, 1791 bp, synthetic construct
  misc_feature 1..1791: note = Description of Artificial Sequence: Synthetic coding sequence
  source 1..1791: mol_type = other DNA
atggcagaggatgagcccgacgcgaagagccccaaaaccggaggcagggcccctcccggaggcgcagaagcaggcgaacccacaaccttgctgcagcgcctaagaggaacgatcagtaaagccgtccaaaacaaggttgagggcatacttcaggacgtgcaaaagtttagcgacaacgataaactctatctatatctgcagttgccttccggacctactaccggagataaatccagcgaaccatctactctttctaacgaggagtatatgtatgcatatcgctggatcagaaatcacttggaggaacataccgacacgtgcctgcccaagcagtctgtgtacgacgcgtaccgcaagtattgcgaatctcttgcgtgttgccggccactttccacagcaaattttggcaagatcatcagagagatcttccccgacataaaggctaggcgcctgggtggacggggacagagtaaatactgttattccggaattcggcgtaaaaccctcgtgtccatgcctccactaccgggtctggatttaaaaggaagcgaaagtccagagatgggccctgaagtcaccccagcacccagagatgaactggtagaggccgcatgcgctttgacttgtgattgggccgaaaggatactcaaacgtagtttctcttctatcgtggaggtggccaggtttctgcttcagcagcatctgatcagcgcacgcagtgcacacgcgcatgtgctcaaggcaatgggattagctgaggaggatgagcacgctccaagagagaggtcttccaaaccgaaaaatggcctggaaaatcccgagggcggagcgcataagaagcccgagagattggcccagccccctaaagacttggaagcccgaacaggcgctggaccactggccagaggagaacgtaaaaaaagcgtagtagaatcctccgccccaggtgctaacaacctccaggtcaatgccctggtcgccaggcttcctctgctcctaccgagagctcccaggtcattaataccgcctataccagttagcccacccatactggcacctcggctctcaagtggggctctgaaagtggcaacactaccgctaagtagcagagcaggcgcaccacccgctgctgtgccaattatcaatatgattctacctacagtgcccgcactgcctgggcctggtccagggcctggtcgcgctcccccaggaggcctaacacaacccagaggtacggaaaatagagaagtcggtattgggggagatcaaggcccacatgacaagggcgtcaaacgtactgcagaagtcccagtatcagaggcatccgggcaggcaccacctgccaaggctgcaaaacaggatattgaggatactgcctcggatgccaaaagaaagcgcggaagaccacgcaaaaaatcaggaggtagcggagagaggaacagcacacctctgaaatcggccgctgccatggagagcgctcagagctctcgcctgccctgggaaacctgggggtcgggaggagagggtaatagcgctggcggagctgaacgtcccggtcccatgggtgaggcagaaaaaggggcagtgctggcacaggggcagggtgacgggaccgtgtccaagggcggacgtggaccaggaagtcagcacaccaaagaagccgaggacaaaatacctcttgtgcccagcaaagtgtctgtcatcaaggggagtcgttcccagaaagaggctttcccgttagccaaaggtgaggtggacacggcccctcagggcaataaggatttgaagtag

SEQ ID NO: 238316 - DNA, 357 bp, synthetic construct
  misc_feature 1..357: note = Description of Artificial Sequence: Synthetic coding sequence
  source 1..357: mol_type = other DNA
atggcggaggacgagccggatgcaaagagcccaaagactggcggtagggccccaccaggcggtgcagaagcaggggagcccacgacactgttgcagcggcttagggggactatctctaaagcagtgcagaacaaggtggagggtatccttcaggacgtgcagaagttctcggataacgataaactgtacctatatttgcagcttccctctgggcctaccactggtgataaaagttcggagccttcaactctctctaatgaagagtatatgtacgcttaccggtggatcaggaatcacctggaggagcacactgatacatgtctgccaaaacagagcgtgtacgacgcttataggtag

SEQ ID NO: 238317 - DNA, 693 bp, synthetic construct
  misc_feature 1..693: note = Description of Artificial Sequence: Synthetic coding sequence
  source 1..693: mol_type = other DNA
atggctgaagatgaaccggatgcaaagtcacccaagacagggggtcgggcacctcctggaggagccgaagcaggcgaacctaccacgttacttcagcggctgcggggtaccatttcgaaggcagtccagaacaaagtggaaggaattctgcaggacgtgcagaagtttagtgacaacgataaactctatctttatctccagctcccctccgggcctactacaggcgacaagagttctgaaccgagcaccctgtctaacgaggaatacatgtatgcgtatcggtggatccgcaatcacctggaggagcacacagacacctgtttgcccaagcagtctgtgtatgatgcctatcgtaagtattgtgaaagtctggcctgttgtcgaccccttagcacggccaacttcggcaaaattatcagagaaatttttcctgacatcaaggcccgacggctcggcggtcgaggccagtccaagtattgttattcaggaatcaggcgcaaaactctggtaagcatgcctccccttccaggtctggatttgaagggttccgagtcccccgagatgggccctgaggtcacacctgctcccagggacgaacttgtggaagcggcttgtgcacttacatgcgactgggctgagagaatcttgaaacggagcttctctagtattgtagaagtagcccgttttctttag

SEQ ID NO: 238318 - DNA, 372 bp, synthetic construct
  misc_feature 1..372: note = Description of Artificial Sequence: Synthetic coding sequence
  source 1..372: mol_type = other DNA
atggccgaggacgaaccagatgccaagtcacctaaaacaggcggacgcgcacccccaggaggggcagaagccggtgagcctacgacgcttctccagagactgcgagggactatatcaaaggcagtccagaataaggtagaagggatattacaagatgtccagaagttctccgataacgataagctgtacttatatctccaattgccaagcggtccaaccactggcgacaaatcctccgagcctagcaccttaagcaacgaggagtatatgtacgcttaccgctggatacgcaaccacctcgaagaacacacagatacatgtttacctaaacaaagcgtgtatgacgcttatcgaaaatactgtgagtcttag

SEQ ID NO: 238319 - DNA, 291 bp, synthetic construct
  misc_feature 1..291: note = Description of Artificial Sequence: Synthetic coding sequence
  source 1..291: mol_type = other DNA
atggcggaggatgagcctgatgccaaatccccaaagaccggcggtcgtgccccacctggtggagcggaggcaggtgagccaacgactctgttgcaacgcctgcggggtactatcagcaaggcagtccagaataaagtcgagggcattctccaggacgtccaaaaattctctgataatgacaagttgtacttgtatttgcagctaccatctggcccaaccaccggcgacaagagcagcgaaccaagcacgttgagcaatgaagagtacatgtatgcttaccggtggatatag

SEQ ID NO: 238320 - DNA, 321 bp, synthetic construct
  misc_feature 1..321: note = Description of Artificial Sequence: Synthetic coding sequence
  source 1..321: mol_type = other DNA
atggcggaggatgagccagatgctaagtcaccaaaaacaggaggcagagcacctcccggtggcgctgaagctggcgaacccactacgttactgcaacgccttcggggtacaatcagtaaggctgtccaaaacaaggttgagggaattctgcaggatgttcagaagtttagtgacaacgataaattgtacctctatctccagctcccttcagggccaaccactggtgacaagtcctccgagccctcaacgctgtctaatgaggaatacatgtacgcataccgatggatacgcaatcacctcgaggaacatacagacacgtag

SEQ ID NO: 238321 - DNA, 555 bp, synthetic construct
  misc_feature 1..555: note = Description of Artificial Sequence: Synthetic coding sequence
  source 1..555: mol_type = other DNA
atggcagaagacgaaccggatgctaaaagccccaagaccggagggagggctcctccaggtggcgctgaggccggagagcccactacactcttgcagcgcctcaggggcacgatttcaaaggctgtgcaaaacaaagtcgaggggattctgcaagatgtccaaaaattctcagataatgacaaattgtacctgtatctccagctgccgagtggtcctaccactggcgataagtcttcagagccctccacactgtcaaacgaggagtatatgtatgcctatcggtggattcgtaatcacttggaagaacatactgatacctgtcttcctaagcagtctgtgtatgacgcctacagaaagtactgcgagtccctggcctgttgccgcccattgtccaccgcaaatttcggaaaaatcatccgcgaaatcttccctgacataaaggctcgacgattaggaggtcgcggtcagagtaaatattgctacagcggcataaggcgcaagacactggtgagcatgcccccactgccgggtctcgatctcaaagggagtgaatag

SEQ ID NO: 238322 - DNA, 1731 bp, synthetic construct
  misc_feature 1..1731: note = Description of Artificial Sequence: Synthetic coding sequence
  source 1..1731: mol_type = other DNA
atggctgaggacgagcccgatgctaagagccctaaaacaggcggacgtgcccctccgggaggagccgaggccggtgagcctaccacgttgcttcagcgccttcgaggaactataagtaaggccgtccaaaacaaggtagagggtattctccaagatgtgcaaaaatttagcgacaatgacaagctgtacctatatttacagctccctagtggccctacgacaggcgacaaaagaaagtactgcgaatctcttgcatgctgtaggccattgtccaccgcgaactttggcaagatcataagagagatctttcctgacatcaaggcaaggcgcctggggggaaggggccagagtaagtactgttacagcggaatccgcaggaagactctcgtgtcaatgccccctctgcctggtctagatctcaagggatcagaaagccccgagatggggcctgaggtgaccccagctcctcgggatgagctcgttgaggctgcctgcgctctcacgtgcgactgggcagaacgaattctgaaaagaagcttcagttcaatcgtggaggtagccagattcttgctgcaacagcacctcatttctgcacgcagtgcccatgcccatgttttgaaggccatgggcctcgccgaggaagacgagcatgcaccccgtgagagatcaagcaaacctaagaacggcctcgagaatcccgaaggcggagcgcacaagaaacctgagaggctggcccagcctccaaaagacttagaggccagaaccggagcaggtccccttgccaggggagagcgcaagaagagcgttgtcgagagctccgcccctggggcaaataacttgcaagtgaatgcacttgttgccagattacctctgctgctgcccagagccccaaggagtcttattcctccgattcccgtgtccccaccaatacttgcacctagactaagttccggcgctctaaaggtggccactctccctctttcttcgcgcgcaggcgcaccaccagcagccgtgcctattattaacatgatactcccgaccgttccagccttgcctggcccaggccctggaccaggacgtgcccctcctggaggcctgacacaacccagagggactgaaaaccgggaggtaggtatcggcggagaccagggccctcatgataaaggtgttaaacgtaccgctgaggttccggtcagcgaggcttcaggccaagctcctcctgccaaggccgctaagcaggacatcgaagataccgcgtccgatgcaaagcgcaagaggggcaggccaaggaagaagtccggcggatccggtgaacggaactccactccactgaagtcagccgctgcaatggaatcagcacagagtagtaggctaccctgggagacatggggatcagggggagaaggaaattcagctgggggagcagagagacccggacccatgggagaagcggagaagggagctgttttggcccagggacagggagacggtacagtgtccaaaggtggtcgcggacccggatcacagcatactaaggaagccgaagacaaaattcctctcgtgcccagcaaagtgtccgtgatcaaagggagccgttctcagaaggaggcctttccactggccaaaggcgaggtggacaccgcaccacagggcaacaaagatttaaaggaacatgtgctgcagtcgtctttaagtcaggagcataaggaccctaaggccacaccgccttag

SEQ ID NO: 238323 - DNA, 1851 bp, synthetic construct
  misc_feature 1..1851: note = Description of Artificial Sequence: Synthetic coding sequence
  source 1..1851: mol_type = other DNA
atggctgaggatgagcccgatgcaaagtctccaaaaacaggcggaagagctccacctggcggtgcggaagcaggtgagcctaccaccctcctgcagcggctgcgaggaacaatttcaaaggcagtccagaacaaggtcgagggtattctgcaagatgtccaaaagttctccgacaatgataagctgtacctatacctacaactgccctcaggtccgaccaccggagataagagctccgagccatccactttatctaatgaggaatacatgtacgcatacaggtggattcggaatcacctggaggagcacacagatacgtgcctgcccaaacagtcagtttacgatgcatatcgtaaatattgcgagtcattggcttgttgtcggcctctgagtacagcaaacttcggtaagatcatccgggaaatatttccggacataaaggccagaagactgggcggtcgaggtcagagtaaatactgctacagcggaatccgccgtaaaactctggtcagtatgccccctctcccgggactcgacctgaaggggtccgaatcaccagagatgggaccggaagtgacacccgcacctcgggacgagcttgtagaggccgcatgtgccctgacttgcgattgggctgagcgcattctgaagcggagcttctcatccatagtggaggttgcaagatttctgctccagcagcaccttatctctgcgaggagcgcccatgcacacgtgctgaaggccatgggcttggccgaggaagatgaacatgcccctagggagcggtcttcaaaacccaaaaacgggctggagaacccagaggggggtgcacataagaaacccgagaggctggcacagccccctaaagatctggaagcacgtaccggagcagggccacttgcacgcggagaaaggaaaaagtccgtcgtagagtccagcgcccctggtgcaaataacctgcaggtgaacgcactagttgcacgactgcctttgctcctcccgcgagcccctagatcgctgataccaccaatcccagtcagcccccctatcctggcacctagattgtcatccggcgctctgaaagtggccacgttgccactctcgtcgcgggctggcgcaccgcctgccgctgtcccaatcattaacatgatcctacccactgtgcccgctctgcccggacctgggccagggccaggccgtgcccctcccggaggcctgacccagcccagaggcacggaaaacagggaggtgggaattggcggagaccagggaccacacgacaagggcgtaaagagaactgccgaagttcctgtgtcagaggcatcaggacaggcacctcccgctaaagccgcaaaacaagatatagaagatacagcctcagacgcgaaacggaagcggggacgcccacggaaaaaatctggcggttccggggaacgcaatagtacacccctgaaaagtgcggctgctatggagtcagctcagagttctaggttgccttgggagacctggggctccggcggagaggggaattccgccggaggggcagaacgacctggacccatgggagaggcagagaaaggggctgtgctggctcagggtcagggagatggaactgtctccaaggggggacgcggtcccggatcccagcacacaaaggaggccgaggacaaaatccccctggttcccagtaaggtgtcagtgattaaagggagtagatctcaaaaggaagcattccctttggcaaagggcgaagttgacaccgctccgcaggggaataaggacctgaaggagcacgtgctccagagttcattgagccaggagcacaaggatcccaaggcaacccctccttag

SEQ ID NO: 238324 - DNA, 498 bp, synthetic construct
  misc_feature 1..498: note = Description of Artificial Sequence: Synthetic coding sequence
  source 1..498: mol_type = other DNA
atggcggaggacgaacccgacgctaaatccccaaagactggcggtagagcgcctccaggtggcgctgaagccggtgaacctaccacccttctacagcggttgcgtggcacaataagcaaagccgtgcaaaataaggtggaggggatcctgcaggacgtccagaaatttagcgataacgataaactgtacctttacctgcagctcccaagcggacctaccacaggggacaagagttcagagcccagcacgctgtctaacgaagaatacatgtatgcatataggtggatccgcaaccacctggaggaacatacggacacttgcctcccaaagcaatcagtttatgacgcctaccggaagtactgtgagtcactggcatgctgtaggcccttgagcactgctaatttcgggaagatcattcgcgagatttttcctgatataaaagccaggaggctggggggacggggacagtccaagtactgctatagcggaattaggtag

SEQ ID NO: 238325 - DNA, 2787 bp, synthetic construct
  misc_feature 1..2787: note = Description of Artificial Sequence: Synthetic coding sequence
  source 1..2787: mol_type = other DNA
atggccaaagtacctgagctggaggacacattcttacaagcccaacctgcccctcagctctcccctggcattcaggaggactgttgtgttcagctccttggcaagggattgctggtataccctgaggaaacagtgtacctggccgcagaaggacagcccggaggtgagcagggcggaggggaaaagggcgaagaccctgagctcccaggagccgtcaaatccgagatgcatctgaacaacggcaacttctcgtcggaggaagaagatgccgacaatcatgactcaaagaccaaagcggctgatcagtacctgtcacagaagaaaactataacccagatcgtgaaggacaaaaaaaaacagactcagctgacgcttcagtggttggaagagaactacattgtttgcgaaggcgtgtgtctccctcggtgcattctgtacgcccactacctggacttctgcaggaaagagaaactggagcccgcatgtgccgcaacgtttgggaagaccatccgccaaaagtttcccctattgacaaccaggagactgggtacccgtggacacagcaagtatcactattacgggatcgggatcaaggaatccagcgcatactaccactcagtctacagcgggaaaggcctgactcggttctccggctctaagctcaagaacgagggcggtttcacccgaaaatattctctgtcttcaaagacaggcaccctcctccctgagtttcccagcgcccagcacttggtgtaccaaggttgcatttccaaagataaagtggacacactgataatgatgtacaagacacactgtcagtgtatcctggacaacgccatcaacggtaacttcgaggagatccagcacttcctcttacacttttggcaggggatgccagatcaccttctgcctttactagagaacccagtgataattgacattttttgcgtttgcgattctatcctgtataaagtgctcaccgacgtactgatacccgctacaatgcaggaaatgccagagtctttactcgcagatatccgcaacttcgctaaaaattgggaacaatgggtcgtgagcagcctggaaaacctgcctgaagctctgacagacaaaaagatccctattgtgaggagattcgtctcaagcctcaagcgacagacctcattcttacaccttgcccagatcgcacgtccagccctgtttgatcagcacgtggtaaactctatggtcagcgatatcgagcgggttgatcttaacagtataggatcacaggcactgctgactatatctgggtctacagacaccgagagcgggatctataccgagcacgattccataaccgtgttccaggagctgaaggacctcctcaaaaagaacgcaaccgttgaagcttttattgagtggttggacacagttgttgaacaacgtgttatcaaaacctcaaaacagaacggccgttccctgaaaaaaagggcccaggatttcctgcttaaatggagttttttcggtgccagggtcatgcacaatctgactctcaataatgcgtcctcgtttggaagcttccacttgatccgcatgctgcttgacgagtacatactgctggccatggaaacacaatttaataacgacaaagagcaggagctgcagaatttgctggacaagtacatgaagaattcggacgccagcaaggccgctttcaccgcgtctccgagctcatgtttcctcgctaaccgtaataagggctcaatggtatcctcggatgcggttaagaatgaaagccatgtggaaaccacttacctgcctctgccatcttcccagcctggcggtctcggcccagcacttcaccagttcccggcaggaaatacggacaatatgccacttaccggacagatggagctcagtcaaatcgctgggcacttgatgacaccaccaattagccctgccatggccagtcggggaagtgtgattaaccagggccctatggccggaaggcctccatctgtgggacccgtgctctccgccccatcccactgttcaacctatcctgagcctatttatcccaccttgccacaggccaatcacgacttttattcgacttctagtaactatcagacagtgttccgcgcacagccgcattctacatccggtttgtatcctcaccacactgagcatggtaggtgtatggcatggacagagcagcagttgtcaagagactttttcagcggcagttgtgcaggaagtccatataatagtcgcccaccgtccagctacggaccctcactgcaggctcaggatagccataatatgcagttcctaaacaccggctcttttaactttttgagcaataccggggcagcatcgtgccagggagcaactttgcctcccaacagtccgaacggctactacggttccaacatcaactaccctgaaagtcacagattggggagcatggtgaatcagcatgtctcagtgatcagctcaatcaggtccctcccaccatattccgatatccacgatcctctgaacattttggatgatagcgggagaaagcagacgtcatcattctacaccgatacctcatcccctgttgcgtgccgcacccccgtccttgctagcagtcttcagacaccaatcccatcctcgtcaagccagtgtatgtatgggacttctaaccaataccctgcccaagaaaccctagatagccacggaaccagttcaagagagatggtgagtagtttacccccaattaacactgtgttcatgggtaccgctgccggaggcacatag

SEQ ID NO: 238326 - DNA, 4122 bp, synthetic construct
  misc_feature 1..4122: note = Description of Artificial Sequence: Synthetic coding sequence
  source 1..4122: mol_type = other DNA
atggctgaagagcaacagcagccacctccccagcaacccgatgctcaccagcagttgcccccttccgctcccaacagtggcgtggctttgccagcccttgttccaggattacccggaacagaggcctccgctctccagcacaagatcaagaactcgatttgcaagactgtgcagtccaaggtggattgcatcttgcaggaagtggaaaaattcacagatctagagaaactctacctgtacctgcagcttccatcaggactttcaaacggagaaaagtcagaccagaatgcaatgtcctcaagccgggctcaacagatgcacgccttttcctggattcgcaatacgctcgaagagcaccccgagacttctctcccgaagcaggaagtctatgacgaatataaatcatattgtgacaatttgggctaccacccactttctgctgcagatttcggtaagatcatgaagaatgttttccctaatatgaaggccagacgccttggtactaggggcaaatccaagtactgctactccgggctccggaaaaaagctttcgttcacatgcctacattgcctaatctggatttccacaagacaggcgacggactcgagggcgcagaacctagcgggcagctgcaaaacatcgacgaagaagttatttcctcagcgtgtaggctcgtctgcgaatgggcccaaaaggttttatctcaaccttttgatacagtgcttgaactggccagatttctcgttaagagtcactatattggcacaaaatccatggcggcattaactgtgatggcagctgccccagctggaatgaagggcatcactcagccatctgccttcattcctacagccgaatcaaatagcttccaaccccaggtaaagaccttgcctagccctattgatgccaagcagcaactacagcgaaagatccagaagaagcagcaggaacagaagctacagtcccccctgccaggtgagtctgccgctaaaaagagtgaatcagccacctctaacggcgttacgaacctacccaatggcaacccctccattcttagtcctcagcccatcggcattgtggttgccgctgtgccgtcccctatcccggttcagaggaccaggcagctggtgacgagcccatctcctatgtctagctccgatggtaaggttctgccgctgaatgtgcaggtggtaactcagcatatgcagtctgtgaagcaggccccaaagaccccccagaacgtacccgcttctcccggaggagacagatccgcacgacacagatatccccagatacttccaaaaccagccaatacctctgctctcacaattagatccccaactactgtgctcttcacatcatctcctatcaaaacagccgttgtgcccgcttcacacatgtcaagcttgaatgtagtgaagatgaccactatttcattgaccccaagcaactccaatacgcccctgaaacacagcgcctccgtatcttcagccacaggcaccaccgaggaatctcgctctgtcccgcagataaaaaacggctcggtggtatctctccaaagtcctgggagtagatcttcgtcagctggtggaacatcagcagtagaggtcaaagtggaaccagagacatctagcgatgaacaccctgttcagtgccaggagaactcagacgaagctaaagctccccaaacaccctctgcgctgctcgggcagaagagcaacacggacggagccctccagaagcccagcaatgaaggggtgatcgagatcaaagcgacaaaagtctgcgatcaacgaactaaatgtaaatccaggtgcaacgaaatgcttccgggaacttcaacagggaacaaccagtcaactattaccctcagcgtggccagccagaatttgacttttactagctcatcgtctccaccaaacggcgactcgattaacaaggatcctaagctttgcaccaagtctcctaggaaaagactgtcctctacactccaggagacacaagttccacccgtaaagaagcccattgtcgaacaactgtctgccgctaccattgagggccaaaagcagggctctgtcaaaaaggatcagaaagtgccacactcagggaagacagaggggagcacagcgggtgctcagatcccatctaaagttagtgtgaatgtctccagccacatcggagctaatcagcctttgaattctagcgctcttgttatctctgactctgccctcgagcaacagactacacccagcagcagtccagatattaaggtgaagctggaaggctcggtgttccttttagattcggactccaaatctgtgggttcattcaatccgaatggttggcaacagataacaaaggactccgaattcatatcagcatcatgtgaacagcagcaggatatcagcgtgatgactatacccgaacatagcgacattaatgatctggaaaaaagcgtttgggaattggaggggatgcctcaagatacctactcccagcagctgcactctcagattcaagagtccagcctcaaccagatccaagcccattccagcgatcagctgcctcttcaatcagagctgaaggagtttgagccatctgttagtcagactaacgaatcatacttccctttcgacgacgagttgactcaagattctatcgtcgaagaactggtcctcatggaacagcagatgtctatgaacaactcgcattcatacggtaactgtctgggtatgaccttacaatcccaaagtgtaactcctggggctccaatgagcagccatacctcttccacccatttttaccaccccatccattccaacggtaccccaattcatacaccaacacccactcctacccctacccccaccccgacgcccactcctacgcccaccagcgagatgatcgccggttcacagagcctgtcacgcgaatctccttgcagccgactggcccaaactacacctgtagactctgcgctcggatcgagtcggcacacgcccattgggaccccacatagcaactgctcgagctctgttcctcctagccctgtggaatgcaggaaccccttcgcctttacccccatttcaagcagtatggcatatcacgatgctagcatcgtcagcagctcgcccgtgaaacctatgcagagacccatggcgacccatcccgacaaaacaaaactggagtggatgaataacggctattccggagttggaaatagctcggttagtgggcacggcatcctcccatcctaccaagagctggttgaagatcgtttcaggaagccacatgcattcgccgtaccaggacagtcgtaccagtctcagagcagacaccacgatacgaattttggccgactcactcccgtctctcctgtccagcatcagggcgctaccgtaaacaacacaaacaaacaggaagggttcgccgtacctgctcctttggacaacaagggcacaaattcttctgcgtcttccaatttccggtgtcggagcgtctcaccggctgtccataggcaacgaaacctgagcggatccaccctctatccggtatcgaatatccctcgctctaatgtgactcctttcggcagcccagtaacccctgaggtgcacgtctttacaaacgtgcacaccgacgcatgcgctaacaatattgcacaaagatctcaaagcgtgcccctcactgtgatgatgcaaacagcattcccaaatgcgctgcaaaagcaggcgaattcgaagaaaataactaatgtcctcctgagcaagctagacagcgacaacgatgatgccgtgagaggactggggatgaacaacctcccgagcaattacaccgctcgcatgaatctgacccagatcctcgaaccaagcacggtgtttcccagtgccaaccctcaaaatatgatcgactcctctaccagtgtctacgaattccaaacaccttcttatctgaccaagtctaacagcacaggacagattaacttctctcccggagataatcaggctcagagcgaaataggggagcaacagctggattttaattccacggtgaaggaccttttatcgggagattccctacagactaaccagcaattgaagtatcctgatgtcctgggtgagtag

SEQ ID NO: 238327 - DNA, 3846 bp, synthetic construct
  misc_feature 1..3846: note = Description of Artificial Sequence: Synthetic coding sequence
  source 1..3846: mol_type = other DNA
atgtcctcgtccagagcccaacagatgcatgcattctcatggatcaggaataccctggaggagcacccagagacatccctcccaaagcaggaggtatacgacgagtacaagagctactgcgacaacctgggctaccatcccctttcagcagccgatttcggaaagattatgaagaatgtatttcctaatatgaaggctaggagacttggtactcggggaaagagtaagtattgctacagcggactgcgaaagaaagcattcgtccacatgcccacccttccaaaccttgacttccacaagacgggtgatggtctagagggggcagaacccagtggccagctccagaacattgacgaagaggtaatctcctcagcctgcaggctggtgtgtgaatgggctcaaaaggttctatcacagcccttcgataccgttcttgaactggcgagattcttggtgaaaagccactacatcggtaccaaatccatggccgcactgaccgtgatggccgctgctcctgccggaatgaaaggtattacgcaaccgtccgcttttatcccaacagcagaatctaactcgtttcaaccacaagtgaaaactcttccgtcccctatagatgcaaaacaacaactgcagcggaaaattcagaagaagcagcaagagcagaaactccagagtcccttgcctggtgaatccgctgccaaaaagtccgagtcggcaactagtaacggtgtgactaacctccctaacggcaatccgtctatactctcgccacagccgatcgggatcgttgttgcagctgtcccatcccccatccccgtgcagcgcacacgtcagttagtgacctccccctcgcccatgtcttcttctgatggcaaggtgctacctctaaacgtgcaggtggtgacacagcacatgcagtcggtgaagcaggctcctaagaccccccaaaatgtgccagcgtccccaggcggagatcgctctgcacgccacagataccctcagattctacctaaacccgcaaatacgtcagccttgaccattcgttcacctacaacagttttgtttacctcatcccctatcaagaccgccgtggtcccagctagccatatgagcagcctgaacgtcgttaagatgaccactatctcacttacccccagtaatagcaacacccccctcaagcattccgcttcagtcagctccgctaccggaaccacagaagagtctcgatctgtccctcagataaagaatggatccgtggtcagcctacagtctcctggaagtaggagtagctccgcaggcggaactagtgcagtggaagtgaaggtcgaacccgagacttcttcagatgagcatcctgtgcagtgccaggagaattcagacgaggctaaggcccctcagacaccatctgcgttgttgggtcagaagagcaataccgacggcgcactgcagaaaccatctaacgaaggcgtcatagaaatcaaagccacaaaggtatgtgatcagagaaccaaatgcaaatcacggtgcaatgagatgttgcctggcacttcaaccgggaataatcagagtacgatcactttgtctgtagcctcccagaatctcacttttacctcttcgagcagtcccccaaatggtgatagcatcaataaggaccccaaactctgtacaaagtctccccgtaagcgtctcagctccacactccaagagacacaagtcccacccgtcaaaaagcctatagtggagcagctgtccgcggcaacaattgaaggacagaagcaaggcagcgtgaagaaagatcagaaggtcccacactcaggaaagaccgaaggatccacagccggagcccagatcccaagtaaggtgtcggttaacgtttcaagtcacatcggagccaaccaacccctcaattccagtgccctggtgatcagtgattctgctctggagcaacagaccactcccagcagttcacccgacataaaggtcaagctcgagggatccgtgttcttgcttgattccgactccaaatctgtaggcagctttaatccaaacggttggcagcaaatcacgaaggattccgaattcatttcagcctcatgtgagcaacagcaggacatctcggtcatgacaattccggagcactctgacatcaatgatctcgaaaagtcagtttgggaattggagggaatgcctcaagatacatacagtcagcagctgcatagccagattcaggagtcctcactcaatcagatccaagctcactcctccgatcagttgccattgcagagcgagcttaaagaatttgaaccatcagtgtcccagaccaatgagtcctatttccccttcgacgatgaactgacccaggattccatcgtggaagagctggtgctcatggagcagcaaatgtccatgaacaattcacacagctatggtaactgtctcggaatgaccctacagtcccagtctgtcaccccaggcgctccgatgtcttcacacacttcctccacgcatttctaccacccgatacacagcaacggcaccccaatccatactcccacccctactccaacgcccaccccaacccccacacccacgcccactcctacgtctgagatgatagcaggcagccagagtcttagcagggagagcccatgttcaagactggcccaaactacaccggtcgattcagcgttaggcagtagcagacacactccaatcgggactcctcattctaattgttcaagctctgtgccgccatcacccgtcgagtgcagaaatccgtttgcatttaccccaatttccagctcaatggcgtatcacgacgctagcattgtgagtagctctccggtgaaacccatgcagagacccatggctacacaccccgataaaactaagctggagtggatgaacaacggctattccggtgtcgggaattcatccgtttccggtcacgggatcttaccgagctatcaagaattagtcgaagaccgatttaggaagcctcacgccttcgccgtcccaggccaatcctatcagtctcagagcagacatcatgatacaaatttcgggaggctcactcccgtgagccctgttcagcaccagggagccactgttaacaacaccaataaacaggaggggttcgctgtcccagcccctctggataataagggcactaacagctccgccagtagtaactttaggtgccgatcagtgtctcctgcggtccatagacaacgcaacctgtccggctcaactctttatcccgtttccaatatcccacgctctaatgtgactcctttcggtagtccagtcacaccagaagtgcatgtgttcaccaacgtgcacacggacgcctgtgctaacaatatagctcagcgatcacagagcgtgcctctgactgttatgatgcagactgcctttccaaatgccttgcagaaacaagcaaactccaaaaagatcaccaacgttctgctaagcaagttggatagcgataatgatgatgccgtccggggtctaggaatgaataatctcccctcaaactacaccgctaggatgaacctcacccagatcctcgagcctagtacagtctttccgtctgccaatcctcaaaacatgattgacagctccacaagtgtttatgagttccagactcccagttacctgaccaaatctaacagcaccggccagattaacttcagccccggtgataatcaagcgcagagcgagattggggaacagcaactggatttcaatagcactgtgaaagatctcttgagcggcgattccctccaaactaatcaacagttatgttcctgcccttcatccctgcttgcaggtatgcagatgtag

SEQ ID NO: 238328 - DNA, 4383 bp, synthetic construct
  misc_feature 1..4383: note = Description of Artificial Sequence: Synthetic coding sequence
  source 1..4383: mol_type = other DNA
atggcggaggagcagcagcaacctccgcctcagcagcctgacgctcaccagcagctgccgccatctgctcctaacagtggcgttgctcttcctgccctcgtgccaggactgcccggaaccgaggccagtgccctccaacataagatcaagaactctatctgtaagaccgtgcagagtaaagttgactgtatcctgcaggaagttgagaaatttactgatctggagaagctttatctctatttgcagcttccatcaggattatccaatggagagaagagtgaccagaatgcaatgtccagctcccgtgcgcagcagatgcatgctttctcctggatcagaaacacgcttgaggaacatcctgaaactagtttacctaaacaggaggtatacgatgagtacaagtcatattgtgacaatctgggctatcacccactgtcagccgctgattttgggaaaattatgaaaaatgtattccctaacatgaaagctcggcgactgggcacgcggggaaagagtaagtattgttattcaggtctgcggaagaaggctttcgtccacatgccaacgcttccgaacctcgatttccacaaaaccggggatggcctcgagggagccgagccctccggccagctgcagaacattgatgaggaagtgatttccagcgcttgccgcctcgtctgcgagtgggcacagaaggtactgtcacagccatttgacaccgtcctggagctggcaagatttctggtaaaaagtcactatataggcacaaagtctatggctgccctcacggtcatggcagccgctcctgcaggcatgaagggaattactcagcccagcgcttttatccctacggccgagagcaatagtttccagccacaagtgaagactttgccatccccgatcgacgctaaacagcagcttcagagaaagatacagaagaagcaacaggagcagaagctccagtcccccctccctggcgagagcgcagctaaaaaatcagaaagtgcgacctccaacggggtgaccaatttaccaaacggcaaccccagcatcctgagcccccaaccaattggcattgtcgtggccgcagtgccaagccctatccccgttcagcgcacgagacagctggtgacgtccccatcacctatgagctccagcgacgggaaagtcttaccactgaatgttcaggtggtaactcaacacatgcagtcagttaaacaggcaccaaagacaccacagaatgtgcccgcttcgccaggcggagaccggtctgccagacaccggtatccacaaattctgccaaaacccgcaaacacgtctgctctgaccatccgctccccaactactgtcctgtttacgagctcacccatcaaaacggccgtggttcctgccagtcacatgtcttccctgaacgttgtgaaaatgaccacaattagtctcaccccatccaactccaacacaccattgaaacatagtgctagcgtgtcttctgctactgggaccaccgaggaaagccggtcagttccacaaataaagaatggatctgtagtatcgctgcagtctcccggatcgcggagttcatccgccggaggaacaagtgcagtggaggtgaaagtcgagcctgaaacctcctctgatgagcatcctgttcagtgccaggagaacagtgatgaggcgaaggctccacagacgccatctgcgctgcttggacagaagtcaaatacagatggtgcattacagaaaccttctaacgagggcgtgatagaaatcaaggccaccaaggtgtgtgatcagagaactaaatgcaagtcccgttgtaacgaaatgctccccggtacctcaacaggaaataatcagagtactattaccctttcggtggcatcccagaacctaacgtttactagtagtagttcccctccaaacggggattcaatcaacaaagatccaaaactgtgcacaaagtcaccaagaaagagattgtcctcaaccctccaggaaacacaggtccctcccgtaaagaagcccattgtcgagcagctgagcgctgctacaatcgagggccagaaacaggggtccgtgaaaaaggatcaaaaggtccctcatagcggcaaaaccgagggaagtactgccggagctcagatccccagcaaagtctccgtgaatgtgagcagccacataggagccaaccagccattaaattccagcgccctggttatttcagactcagcactagagcagcagaccacccccagctcctcccccgacattaaagtgaagctggaggggtcagtgtttctgctcgacagtgattccaaatccgtaggttcatttaaccccaatgggtggcagcagattacgaaggattccgagttcatttctgccagctgtgagcaacagcaggatattagtgtgatgacaattcctgagcactccgatatcaacgacctggagaaatctgtttgggagctggaaggcatgccccaggatacgtactcccagcagctgcattcacagattcaggagtcttccctgaaccagatccaggcgcattcatccgaccagctcccactccagtccgaattaaaggagtttgagcctagcgtgagccagaccaacgaatcttacttccctttcgacgacgagctgacacaggattctattgtcgaggagttagtccttatggaacagcagatgtcaatgaacaattcgcattcttacggcaactgcctcgggatgacgctccagagccaatcagtgactccgggtgcacccatgagctcgcataccagtagtacgcacttctatcatccaatccacagtaacggcactcccatccacaccccaacacctaccccgacccccacccctacaccgacaccaaccccaacccccacgtccgaaatgattgcgggttctcagtccttgtcccgcgaaagcccgtgtagccgtttggctcagacgaccccagtggattcagcgttgggctctagccggcacacgccgattggaacaccacactctaactgcagtagctctgttccacctagccccgtagagtgtcgcaatccttttgccttcacaccaattagcagcagcatggcttatcatgatgccagcatcgtttcgagctctcctgttaagccaatgcagcgacctatggccacacacccagataagaccaagttggaatggatgaacaacggatactcaggggttggaaactcaagtgtgagtggccacggcatactgccttcatatcaggagctggtggaagacagatttagaaaaccccacgcattcgctgtgcctgggcagtcttaccaatcgcagagccggcaccatgacaccaattttggcagactaactcctgtgagtcctgttcaacatcagggcgcaacagttaacaacaccaacaaacaggagggtttcgcagtccccgctcccctcgataataaagggactaactcctcagcctctagcaacttccgctgcagaagcgtgagcccggcagtgcatagacagcgaaatctgagtggttctaccttgtaccctgtttcaaatatccctcgcagcaacgtgactcccttcggctcccctgtgacccccgaggtccatgtcttcaccaatgtccatacagatgcctgcgctaacaatatcgcgcagaggagtcagtccgtgcctctgaccgtgatgatgcagacagcctttcctaacgccctgcagaaacaggctaactccaaaaagattacgaatgtacttctgtccaaacttgatagcgataacgacgatgccgtgcgtgggctcggcatgaacaatcttccatctaactatactgcccgtatgaatcttacacagatccttgagccatcaacagtgttcccttcagcaaatcctcagaacatgattgattcgtctactagcgtgtacgagtttcagactcctagctacctgacaaagtccaactctacaggtcagatcaacttcagccccggagacaatcaggcccaatcagagatcggcgaacaacagctggactttaatagtactgttaaggacctacttagcggcgactctctgcagacaaaccagcaactcgtcggacagggcgcatccgatctgaccaatactgcgagtgacttcagctctgatataaggttatccagcgaacttagtggctctatcaacgatctgaatacactggatcccaacctgttatttgatcctggcagacagcagggacaagatgacgaggctaccctggaggagttgaaaaacgatcccctttttcagcagatctgttctgagtccatgaactctatgacctcttccggctttgaatggatcgagtcaaaggatcatccaacagtggagatgttaggctag

SEQ ID NO: 238329 - DNA, 4092 bp, synthetic construct
  misc_feature 1..4092: note = Description of Artificial Sequence: Synthetic coding sequence
  source 1..4092: mol_type = other DNA
atgagctccagccgcgctcagcaaatgcacgccttctcttggatacgcaacacactggaagagcaccccgagacctcactgcctaaacaggaagtttacgacgaatacaagagctactgtgataacctaggctatcaccccctttccgccgcagacttcggcaaaatcatgaaaaacgttttccccaacatgaaggctcgcaggctcggtaccaggggcaaaagcaagtactgctactcaggactgcggaagaaagctttcgtgcacatgcctactctgcctaacctggatttccacaaaaccggggatggtctggaaggtgcggaaccttccggacagctgcagaacattgatgaggaggtgataagcagcgcttgtcggctcgtgtgtgagtgggcccaaaaggtcctctcacagcccttcgacactgtgctggagttagcccgattcttagtgaagtctcattacatcggcacaaaatcgatggcagccctcactgtgatggctgccgctccggctgggatgaaaggtattacccaaccgagtgccttcattcccacggcagagagtaattcctttcagcctcaggtgaagaccctccccagcccaatagatgcaaagcaacagcttcaaaggaagatccagaagaagcagcaggagcagaaactgcaatcccccttgcctggggagagcgctgcaaaaaaatccgagtccgcaacctcaaatggggtgacaaacctccccaatggcaatccaagtatcctgtcccctcagccaatcggcatcgtggtagccgctgtcccctccccgatccccgtccagcgcacaaggcagttggtcacatcaccaagccccatgagtagtagcgacgggaaagttctgcctttgaacgttcaagtggtgactcagcatatgcaatccgtgaagcaggccccaaaaactccccaaaatgtgcctgcatccccagggggagaccggtcagccagacacaggtacccccagattctccctaagccagccaacaccagtgcgctgaccatccggtctcctaccacagtgctcttcaccagttcacctattaagaccgcagtcgtgcccgctagccatatgagctccctgaacgtcgtcaaaatgaccacgattagccttacaccatcaaattctaacacaccgctaaagcacagcgcatccgtgtcatctgcaacggggaccactgaggagtcaaggagcgtgccgcaaatcaagaatgggagtgtggtgagcctgcagtcacccggatctaggtctagcagcgctggaggaacttccgccgtcgaggtcaaggtggaaccagaaacttcctctgatgagcaccccgtgcagtgccaagagaactctgatgaagctaaagccccacagaccccaagcgctttacttggacaaaaatctaacaccgatggggcactgcagaagccgtctaatgagggggtaatagagattaaggcaacaaaagtgtgtgaccagcggaccaagtgcaagtccagatgcaatgaaatgctccctgggacttctacaggaaacaatcagagtactatcacactttctgtggcctcacagaatttaacattcacctcttcgagctcccctcctaacggagattctattaacaaagatcctaaattgtgtactaagtctccaagaaaacggctttcctccacattgcaggaaacgcaggtgccgccagtcaagaagccaatagtggaacaactttctgccgcaactatcgaggggcagaagcagggatctgtgaaaaaagaccagaaagtcccacatagcggaaaaactgagggctcaaccgctggtgcccagatccccagcaaagtgtcggtcaatgtctccagccatattggcgctaaccagcctctgaactctagtgccctggtaatttcagattccgcactagagcagcagactacaccgagcagctcgcctgacatcaaggtgaaactggaagggtcggtcttcctgttagacagcgattcaaagagcgttggtagcttcaatcccaatggctggcagcaaataaccaaggacagcgaatttatcagcgcttcttgtgaacagcagcaggatattagcgtgatgacgattcccgaacactctgatataaacgatctagagaagagcgtgtgggaacttgaaggcatgccccaggacacgtacagtcagcagctccattctcaaatacaggaaagctccctgaatcaaatccaagctcacagctctgaccaactgccactgcagtcagagttgaaggagttcgaaccgtcagtgagccagaccaatgagagctactttcctttcgacgatgagctgacacaggattctattgtcgaggaactggtgttgatggagcaacagatgagcatgaacaactctcatagctatggaaattgtctgggcatgactttgcagtcccagagcgtgaccccgggtgctcccatgagcagtcacacatcatctactcatttctatcatcctatccactccaacgggactcccattcacactcctacaccaacaccaacccctacgcccacacctacaccaactccgactccaactagcgaaatgatagctggctcacagtcattgagccgagaatctccttgcagccgtttggcccagaccacacccgtggatagcgctctcggttcctcgcgccacacccctatagggacccctcattccaattgctcatcaagcgtacccccttctcctgttgagtgtaggaaccctttcgccttcactccgatcagctcaagtatggcctaccatgacgcctcaattgtgtcctccagcccagtgaagccaatgcaaaggccaatggcaacgcaccctgacaagaccaaacttgagtggatgaacaacggatacagcggagtgggtaattcctctgtgtccgggcatggcatactaccatcctatcaggagctcgttgaggaccggtttaggaaaccacatgcttttgcagtccctggccaaagttaccagtcccagtcccgccaccacgatacaaacttcggtcggctgactcctgtgagtcctgtgcagcaccaaggtgcgaccgttaataacacaaataaacaggaggggttcgccgtgcctgccccactcgataacaagggcaccaatagctcagcaagttcgaatttccgttgtagatccgtatccccagcagtccacagacagcgtaatctctcaggttctaccctgtaccccgtttcaaatattcccagatctaacgtcacaccatttggctctcccgtcacacctgaggttcacgtgttcactaatgtccacactgatgcctgcgctaataatatagcacagcgttctcaatcggtccccctgactgtgatgatgcagacagcatttccaaacgccctccaaaagcaggcaaacagtaaaaagatcactaacgtcttactgtcaaagttggacagcgataacgatgatgccgtgagaggactcgggatgaacaatctgcccagcaattatacagcgaggatgaatttgactcagatccttgaaccctcgacagtgtttccgtctgctaatccccagaatatgatcgattcatctactagtgtgtacgagttccaaactccatcatacctgacgaagagtaactccaccgggcaaatcaacttctcaccgggagataatcaggcacagagcgaaatcggggagcagcagttggactttaacagcactgtcaaggacctcctctctggcgactcgctgcagacgaatcagcaattggtgggccagggcgcatccgatctgacaaatacggcttctgatttcagttccgacatccgtttgtcatctgaactcagcgggtctattaatgatttgaacactctagaccccaatctgctgtttgatccagggaggcaacagggccaggacgacgaggccacgttggaagagctaaagaacgatcctcttttccaacagatatgctctgagagtatgaacagcatgacctcgagtgggttcgagtggatcgagtccaaagatcatccgaccgtcgaaatgctcgggtag

SEQ ID NO: 238330 - DNA, 783 bp, synthetic construct
  misc_feature 1..783: note = Description of Artificial Sequence: Synthetic coding sequence
  source 1..783: mol_type = other DNA
atggagctcactcagcccgctgaagatctgatacaaacccagcagactcccgcttccgaactgggcgacccagaagacccaggtgaggaggctgccgacggcagtgacacagtcgtgctttcgctattcccttgcacccctgaacccgttaaccccgagccggacgcgagcgtctcatcaccacaagccggaagttctcttaagcattccactaccctgacaaataggcagaggggcaacgaggtgtcagccctaccagctacactagactcgctgtccatccaccagctggctgctcagggggagcttgaccaattgaaagagcacctccggaagggagacaacttggtgaacaagcctgacgagagaggatttactcctttgatttgggcttccgctttcggtgagatcgagaccgtgcgatttttgctggagtggggggcagacccccatattcttgcgaaagaacgcgaaagcgctctgagcctggcaagtacaggaggctacactgacatcgtcgggctccttctggagcgcgatgtggatataaatatatatgactggaacggcggaacccctctgctgtacgccgtccgaggaaaccatgtaaagtgcgtggaagccctcctggctagaggagctgatctgacaaccgaagccgattctggctataccccgatggacttggcggtggcattgggctaccgaaaggtgcagcaagttattgagaatcacattcttaagctcttccagtctaatctggtacctgcggatcctgagtag

SEQ ID NO: 238331 - DNA, 714 bp, synthetic construct
  misc_feature 1..714: note = Description of Artificial Sequence: Synthetic coding sequence
  source 1..714: mol_type = other DNA
atggaacttactcagcccgctgaggatttgattcaaacacagcagacccccgcatctgaactgggggacccagaagacccgggagaggaggcagctgacggtagcgatactgtcgttctgtccctgtttccgtgcaccccggagcccgtgaatcctgaacctgacgctagcgtgagtagcccacagggaagctcacttaaacactcgaccacgttgactaaccgacagcgagggaacgaggtctctgccttgcccgcaaccctggattgcgacaacctggtcaacaagcctgatgagcggggattcaccccattgatctgggcttcagcgttcggggaaatcgagacagtgagattcctacttgagtggggcgcagacccacatatcctcgccaaagaaagagaatccgcgctgtccttggcatccactggcggatacaccgatatagtgggactactcctggaaagggatgtcgatatcaacatctatgattggaatggcggtaccccactcctgtacgctgtgaggggaaaccacgtgaaatgcgtggaggctttactagctagaggcgcagaccttaccacagaagcagatagtggctatactcccatggacttggctgtggccctcggttatcgaaaagtgcagcaggtgatcgagaaccacatcctcaaattattccagtccaatctggttcctgccgatcctgagtag

SEQ ID NO: 238332 - DNA, 192 bp, synthetic construct
  misc_feature 1..192: note = Description of Artificial Sequence: Synthetic coding sequence
  source 1..192: mol_type = other DNA
atggaactcactcagccagctgaggatctcatccaaactcagcagacccccgcttctgagctgggagaccctgaagatcccggtgaagaagccgctgacggaagcgacacagtggtgctgagcctcttcccttgcaccccagaacccgtgaatcctgaacctgacgcctccgtgtcttctccccaggcttag

SEQ ID NO: 238333 - DNA, 717 bp, synthetic construct
  misc_feature 1..717: note = Description of Artificial Sequence: Synthetic coding sequence
  source 1..717: mol_type = other DNA
atggagttgactcagcctgcagaggacctgattcagacacaacagacacccgcaagcgagttaggcgatcccgaagacccaggggaagaagccgcagacggatctgacaccgtggtgctctctctgttcccatgcactccggagcccgtgaatcccgagcctgacgccagtgtttcctctccacaggcaggttcaagcctgaagcatagcaccactctgactaataggcagcgtggtaacgaagtctctgctctgcccgctacccttgattgtgacaacttggtgaataagcctgacgaaagggggtttacacccctgatttgggcctctgcattcggcgagattgagaccgtgcggtttctcctagagtggggagcagaccctcacattctagcaaaagagagggaatccgcgctcagtctggcctctactggaggctataccgacatcgttggacttctgctcgaacgtgacgtcgacatcaatatttatgattggaacggaggaaccccattgctatacgctgtcagggggaaccacgtcaagtgcgtagaggctctcctcgcacgcggagccgatttgacaacagaagcagacagcggttacacgccaatggatctggctgtggcccttggttatcgtaaggtccagcaggtgatcgagaaccacatcttgaagttatttcagtccaacctggttcctgcagacccagaatag

SEQ ID NO: 238334 - DNA, 819 bp, synthetic construct
  misc_feature 1..819: note = Description of Artificial Sequence: Synthetic coding sequence
  source 1..819: mol_type = other DNA
atggaggctcagggcgtggctgaaggggctggaccgggtgctgcaagtggcgtacctcatcccgcagcattagcaccggcagctgcaccaactcttgcccctgcgtctgtggctgcagccgcttcccagtttactctcctggtcatgcagccatgcgcaggacaggatgaggcagctgctcccggaggcagcgtgggagctggcaagcctgtgcgctacctgtgcgagggcgcaggtgacggtgaggaagaggctggggaggatgaagcggatctgttagataccagcgatcctcccggtggcggagagtctgcggcatctttagaggatctcgaggacgaggagactcattcagggggtgaaggatcttccggcggtgcgcgacgcaggggctccggagggggatccatgagtaagacttgcacatatgagggctgttctgaaaccactagccaagtggctaaacaacgaaaaccatggatgtgcaaaaagcatcggaataagatgtataaggacaagtataagaagaagaaatccgaccaagcactcaattgcggcggaacagcctcgacagggtcagccggtaatgtcaagctcgaggaatccgccgataatatcctcagcatcgtgaaacaacgcactggctcattcggcgatcgtcctgctagacctaccctgctggaacaagtacttaatcagaagaggctatccctgctgaggagccccgaggttgttcaatttctccagaagcagcagcagctgctgaaccagcaggtactggagcaacgccaacagcagtttcctggcacttctatgtag

SEQ ID NO: 238335 - DNA, 1854 bp, synthetic construct
  misc_feature 1..1854: note = Description of Artificial Sequence: Synthetic coding sequence
  source 1..1854: mol_type = other DNA
atgtcttcgctgcccacctctgacgggttcaaccacccagccagatcttccggacaatctcccgatgttggcaaccccatgagcctggccaggagcgtttctgcctcagtttgccccattaagccaagcgattcagatagaatcgaacctaaagcagtaaaagcacttaaagcctcagctgagttccagctgaactccgagaaaaaagagcatctaagcctgcaagacctgtcggaccacgctagtagcgcggaccatgctcccaccgatcagtcacccgcaatgccgatgcagaatagctccgaggagattaccgttgccggaaacctagagaagagcgctgaaagatcaactcagggcctgaagtttcacctacatacaagacaggaggccagtctttctgtgacgtctaccaggatgcacgagccacagatgtttttgggtgagaaagactggcaccccgaaaaccaaaatttaagccaggtgtcagacccacagcaacatgaggaacccggtaatgaacaatacgaggtggcacagcagaaagcctcgcacgatcaggaatatctgtgcaacatcggagatctcgaactgcctgaagaacggcaacagaaccaacataaaatcgtggatctggaagctacaatgaaagggaatggattaccccaaaacgtcgaccctccgagtgcaaagaagtctatacccagttccgaatgtagtggatgctcaaatagtgagaccttcatggagattgacacggcccagcagtctctggttacactgctaaatagcacgggtagacagaacgcaaacgttaagaacatcggggcattagacctgactctggacaatccacttatggaggtcgagacatctaagtgtaatccgtcaagcgagatcctgaatgatagcatctcaacgcaggacctccaaccccctgaaaccaacgtcgaaattccagggaccaataaggaatacggtcattacagctccccatccttatgcggcagttgccaacctagcgtggagtctgcagaagagagttgtccatccatcacagccgcactcaaagagctgcacgagctcctcgttgtgtcttcgaagccggctagcgaaaacacaagcgaggaggtgatttgccagtccgagaccatcgccgaaggccagacttcaatcaaggatctgtccgagagatggacacagaatgagcacctcacacaaaacgagcagtgcccccaggtgtcgttccaccaggcaatctccgtgagcgtggagacggagaagctcacgggaaccagctccgacacaggacgggaggctgtcgaaaatgttaacttcagatcactaggtgacggcttgagcacggacaaggaaggagtgcccaaaagtagagagagcattaacaagaaccggtcagtgaccgtaaccagtgcaaaaacctctaaccagctccattgtacactaggagtggagataagccctaaactgctcgccggtgaggaggacgcgctcaatcaaacctccgaacagactaagtcactctcttccaattttatcttggttaaggacctggggcagggcatccaaaacagcgtcactgatcgtcctgaaactagggaaaacgtctgccctgacgcgtctcggccactgcttgagtacgagcctcccacttctcatcccagctccagccctgccattctcccgccactcatctttcctgccacagacatcgaccgcatcctcagggctggatttaccttacaggaagctctgggggcacttcaccgcgtgggtggcaacgcagatttggcgctgcttgtgctgctcgcgaaaaatatagtggtgcctacctag

SEQ ID NO: 238336 - DNA, 657 bp, synthetic construct
  misc_feature 1..657: note = Description of Artificial Sequence: Synthetic coding sequence
  source 1..657: mol_type = other DNA
atgagcagcggcgctgccagcggcacaggcaggggccgaccgaggggtgggggacccggacccggtgatccgccaccatcagaaacgcataaactggtggtggtaggcggtggcggtgtcggaaagtctgcccttaccatacagttcatccagtcttactttgttagtgactacgatcctactattgaggacagttatacaaaaatatgcagtgtggatgggataccagccagactggacatcctagacacagccggtcaagaggagttcggagctatgagagaacagtacatgcgggctgggcatgggtttttgctcgtatttgcaataaacgacaggcaatcatttaacgaagtgggtaaactgttcacccaaatcctcagagtgaaggatcgagatgattttcccgttgtgctggtggggaataaggccgacttggagtcccagcgccaggtgcccagatctgaagccagtgcattcggcgcaagccatcacgtagcgtactttgaagcaagcgccaaactgagactgaacgtggacgaggcctttgagcaattggtgcgtgcagtcaggaagtaccaggagcaggagttacctccaagtccgccttctgccccacgcaagaagggaggcggatgcccatgcgtgctgctgtag

SEQ ID NO: 238337 - DNA, 615 bp, synthetic construct
  misc_feature 1..615: note = Description of Artificial Sequence: Synthetic coding sequence
  source 1..615: mol_type = other DNA
atggcagccgcaggatggagagatggttcagggcaggaaaaataccgcctcgtggtcgtcggcggagggggagtggggaagtccgccctgacaatccagttcatccagtcttactttgtgacggactatgaccccacaatcgaagacagttacacaaagcaatgcgtgattgacgatagggcagccagactcgatatcctggacacagccggtcaagaagagtttggcgctatgcgagagcaatatatgcgcacgggcgaaggattcctgctggtgttctctgtgactgaccgcggatcctttgaagaaatctataagtttcagcggcaaatcctcagagtgaaagatcgtgacgaattcccaatgatattgattggaaataaggcggatctggatcaccaacgacaggtcacacaagaagagggccagcagttggctaggcaactgaaggtgacgtacatggaagcctctgctaaaatccgaatgaacgtcgaccaagccttccacgaactggtgcgggtaatccgaaagttccaggaacaggaatgccccccatcgcccgaaccaacacgaaaggaaaaggacaaaaagggatgccattgtgtcattttttag

SEQ ID NO: 238338 - DNA, 384 bp, synthetic construct
  misc_feature 1..384: note = Description of Artificial Sequence: Synthetic coding sequence
  source 1..384: mol_type = other DNA
atgcgcgagcagtatatgagaacaggagagggctttctgctggtcttctccgtgacggaccggggaagtttcgaggagatatacaagtttcaacggcagatccttagagtgaaggacagagatgaatttccaatgatcttaatcggaaataaggcagacctggaccatcagaggcaggtcactcaggaggagggccaacagctggctcgccagctgaaggtgacgtacatggaagcttctgccaagatccggatgaacgtcgatcaggcctttcatgaactagtcagagtcatcagaaagttccaggagcaagagtgcccaccaagccctgagccaacccgcaaggagaaagataagaagggttgtcattgcgtgatcttctag

SEQ ID NO: 238339 - DNA, 384 bp, synthetic construct
  misc_feature 1..384: note = Description of Artificial Sequence: Synthetic coding sequence
  source 1..384: mol_type = other DNA
atgcgggaacagtacatgaggaccggcgagggcttcctcttggttttcagtgttaccgaccggggttccttcgaggagatatacaaattccagcgacagatcctgcgggtgaaagaccgtgacgagtttccaatgattctgatcggcaacaaggccgatctggaccaccaacggcaagtaacccaggaagaaggacagcagctagcacgccagctcaaagtgacgtatatggaggcaagcgccaagattcgaatgaatgtggaccaagccttccatgagctggttcgcgtgatcagaaaatttcaggaacaggaatgcccgccatcccccgaacccaccaggaaggagaaggacaagaagggctgtcattgcgtcatcttttag

SEQ ID NO: 238340 - DNA, 384 bp, synthetic construct
  misc_feature 1..384: note = Description of Artificial Sequence: Synthetic coding sequence
  source 1..384: mol_type = other DNA
atgcgagaacagtatatgcgtaccggggaaggttttctgctggtgttcagtgtgacggaccgcggatcattcgaagaaatctacaagttccagcgacagatcctcagagtgaaggaccgcgacgagttccccatgatccttattggcaacaaggctgatctggatcatcaaagacaggtgacacaggaagaaggtcagcaactggccaggcagttgaaagtgacttacatggaggcctctgcgaaaatccggatgaatgtggaccaagcatttcatgaacttgttagggttatcaggaagttccaagaacaggaatgccctccaagtccagagcccacccggaaagaaaaggataagaagggatgtcactgtgtgattttttag

SEQ ID NO: 238341 - DNA, 210 bp, synthetic construct
  misc_feature 1..210: note = Description of Artificial Sequence: Synthetic coding sequence
  source 1..210: mol_type = other DNA
atgcgagagcagtacatgcggactggcgagggctttctacttgttttttccgtgactgaccgagggagctttgaggagatttataagttccaacgccagatcctgagagtgaaagatcgagacgagttccccatgatcttaattgggaacaaggcggacttggaccaccagagacaggttacccaggaggaaggacaacaattagcctag

SEQ ID NO: 238342 - DNA, 384 bp, synthetic construct
  misc_feature 1..384: note = Description of Artificial Sequence: Synthetic coding sequence
  source 1..384: mol_type = other DNA
atgcgcgaacagtacatgcgaacgggggagggtttcctcctcgtgttcagtgtcaccgacagggggtcgttcgaagagatctataagtttcagaggcagattttaagggtgaaggaccgggacgagttcccaatgatcttaattggcaacaaggcagatctcgaccaccagcgccaggttacccaggaggaagggcagcagctagcgagacagctgaaggttacttatatggaagcctctgctaagatccgcatgaacgtcgatcaggccttccacgagctcgtccgggttatcaggaaattccaggagcaggagtgtccaccaagcccagagccgacccgaaaggagaaagacaaaaagggatgtcactgtgtgatcttctag

SEQ ID NO: 238343 - DNA, 384 bp, synthetic construct
  misc_feature 1..384: note = Description of Artificial Sequence: Synthetic coding sequence
  source 1..384: mol_type = other DNA
atgcgtgagcagtacatgcggacaggcgaaggatttctactagtatttagtgtgaccgaccgcggatctttcgaagagatctataagttccagcgacaaatattacgggttaaggaccgggacgagttcccgatgattctgattggcaacaaggctgacctggaccatcagaggcaggtgacccaggaagagggacagcagcttgccaggcagcttaaggtgacctatatggaagcatcagctaagatacggatgaatgtcgatcaggctttccacgagctcgtgagagttattagaaagttccaggaacaggagtgccctccttccccagaacccactaggaaagaaaaagataagaagggatgccattgtgtaatcttttag

SEQ ID NO: 238344 - DNA, 510 bp, synthetic construct
  misc_feature 1..510: note = Description of Artificial Sequence: Synthetic coding sequence
  source 1..510: mol_type = other DNA
atgagttactttgtgacagattacgatcctaccatcgaagatagctacactaagcagtgtgtgattgacgatagagccgcaaggctagatatcctcgataccgcgggtcaggaagaattcggcgctatgcgcgagcagtacatgcggaccggggaaggatttctgctcgtttttagcgttaccgatcgcggatctttcgaagaaatatataagttccaacgacagatcctgcgcgtgaaggacagagacgaattcccaatgattttgattggaaacaaagcagacttggaccatcagagacaggtgactcaagaggaaggacagcaactagcacgccagcttaaagtgacttacatggaagctagcgcgaaaatccgtatgaacgtggatcaggcatttcacgagctggtcagagtgattagaaagttccaggaacaggagtgtcccccatcaccggagcccacgcgtaaggagaaggacaagaaggggtgtcactgcgtcattttctag

SEQ ID NO: 238345 - DNA, 633 bp, synthetic construct
  misc_feature 1..633: note = Description of Artificial Sequence: Synthetic coding sequence
  source 1..633: mol_type = other DNA
atggccgcagccggatggagggatggctccgggcaggaaaagtataggttggttgtcgttggtggagggggagtcggcaagagcgctttaacgatccagtttatccagttctttctgttcctgcagtcgtatttcgtcaccgattacgacccgacaattgaggattcttataccaaacagtgcgtgattgatgaccgtgctgcgagattggatattctggacaccgcgggtcaagaggagtttggtgctatgagggagcagtacatgcggacaggtgagggcttcctgctggtgttcagcgttacagacagggggagctttgaggaaatttataagttccaaagacagatcctgcgtgttaaggacagagacgagttcccaatgattctgattggaaataaggccgacctggatcatcagaggcaagtgacccaggaagaggggcagcagttggcaagacagctgaaggtgacttacatggaagctagcgccaagatccggatgaacgttgatcaggcattccacgagctggtccgggtcattcgcaagtttcaggagcaggagtgccccccaagtcctgagccaactcgcaaagaaaaggacaagaaagggtgccattgtgtgatcttctag

SEQ ID NO: 238346 - DNA, 633 bp, synthetic construct
  misc_feature 1..633: note = Description of Artificial Sequence: Synthetic coding sequence
  source 1..633: mol_type = other DNA
atgggttgttgctctagtagcgacccacgacgagaagatgacctgagagccagggagaaattgaagaagacaaagattattttcgtggtgggaggtccaggctcaggaaagggcacgcaatgtgagaaaatcgtgcaaaagtatgggtacacgcacttgtctacaggggatctacttcggtcagaagtctcatcgggctcagcaaggggtaagaagctgtccgagattatggagaaagggcaattggtgcccctagaaactgtgttggacatgctgcgggatgctatggtggccaaagtcaatacaagtaaaggattcctgattgatgggtaccccagggaggttcagcaaggtgaggaatttgaacgcagaattggccagccaactctattgctctacgtggacgcagggccagagaccatgacacagaggctcctcaaaagaggggagacgtcgggaagagtggacgacaatgaggaaactattaagaaacgacttgaaacatattataaggcaaccgagcctgtgatcgccttttatgaaaagagaggaatcgtcagaaaagtgaacgcagaaggaagtgtggactctgtcttctcacaagtgtgcactcacctcgacgccctgaagtag

SEQ ID NO: 238347 - DNA, 354 bp, synthetic construct
  misc_feature 1..354: note = Description of Artificial Sequence: Synthetic coding sequence
  source 1..354: mol_type = other DNA
atgcctcgactgttcctctttcacctactcgaattttgcctgttactcaaccaattctctcgggcagtggccgcaaagtggaaggatgatgtgatcaagttatgcggacgcgagctcgtcagagcacagattgctatctgtgggatgtccacctggtccaaacgctctctgtcccaggaggacgcccctcagacacctaggcctgtcgcgggtgacttcattcagactgtgagcctgggtatctctcctgatggtggcaaggcattaaggacgggctcttgcttcacccgcgagtttctcggcgcactcagtaagctgtatcaccccagctccacaaagattcagaagttatag

SEQ ID NO: 238348 - DNA, 429 bp, synthetic construct
  misc_feature 1..429: note = Description of Artificial Sequence: Synthetic coding sequence
  source 1..429: mol_type = other DNA
atggcccgatatatgctgctgctgctgttggcagtttgggtgctgactggcgaactttggcccggtgccgaagcaagggctgcaccttacggggtccgtctgtgtggcagggagtttatccgggcagtcatctttacctgcgggggaagtcgatggcggagaagcgacatcctggcccatgaggcgatgggggatacgtttcctgacgctgatgctgatgaggattctctcgcaggtgagctggacgaggccatgggaagtagtgagtggttagctctgaccaaaagcccccaggctttttaccgagggagacccagttggcagggcaccccgggagtgctgcgcggaagtcgggacgttctggccggtctgtcaagtagctgttgcaagtggggctgttcaaagtcagagatctcaagcctctgctag

SEQ ID NO: 238349 - DNA, 1293 bp, synthetic construct
  misc_feature 1..1293: note = Description of Artificial Sequence: Synthetic coding sequence
  source 1..1293: mol_type = other DNA
atgaagccttcgcttttgtgtaggccgctgagttgctttctcatgttgctgccctggcccctcgcaacccttacatcaacaaccctctggcagtgcccccctggggaagaaccggacctggatccagggcaggggacattgtgcagaccttgccctccaggaaccttctccgcggcttggggcagcagcccttgtcagccacacgcaagatgctcactgtggaggcggctggaggcccaggtgggaatggcaacaagggataccctgtgtggtgactgctggcctgggtggttcggtccatggggtgtccctcgggtgccatgtcaaccttgtagctgggctccactgggtacacatgggtgtgacgagtggggcagaagagcacgtcgcggtgtggaagtagcggcaggtgcctccagcggcggagaaacaaggcaacccggaaacggtacacgggcaggtggccctgaggagactgccgcacagtacgcagttatagctatcgtgcccgttttttgcttgatgggtctgcttgggattctggtttgtaatttactgaagaggaaggggtatcactgtacagctcataaagaggtcggccctgggcctggcggtgggggatcgggaataaatcctgcctaccggactgaggatgctaacgaagacactatcggcgttctagttcgccttatcaccgagaagaaagaaaatgctgccgctttggaggagctgctgaaagaataccactccaaacagctggtccaaacctcccaccgtcccgtttcgaaattgccaccagccccacccaatgtgcctcacatatgccctcataggcaccacctgcatacggtgcaagggttagcatcactcagcggcccatgctgtagtaggtgttcccagaaaaaatggccagaagttctcctgagtcctgaagctgttgcggctaccacccccgtgccttccctgctgcccaaccccacacgagttccgaaagctggagctaaagccggtcgccaaggggaaataaccatcctatccgtcggaagattcagggtagcgagaatcccggagcaaaggacctcaagcatggtgagtgaagttaaaaccatcacggaggccggaccgagctggggggacctcccggatagtccacagccagggctccctcccgagcagcaggccctgctgggttccggcggaagtcggactaagtggttgaagccacctgccgaaaataaggccgaagaaaacagatacgtcgtgcgcttaagcgagagtaatcttgtcatttag

SEQ ID NO: 238350 - DNA, 1293 bp, synthetic construct
  misc_feature 1..1293: note = Description of Artificial Sequence: Synthetic coding sequence
  source 1..1293: mol_type = other DNA
atgaagccttctctgttatgtaggccgctatcttgctttcttatgctgctgccttggccattagctacacttacatccactaccctctggcagtgtccaccaggcgaggaacctgatctcgaccccggtcagggaaccctctgccgtccctgcccaccaggcacttttagtgccgcatggggctcgtccccgtgtcagccacacgcccgttgctccctttggcgaagacttgaagcccaggtgggcatggcgacaagagataccctttgtggagattgctggccagggtggttcgggccatggggcgttcctagggtcccctgtcagccatgctcatgggctcctctcggaacccatggttgcgacgaatggggccgacgggcacgtcggggagtggaggtggccgcaggcgcttcaagcgggggtgaaactagacagcctggcaacggtacacgcgcaggtggaccggaagagaccgccgcacaatacgctgtgattgccatcgttcccgtattttgtctcatgggtttgctgggcatccttgtgtgcaatctgctcaagagaaagggataccattgcaccgcgcacaaagaggtgggcccaggccctgggggtggaggctcaggcatcaatcctgcatatcgcaccgaagatgcaaacgaggatactatcggagtgctggtgagactgatcacggaaaaaaaagagaatgcagctgccttggaggaattgctgaaggaataccactctaagcagctcgtccagacctctcaccgtcccgtttcgaagctgccgcctgcaccacctaatgtcccgcacatctgcccacaccgccatcacttacataccgtgcagggcctggcttctctttccggtccctgctgctccagatgctcccagaagaagtggcccgaagtgttgctctcacctgaagccgtggccgctaccacaccggtaccttcactccttccgaatcccaccagggtacctaaagctggggctaaggccggaaggcaaggcgagattacaattctctccgtcggacgctttcgtgttgccagaatccctgagcagcgcacatcctcaatggttagcgaggtgaaaacaatcactgaggccggtccatcctggggagatctgcccgacagcccacagcctggtctcccacctgagcagcaagccctcttgggatcaggcggttcgagaacaaagtggctgaagcctcctgctgagaataaggcagaggaaaacaggtacgtggtgaggctgagtgagtctaatctggtgatctag

SEQ ID NO: 238351 - DNA, 897 bp, synthetic construct
  misc_feature 1..897: note = Description of Artificial Sequence: Synthetic coding sequence
  source 1..897: mol_type = other DNA
atgcatcctggttgctgggtgcaggaagctctagtacttaatcatgaaggagacatgggattctccgaacctgggagtcacatctgtagagctcttggtgggctatctccgaaatgtacatgctcagggcctcttaggagacctggtctcccatctgcaggccgttcctggttctcttctggcgtgaggttgccgccttccccaggatcaggaccattttcctcgcccggtatcaacccagcatacagaaccgaggacgctaacgaggatactatcggcgtgctggtgcgcttgatcaccgaaaagaaggagaatgccgctgcactggaagagctgctaaaagagtaccactccaagcagctggtgcagaccagccacagaccagtgagcaaactgccaccagcacctccgaatgtgccacacatttgcccacatcgccaccatctgcatactgtgcaagggcttgcatccctgtctggaccatgctgcagccggtgttcccagaagaaatggcccgaagtcctcctgtcgcctgaggctgttgcagctacgacccctgtcccatccctgttgccaaaccccacacgagtgccaaaggctggcgctaaagccggtcgccagggagaaattactatcctaagtgtcgggaggtttcgcgttgcccgaattcctgaacaaagaactagctccatggtgtccgaggtcaagacgatcactgaggccggaccatcgtggggggacctgccggactctccgcagccaggcttaccgcctgaacagcaggctcttctggggtccggagggtctagaactaagtggctgaagccacctgctgagaacaaagcagaggaaaaccgctatgtggtgcggctgtcggaatcaaacctggttatttag

SEQ ID NO: 238352 - DNA, 306 bp, synthetic construct
  misc_feature 1..306: note = Description of Artificial Sequence: Synthetic coding sequence
  source 1..306: mol_type = other DNA
atgaagccatctctgttatgccgtccgcttagctgcttcttgatgctcttgccatggcccctggcaactcttacctccacaacactttggcaatgcccacccggtgaggagccagatttggacccaggtcagggaacactatgccgcccttgtccgccaggcactttcagtgcagcctggggatcaagtccttgtcagccgcacgcacgatgttccttatggagacgcttagaggcccaggtcggcatggccactcgagacaccctgtgtggcgattgttggcccggttggtttgggccatggtag

SEQ ID NO: 238353 - DNA, 4325 bp, synthetic construct
  misc_feature 1..4325: note = Description of Artificial Sequence: Synthetic coding sequence
  source 1..4325: mol_type = other DNA
atggctactgccgctgccgcagccgcagttatggcccctccaggctgccccggatcctgcccaaactttgcggtggtttgctcatttctggagcgatatgggccactcctagatctcccagaactgccgttcccagagttggagagagtcctccaagctcctcctccagatgtgggcaacggtgaggtgccaaaggaattggtggaactgcatctgaagctgatgaggaaaataggaaaatctgttacagctgatagatgggaaaagtaccttatcaagatatgtcaagaatttaacagcacatgggcatgggagatggagaagaaggggtacctagaaatgtcggtggagtgtaaactagcgctgctaaaatacctttgcgaatgccagttcgatgataatcttaagtttaagaatatcatcaacgaagaggacgccgatactatgcgattgcaacccattggtcgggacaaggacggcctgatgtactggtaccaattagatcaggaccacaacgtgcgcatgtatattgaagagcaagacgatcaggacgggtcctcatggaagtgtatcgtgagaaaccgaaacgagttggctgaaacactggcactgctcaaagctcaaatcgacccagtgctgctgaaaaacagtagccaacaagacaattcttctcgcgaaagtccctccctggaagatgaagaaaccaagaaagaggaggaaacaccgaagcaggaagaacaaaaagagtctgaaaaaatgaagtcagaggaacagcctatggatcttgagaatcgcagtaccgctaacgtgttggaggagacgacagtaaaaaaagagaaagaagatgaaaaagaactcgtgaaattacctgttattgttaagttggagaaaccactgcctgaaaatgaagagaaaaagattattaaagaagagagcgattcgttcaaggaaaatgtaaagcccatcaaggtggaagtgaaggaatgtcgcgctgatcccaaggacacaaaatcttcaatggagaagccagtggctcaggaacccgagcgaatcgagtttggagggaatataaagtccagccatgagattactgaaaaatctactgaggaaactgagaaactaaaaaatgaccagcaggcgaagatccccctgaagaaaagagagatcaaactcagtgacgatttcgatagccctgttaagggccctctttgcaagtccgttaccccaaccaaggaattcctgaaagacgagattaaacaagaggaggagacgtgcaagcggatctccacaatcacagcactgggccatgagggcaagcagctcgttaacggggaggtttcggatgaacgcgtggcaccaaacttcaaaacagaacccatcgagaccaaattctacgagacgaaagaggagtcttacagcccaagcaaggacaggaatattataactgagggcaacggcacagagagcctgaattcagtgataactagcatgaagacaggtgagttggagaaagagacggcgcctctgcgtaaagatgctgattctagcatttccgtactggaaatccattcccagaaagctcagattgaagaacccgacccaccagaaatggaaaccagcctggactcaagcgaaatggcgaaagatctgtcgtccaagacagccctgtctagcaccgaaagctgtactatgaagggcgaggagaaatcacctaagacaaagaaagataaacgacccccaatattggagtgtttagaaaagttggaaaagagtaaaaagacctttcttgataaggatgctcagaggctctcaccgatccccgaagaagtccctaagtcaactctagaaagcgagaagccgggaagtccagaggccgcagagactagccccccatccaacattatcgatcactgcgagaagctggcctccgaaaaggaggtggtagagtgtcagtctactagcaccgtgggtgggcaaagcgtgaaaaaggtcgacctcgagacactgaaagaagatagtgaatttactaaggtagaaatggataatctcgacaatgcgcagacatctggaattgaagagccctccgaaacgaagggcagcatgcagaaatcgaagtttaagtataaactggtgcccgaagaagagacaactgccagtgagaatacagagattacttcggaacggcagaaggaaggaattaagctaacaatacgcatctctagtaggaaaaagaaacccgacagccccccaaaagtacttgagccagaaaacaaacaagagaagaccgaaaaggaggaggaaaagacaaacgtcggcaggacccttcggagaagtccccgtatatcccggccaaccgctaaggtggcagagattcgcgatcagaaggccgacaagaagagaggggaaggggaggacgaggtggaagaagaatcaacggccctgcagaaaacagacaaaaaagaaatcctgaaaaaaagcgagaaggacactaattcgaaggtctcaaaagtgaagccaaaggggaaagtaagatggacgggaagtagaactaggggcagatggaaatactcttccaacgatgagagtgagggatcaggatcagaaaagtcgtcggcagctagcgaggaagaagaggagaaagagagcgaggaagctatccttgccgatgacgacgaaccatgcaagaaatgcggcctccctaatcatcccgaactgattcttctgtgcgattcttgcgacagtggctatcacactgcctgtctcaggccgccactcatgatcatcccagatggagaatggttttgccccccatgccagcacaagttgctttgcgaaaaactagaagagcagctacaggacttggatgttgcgcttaagaaaaaggagcgcgcagagcgcagaaaagagagattagtctatgtgggcatcagcattgagaatattatccctcctcaagagccagacttctccgaagaccaagaggagaaaaaaaaagattctaagaagagtaaggcgaacctcctcgaaaggagatcaactcggaccaggaaatgcatctcttacagattcgatgagttcgacgaggcaatcgatgaggctattgaagatgacattaaggaagcggatggtggtggcgtgggcagaggcaaggacataagcactattactgggcaccgagggaaggacatctcgacaatcttagatgaagagcgcaaggagaacaagaggccacagcgcgcagcagctgccaggcgcaagaaacgtcggcgtctcaacgacctggactcagattcaaatctagatgaagaagaaagcgaggacgaatttaagatttcagatggatctcaagacgagtttgttgtcagcgacgaaaacccggatgagagcgaggaagatcctccaagcaacgatgactctgacacagacttttgcagtcgaaggcttcgtcgccacccctcccgccctatgcgtcagtcccgcagactcaggcgaaaaactccaaagaaaaagtatagcgacgacgacgaggaagaggagtccgaagaaaatagccgggactccgagtcagattttagcgacgacttctctgatgattttgtcgagacccggaggcgaagatctagaagaaatcagaagcggcagattaactataaggaggactcggaatctgacggatctcaaaagtccctccgtcggggtaaggaaataagacgggtacataaaagacggctaagctcaagcgagagcgaggagtcctatctgagcaaaaacagcgaggacgacgagctggcaaaagagagcaaacgtagcgttcgaaagcggggtcgaagtacggacgagtacagcgaagccgatgaagaagaagaagaagaggagggtaaacccagcagaaagcgcctgcatcggattgagaccgatgaggaagagagctgcgataatgcacacggggacgcgaatcaacctgccagggattcacaacctcgggtattgccttctgagcaggagagtaccaaaaaaccttaccgcattgaaagcgacgaagaagaggactttgaaaatgtggggaaagttggcagtccactcgactatagtctcgtagatctgccttccaccaatggacagagccccggtaaagccattgagaacctcattggcaagcccactgagaaatcccagacacccaaggataactctaccgcaagtgcgtctctggcatcaaacggaacgagtggtggtcaagaggcaggtgcgccagaggaagaagaggacgaacttcttcgggtaaccgatctcgtcgattacgtatgcaattctgaacagcttta

SEQ ID NO: 238354 - DNA, 4233 bp, synthetic construct
  misc_feature 1..4233: note = Description of Artificial Sequence: Synthetic coding sequence
  source 1..4233: mol_type = other DNA
atggcgaccgccgcagctgctgcggctgtaatggcaccccctgggtgtcccggaagctgtcccaatttcgccgtggtgtgtagctttctcgaaagatatggtcccctgcttgatcttccagagctgccattccccgagctggaaagagtcctacaggcccctcctcccgatgtcggtaacggggaggtgcccaaagaacttgtggaactccatctgaagttaatgcgtaaaatcggcaaatccgtcaccgccgaccgctgggaaaaatatctcattaaatacttgtgtgagtgccagttcgacgacaatctaaagttcaagaacattattaacgaggaggatgcagacaccatgagactccaacctatcggcagagacaaagatgggcttatgtactggtaccagctggaccaggatcacaatgttcgtatgtacattgaggagcaagatgatcaggatggttcctcctggaagtgcatcgtgcgtaatcgaaacgagctagctgaaaccttggctctgctgaaagcccaaatagacccagttctacttaagaatagctcccagcaggacaacagcagccgggagtcacccagcctcgaagacgaggagaccaagaaagaggaagaaacaccaaagcaggaagaacagaaggagtcagaaaaaatgaaatcagaagaacaaccaatggatctggagaatcggtcaactgccaacgtgctcgaagagactactgtcaagaaagagaaagaggacgagaaggagctggtcaaactccccgtgattgtgaagctggagaaacccctgccggagaacgaagaaaagaagatcattaaggaggaaagtgattcctttaaggagaacgtgaaaccaattaaagtggaagtcaaggagtgtagggctgacccaaaagacacaaagtcttctatggaaaagccagtcgcacaggagccagaacgtatcgaatttggcggtaacataaagagctctcatgaaattactgagaaaagcaccgaagaaacagagaagcttaagaacgatcaacaggcgaaaatcccactaaaaaagcgcgaaatcaagttgagtgacgactttgacagtccagtgaagggacccctgtgcaaatcagtgacccccaccaaggaattcttgaaagatgaaatcaagcaggaagaagagacctgtaaaaggatctctactattactgccctcgggcatgagggcaagcagctggtaaatggggaagtctccgatgagagggtagcacctaacttcaagactgagccaatagagacaaagttctacgaaaccaaagaagagagctattccccgagtaaggatcgtaatattataactgaaggcaacgggactgagtccttgaacagtgttattacctcgatgaaaacaggagaacttgagaaggaaactgcccctcttagaaaggacgccgattcctctatcagcgtgctcgagattcactcacagaaggcccagatagaggagcctgatccccctgaaatggagaccagcttggattcttccgaaatggctaaggacctgtccagcaagacagcgctgagctcaaccgaatcttgcacaatgaaaggtgaagaaaaatcacctaagactaagaaggataagagaccacccatactggaatgcttggaaaaactggaaaagtctaagaagacatttctggacaaagacgcacaacgtttgtcaccaatcccggaagaggtacccaagtctactctggagtccgagaagccgggaagcccagaggcagctgaaacttctcccccaagcaatattattgatcattgcgaaaaactggcctcggaaaaagaggtcgttgagtgtcaatcaacgagcaccgtggggggacagtccgtaaagaaagttgatctggaaactctgaaggaggatagtgaatttacaaaagtagaaatggacaacctggacaatgcacaaaccagtggaattgaagagccatctgaaaccaaggggagcatgcagaagtccaagtttaaatacaaactggtgcctgaagaagaaaccacagcctctgagaacactgaaatcaccagtgagcgacagaaggagggcattaaactcactatccgaatttcttcacggaagaaaaagcctgactcaccaccgaaggtgttagaacctgagaataagcaagaaaaaacagaaaaggaagaagagaaaacgaacgtagggcgaaccctgcgtcgatctccacgtattagcaggcccacagccaaggttgccgaaatccgcgatcagaaggcagacaagaagaggggtgaaggtgaggacgaggtagaggaggagtctaccgctttacaaaagactgataagaaggagatcctcaaaaagtccgagaaagataccaactctaaggtgtcgaaggtgaagccgaaaggcaaagtccgttggaccggttctaggaccagaggccgatggaagtactcctctaatgacgaatcagagggaagcggaagtgagaagagctctgctgcaagcgaggaggaggaagaaaaggaatcagaggaggcaatcctggccgatgatgacgaaccatgcaagaagtgcggcctccctaaccacccggagttgatcctgctgtgcgattcctgcgattctggctaccatactgcctgtcttcggccacccctgatgattataccagacggtgagtggttttgccccccttgtcaacacaaactgttatgtgagaagctggaggagcagcttcaggaccttgacgtggccttgaagaagaaggagcgcgcagagaggcgtaaggagaggctggtatacgtcggtattagcattgaaaacatcatcccccctcaggagccagacttttccgaggatcaagaagagaaaaaaaaagattccaaaaaatctaaagctaacctcttggagagacgctcaaccagaaccaggaaatgcatatcttacagatttgatgaattcgacgaagccattgatgaagccatagaggatgatattaaagaggcggacgggggtggagttggacgaggcaaggatatcagcacaatcactggacacagagggaaagacatctctaccattcttgatgaagaaagaaaggaaaacaagagaccacaaagagctgctgccgcaagacggaaaaaacgcaggcgcctcaatgatttggatagcgacagcaatcttgacgaggaggagtctgaggacgagtttaaaatatcagacgggtcccaagacgaattcgtggtgtcagatgagaacccagatgagagcgaggaagatcctccatccaatgacgacagcgataccgatttttgctctcggaggttgcgcagacacccctcacggcctatgcgacaatcccgcagactcagacggaaaacccctaagaagaaatactccgacgacgatgaggaggaagagtcagaggagaactcgagagacagcgagagtgactttagtgacgatttttcagatgattttgtggagacccggcgtcggaggagtagacgcaaccaaaagagacagataaactataaagaggactctgagtctgacggcagtcagaaatctttgcgtagggggaaggagatacggagagtccacaagagaagactttccagctctgaaagcgaagagtcatatctgagtaagaactctgaggacgatgaactggccaaggagagcaagagatcagtccgtaagagagggagatctacagacgaatattcagaggccgatgaggaagaagaagaggaagaggggaagccaagccgaaaacggcttcatagaatagagaccgacgaggaagagtcttgtgataatgctcatggcgatgccaatcagccagcaagggacagccagccccgagtgcttccaagcgaacaggaatccacgaaaaagccatataggattgagtccgatgaggaggaggactttgagaatgtaggaaaggtcggcagcccactcgactattcgttagttgacctgccatccacaaatgggcagtctcccggaaaggctattgagaatctgataggcaagcctaccgagaagtcacaaacccccaaggataattctaccgcctccgccagtctggcaagcaacggcacgtccggcggacaagaggcaggcgcacccgaggaggaagaggacgagctgctaagggtgaccgacctggtggattatgtgtgcaactctgaacagctatag

SEQ ID NO: 238355 - DNA, 3570 bp, synthetic construct
  misc_feature 1..3570: note = Description of Artificial Sequence: Synthetic coding sequence
  source 1..3570: mol_type = other DNA
atgaaatcagaagaacagcccatggacttggagaatagatcgacagccaacgtcctcgaggaaaccacggttaagaaagaaaaggaggatgaaaaggaactggttaagctccccgtcatcgtgaagttggagaaaccattgccagaaaatgaagagaaaaagatcattaaggaagaaagcgacagcttcaaagagaatgtgaaacccatcaaagtcgaggtgaaagaatgccgtgctgaccctaaagacactaagtcaagcatggagaaaccggtagcacaagagcccgaaaggatagaatttgggggtaatatcaagagtagccacgagataaccgagaagtcaacggaagaaacagaaaagttgaagaacgaccaacaagctaaaatcccacttaaaaaacgcgagattaagctgagtgacgactttgacagtccagtcaagggacctttgtgtaagagcgtcacccccacaaaagagtttctcaaagatgagatcaaacaggaagaggaaacttgtaagcggatcagcacgatcacagcgcttggccatgaggggaagcagctcgttaacggtgaggtcagcgacgagagggtggccccaaattttaaaacagagccgatcgagaccaaattctatgaaaccaaggaagagtcctatagtcccagcaaggaccgtaacatcatcacggaaggtaatggcactgaaagcttaaactctgtcattacctcaatgaaaaccggagaactcgagaaggagactgcccctctgcgtaaagacgccgactccagcatttctgtactggaaatccattcacagaaagcacagattgaagagcctgatcctcccgagatggaaacatcgcttgatagctctgagatggctaaggacctcagctctaagaccgcgctgtctagcacggagtcgtgtactatgaagggggaggaaaaaagccctaagaccaagaaggacaagaggccacctatattggagtgcttagagaagctggagaagtctaaaaagacctttttagacaaagatgcccaacggctgagtccaattcccgaagaagtgcctaaaagtacccttgagagcgaaaaaccaggttcgcctgaagccgcagaaactagtcctcctagcaacatcatagatcactgcgaaaagctcgcaagcgaaaaggaggtcgtggaatgtcagagcacctctacagtgggtggtcagtctgtgaaaaaagtcgatctggaaacactgaaagaagactcggaattcacaaaggtagagatggacaacctggataatgcacagacaagcggaattgaagaacccagtgaaactaagggctcaatgcagaagagtaaattcaagtataagttggtacccgaagaggaaacaactgcttctgaaaacacagagattacctcggagcggcagaaagaaggcatcaagctgacaattcgtataagttcacgaaaaaaaaagcctgattcaccaccaaaagttctggagcccgaaaataagcaggagaaaactgagaaggaggaggaaaaaaccaacgtgggcaggactctccgaagaagcccccgtatctcaaggcccacagcaaaggttgccgaaatccgggatcagaaggccgataaaaagcggggagaaggagaggacgaggtcgaagaggagagcaccgccctgcagaagacagataagaaagagatattgaagaaaagcgagaaggatacaaacagtaaggtttcaaaagtcaaacccaagggtaaggtccgatggacaggaagtcgtacacgcggtagatggaaatatagttccaacgacgaatccgaagggtccgggtccgagaaatcttccgccgcttccgaggaggaggaggaaaaggagagtgaggaggctattctggctgatgatgatgaaccatgtaagaagtgcgggctacccaatcacccagagctcatattgctctgcgacagttgtgactcaggatatcataccgcttgtcttcggccaccgctgatgatcatccctgatggcgaatggttttgtcctccctgccaacacaagctcctgtgtgagaaacttgaggagcagctccaggacctggacgtggccctgaagaagaaagaacgggcagagcggcgaaaagagcgattagtctacgttggcatctctatcgagaacattattccaccccaagaaccagatttttccgaggatcaggaagaaaagaagaaagactcaaagaagtccaaagctaacctgctggagaggcggagtacccgcacaagaaaatgcattagttacaggtttgatgaatttgacgaagctatcgacgaggcaatcgaggatgatatcaaggaagctgatggaggcggtgtgggccgaggcaaggatatttcaacaatcacaggacatcgcggaaaagacatcagtactattttggatgaggagcggaaggaaaataagaggccccagagggccgctgccgctaggaggaagaagcgacgccgtctgaacgatctagactccgattccaatttagatgaggaggaaagcgaggacgaattcaagatttcagatggttcccaggatgagttcgttgtgtcagacgagaacccggacgagtccgaggaggatcctccttctaacgacgatagcgatactgatttctgctcccgcaggctgcgtaggcacccatcaagaccaatgcgccagagccggagattacggaggaagacacccaagaagaagtatagcgatgatgatgaagaggaggagtctgaagagaatagtcgggattcagaatccgatttctccgacgatttctcggacgattttgtcgagacgcggcgaaggcggtcacgacgaaaccaaaagcggcagattaattacaaggaggacagcgaatctgatggaagtcagaaaagtctccgcaggggtaaggaaatccgcagagtgcacaagcggaggctcagcagctccgaaagcgaagagtcgtatttaagcaaaaatagcgaggacgatgaactggcaaaagagagcaagagatccgtaaggaagagaggtcggtcgactgatgaatattctgaggctgatgaggaagaggaagaggaagaaggcaaaccttcccgcaagcgtctacaccgcatcgagactgacgaggaggagtcctgtgacaatgcccacggcgacgctaatcagcctgcccgagactctcagccacgggtgctccctagtgagcaggagagtaccaaaaaaccgtaccgtattgagagtgatgaggaggaggactttgagaatgtcgggaaggtgggatctcccctggactattccctggtggatctgccctccacgaacggccagagtcccggaaaagctattgagaacttgatcgggaaacccactgagaaatcccagacccctaaagacaatagtaccgcatctgcaagtttggccagtaatgggacttcaggaggccaggaagcgggtgcgccagaagaagaggaggacgagttactgcgagttaccgatctggtggattatgtgtgtaatagcgaacagctgtag

SEQ ID NO: 238356 - DNA, 2412 bp, synthetic construct
  misc_feature 1..2412: note = Description of Artificial Sequence: Synthetic coding sequence
  source 1..2412: mol_type = other DNA
gaaacactcgctctactgaaggcccaaatagatccagttctactaaagaatagttctcagcaggataatagctcccgggagtctccgtctctggaggatgaggagactaagaaagaagaggaaaccccaaaacaggaggagcagaaagagagtgagaagatgaaaagtgaggagcagccaatggatcttgagaaccgaagcaccgctaatgtgcttgaagagacaacagtgaagaaggaaaaggaagacgagaaggaactagtcaagctccctgtgatagtgaagcttgagaagccccttcccgaaaatgaagaaaaaaaaatcatcaaggaggagagcgactccttcaaggagaacgtaaaacccattaaggttgaagtgaaggagtgtagagctgacccgaaggacacaaagtctagtatggagaagcctgtagctcaggaacccgagcgcattgagtttggtggtaatattaagtcttcacacgagataactgagaagtctactgaagaaacagagaagctcaagaatgatcaacaggcaaaaattcccctaaagaaacgggagatcaaactgagcgacgactttgattctccagtgaaaggaccactgtgtaaaagcgtgactccaacgaaggaattcttgaaagatgaaattaaacaggaggaggagacctgtaaacggataagtactatcacagctctggggcatgagggaaagcagttagtgaatggagaggtctccgacgaaagagtggcccctaacttcaagactgaaccgatcgagaccaagttctacgagactaaagaggaaagttacagtccctcaaaggatcggaatatcatcaccgagggaaacggaaccgaatccctgaatagcgtgattacaagcatgaaaaccggagaactcgagaaggagacagccccactgcggaaggacgctgactcttccatctctgtgctcgagattcactctcagaaagcacagatcgaagagcctgatcccccagagatggagacttcactggacagctctgaaatggctaaagacctcagctcaaaaacagccctctcaagcactgagagctgcacaatgaaaggcgaagagaagtcacccaaaaccaagaaagataagcggcctcccatcctggagtgcctggagaagctggagaagagcaagaagacctttcttgacaaggatgcccagagactcagtcccatccctgaggaggtgccgaaaagcacccttgagagtgagaagcccggttcaccagaggccgcagagacttctcccccatcaaatattattgatcattgcgagaaactggcgtctgaaaaagaggtcgtcgaatgtcaatcaacgagcaccgttggcggacaatccgtaaagaaagtagatctggagacgcttaaggaagacagtgagtttacgaaggttgagatggataaccttgacaacgcacagaccagcggaatcgaagagcccagcgagactaaggggagcatgcaaaagtccaagttcaaatacaaactggtgccggaagaggaaacgacagcaagcgagaatactgaaattacaagtgaaaggcagaaggagggcattaagcttacaattcgaataagttctcggaaaaagaagcctgacagccctcctaaagtattggagccagagaataaacaggagaaaaccgagaaagaggaagagaaaacgaacgtgggcaggaccttgaggcgcagcccccgaatcagcagaccaacagcaaaagtagccgagatccgggaccaaaaagcggataagaagaggggtgaaggagaggatgaggttgaagaagaatctactgctctccagaagacagacaagaaggaaatcctgaagaaatccgagaaagatacaaacagcaaggtttctaaagtgaaacctaaaggaaaagtacgatggacaggcagccgcacaaggggccgttggaagtattcctctaatgacgagagtgaaggctcaggctccgagaaatccagcgctgcttctgaagaggaagaggagaaagaaagtgaagaagcaattcttgctgacgatgacgaaccgtgcaagaaatgcggattgccaaatcacccagaactgatattactttgcgactcctgtgattctgggtaccacacagcctgcctccgcccaccccttatgattatacctgatggtgaatggttttgtcctccatgtcaacacaagctgctgtgcgaaaagctggaggaacagctacaagacctggatgtcgctctgaagaaaaaggaaagagctgagcggagaaaggagagactggtttatgtcggaatttccattgagaacatcataccccctcaggagccagacttttcggaagaccaggaagagaagaaaaaagatagcaaaaaatag

SEQ ID NO: 238357 - DNA, 2109 bp, synthetic construct
  misc_feature 1..2109: note = Description of Artificial Sequence: Synthetic coding sequence
  source 1..2109: mol_type = other DNA
gcaactgcggcagctgctgccgctgtcatggcacctccaggatgtcctgggtcatgtcctaacttcgccgtggtctgcagctttctggagcggtatggtcctctgctggatcttcctgaactgcctttccccgagcttgagcgcgtgctgcaagctccccctcctgacgtgggcaacggtgaagtgccaaaggagctggtcgagctgcaccttaagctaatgcgaaagatcggaaagtcagtgaccgcagatcgttgggagaagtacctgatcaaaatttgccaggaattcaactcaacttgggcttgggaaatggagaaaaaaggctacctcgaaatgtcggtggagtgcaaactggccctgttaaaatacctctgtgagtgtcagttcgacgataatctcaagttcaaaaatattattaatgaagaagacgctgatacgatgcgcctgcagccgatcggaagggacaaggatggcttgatgtactggtatcagctcgaccaagaccacaatgttcgcatgtatatagaagaacaggatgaccaggacggttcttcttggaagtgcattgtgcgtaatcggaatgagttagcagagacattggctctgctgaaggctcagatcgatcccgtcctcttgaaaaacagctcccaacaggacaacagtagtcgggaaagcccttctctggaggacgaagaaactaaaaaagaagaagagactcccaagcaagaggaacagaaagaaagcgagaaaatgaagtctgaggagcagccaatggacctggagaaccgctccaccgcaaacgtgttggaggaaaccactgtaaagaaagaaaaagaagatgagaaggagctcgttaaactccctgtgatagttaagttggaaaaaccactgccagaaaacgaagagaagaagattatcaaggaagagtctgatagctttaaagagaacgtgaaaccaatcaaagtggaagtgaaggaatgcagagccgatcctaaggacactaaatcatccatggagaaacctgtggctcaggagcccgaacgaatcgaattcggcggtaatattaagtcttctcatgaaattaccgagaagtctactgaggagaccgaaaagttaaagaacgatcaacaggctaagattcctctcaagaaacgggagatcaagctgtcagacgatttcgacagccctgtcaagggtcccctgtgcaagtcagtgaccccaactaaggagtttttgaaggatgagatcaagcaagaagaggaaacttgtaaaaggatctcaactatcacagctctgggtcacgagggcaaacaactcgtcaatggcgaggtgtccgatgaacgtgtggcacctaacttcaagaccgagccaatcgagactaaattttatgaaaccaaagaggaatcctattcgccgtcaaaagataggaacattattaccgagggcaacggaaccgaatctctgaactccgtgatcacgagcatgaagacaggagagctcgagaaggaaaccgctcccctgcgtaaggatgccgatagctcaatctctgttctggaaatccactctcagaaggcacagattgaggaacccgatcccccagagatggaaacttcactggactctagtgagatggcgaaagacctgtccagtaaaactgccctgtctagtacggagagttgcactatgaaaggtgaggagaagtcacccaagactaagaaggacaagcgccctccaattctggagtgtctggagaagctcgagaagtctaagaagaccttccttgataaagacgcccaacggctttcacccatcccagaggaggtgcccaagtcaaccttggaaagcgagaaacccggttcacccgaggctgccgaaacttcgcccccttcaaatattatagaccattgcgagaagctggcgagtgaaaaggaggtggtggaatgtcagagcacaagcaccgtcggcggtcaaagtgtgaagaaagtggacctcgaaacactcaaggaggactctgagttcaccaaggtcgaaatggacaatctggacaacgcacagacctcaggaatagaggaaccttctgagactaaaggatcaatgcagaaatag

SEQ ID NO: 238358 - DNA, 831 bp, synthetic construct
  misc_feature 1..831: note = Description of Artificial Sequence: Synthetic coding sequence
  source 1..831: mol_type = other DNA
gaaccctgtaaaaagtgcggactgccaaaccacccagaacttatcttgttgtgcgacagctgcgattctggctatcacactgcatgtctgaggccccctctgatgattatccccgacggagaatggttttgcccaccttgtcaacacaaactcctctgcgaaaagctcgaggagcagctgcaggatctggatgtggcccttaagaaaaaggaaagggcggagcggaggaaggagcgcctggtttatgtgggtatttccatagagaacatcatacctccccaagaacctgatttcagcgaggatcaagaagaaaagaagaaagacagcaagaaatctaaagccaacctgctggaacggaggtccaccagaacacgaaaatgcatttcttacagatttgatgaattcgatgaggcaatcgacgaggcaattgaagatgatatcaaagaagccgatggcggaggcgtagggagagggaaggacatatcaaccataactgggcatagggggaaagatataagcaccattctggatgaggaacgaaaagaaaacaaaaggccacagagagctgctgccgcaagaaggaagaagaggcggcgactcaatgatttggactccgactctaatctggatgaagaggagtcagaagacgagtttaaaattagtgacgggagtcaggacgagttcgtagtgagcgacgagaatccagacgaatctgaggaagatcctcccagtaatgatgacagtgatactgatttctgtagtagacgcttgaggaggcacccaagcagaccaatgaggcagtcaaggcgactgagaagaaaaacaccatag

SEQ ID NO: 238359 - DNA, 1029 bp, synthetic construct
  misc_feature 1..1029: note = Description of Artificial Sequence: Synthetic coding sequence
  source 1..1029: mol_type = other DNA
atggcccaggttctgatcgtcggggcagggatgaccggttctctctgcgctgccttgcttaggaggcagactagtggacccctgtatcttgctgtttgggacaaagctgaggatagtggaggtagaatgaccactgcctgctctcctcacaatccccagtgtacagccgatctgggcgctcaatatattacttgtacaccacactacgctaagaaacatcaaaggttctacgacgagctgctggcttatggggtgctacgcccactgtcctcacccattgaaggaatggtgatgaaggaaggagactgtaattttgtggctccacagggaatatcatctattatcaagcattatttgaaagaaagcggcgctgaggtatactttagacatcgcgttacacagattaatctcagagacgataaatgggaggtctccaaacagacaggttccccggaacagttcgacctcatagtattaacaatgccagtccccgagattctgcagctgcagggagacatcactacactaatcagcgagtgccagagacagcagttggaggctgtcagctacagtagtagatatgccctcggactgttctatgaagcgggtacaaagatagacgtgccctgggccggtcaatacatcacaagcaacccctgcatccgttttgtgagcatcgacaacaaaaagagaaatattgaatctagtgagattgggcctagtctggtcatacatacaactgtgccattcggagtcacatatctcgagcactctatagaggacgtgcaggaactggtcttccagcagctggagaacatactccctggactcccacagccaatcgcaaccaaatgtcagaaatggcggcactcccaggttacaaatgcagccgctaattgtccgggacaaatgactctccaccacaaaccatttctggcctgtggcggtgacgggtttacgcagtctaatttcgacggctgtataacctccgccctgtgcgtgctagaggccctgaagaactacatttag

SEQ ID NO: 238360 - DNA, 948 bp, synthetic construct
  misc_feature 1..948: note = Description of Artificial Sequence: Synthetic coding sequence
  source 1..948: mol_type = other DNA
atggctcaagtcctcatcgtcggcgctggcatgactggttctctgtgcgcagctctgttgcgacgccagacaagtggtcctctgtacttggcggtttgggataaggccgaagattctggcggacgcatgaccactgcctgttcaccccataaccctcagtgtacagcagacttaggagcgcaatatatcacgtgcacaccccattatgctaaaaaacaccaacggttctacgatgagttactggcctacggcgtgcttagaccattgtccagtcccattgaaggcatggtgatgaaggagggcgactgtaacttcgtggcaccacaaggaatttcatccattatcaagcattatctcaaagaatcaggggctgaggtgtattttcgacatcgggtgacgcaaattaatctccgggatgacaaatgggaggtgtcaaagcagaccggatcccccgagcaatttgacctgatagtgctaaccatgccagtacctgaaatcttgcaactgcagggcgacatcaccactttgatcagcgagtgtcagagacagcagctggaagcagtgagctactcctctcggtacgctctcggacttttctacgaagctggcaccaaaatcgacgtaccctgggccggtcaatacataacaagtaacccatgtataaggtttgtgtccatagacaacaagaaacggaatattgaaagctcagagattggcccaagcctggtgattcacactaccgttccttttggcgtgacctacctggagcacagcatcgaggatgttcaggagctcgttttccagcagctcgagaacatactccctggcctgccacagcctattgctaccaaatgccagaagtggaggcattctcaggtcccatctgctggagtcatccttggctgcgccaagtccccgtggatgatggcaattgggttccccatttag

SEQ ID NO: 238361 - DNA, 699 bp, synthetic construct
  misc_feature 1..699: note = Description of Artificial Sequence: Synthetic coding sequence
  source 1..699: mol_type = other DNA
atggcccaggtcctcattgtgggtgcaggcatgacaggatctctttgcgctgcacttctgcggagacagacctccggcccactctacctagcagtatgggataaggcggaggacagcggcgcagaggtgtactttcggcatcgtgtaacccaaatcaatttacgcgatgacaaatgggaagtcagcaagcagaccgggtcgcctgagcaatttgacctgatagtccttactatgccagtgccagaaatactgcagctccaaggagacataacgacgctgattagtgaatgtcaacggcagcagctcgaggcagtgtcgtatagttcgcgatatgctctgggtctgttttacgaggctggcacgaaaatcgatgtgccctgggccggacaatatattactagcaacccctgcattcgatttgtcagtatcgataataaaaagcgcaacattgaaagtagtgagattgggccatcgctagtgatacacacaactgttcctttcggggttacttatctcgagcactccattgaggatgtccaggaattagtttttcagcaactcgagaacatcctgcctggcctgccccagcctatagctacaaagtgccaaaagtggcgccactctcaggtgccaagtgccggagtgatattggggtgtgcaaagagcccgtggatgatggctattggttttccaatctag

SEQ ID NO: 238362 - DNA, 1221 bp, synthetic construct
  misc_feature 1..1221: note = Description of Artificial Sequence: Synthetic coding sequence
  source 1..1221: mol_type = other DNA
atggacggatggcgaaggatgccaagatggggcctccttctgctgctttggggatcatgtacctttggcttgcctacagatactacaacatttaagcggatctttctcaagagaatgcccagtatccgcgaatcgctgaaagagaggggagtggacatggcacgcctggggcctgagtggagtcagcccatgaagagacttacgttgggaaacacaacttcttctgtaatacttactaattatatggacacccagtactatggagagatcggcatcggcaccccaccacagaccttcaaggtggtgttcgacacggggagctcaaacgtctgggtgccttcaagtaaatgcagccggttgtacacagcttgcgtctatcacaaattatttgacgcctcagactcttcctcatacaagcacaatggtacagagctgaccttacggtactccaccggaaccgtcagcggctttctctcacaagatatcataacagtaggcggaatcaccgttacgcaaatgtttggcgaggttacagaaatgcctgctctacccttcatgctggcagagtttgacggtgttgtcggaatgggtttcattgaacaggctatcggacgggttactcccatattcgataacattattagtcagggtgtgctgaaggaggatgtgttttccttttattataaccgagatagtgagaattcccagtctttaggaggtcagattgtgctgggcggtagcgacccgcaacattacgaggggaactttcactacatcaatctaatcaaaacaggagtgtggcagattcaaatgaaaggtgtttctgttgggtcctccacccttctgtgcgaggacggctgcctggcactcgttgacaccggagctagttacatttctgggtccacatcaagcatcgaaaaattgatggaggctctgggggcaaagaaacgcctctttgactatgtcgttaagtgtaacgagggtcctacacttcctgatatctcttttcaccttggagggaaggagtacacactaacgtccgccgattacgtgtttcaggagtcttactcttcaaaaaaactgtgtacactggccattcatgctatggacatcccaccaccaacagggccaacctgggcactgggggcaaccttcatccgaaaattttacactgagttcgatagacggaacaataggatcgggttcgctctggccagatag

SEQ ID NO: 238363 - DNA, 1212 bp, synthetic construct
  misc_feature 1..1212: note = Description of Artificial Sequence: Synthetic coding sequence
  source 1..1212: mol_type = other DNA
atggatggttggcggcgtatgcccagatgggggcttctgttgctcctgtggggatcctgtacatttgggctccctactgacacaaccaccttcaaaaggatcttcctgaagaggatgcctagcatccgggagagtcttaaggagcgaggggtcgacatggcccgactcggcccagaatggagccaaccaatgaagcggcttactctggggaacaccacttcttcagttatcttgaccaactatatggatacccagtactatggggaaatcggcatcggcactcccccacaaacatttaaggtggttttcgatacaggctcctccaatgtgtgggtcccatctagtaagtgttcccggctgtataccgcgtgtgtttatcacaaactctttgatgcatcagactcctcctcctataagcacaatggcacggagctgactctgcgatattcgactggcacggtgagcggttttcttagtcaggatatcattaccgtcgggggtataaccgtaacacagatgtttggcgaggtcaccgagatgcctgctctcccattcatgctggccgagtttgacggagttgtcggcatgggattcatcgaacaggcgatcggcagggtcactcccatcttcgataatataatcagtcaaggggtgctaaaggaggatgttttctccttctactacaaccgtaattcccagagcctcggcggacagatagtcctcggcggatcggatccccagcactacgagggcaactttcattacattaatctgatcaagaccggggtctggcagatacaaatgaagggcgtgagtgttggaagcagcaccctgctgtgcgaagacggatgtttagcgctagtggacacgggcgctagctatatatctgggagcacatccagcatcgagaagctcatggaagccttgggggctaaaaaaagacttttcgattatgttgtcaaatgcaacgaaggaccaaccctgccggacatcagcttccacctgggtgggaaggagtacaccttgacttctgctgactacgttttccaggagtcctactcgtctaagaaattatgtaccctagcgattcacgcgatggacatcccacccccaacaggacccacctgggctctgggcgctaccttcattcgcaaattttacaccgagttcgacagacgtaataatcgcatagggttcgctctcgcgagatag

SEQ ID NO: 238364 - DNA, 978 bp, synthetic construct
  misc_feature 1..978: note = Description of Artificial Sequence: Synthetic coding sequence
  source 1..978: mol_type = other DNA
atggatactcaatactacggcgagatcggcatcgggaccccccctcagacattcaaagttgtgtttgatacgggtagttccaatgtatgggtgccttcctctaaatgttcccggctttatactgcctgtgtttatcataaactctttgacgccagcgattccagttcgtataagcataacgggactgaactcactctgcgctattccacaggaactgtcagtggattcctgtcgcaggatatcatcacagtcgggggtatcactgttacacagatgttcggggaagtcaccgagatgcctgccttgccatttatgctggccgaattcgacggggttgtcggcatggggttcattgaacaagctatcggcagagtgactcccatatttgacaatatcatttcgcagggcgtgctgaaggaggacgtcttctctttctactacaaccgcgacggcgaaaactcacaatctcttggcggacagatcgtcctggggggtagcgatcctcagcactatgaaggaaattttcactacatcaatttgattaaaacaggggtgtggcaaatacaaatgaaaggtgtaagcgtcgggtcaagtacgctcctgtgtgaggacggctgcctggcccttgttgacactggagccagctatatctccggtagcacttcaagtattgagaagctgatggaggccctgggtgcaaagaaacgcctgttcgattacgtggttaagtgtaacgagggtcccactctacctgacatttcattccatttgggtgggaaggagtacacactgaccagtgcagattacgtgtttcaggagtcctatagtagcaagaaactttgcacgctggcaatccatgccatggatattccaccacctaccggacccacttgggccctgggagcaaccttcatcagaaagttttataccgagtttgaccgcaggaacaataggattggcttcgctctagcacggtag

SEQ ID NO: 238365 - DNA, 1284 bp, synthetic construct
  misc_feature 1..1284: note = Description of Artificial Sequence: Synthetic coding sequence
  source 1..1284: mol_type = other DNA
atgagtaaaggccttccagccagacaggatatggagaaggagcgcgagactctccaagcgtggaaagaacgtgttgggcaggaactggaccgggtagtggccttctggatggagcacagccacgaccaagagcacggtggcttttttacctgcttggggagagagggtagggtgtacgatgacttgaagtacgtgtggcttcagggcaggcaagtgtggatgtactgcagactatatcggactttcgagcggtttagacatgctcagttgcttgatgctgccaaggctggcggtgagtttcttctgcgatacgctcgcgtcgcccctcctgggaagaaatgtgcatttgtcctcactcgagacggtagacccgtgaaggtccagcgcacaatcttcagcgagtgcttctacaccatggcaatgaatgagctttggagggccacaggcgaggtcaggtaccaaacagaggccgtggaaatgatggaccagatcgtccactgggtccaagaagacgcatccggcttgggacgccctcagcttcagggtgctcccgcagccgagccgatggctgtgcctatgatgctgttgaacctcgttgagcagctaggagaagctgacgaagaactggctggcaagtacgcagaactgggcgactggtgcgccagaagaatcttacagcacgttcagagggacggccaagctgtgctagagaacgtgtcggaaggcggtaaggagctgcctggatgccttgggaggcaacaaaacccaggccacacgcttgaggctggttggttccttctgcgccactgcatccgcaagggcgacccagagctcagagcgcatgttatagacaaatttcttctgcttccttttcactcgggctgggatcctgaccatgggggactgttctacttccaagacgccgacaatttttgccctacacagctggaatgggcaatgaagctgtggtggccccactctgaggcgatgatagcatttttaatgggctactcagattcgggcgaccctgttcttcttaggctcttttatcaagtggcagaatatacgttccggcagttccgggacccagaatacggtgaatggttcgggtacctgagccgggaggggaaggtggcactgtcaataaagggaggacccttcaaagggtgtttccacgtgcctaggtgtttggcaatgtgcgaggagatgttaggtgcactgctgtctcgccctgcccctgctcctagccccgcacctacgcctgcatgtcgaggcgcagaatag

SEQ ID NO: 238366 - DNA, 765 bp, synthetic construct
  misc_feature 1..765: note = Description of Artificial Sequence: Synthetic coding sequence
  source 1..765: mol_type = other DNA
atgagtaaaggactaccggcaagacaggatatggaaaaggagagagaaacactgcaggcgtggaaggagcgcgtcggccaggagctggatcgagtcgtagctttttggatggagcacagtcacgaccaggaacacgggggattttttacctgccttggcagagagggccgagtctatgacgatttaaagtacgtatggcttcagggacgacaggtgtggatgtactgccgcctctaccgaacatttgaacgctttagacacgcacagttgctggatgctgcaaaggcaggcggagagttcctcctgcgttacgcacgcgtggcgcctccagggaaaaagtgtgctttcgtcctgacccgcgatggccgtccagtcaaagtccagaggacaatcttctctgagtgcttttacacaatggccatgaacgaactctggagggctaccggggaggtgcggtatcagaccgaagctgtagaaatgatggaccagatcgtgcactgggtccaggaagacgcatccggtctgggcagaccacagttgcaaggagctcctgctgcagaacccatggctgtgcccatgatgttgttgaaccttgtcgagcagctcggcgaggctgacgaagagctggctggcaaatacgccgagctcggggattggtgtgctcggagaattctacagcacgttcaggcaactcggtggaagcctgcgggattttgtagcgtcatagccttcggcaaggctaccccgaactttgagcctacctag

SEQ ID NO: 238367 - DNA, 2355 bp, synthetic construct
  misc_feature 1..2355: note = Description of Artificial Sequence: Synthetic coding sequence
  source 1..2355: mol_type = other DNA
atggcgcaactcctgaattcaatactgtcagttatcgacgtctttcacaagtatgcgaaaggaaacggagattgtgccttgctgtgcaaggaggaacttaagcagctgctcctcgccgagtttggggacattctgcaacggccaaatgaccctgagacagttgagacaatcctgaatcttctagaccaggaccgcgacggccacatcgattttcacgagtacctactccttgtgtttcagctcgtgcaagcatgttaccataaattggataataaaagccacgggggaagaacgagccagcaagagagaggtcaggagggggcacaggactgcaaattccctggaaacactggcagacagcatcgtcaacggcatgaagaggagaggcagaactctcatcatagtcagcccgaaagacaagacggcgactcacaccatgggcagcctgagcgacaggacagggacagccatcacgggcagagcgaaaagcaggaccgcgactctcaccactcccaaccagaacgacaggacagagactcacaccacaatcagtcagaaaggcaagataaagacttctcattcgatcagtcggagcggcaatcccaagacagtagcagtggaaagaaggtcagccacaaatccacatctgggcaggccaagtggcagggacatatttttgccctgaaccgctgtgagaagcccattcaggattcacattatgggcaatccgagcggcacacgcagcagagcgagacccttgggcaggcgagtcactttaaccaaaccaatcaacaaaaatctggatcctactgtgggcaaagtgagcgcctaggccaggagcttgggtgcggccagactgacagacaggggcagtcatcccactacggccaaacagaccgtcaggaccagtcttatcattacgggcagaccgatcgccagggccagtcatctcactattctcaaacagatcgacaaggccagtcctcccactattcccagcccgatagacagggacaaagttcccattatggacaaatggacaggaaaggtcagtgctatcattacgaccagacgaataggcagggacaggggagccattactcccagcctaacaggcaggggcagtctagtcactacgggcagcctgatactcaagatcaaagtagccattacggacagacggacagacaagatcagagttcccactatgggcagacagagcgtcaggggcagtccagccactatagtcaaatggacagacagggccagggttcgcactacggccagacagacaggcagggccagagctctcactacggccagcctgataggcaaggtcagaactcccactatggacagaccgatcggcagggccagtcatcccattacgggcagacagaccggcagggtcagagcagccactattcccagccagataagcagggacaaagctcccattacggtaaaatagatcggcaagaccagagctaccactacggtcagcctgacggacagggacaatcctcccactacggccaaactgatcgccaagggcaatctttccactacggacagcccgatcggcagggacagagttcccattacagccaaatggaccgtcaaggccagtcgtcccactatgggcagacggacagacaaggtcagtcctctcactatgggcaaacggacaggcaaggacagtcctatcattacgggcagaccgataggcagggacagagctcccactacattcagagccagacgggggaaatacaggggcagaacaagtacttccagggcaccgaaggcacccgaaaggccagctacgtagagcagtcaggccgatccgggcgtctttcccaacagacgccaggtcaagaggggtatcagaaccagggacaaggcttccaatcgcgagattctcagcagaatggccatcaagtttgggagcctgaggaagactcacaacaccaccagcataagctgctcgcgcagatccagcaggagcgccctctgtgtcacaaaggcagagactggcagagttgcagttccgagcagggccaccgccaggcacagactagacagtcacatggcgagggactttcccattgggccgaggaggagcaaggtcaccagacttgggatcggcactcccacgagagccaggaaggcccatgcgggacccaggatagaagaactcacaaagacgaacaaaaccatcagcgtcgagataggcagacccacgaacacgagcaatcgcatcagagaagggaccgccagactcacgaagacaaacaaaatagacagcgtcgggaccggcagacccatgaggatgagcagaaccaccagcggtag

SEQ ID NO: 238368 - DNA, 1320 bp, synthetic construct
  misc_feature 1..1320: note = Description of Artificial Sequence: Synthetic coding sequence
  source 1..1320: mol_type = other DNA
atggatcgcaagggccagtgctaccactatgatcagaccaaccgccaggggcaagggtctcactatagccagccaaacagacaggggcagagttcacactatggacagcccgacactcaggaccaaagtagtcactacggccagaccgacagacaagaccagtcgtcccattatggccagaccgaacgccagggtcaatccagtcattattcccagatggatcgtcagggtcaggggtcccattacggccaaaccgatagacaggggcaatctagtcactacggacagcccgatagacaaggccagaactctcactacggacagacagatcgccaaggccaaagctcccattacggccaaaccgaccggcaggggcagtcgtcccattactcgcagcctgataagcagggacagagttctcactacggcaaaatagaccgacaggaccaaagctatcactatggacagccagacgggcaggggcagagtagccactatggccagactgacaggcaggggcagagttttcactacggtcagcctgaccgtcagggccagtcttcccactacagccagatggaccgccaggggcagtcaagccactacgggcagaccgacagacagggccagagctcacattatgggcaaaccgaccgtcaaggccagtcttaccactacggccagactgaccgacagggacagagctctcattacatccagtcacagaccggggaaatccagggccagaacaagtatttccaagggactgaagggaccaggaaagcgagctatgtcgaacagagcgggagatcagggcgtctgtcgcagcagacacctgggcaagaggggtatcagaaccaaggccaaggatttcaatcaagggatagccagcaaaacggtcaccaagtgtgggaacccgaggaagattcgcagcatcaccaacacaagctgttagctcagattcagcaagaaagacccctgtgtcacaagggacgggactggcagagctgtagcagtgagcagggacatagacaggctcagacccggcagtcccacggggagggattgtctcactgggccgaggaggagcagggccatcaaacttgggacagacatagccacgaatcccaggaaggaccctgcggcacccaggatcgacgcacccacaaggacgaacaaaatcatcagcggcgagataggcagacacacgaacacgaacagagtcatcagcgcagagatcgccagactcacgaagataagcagaaccggcagcgcagagaccgccagacccacgaagatgagcagaatcatcagaggtag

SEQ ID NO: 238369 - DNA, 1065 bp, synthetic construct
  misc_feature 1..1065: note = Description of Artificial Sequence: Synthetic coding sequence
  source 1..1065: mol_type = other DNA
atggaggtcgaagcagtgtgcggcggtgctggagaggtggaagcacaagattcagaccccgcacccgcattcagcaaggcccctgggtcagctggccactatgaactcccgtgggtcgagaaatatcgacccgttaagctcaatgaaatagtgggaaatgaggataccgtctccagactggaagtgtttgcaagagaggggaacgtaccgaatatcattattgcaggcccaccagggactggtaagaccacaagcatactttgccttgcacgggcattacttggacctgccctgaaggacgcaatgctcgaactgaacgccagtaacgacaggggaatagatgtggttcggaataagattaagatgttcgctcagcagaaggttaccctcccaaagggcagacataaaatcatcatcctggacgaggcggatagcatgacggacggtgcacagcaggccttaaggcgaacgatggagatctattccaagacgactcggtttgctttggcttgcaatgcctcagacaagattattgagcctattcaatctcgatgtgccgtgctccgctataccaaactcactgacgcccagatcttaacacgacttatgaatgtgatcgaaaaagagcgagttccctacacagatgatggcctggaagctatcattttcaccgcccagggcgacatgcggcaggccctgaacaatctacaatctactttttccgggttcgggttcataaatagtgagaacgtctttaaggtttgcgatgaacctcatcctctgttggtgaaagaaatgatacagcactgcgttaatgcaaatatagacgaggcatacaagatcctggcccatctctggcacctggggtatagccctgaagatattatcgggaacatatttagggtctgcaagacgttccagatggcagagtatctgaagctggagtttatcaaggaaatcggctacacacacatgaagatagccgaaggggtcaatagccttctccaaatggccggtctgctggctaggctctgtcaaaagaccatggcccctgtggcaagctag

SEQ ID NO: 238370 - DNA, 963 bp, synthetic construct
  misc_feature 1..963: note = Description of Artificial Sequence: Synthetic coding sequence
  source 1..963: mol_type = other DNA
atggaagtcgaggcagtgtgcggaggtgctggcgaggtggaggcacaggacagcgaccccgctcccgctttcagcaaagccccaggctcagcgggacactatgagctgccatgggtggagaagtacagacctgtcaaattaaatgaaattgtcggtaacgaggataccgttagtcggctggaagttttcgccagagaaggcaatgtgccgaatatcattatcgctggcccacctggaacgggcaaaactacgtcaatactgtgtttggccagggccctcctcggaccagctttgaaagatgccatgctcgaactgaatgcaagcaatgatagcatgacagacggagcacagcaggcattaaggcggaccatggaaatctattctaaaacaacaagattcgctctcgcctgcaacgcatcggacaagatcatcgagcccattcagtctaggtgcgccgtgcttagatacacaaagctgacagatgcccagatcttgacacggctcatgaacgtcattgaaaaggaaagggtaccatatactgacgatggcttggaggccattatctttacagcacaaggcgatatgaggcaggccctgaacaatcttcaaagtacattctctggctttggctttatcaattccgaaaatgtctttaaagtgtgcgacgaaccacatcctctgttagtcaaggagatgatccagcactgtgtgaacgccaatattgatgaagcttacaagattttagcacatctgtggcatctgggatactccccagaagatatcattggtaacatttttcgcgtgtgtaaaaccttccaaatggccgaatacctcaagctcgagtttatcaaagaaatcgggtacacccacatgaagattgcggaaggcgtaaattccttgcttcaaatggctggtttgctggccagattgtgccagaagactatggcaccagtggcgagctag

SEQ ID NO: 238371 - DNA, 1071 bp, synthetic construct
  misc_feature 1..1071: note = Description of Artificial Sequence: Synthetic coding sequence
  source 1..1071: mol_type = other DNA
atgtccctttgggtagacaaatatcgcccatgcagcctgggaagactcgattaccataaagaacaagccgctcagctgcgcaatcttgtgcagtgcggggactttcctcaccttttggtgtatggtccaagtggggctgggaagaagacccggattatgtgcatcctccgagagctgtatggcgtcggggttgagaagctgcgaatcgaacaccaaaccattacgacacccagcaaaaaaaaaatcgaaatctctacaattgcttcgaattaccatctggaggtgaatccctcggatgccggaaattcagacagagtggtcatccaggagatgttaaaaaccgtcgcgcagtctcagcagttggaaactaacagccagcgtgatttcaaggtcgtgctgctgacagaggtggacaaactgaccaaggacgcacagcacgcgttgcgaaggacaatggagaagtatatgagtacgtgtaggctgatcttgtgttgtaattccaccagtaaagtgattcctcccataaggtccagatgcctggctgtgcgagtgcccgcaccaagcattgaggacatttgccatgtcctcagcacagtctgtaagaaggagggccttaatctacccagccagctcgctcatcggctcgccgaaaagtcctgcagaaatctccggaaggcattgctcatgtgcgaggcatgccgggtacagcagtacccgttcactgccgaccaggaaatccctgaaacggactgggaggtgtatttgcgcgaaacagcaaatgcaatcgtctcccagcagacccctcaaagactgttggaggtgcggggtcgattatatgaactgctgacccattgcattcccccagaaatcataatgaagggcttgctcagcgagttgttgcacaattgtgacggccagctgaaaggagaggtcgcccagatggctgcctattatgagcatagactgcagttagggtccaaggcaatttatcacctggaagccttcgttgcaaagttcatggcgctttataagaagttcatggaggatggcctagaggggatgatgttctag

SEQ ID NO: 238372 - DNA, 918 bp, synthetic construct
  misc_feature 1..918: note = Description of Artificial Sequence: Synthetic coding sequence
  source 1..918: mol_type = other DNA
atgtccctttgggtggacaagtatagaccctgtagtttgggacggcttgattatcataaggagcaggccgcacagttacgcaacttggtgcagtgcggagacttcccccatctgctagtgtacggccctagcggggcagggaagaaaacaagaataatgtgcattctgcgagagttgtatggcgtcggcgtggagaaactgcgcatcgagcaccagaccatcaccactcccagtaaaaagaaaattgaaatctcaaccattgcctccaattatcatctggaagtcaaccccagcgatgccggtaacagcgaccgagtagtgatccaggaaatgctcaaaacagtagcccagagtcaacaactggagacgaactctcaacgggacttcaaagtggtgctcctgaccgaggttgataagctgacgaaggacgcccaacatgccctgcgcagaactatggagaagtacatgtccacctgccgcctgattctgtgttgtaatagcacgagtaaagtgatccctccaatccgctcacggtgtctggctgtccgggttccggctccaagcatagaagatatttgccacgtgctgagcactgtgtgtaagaaagaaggcctgaaccttcccagccagctcgctcatcggttggccgaaaagagctgcagaaatcttcgtaaggctttgctgatgtgtgaggcatgcagggttcaacagtaccccttcacagcggatcaggaaatccctgagacggattgggaggtgtatctgagggaaactgccaacgcaattgtttcccagcaaacaccccaaaggctccttgaagtcaggggacgcctgtacgaactgctcacccattgtatcccgccagagattatcatgaaagcctgcaaggaggagagcaggagctgcgacatattttag

SEQ ID NO: 238373 - DNA, 1092 bp, synthetic construct
  misc_feature 1..1092: note = Description of Artificial Sequence: Synthetic coding sequence
  source 1..1092: mol_type = other DNA
atgcaagctttcctgaaggggacctccatctccacaaaaccccctctgacaaaagatagaggggtcgccgcatctgcaggcagctctggggagaacaagaaagctaagccagtgccctgggtggaaaaataccgaccaaaatgcgtagatgaggtggcttttcaagaggaggtagttgcagtcctgaagaagagcctcgagggggcagatttgcctaatctgctgttctatgggcctcctggaactggcaagacttccacaatcttagccgcagctagggaacttttcggccctgagctgttcagactcagagttctggagctgaacgcgtctgatgagcgaggcattcaggtggtgagggaaaaggtgaagaatttcgctcagctgacggttagtggtagccgtagcgacggaaagccatgtcctccttttaagatcgtaatcctggatgaggctgactctatgacaagtgctgcccaggccgctctcaggcgcacaatggagaaggaaagcaaaactacacgcttttgcctgatatgcaactacgtgtccagaatcattgagccactgacatcacggtgtagcaaatttcgattcaaacctctttcggataaaattcagcagcagcgtctgctggacattgccaagaaggaaaatgtaaaaataagtgatgaggggatcgcctaccttgtgaaggtttccgagggcgacttgagaaaggcaattaccttcctccagtctgcaaccagattgacgggaggtaaggagatcaccgaaaaggtcatcaccgacatcgcaggcgtgattcccgctgagaaaattgacggcgtgttcgcagcgtgccagtccgggagcttcgacaaattggaagcagttgtcaaggatcttattgatgagggacacgctgccacccagctggtgaatcagctacacgacgtcgtggtggaaaacaacctgagcgacaagcagaagtcaatcatcactgaaaagcttgctgaagtggataagtgcctggccgatggagccgatgaacatcttcagctcatcagtttgtgcgccactgtgatgcagcagctgagccagaattgctag

SEQ ID NO: 238374 - DNA, 1092 bp, synthetic construct
  misc_feature 1..1092: note = Description of Artificial Sequence: Synthetic coding sequence
  source 1..1092: mol_type = other DNA
atgcaggcatttctgaaggggacatctatctctactaagcccccactgacgaaggacaggggggtagctgcaagtgctggctcctctggagagaacaagaaggcaaaaccggtcccttgggtggaaaagtaccgtcccaaatgtgtagatgaggtagcctttcaggaagaagtggtcgctgtgctgaagaaaagtctcgagggcgcagatctacccaatctgctcttctatggtccaccgggtactggcaagacatcaactatcttggccgcagccagggaactttttggccctgagttgttccgcttgcgagtgttagagctcaacgcaagtgacgaacggggaattcaggtagttcgagagaaggtgaagaatttcgctcaactaaccgtgagtggttcccgcagcgacgggaagccctgccctccatttaaaattgtgatcctggatgaggccgactccatgacatcggctgcccaggctgccctgcgcaggacaatggagaaggagagtaagactacaagattttgtctgatctgcaattatgtctcaaggatcatcgagcctctcacctctcgttgttcgaagtttagattcaaacctttgagcgacaagattcagcagcagcggctacttgacatagccaaaaaagagaatgtaaagatctctgatgaggggatagcctatttagtcaaagtgtcggaaggtgacttgaggaaggccatcaccttcttacaatccgccacacgcttaactggtggtaaagagataaccgaaaaagtcattaccgatatcgccggtgttatccccgcagagaagatagacggcgtgtttgctgcgtgccagtcgggttctttcgataaactcgaagctgtggttaaagatctgattgatgaaggtcatgccgcaacacagctggtgaatcagcttcacgacgtggtggttgagaacaacttatctgataaacaaaaatctattatcacggaaaaacttgccgaggtcgataagtgcctagccgatggggctgatgaacacctgcagcttatcagcctgtgcgcaacagtgatgcagcaactcagccagaactgctag

SEQ ID NO: 238375 - DNA, 132 bp, synthetic construct
  misc_feature 1..132: note = Description of Artificial Sequence: Synthetic coding sequence
  source 1..132: mol_type = other DNA
atgcaggcctttttgaagggaacctcgatttccacaaagccccctctaacgaaagaccggggagtggccgcatcggcaggctccagtggcgaaaataagaaggccaagccagtgccctgggtggaaaagtag

SEQ ID NO: 238376 - DNA, 645 bp, synthetic construct
  misc_feature 1..645: note = Description of Artificial Sequence: Synthetic coding sequence
  source 1..645: mol_type = other DNA
atgcaggccttcctcaaagggacctccataagtacaaaacccccactgactaaggatcggggtgtcgccgcaagtgccggatcttctggagagaacaagaaggctaagccggtcccctgggtagagaaatatcgcccaaagtgtgtagatgaagtggctttccaggaagaagtagttgccgtgctgaagaagagtttagagggggctgacttaccaaatttgctcttctacgggccaccaggaactggcaaaactagcaccattttggcagcggcacgagagttgttcgggcctgagctttttcgtctgcgggtcctagagttaaatgcttctgacgagagggggatccaggttgtgagagaaaaagtaaaaaattttgcccaattgaccgtgtccggctcgcgatccgatgggaaaccatgtccaccttttaaaattgtgatcttagatgaggctgattccatgaccagcgccgctcaggcggctctgcgcagaactatggaaaaggaaagcaaaaccacgcgattctgtctgatctgcaattatgtcagccgtatcattgaaccactaactagcagatgtagcaagtttagatttaaacctctgtccgataaaatacaacagcagaggctcctcgacatctag

SEQ ID NO: 238377 - DNA, 372 bp, synthetic construct
  misc_feature 1..372: note = Description of Artificial Sequence: Synthetic coding sequence
  source 1..372: mol_type = other DNA
atgcaggctttcttaaagggaacgtctatctcgactaagccccctttgacaaaagataggggcgtggccgctagcgccggatccagtggcgagaataaaaaagccaagccggtcccttgggttgagaaataccgcccaaagtgtgtggatgaggtggcgttccaagaggaagtggttgccgtcctgaagaaaagtctagagggcgctgatcttccaaacctccttttctatggccctcccggaactggtaaaacttctactattttagcagcagccagagaactattcggtcctgagctcttccggctccgcgttcttgaactgaacgcatctgacgaacgaggcattcaggtcgtgagagaaaaagtgtag

SEQ ID NO: 238378 - DNA, 504 bp, synthetic construct
  misc_feature 1..504: note = Description of Artificial Sequence: Synthetic coding sequence
  source 1..504: mol_type = other DNA
atgcaggcctttctcaaggggacctctataagcacaaagccccctctgacaaaagatagaggggtcgccgctagcgccggatcgtccggagagaacaaaaaagccaaacccgtgccttgggtcgaaaagtaccgtcccaagtgtgtggatgaagtcgccttccaggaggaggtagttgcggtgctgaaaaagtcactggaaggcgctgacctgcctaaccttcttttctacggcccacctggcacagggaagacatctacaattttagctgcagccagagagctcttcggcccagagctcttccgcctacgggtgctggaactcaacgcctctgacgaaaggggcattcaagtcgttcgtgaaaaggtcaaaaacttcgcccagctgaccgtgtctggaagccggtccgatggtaaaccttgcccgccttttaaaattgtcattctggacgaggcagattcgatgacctccgccgctcaggctgccctgaggcggaccatgtag

SEQ ID NO: 238379 - DNA, 288 bp, synthetic construct
  misc_feature 1..288: note = Description of Artificial Sequence: Synthetic coding sequence
  source 1..288: mol_type = other DNA
atgcaggcctttcttaaggggacaagtattagcaccaaacccccactgactaaagatagaggggtcgccgcatcagcgggaagctcaggggagaacaaaaaagccaaacccgtcccttgggtagagaagtatcgacccaaatgcgtggatgaagtcgcgtttcaagaagaggttgtcgccgtcctgaagaaaagtctggagggcgcagatctgccgaacctcctcttctacggtccccctggcaccggcaagacctccactattcttgccgctgctagagagctttag

SEQ ID NO: 238380 - DNA, 1746 bp, synthetic construct
  misc_feature 1..1746: note = Description of Artificial Sequence: Synthetic coding sequence
  source 1..1746: mol_type = other DNA
atgcagagaccaggccctcgcctgtggctagtgctgcaggttatgggatcttgcgctgccatttcttcaatggacatggagaggcctggcgatggtaagtgccagccaatcgagatacctatgtgtaaagatattggctacaatatgactagaatgccgaatctgatgggccatgaaaatcagagagaagctgccatacaactgcacgagtttgcccctctcgtcgaatacgggtgtcatggtcacttacgctttttcctgtgttccctctatgctccgatgtgcacggagcaggtgtctaccccgatccccgcatgtcgggttatgtgcgaacaggcccgacttaagtgctcccccatcatggagcaattcaatttcaaatggccggattctcttgactgcagaaaacttccaaacaagaacgacccaaactacttgtgcatggaggctcccaataatggctccgatgagccgacacgcggatcaggtctgtttccccctctgttccgcccacaacgcccacactctgcacaggagcaccccctcaaagatggtgggcctggcagagggggatgcgacaatcctggcaagtttcaccacgtggaaaaatctgcttcctgtgccccactatgcacacctggggttgacgtttactggtcacgcgaagacaaacgattcgccgtggtctggctggctatatgggccgtactgtgttttttcagttcagctttcacagtgctaacatttctgatagatccggctagatttcgttacccagagcgccctatcatcttcctatctatgtgttattgcgtatacagtgtggggtaccttattagactgtttgccggtgccgagagcatcgcctgcgacagggatagcggccagctgtatgttattcaagaggggttagagtcaacgggatgtacgctcgtgttcctagtgctttactacttcggcatggccagctccctgtggtgggtagttctcacactaacctggttcctcgcagctggcaagaaatgggggcatgaagccattgaagctaacagcagctactttcacctcgctgcctgggccatccctgccgtaaagacaatcttgattctggtgatgcgaagagtggcgggagacgagctaactggcgtgtgctacgtaggctccatggatgtcaatgcactcaccgggtttgtgctcatcccgctagcatgctacctggtcataggtactagttttattttatccggctttgtggctctctttcacataagaagagtgatgaagacagggggagaaaacacagacaagcttgagaagctaatggtgaggatcggattgttttcagtactgtataccgtgcctgccacttgtgtcattgcttgctatttctatgaaagactgaatatggattactggaaaatccttgccgctcagcacaagtgcaagatgaataatcagacaaagacgctcgattgcctgatggcggctagcatccccgctgtggagatattcatggttaagatctttatgcttctggtggtcggcatcactagcggcatgtggatatggacttcaaaaacactacagtcttggcagcaagtgtgctcaaggaggctgaaaaagaaatcacgtcgtaaacccgctagcgtcatcacaagcggcggtatctataagaaggcccagcatccacaaaaaacacatcacggcaagtacgagatccccgctcagagcccgacctgcgtttag

SEQ ID NO: 238381 - DNA, 960 bp, synthetic construct
  misc_feature 1..960: note = Description of Artificial Sequence: Synthetic coding sequence
  source 1..960: mol_type = other DNA
atggttgagaagtataggccccagacactaaatgacttaataagccatcaagatatcctgtccaccatccagaaattcattaacgaggatcgattaccacacctgctgctttacggcccaccgggtactgggaagacatcaactatcctggcttgcgccaaacagctatacaaagacaaggagtttggctctatggtgctggagcttaacgcatccgacgatagagggatcgatatcattcgaggacctatcttaagctttgctagcacaagaacgatttttaagaagggctttaaacttgtcatactggatgaggcagacgccatgacacaggatgcccaaaacgctctgagaagagtaatcgagaagttcactgaaaacactcggttctgccttatctgtaactacctcagtaaaatcattcctgctttgcagagcagatgcacccggtttagatttgggccactcactccagaactgatggtgccaagactcgaacacgtcgtggaagaggagaaagtcgatatctctgaggatgggatgaaagcactcgtgactctttcatcaggggatatgaggagagccctgaacatcctgcagtcaactaacatggcttttgggaaagtcacagaagagactgtatacacctgcaccggacatcccttgaaaagtgatattgcaaatatccttgattggatgttaaatcaggactttactacagcttacagaaacatcaccgaactcaagaccttgaaaggactggccttgcacgacatactcactgaaattcacttgttcgtgcatcgggttgattttccttcttcggtgcgcatccaccttttgacaaagatggcagacatcgagtataggctctctgtcggtactaacgagaagatacagctgtcctcgttaatcgcagcattccaggtgacacgcgacctcattgtcgccgaagcatag

SEQ ID NO: 238382 - DNA, 315 bp, synthetic construct
  misc_feature 1..315: note = Description of Artificial Sequence: Synthetic coding sequence
  source 1..315: mol_type = other DNA
atggtggagaaatacaggccccaaactcttaatgacctcattagccatcaggacatcctgtcaaccatccaaaagtttatcaacgaggatagattgccacatctgctgctatacggtcctcctggcaccggcaagacctcaacaatcctggcttgcgcaaaacagctgtataaagacaaggaatttggctccatggtactggaactcaacgcgtccgatgacagggggatcgatatcattcgtgggccaattctctcctttgcttcaacacgcacaatttttaaaaaaggcttcaaacttgtaatcctggattag

SEQ ID NO: 238383 - DNA, 1023 bp, synthetic construct
  misc_feature 1..1023: note = Description of Artificial Sequence: Synthetic coding sequence
  source 1..1023: mol_type = other DNA
atggaaacatccgccctcaagcagcaggaacagcctgccgcaacaaaaattcgaaatcttccgtgggtggagaaatatcgaccccagacactcaatgatctgatcagccatcaggatatcctctcaactattcagaagtttatcaatgaagaccggttgccgcatctccttctttatggaccgcctgggactggcaagacgtccaccatacttgcctgcgccaagcagctgtacaaggataaggagttcgggtctatggtccttgaattaaacgcctcagacgaccggggaatcgacatcattcgaggtccgatcttgagtttcgccagcacccggactatcttcaaaaaggggttcaaactagttattctcgatgaggctgatgccatgacccaggatgctcagaacgcactgaggagggtcatagagaagttcacggagaatacgcgcttttgccttatatgcaactatctgtctaagatcatccctgccttgcagagtcggtgcactcggtttcggtttggaccactgacacctgaactaatggtccccagattggagcatgtggtagaggaggagaaagtggacatctccgaggacggcatgaaagctctcgtcaccctgagttccggggacatgcggagggctctaaacatccttcagtcaactaacatggcctttggcaaggttaccgaggaaactgtgtacacttgcacaggccaccccttgaaaagcgacattgccaatattctggattggatgttgaatcaagattttacgactgcctaccggaacattactgagctgaagactttaaaaggtctggctctgcatgacatcctgacggagattcacctcttcgtccatagggtggatttccctagctccgtcaggatacacctgttaaccaagatggccgatattgagtaccggctgagcgtcggcacaaacgagaagattcagttatcttcactgatcgccgcatttcaagttacccgcgatctgatcgtggctgaagcctag

SEQ ID NO: 238384 - DNA, 192 bp, synthetic construct
  misc_feature 1..192: note = Description of Artificial Sequence: Synthetic coding sequence
  source 1..192: mol_type = other DNA
atggtggaaaagtacaggccccagacattgaatgacctaatcagccatcaggacattctgagtacaatccagaaattcatcaacgaggaccggctgcctcaccttttattgtatggccctccgggtaccggtaagacctcgactatattggcttgcgcaaaacaactgtacaaggataaggagtttggttag

SEQ ID NO: 238385 - DNA, 1077 bp, synthetic construct
  misc_feature 1..1077: note = Description of Artificial Sequence: Synthetic coding sequence
  source 1..1077: mol_type = other DNA
atgtggaactcaaacgatggcggagctggttggaggcggaagcggatagctggcggtttctctaaacgagccagccttgggtctgagaggagagtggttgccggagaagagggacgggaacggtcttggggcgtatggggctcccctgcaggacggaggcgcggtcgcctcgggaggctcggacagtgtctcaagggccgtagcctgcgcgagcctgctggcttttccgaggcttgggatgttgcacaggccctgatcctgctgtttaagactggaggatttgagtcgtacgggtcaagttcttatggcggagccggagggtatacccagagcccaggcggtttcggcagtccagcccctagccaggcagagaagaaaagccgtgcacgggctcagcatattgtaccctgcaccatctcccagctgctatcggcgaccctggtcgacgaggtgttcaggatcgggaatgtcgaaataagccaggtcactatcgtgggaataattaggcacgcagagaaagcgccaaccaatatcgtgtacaaaattgacgatatgactgctgcgcctatggacgtgcgccagtgggtggacaccgacgacacttcctccgagaacaccgttgttccgcctgagacctacgtgaaggtcgccggacatctgcggtctttccagaataagaagagtttagtggcttttaagatcatgcccttagaagacatgaacgaatttactacacatatccttgaggtcatcaacgcacatatggtattaagcaaagcgaattcgcaaccaagtgccggtcgcgcacctatatccaaccctggcatgtcggaggctgggaatttcgggggaaatagctttatgcctgctaacggcctgaccgtagcccagaaccaggtcctcaatctcatcaaggcctgtcccagacccgaaggcttaaactttcaagacctgaagaaccagctaaaacacatgtcagtatcctcaatcaagcaagctgtcgactttctgagcaatgaggggcatatatactcgaccgtggacgacgatcattttaaaagtactgacgccgaatag

SEQ ID NO: 238386 - DNA, 837 bp, synthetic construct
  misc_feature 1..837: note = Description of Artificial Sequence: Synthetic coding sequence
  source 1..837: mol_type = other DNA
atgggacgcggtgatcggaataagcggtcaattcgcggattcgagagctacggtagctcgagctacgggggagccggtggctacacacaaagcccgggagggttcggctcgcccgctccatctcaagccgagaagaagtctagggcccgagctcaacatatcgtcccttgtactatcagtcaacttttgtccgccacccttgtggatgaggtgtttaggatcggcaacgtggagatatcacaggtgactattgttggcattatcagacacgcagagaaggcccctactaacatagtgtataaaatagatgacatgaccgccgctcccatggacgtgcgacagtgggtggatacagacgacaccagttctgaaaatacagtagtcccgccagaaacatatgtgaaagtcgccggacatctccgctctttccagaataagaaatccctggtcgcatttaagatcatgccattggaggatatgaacgagtttaccacccacattttggaggtgataaatgcccacatggtgctgtctaaagctaactctcaaccctcagccggacgagccccaatatcaaatccagggatgtccgaggcaggtaatttcggcggaaatagtttcatgcccgctaatggactgaccgtggcacagaatcaagtgctcaacctcattaaggcctgtccgaggccggagggtctgaattttcaagatttgaaaaatcagctaaagcatatgtccgtgagctccatcaagcaggctgtcgactttctgtctaacgaagggcacatctattcaacggttgacgacgaccacttcaagtctaccgacgcagagtag

SEQ ID NO: 238387 - DNA, 813 bp, synthetic construct
  misc_feature 1..813: note = Description of Artificial Sequence: Synthetic coding sequence
  source 1..813: mol_type = other DNA
atgtggaacagtggctttgaatcttatggttcatcttcttatggcggagccggtggctacacacagagcccgggagggttcgggagcccagctccatcacaggctgaaaagaagagccgggcaagggcacaacacatcgttccatgcacgatcagccagttactctcagccactctcgttgatgaggtcttccggataggtaatgttgaaatttctcaagtgacaattgtgggaatcatacggcacgcggagaaagcgccaacgaatatagtatacaagattgacgacatgacagccgcaccgatggacgtccggcagtgggtcgatacggacgacacatcttccgaaaatactgtagtgccacctgagacttatgtcaaggtcgcaggtcatctgagatcgttccaaaacaaaaaaagtttggttgcatttaaaattatgcctctggaagacatgaatgaatttactacacacatactggaggtaataaatgcacatatggttttgtcaaaggcaaactctcagccctctgctggccgtgcccctatctctaatccgggaatgtccgaggcagggaatttcggtggaaattcattcatgccagcaaacggactgaccgtggcccagaaccaggtgctgaaccttatcaaggcctgtcccaggcctgaaggccttaatttccaggacctgaagaatcagctgaaacacatgagcgtctccagcatcaaacaggcggtagacttcctttccaatgaagggcatatttactccaccgtggacgatgaccacttcaagagcaccgatgctgagtag

SEQ ID NO: 238388 - DNA, 369 bp, synthetic construct
  misc_feature 1..369: note = Description of Artificial Sequence: Synthetic coding sequence
  source 1..369: mol_type = other DNA
ctagaagacatgaacgagttcaccacacacatcctggaggtaattaatgcccacatggtcttaagcaaggccaactcccaaccttctgcgggtcgtgcccctatctcaaacccaggtatgtccgaagccggaaacttcggcggaaattccttcatgccagcaaacgggctcacggtggcacagaaccaagtgctgaatttgatcaaagcttgcccacgccctgaaggcctaaatttccaggatttgaagaatcagctgaaacatatgtccgtgagctctatcaaacaggcagtggacttcttgtcgaatgagggacacatttattccaccgtggacgatgatcattttaaaagcaccgatgctgagtag

SEQ ID NO: 238389 - DNA, 540 bp, synthetic construct
  misc_feature 1..540: note = Description of Artificial Sequence: Synthetic coding sequence
  source 1..540: mol_type = other DNA
atgtggaacagcaatgacgggggtggctttgagtcatatggaagttcttcctacggaggtgctgggggttacacccagtcccctggcggatttggctcccctgcaccatctcaggctgagaagaagtccagagccagggctcagcacatcgtcccctgcactatctcccagctgctatctgctaccttagtggatgaggttttccggataggcaacgttgagatttcccaggtgaccattgtaggcataatccgccacgccgaaaaggcaccaaccaatatcgtttataagatcgatgacatgacagctgcccctatggacgttaggcagtgggtcgataccgacgatacatcatcagagaataccgtcgtgccccctgaaacctacgttaaggtggcaggtcatcttaggagctttcagaataaaaaatccctggtggctttcaagattatgcctctcgaggacatgaacgaatttactacacatattttggaggttattaatgcacacatggtgctgtcaaaagctaactcccagtag

SEQ ID NO: 238390 - DNA, 786 bp, synthetic construct
  misc_feature 1..786: note = Description of Artificial Sequence: Synthetic coding sequence
  source 1..786: mol_type = other DNA
atgtccaagtccggtttcggatcctatggatcaatcagtgctgccgacggagctagtggaggaagtgaccagctctgtgagagagatgctactccggcaatcaagacccaaaggccaaaggttcgcatacaggacgtggtaccttgcaatgtgaatcaactgctttcctccactgtttttgatccagtgttcaaggttcggggaatcattgtgtcccaggtatccatcgtgggcgtgatccgcggagctgaaaaggctagcaaccatatctgctataaaatcgatgacatgactgcgaaacccatcgaagcgcgtcaatggttcgggagagaaaaggttaaacaggttacccccttatcggtgggcgtgtatgttaaagtctttggcatcctcaagtgtcccactggtactaaatctctggaagtattaaagatacacgtgttggaggatatgaacgaattcacagtccacattctggaaactgtcaatgcccacatgatgctggacaaagcacgccgtgatactacagtcgagtccgtgcctgtaagtccatcagaggttaacgatgcaggagacaacgatgagtcacaccgaaacttcatccaagacgaagttcttaggctgatccacgaatgtccgcatcaggaaggaaagagcattcacgaactgagagcacagctgtgcgaccttagcgtaaaagccatcaaggaggccatcgactacctgaccgtagaaggccacatctatcccaccgtggatagggagcactttaaatctgccgattag

SEQ ID NO: 238391 - DNA, 330 bp, synthetic construct
  misc_feature 1..330: note = Description of Artificial Sequence: Synthetic coding sequence
  source 1..330: mol_type = other DNA
atgaatcccgcactggggaaccagaccgacgtagcaggcttgtttttggccaactcttctgaggcccttgaaagggccgtgcgctgctgcacgcaggcctccgtagtaactgatgatggattcgccgagggcggaccagatgagcgcagtctatacattatgagagtggtgcaaattgctgtcatgtgcgtgctctcactgacagtcgtgttcggaatttttttcttgggctgcaatctactaattaagagtgaggggatgatcaattttctggttaaggatcgtcgtcctagcaaagaagtggaagccgtggtcgtcgggccttactag

SEQ ID NO: 238392 - DNA, 1893 bp, synthetic construct
  misc_feature 1..1893: note = Description of Artificial Sequence: Synthetic coding sequence
  source 1..1893: mol_type = other DNA
atgcaagggtcttccctgtggctatcgctgacattccgttcagctcgggttctcagtcgggctcgatttttcgagtggcagagtcctggcttgcccaacacagccgctatggaaaatggcactggaccatatggcgaggaacgccctcgagaagttcaggagacaacagtgaccgagggtgccgcaaagattgccttcccatccgccaatgaggtgttctacaaccctgtgcaggaattcaaccgggacctgacatgtgctgtgatcaccgaattcgccaggattcagctcggagcaaagggtattcaaatcaaggttcccggagaaaaggatacacagaaagtcgttgtagatctgtccgagcaggaagaggagaaagtggagctaaaagagagcgagaatctggcgtcaggagaccaacccaggacagctgccgtcggggaaatctgcgaggagggactgcacgttttagagggcctggccgcaagcggcttgcgatctattcgatttgctctggaagtccccggactacggtcagtggtcgctaatgatgcctctactagggcggtcgatttgattaggcgaaatgtacaactcaacgacgtggcccaccttgtgcaaccttcccaagccgacgcgaggatgttgatgtaccaacatcagcgggtgtcagaacggtttgacgtcatcgacctggacccatacgggagtcctgcaacatttttggacgccgcagtacaagccgtctcggaaggaggccttctgtgtgtgacatgtacagacatggctgttttggccggtaattccggagagacatgttacagcaagtacggagcaatggccctcaaatcccgtgcctgccacgaaatggcgctacgaatcgtgctccactccctcgacctaagggcgaattgctatcagcgttttgttgttcctttgctgtccatctctgccgatttctatgtgagagtgtttgtgagagtgttcactggccaggctaaggtcaaggcttccgctcgtgcgaagttttccgctgcttgcggtccgccagtgacacctgagtgcgagcactgcggacagcgccaccaactgggaggtcccatgtgggccgaacccattcacgaccttgactttgtagggcgtgtgctggaggccgtatctgccaaccccggtcggtttcacaccagtgagagaatacgtggggtgcttagtgttattacggaggagctgcctgatgtgcccctttactatacattagatcagctgtcctcaacaatccattgcaacaccccttctctgttacaactacggtcagcactgctgcatgcagattttagggtatctctgtcacatgcgtgcaaaaacgccgttaaaactgacgcacccgcatcagcgctctgggatataatgcgctgttgggaaaaagaatgtccggtcaaacgcgaacggctgagtgagaccagtccggcattcagaatattatcagttgaacccagacttcaggctaactttacaatcagagaggacgccaatccaagctcccgtcaacggggactgaagagatttcaggctaaccctgaggcaaactgggggccacgtccgcgagcaagacctggaggtaaggccgctgacgaggctatggaggagcgtagaagactactacagaataagaggaaggaaccaccagaagatgtagctcagcgggctgccagactaaaaaccttcccctgtaagcggttcaaggagggaacctgccaacgcggtgaccaatgttgctactctcattccccacctacacctcgggtgtcggcagatgccgctcccgactgcccagagacttcaaaccaaacacccccaggcccaggagccgctgcgggacccggtattgactag

SEQ ID NO: 238393 - DNA, 249 bp, synthetic construct
  misc_feature 1..249: note = Description of Artificial Sequence: Synthetic coding sequence
  source 1..249: mol_type = other DNA
atgaaggcgttgtgcctcctcctgctcccagtgctcggacttctagtgtcatccaagactctgtgctctatggaggaggccatcaatgagagaattcaggaggtggccggatcactctcctttgcagttacggggtgcacatgtgggagcgcctgcgggtcttgggacgtccgggcagagaccacatgccattgtcaatgcgccggaatggattggaccggtgccaggtgctgccgagttcaaccctag

SEQ ID NO: 238394 - DNA, 954 bp, synthetic construct
  misc_feature 1..954: note = Description of Artificial Sequence: Synthetic coding sequence
  source 1..954: mol_type = other DNA
atgaaaaggctctctctcgtcaccacaaatcgtctcagccctcatggcaactttcttccattgtgcactttccccctggctgtcgatatggccgctctcttccaggaagcatccagttgtccagtgtgcagtgattatctggagaaacccatgtctctcgaatgcggatgtgccgtgtgtttcaaatgtattaattctctgcaaaaagagcctcacggcgaagatcttctctgctgctgttgtagcatggtttctcaaaaaaacaaaatccgcccatcatggcagctggagcgtttagcatcccatatcaaggaactcgaaccgaagctgaagaagattctgcagatgaaccctaggatgagaaagtttcaggtcgatatgacgctcgatgccgacaccgccaacaacttccttctgattagcgatgacctacgctcggtgcggtcaggctgcatcacccaaaaccgccaagacctggctgagcgatttgatgttagcatatgcatccttggctctcctaggttcacctgtggaagacactattgggaagtggatgtgggcacatcaactgaatgggatctcggagtgtgcagggagagcgttcatcgaaagggtagaatccacttaactacagagcgcggattctggacagtgtccctgcgcgacggtagtagattgtccgcgtcgaccgtaccactcactttcctgttcgtagaccgtaaactgcaaagagtggggatcttcctggacatgggaatgcagaatgtatcattttttgacgcagaaggtggttctcatgtgtacacgtttagaagcgtaagtgcagaagagcccctgcatctctttttcgcccctccttcccctcccaacggtgataaatccgttctctctatttgccccgtgatcaatcctggaaccaccgacgctcctgtgcatccaggggaagcaaagtag

SEQ ID NO: 238395 - DNA, 954 bp, synthetic construct
  misc_feature 1..954: note = Description of Artificial Sequence: Synthetic coding sequence
  source 1..954: mol_type = other DNA
atgaagaggctgagtttggtgaccaccaaccgactgagcccacacgggaatttcttcactctgtgcactttcccgctcgctgtggacatggctgccctgtttcaggaagcctcttcatgcccagtttgctctgactatctggagaagccgatgagtctggagtgcggttgtgcagtgtgtctgaaatgcattaacagcttgcagaaagaaccacacggagaggacctgctctgttgctgttcttccatggtgagcaggaaaaataaaattagacgaaatcgacagcttgaacggttagctagccacattaaggaactggagcctaagctgaagaaaattctccagatgaaccctcgcatgcggaagttccaagtggatatgaccctggatgccaacacagctaacaatttcctgctgatttctgacgacctccgtagcgtgcgctccgggcgtattcgccagaaccggcaggatttggcagagagattcgatgtttcagtttgtatcctgggttcccccagatttacatgcggaaggcactgctgggaagtggacgtgggcacgtcaacagagtgggacctcggggtatgtagagaatctgttcatcgtaaagggcgtatacagctgaccaccgagctaggtttctggaccgtatcactaagggatggcggtcgattgtcagctacgacagtcccgctgacatttctctttgtggacaggaagctgcagagagtgggtatttttctggacatggggatgcagaacgtgtcttttttcgacgcagagtcaggctcacacgtgtacactttccgcagtgtgagtgctgaggaacctttgaggccttttctagccccttctgtccccccaaatggagatcaaggcgtactgtccatatgcccactgatgaacagcgggacaacagatgcccctgtcagaccaggggaggcaaagtag

SEQ ID NO: 238396 - DNA, 867 bp, synthetic construct
  misc_feature 1..867: note = Description of Artificial Sequence: Synthetic coding sequence
  source 1..867: mol_type = other DNA
atggcagccctgtttcaggaggctagctcctgcccagtctgctctgactatcttgaaaagcccatgtccctagaatgtggatgcgcagtgtgcctgaagtgcatcaactcgctgcagaaggagccacatggggaggatctgctctgctgctgttcctctatggtatcccggaaaaataagattcgtcgcaaccgtcaactcgaaaggctggcttctcacatcaaggagctcgagccaaaactgaagaagattctgcaaatgaacccacgcatgcggaagttccaagttgacatgacccttgatgccaacactgcaaataactttttgcttattagcgacgatttacgctctgtaaggtcgggtcggatccgccagaacaggcaggaccttgcagaaagatttgacgtgtccgtgtgcatcctgggaagtcccagattcacctgtggccgacactgttgggaggtagacgtcgggacctcaacagagtgggatctcggagtgtgtcgggaaagcgttcacagaaaggggcgaattcagttgactactgaactggggttttggaccgtgagccttagggacggtggaaggctatccgccaccactgttccacttactttcctttttgtggatagaaagttacagagagtgggcatctttctggacatgggcatgcaaaatgtgtccttctttgacgccgagagcggttcccatgtgtacacttttagatcagtgtccgcggaggagcccctacggccatttctggcgccaagcgtccctccaaatggggaccaaggggttctgagcatctgcccactgatgaacagcggtactaccgacgcccctgtgaggcccggtgaagcaaaatag

SEQ ID NO: 238397 - DNA, 867 bp, synthetic construct
  misc_feature 1..867: note = Description of Artificial Sequence: Synthetic coding sequence
  source 1..867: mol_type = other DNA
atggccgcactcttccaggaagcctcatcgtgtccggtgtgtagcgattacctagagaagcccatgtcattagaatgcggctgtgccgtatgtctgaagtgtataaacagcctgcagaaggagccccacggtgaggaccttttatgctgctgttcatctatggtttcacgcaaaaacaaaattcgcaggaaccgccagttagaacgattagcctcacatatcaaggaactcgagcctaaactgaagaagattctccagatgaacccacgtatgcggaagtttcaggtggatatgacactggacgccaataccgcaaataactttttgctcattagcgacgatttgagaagtgttcggagcggacggatccggcagaaccgtcaggacctggcagagagatttgatgtatcagtgtgcattctcggatctcccaggtttacatgcggaagacattgttgggaggtcgacgtggggactagcaccgagtgggatctgggagtttgtagagaaagcgtccatcggaagggacgaatccagctgaccaccgaacttggcttttggacagtatccttaagagacggtggtaggttaagcgcgactaccgtaccactcacatttctttttgtcgatcgtaaactccagagagtcgggattttcttggacatgggaatgcagaacgtgtccttctttgatgcggagtcggggtcgcacgtgtataccttcagatcggtttctgcagaagaaccgctgcgcccatttctggcccctagcgtgcccccaaacggcgatcagggggtgctgtctatttgtccacttatgaatagcggcaccactgacgctccagtgagacccggagaagccaagtag

SEQ ID NO: 238398 - DNA, 1137 bp, synthetic construct
  misc_feature 1..1137: note = Description of Artificial Sequence: Synthetic coding sequence
  source 1..1137: mol_type = other DNA
atggaagtcgctgaactcggcttccccgagactgccgtctcccaatcacgtatctgcctctgcgccgtgctgtgcggacactgggactttgctgatatgatggtgattcggagcctgtccttaattcgtttagaaggcgtcgaaggaagggacccagtcggtggaggcaacttgaccaacaagagaccctcctgcgcaccatccccacaggacctgagcgcccagtggaaacagcttgaagaccgcggagcgtcctcccgtagggtcgatatggccgctttgtttcaggaagcttcttcatgccctgtctgcagcgattatttggagaagcctatgtcccttgagtgcggttgcgcagtctgtctgaaatgcatcaactccctgcagaaggagccccacggcgaagacctgctgtgctgttgcagtagcatggtcagtcgcaagaacaaaatcagacgaaaccgacagctggaacgcctggcttctcatatcaaagagctggagcccaaactgaagaaaattctgcaaatgaaccctcgaatgagaaaattccaagtggatatgaccttagatgctaacaccgcaaataattttcttctgatttcagacgatctgcgaagcgtaaggagcgggaggatacgccaaaatcgtcaagacctggccgagcgcttcgatgtgtctgtgtgcattttgggcagccccagatttacctgcggccgtcactgctgggaggtcgacgtcggaacaagcaccgagtgggatctcggcgtttgtcgcgaatcggtccatcgaaaaggaagaatacagcttactacagagctcgggttctggacagtgtctctgagagacggcggtaggttaagcgccaccaccgtacctttgacattccttttcgtagatcggaagctacagcgggtcggcatcttcctggacatgggaatgcaaaacgtgtcctttttcgacgcggaaagtgggtctcacgtttacactttccgtagcgtctccgcggaggaaccactgagaccattcctggctccttcggtgccgcctaatggcgaccagggagtgctgagtatctgtcccctcatgaattcaggaactacggatgcgcctgtgcggccaggcgaggccaaatag

SEQ ID NO: 238399 - DNA, 954 bp, synthetic construct
  misc_feature 1..954: note = Description of Artificial Sequence: Synthetic coding sequence
  source 1..954: mol_type = other DNA
atgaagaggctgagcctggtgaccactaatcgcttatcgccccaggggaactttctgcctctgtgcacttttccactagccgtggacatggccgcactcttccaagaggcaagcagttgccccgtgtgcagcgactacctggagaaaccgatgagcttggaatgtggctgcacggtgtgtttaaagtgcataaattctcttcagaaagaaccccacggggaagatttgctttgctgctgttgctctatggtgtctcagagaaataagatccgtccgaatagacaacttgaaaggcttgtctcacacattaaagagttggaacctaagttaaagaagatcctccagatgaaccctcgcatgcggaagttccaggtcgatatgaccctggacgccgacacagcaaacaacttccttctgatcagcgatgatttaagaagtgtccgctcgggcttgattacgcagaacagacaggacttggcagaacggtttgacgtttctgtatgtattcttggttcaccacggttcacctgcgggagacactactgggaggtggatgtaggtacgagtacagaatgggatttaggcgtgtgccgtgaatctgtccattgtaagggaaaaattcagctcaccactgagctgggcttctggactgtttccttgcgggatggatctcggctctctgctagcactgtccctttgacgtttctattagtggacaggaaattgcagcgggtagggatcttcctcgacatgggcatgcagaacgtgtccttcttcgatgccgagtccggtagccatgtgtacacctttcggagcgtgtcagcagaagagccactcaggccattcctcgcgccaagcatacctcccaatggagatcagggtgtcctgtccatttgccccctgatgaactcaggaacaactgacgccccagtgcggcctggggaagccaaatag

SEQ ID NO: 238400 - DNA, 867 bp, synthetic construct
  misc_feature 1..867: note = Description of Artificial Sequence: Synthetic coding sequence
  source 1..867: mol_type = other DNA
atggctgcattattccaagaagcgtcttcatgcccagtctgcagcgattatcttgaaaagccaatgagtctggaatgcggatgtaccgtgtgtctaaagtgcatcaattcattacagaaggaaccccatggtgaggatctcttgtgttgttgctgcagcatggtcagtcagcgaaacaagatccgacccaacagacagctcgagagattggtgagtcacattaaggagctcgaaccaaagctgaaaaaaattctacagatgaacccaaggatgcgcaagttccaagtggacatgacccttgacgccgatacagccaacaatttcctcctcatctctgacgacctgcgttcagttaggagcggcctgatcacccaaaatcgccaggaccttgctgaacgctttgatgtctccgtgtgtattttggggtcaccgaggtttacctgtggaagacactattgggaggtagacgtcggtacctctacagagtgggacttgggcgtgtgcagagagagcgtgcattgcaaaggaaaaattcagcttacaaccgagctagggttttggactgtgtcactcagggacgggtctcgcctctcagcttctacggtacctttgaccttccttctggtggaccggaagctgcagcgagtaggcatcttcctcgatatgggcatgcaaaacgtcagcttctttgacgcggaatcagggtctcatgtctacacatttaggtccgtctctgcagaggagccgttgcggccatttctggcgccttctattccaccaaatggggatcagggagtgctcagcatctgcccattgatgaacagtggcactacggatgctcccgtacggcctggcgaggccaagtag

SEQ ID NO: 238401 - DNA, 867 bp, synthetic construct
  misc_feature 1..867: note = Description of Artificial Sequence: Synthetic coding sequence
  source 1..867: mol_type = other DNA
atggccgcactatttcaggaagcgtcatcgtgccctgtgtgcagtgattaccttgaaaagcccatgtctctggagtgcgggtgcaccgtttgtctcaagtgcattaactctcttcagaaagaacctcatggggaggaccttctctgttgttgctgcagcatggtgagccaacggaataagattaggcctaatagacaactagaaagactagtctcacacatcaaggagctcgagcccaagttaaaaaaaatccttcagatgaacccacgcatgcggaagtttcaagtggatatgacactcgatgctgacacagcaaacaactttctgctcatatcggacgatctgcgctctgttaggagtggattgatcacacagaacaggcaggacttggcggagcgctttgacgtgagtgtgtgcatcttgggatctccccgattcacatgcggaaggcactactgggaagtggacgtcgggacatcgaccgagtgggaccttggggtatgtcgggagagcgtacactgcaaggggaaaatccagctcaccaccgagctcgggttttggacggtatctctaagagacggatctcgcctgagcgcgagcacagtgcccttgacattcttgctggtagatcggaaactgcagcgtgttggtattttcttagatatgggcatgcaaaatgtgtctttctttgacgcagagagcgggagtcacgtttataccttccgcagcgtttccgctgaggaacctctgagaccattcctcgctccttccatccctccaaatggcgatcagggagttctgtctatttgccctttgatgaacagtggcaccactgacgccccagtccgcccaggggaggcaaaatag

SEQ ID NO: 238402 - DNA, 3219 bp, synthetic construct
  misc_feature 1..3219: note = Description of Artificial Sequence: Synthetic coding sequence
  source 1..3219: mol_type = other DNA
atggcgaaagccaccagcggagccgctgggctccgacttctgctactgctgcttctgccactcctcggcaaggttgcgctggggttgtacttctctcgggatgcctactgggagaagctttacgtagaccaggctgcaggcactcctctgctgtacgtgcatgcgctccgcgatgcccctgaagaagttccatccttcaggctgggtcagcatctttacggcacatacagaacacgtctgcatgaaaacaactggatatgtattcaggaagacactgggttgctgtacttgaaccggagcttggaccactctagctgggaaaagctgtcggtcaggaacagagggttccctcttctcacagtatacctgaaggtgtttctcagcccaacctcccttagagagggggagtgtcagtggcccggttgcgccagggtgtatttcagcttttttaacacctccttccctgcttgcagctctcttaagcctcgcgagctgtgctttcccgagacgcgcccttctttccgcatacgcgagaatcgccctccaggcacatttcaccagtttaggctcctacctgtgcagttcttgtgccccaatatcagtgtggcttatcgcctcctcgagggtgaaggcctgcccttcaggtgcgcccctgattcacttgaggtgtctacccgctgggctctcgatcgggagcagcgcgaaaaatacgagctggtagccgtctgtacagttcatgccggtgccagagaggaggtcgtcatggttccctttcccgtcacagtgtatgatgaggatgattcggctcctacctttcctgcaggcgtggataccgcgagcgctgtcgttgagttcaaacgcaaagaggatacggtcgtcgctacgctgcgcgtcttcgatgccgacgtggtgccggcttctggtgagttagttcgtcgctacaccagtacactgcttcctggtgacacctgggcccagcagaccttccgggtcgagcactggcccaatgaaacatctgttcaggctaatggaagcttcgtgcgagcaactgtccacgactacaggttagttctgaaccggaacctgtctatctccgaaaatcgcacaatgcagctcgccgtgctggttaatgactctgatttccaggggccaggcgctggagttctcttactgcactttaatgtctccgtcctgcctgtttcactgcacctgcccagcacctactcgctgagcgtttcacggagggctaggagatttgcacagattggaaaagtttgtgtcgagaactgtcaggccttctccgggattaacgttcagtataagcttcatagtagcggagctaactgctcaacgctaggggtggtgacttccgcagaggataccagcgggattttatttgttaatgatactaaggctctgagaagaccaaaatgcgccgaactgcactacatggtagtcgcgacggaccaacagacgtcccggcaggcacaggcgcagctattagtgacagtggagggctcttatgtcgccgaggaagccggttgtcccttatcttgtgccgtttccaagcgcagactcgaatgtgaagagtgcggcggactaggatccccaacaggcaggtgcgagtggagacagggcgatggcaaagggattaccaggaatttttccacttgctctccatctacgaaaacttgcccggatgggcactgtgacgtagtggagacccaggacataaatatatgccctcaagattgcctgcggggttccattgtagggggtcatgagcctggggaaccacggggaatcaaagccggatatggaacttgtaactgcttccctgaggaggaaaaatgtttctgcgaacccgaagatatccaggacccgctctgtgatgagctttgtagaacagtcatcgcagctgccgtgctgtttagtttcatcgtgtctgtgttactgagcgctttctgcatccactgttatcataaattcgcacacaaaccccctatctcaagcgccgagatgactttccgacggcctgcccaggcattccctgtctcatactcatcaagtggggcaaggagacccagcctcgattccatggaaaaccaagtgagcgttgatgcgtttaagatcttggaagaccccaagtgggaatttcccaggaagaacctcgtgcttggcaagactttgggagagggagaatttgggaaagttgttaaggctacagcttttcacctcaagggcagggcgggttacacaacagtggctgttaagatgctcaaagagaatgcatcccccagcgagctgcgggacctacttagcgagtttaacgtgctgaagcaggtaaatcatccgcacgtgattaaactgtatggggcttgcagccaggatgggccattactgctgatcgtggagtatgccaaatacggctctctgcgagggtttctgcgggagtcacggaaggtgggaccgggatatctgggctccggaggttctaggaactcctctagtctcgaccacccagacgagcgcgctcttacaatgggggatctgatttcttttgcctggcagatcagtcagggtatgcagtaccttgccgagatgaaactcgttcatcgtgacctggccgctaggaacatcctcgtagctgaggggcgaaaaatgaaaatctccgatttcggtctgtcccgcgacgtgtacgaggaagactcatacgtcaaaagatctcagggtaggattccagtaaaatggatggctattgagtctctatttgatcatatctacacgacgcagtccgacgtgtggagttttggggtgttactgtgggagattgttaccctagggggaaacccttatcccggtataccgcctgaacggttgttcaatctcctgaaaaccggacatcgcatggagcgcccagacaattgctcagaagaaatgtatcggttgatgctgcaatgctggaaacaagagcctgacaagcggccagttttcgcggatatttctaaggacttggaaaagatgatggtgaaacgcagggactatttggatctggctgctagcacaccatcagatagtctgatatatgacgatggactgtccgaagaggagaccccactggttgattgcaataacgcccctctccctcgcgcacttccctctacatggatcgaaaacaaattatatggaagaatcagtcacgccttcactcgcttttag

SEQ ID NO: 238403 - DNA, 3345 bp, synthetic construct
  misc_feature 1..3345: note = Description of Artificial Sequence: Synthetic coding sequence
  source 1..3345: mol_type = other DNA
atggccaaagctacctcaggcgctgcgggtctgcgattgctgctgctactgctgctccctctcctcggcaaggtcgcactcggcctgtatttctcccgcgacgcctactgggaaaagctgtatgtggatcaggctgcaggtacccccctgctctacgtccacgcccttcgcgatgctcctgaggaggtgccatcttttagattaggacagcatctttacgggacgtatcgaacccggttacacgaaaacaattggatctgcatccaagaggatacaggcctgctgtatctgaataggagcttggaccattctagctgggaaaaactgtccgtccggaatcggggatttcctttattaacagtttatcttaaagtctttctgtctcccacgtcgcttagggaaggagagtgccagtggcccggatgcgccagggtgtacttctccttttttaacacttccttccccgcttgttcctcactgaaaccacgagagctgtgctttcccgagaccagaccgtccttcaggattcgtgagaatcggccacccggaaccttccatcagtttagactgctgcctgtgcagttcttatgtccaaacattagtgtggcctatcggttgctggagggggaaggtctgcctttccggtgtgcgccagacagcctcgaagtgtcgacccgttgggctctcgatcgagagcagagagagaaatacgagctcgtggcagtctgtacagtacacgcaggcgctagagaagaggtggtgatggtcccgttccccgttacagtatacgacgaagatgacagcgcccctaccttccccgctggtgtcgacactgcctcagccgtcgtggagttcaaaagaaaggaagacactgtggtggccactctgcgcgtgttcgacgccgacgttgttccggcttccggtgagctggtgcgacgttacacttctacattgcttcccggagatacctgggctcagcagactttcagagtggagcattggcctaacgagacctcagtacaggctaacggcagttttgtccgggctacagtgcacgactatagattagtgcttaatcggaatttgagtatcagcgaaaaccgtaccatgcagcttgccgtcctggtcaatgactccgattttcaggggccaggggctggggtgctccttctccatttcaacgtaagtgtcctccccgtgtccctccaccttccttccacttactctttaagcgtgagccggagggcaaggaggttcgcacagattgggaaagtgtgcgttgagaactgccaggccttttccgggataaacgtgcaatataagctccattccagtggggctaactgttcaacgttaggggtggtgacttccgctgaagatacctctggcattctgttcgttaacgataccaaggcactgaggcgaccgaagtgcgcagaactgcactacatggtcgtggccacagaccaacagacatcccggcaggcccaagctcagctcttagtgacagtggaggggagttacgtcgcagaagaagctggttgcccactgtcttgtgccgtgagcaagcggaggttggaatgcgaggagtgcgggggtctgggctcaccaaccggtcgctgtgaatggagacaaggcgatggcaaggggattaccagaaactttagcacctgcagtccctcgaccaaaacttgtcccgacggacattgtgatgtggtagagacccaggacataaacatctgtccgcaagattgtctgaggggcagtattgttggagggcatgaacccggtgaaccccgaggcattaaagccggatacgggacttgcaattgttttcctgaagaggaaaagtgtttctgcgaacctgaggacatacaagatccgctctgtgacgagctctgtaggacagtgatcgctgctgcagtgctattttcattcatcgtgtccgtgctgctgagcgctttctgcattcactgctaccataaatttgcccataaacctcctattagctcggctgaaatgacattccgcagaccagcacaggccttcccagtttcttactcgtcctctggagctcggaggccttccctggacagcatggagaaccaggtgtcggtggatgccttcaagattctagaagatcccaagtgggagttccctcgtaagaacctcgtgcttggaaagaccttaggagaaggggaatttggtaaggtggtcaaagcgaccgcatttcatcttaagggaagggccggatatacaacggtggcggtcaagatgctgaaagagaacgctagcccctcagagctacgcgacttgctgtccgaattcaatgttttgaaacaggtgaatcatcctcacgttatcaagctctacggagcctgtagccaggacgggccactactgctgatcgtggagtatgcaaagtacgggtctttgaggggatttctccgcgaatcccggaaggtcgggcctgggtacctgggcagtgggggaagcaggaattcgtcaagtctcgatcacccagacgaaagggcccttaccatgggcgacctcatctccttcgcatggcagatctcccagggcatgcagtacctggccgaaatgaaactggtgcatcgagacctggccgctcggaacatcctcgtcgctgagggccgaaagatgaagatttctgatttcgggctctcgagggatgtctatgaagaggatagctacgtcaaacgcagccaaggaaggatcccagttaagtggatggctattgagagccttttcgatcacatatacactactcagtccgatgtttggtccttcggcgtgctgctctgggagatcgttacccttgggggaaacccgtaccccggaatacctccagagcgtctcttcaatctgctaaagacagggcatagaatggagcgccctgataactgtagcgaagagatgtatcggctgatgcttcagtgttggaagcaggagccggacaagcggcctgtgttcgctgacatctcgaaagacctcgagaagatgatggttaagagaagggactatctggacctggccgcttctacaccatctgatagtctgatctatgacgatggattgagtgaggaagagacaccgctggttgattgcaataatgctcctctacctagagcgctgccaagcacgtggatcgagaataagctgtacggcatgagtgacccgaattggccaggtgaatcccctgtgccgctcacaagagccgacgggacaaataccgggttcccacgctacccgaatgatagcgtatacgccaattggatgctgtcaccttccgccgctaagctgatggacacctttgacagctag

SEQ ID NO: 238404 - DNA, 1377 bp, synthetic construct
  misc_feature 1..1377: note = Description of Artificial Sequence: Synthetic coding sequence
  source 1..1377: mol_type = other DNA
atggccaaagctacttcaggcgctgctggcctccggttgctattgctgctgctccttcccctcctcggaaaagtggcccttggtttgtattttagtcgggacgcatattgggagaaattatacgtcgatcaagcggcaggcactccccttttgtatgtacatgcgctgagagacgcccctgaagaggtgccatcatttcgacttgggcagcacctgtatgggacctaccgtaccagattacacgaaaataactggatctgcatccaggaagacaccgggctcctgtacctgaacaggagtctggaccactccagctgggagaaactaagcgtccggaaccgcggtttccctctgctgaccgtctacttgaaagtgttcctgtctcccacttctctgagagagggggagtgccaatggcctggatgtgcgcgagtgtattttagttttttcaacacctctttccccgcatgctcctcgctgaaacctagggagctctgtttccctgagacacgccctagttttcggatacgggagaacaggccccctggaactttccatcaattcaggcttctgcccgtgcaattcctatgtccgaatatcagtgtagcatataggctgctggaaggagaaggattaccattcagatgtgctccagactcacttgaagtctctactagatgggctttggatagggagcagcgcgagaagtacgaactcgttgctgtctgtacggttcacgcaggtgccagagaggaggtagttatggtgccgtttccagtaaccgtgtacgatgaagatgactctgcgccaacatttccagccggtgtcgataccgcgtctgctgtggtagagttcaaacgcaaggaggataccgtcgtagctactcttcgtgtgtttgacgccgatgtggtgccagctagcggagaactggttcgcaggtacacatccaccctgctgccaggcgacacgtgggcccagcagaccttcagggtggaacattggcccaacgaaactagcgttcaggccaacggctcatttgtgcgggcaacagtgcacgattatcgcctggttctgaatcgcaaccttagcatcagcgagaaccgcaccatgcaacttgctgtactcgtcaacgactcagatttccaggggcctggagcaggtgtgctgcttttgcattttaacgttagtgtgctgccggtctcgttgcatctcccttcaacctattccctctcggtaagccgcagagccaggcggttcgcccagattggtaaagtgtgcgtcgaaaactgtctggccgacctcactggggatgccgtgtccgggagggacgaggccagatcgtctggtcttggatctcagaaacaccccggttcatag

SEQ ID NO: 238405 - DNA, 786 bp, synthetic construct
  misc_feature 1..786: note = Description of Artificial Sequence: Synthetic coding sequence
  source 1..786: mol_type = other DNA
atggatgaggcccttgaaactcagctgaaaaccagtcgcggtcgattttcagcaactgagtcactccccaccctcgagctactatcacaagtcgatatggactgccgcgttcacatgagaccaattggtcttacttgggtactgcagttaaccctggcctggattctgcttgaagcttgtgggggttcccgcccactgcaggccagatctcagcagcatcatggcctggccgctgatctgggaaaagggaagcttcatctagccggaccatgttgcccttctgagatggataccacggagacctctgggccaggaaatcaccccgagaggtgtggggtgcccagtcctgagtgcgaatcctttttggagcatctgcagagagctctgagatcacgcttccggctgagactgctcggcgtaaggcaagcacaacctttgtgtgaagagctgtgccaggcttggtttgccaattgtgaagatgacattacttgtggccctacgtggttgcctctctcagaaaaacggggatgcgagccctcctgtttaacttacgggcagacttttgccgatgggactgatctctgtaggagtgccctcggacatgccttgcctgttgccgctcctggagcacgacattgcttcaatatttcgatatccgccgtgcctagaccccgaccgggaaggcggggaagagaggcccctagccgcaggagtagatctcctagaactagcattttggacgcagcaggaagcggtagtggctctggatctgggagcggcccttag

SEQ ID NO: 238406 - DNA, 675 bp, synthetic construct
  misc_feature 1..675: note = Description of Artificial Sequence: Synthetic coding sequence
  source 1..675: mol_type = other DNA
atgggatggcagctcatctgggccaaagcttcatgcacctggcaggatctagtcgtgccccaacggtggacccaacagaggcaccgggctctggaaactatacagaatgccgtggaatgtagggccctgaacgctaatccaagttggaatacatccaatgtgccgttcgccgtcgccagcgcctgtggatattggggctatgcccgtcactccaggtcagcaaggagctccgctagacccggtagccccaccgccaagatgatttccccggcagccagactgggatcccactctcagaagaaaggagccgtttcaccggcagccctgcccatggacaggttggagtgttccggcgcaataagcgccagatgtaacctacggcttcgcggaagcagcgacagccccgcagccacgtccagaatcgctggcatttctggcgcttgccatcatgctcaactaattttcgtgttcctcgtggaatcagccttccatcacgtcggccaggcgggattcgagctactgacctcgggtgatccacctacaagcgcaagtcagtccgtgggtattaccggcgtgagtcacagacccagaccgcctccctcttcatttttgccgtgcttagatcctcgggatagaatcggtaccccccaggtgccagctcccacacttccctag

SEQ ID NO: 238407 - DNA, 690 bp, synthetic construct
  misc_feature 1..690: note = Description of Artificial Sequence: Synthetic coding sequence
  source 1..690: mol_type = other DNA
atggactgccgggtccacatgagacctatcggcctcacctgggttttgcaactgactcttgcctggattctgctggaggcgtgtggtggcagcaggccactgcaggctcgcagtcagcagcaccacggccttgctgccgacctcgggaaaggcaaactgcacctggcagggccatgttgtccttcggaaatggacaccacagagactagtgggccagggaatcaccccgagcgatgcggggtgccatcaccagagtgtgagagttttctggaacatctccagagggctttgagaagtcgatttcggctccgactcttgggagtgagacaggcccagcccttgtgcgaggagctgtgtcaggcctggttcgccaattgtgaggatgatattacttgcggacctacatggctgccactgtcagaaaaacgcggatgcgaaccatcttgtctgacatacggccagaccttcgcagacggaaccgatctctgtcgcagcgcccttgggcacgccctgccggtggctgcccctggggctagacactgtttcaatatctccataagcgccgtgccccgacccaggcccggacgcaggggaagggaagcgccttccaggagatcgaggtctccgaggaccagtatcctcgacgccgctgggagtggctctggcagcggttcaggaagcggtccctag

SEQ ID NO: 238408 - DNA, 618 bp, synthetic construct
  misc_feature 1..618: note = Description of Artificial Sequence: Synthetic coding sequence
  source 1..618: mol_type = other DNA
atggatgaggccttagaaacccagctcaagactagccgcggtcgcttttctgccacagagagcttaccgacgttggagctcttgtctcaggttgatatggattgtagagtacatatgaggcccattgggcttacttgggttctacagctcacgctagcctggatcctgctagaggcgtgtggcggaagccggcctcttcaggccagatctcagcaacaccacggcttagctgctgatttgggaaagggcaagctgcacttggccggaccgtgctgtccttctgagatggatactactgaaacttccggcccaggcaatcatccagaacgttgcggtgtccccagccccgagtgtgaatccttcctcgagcaccttcagcgagccctgagaagcaggtttagactccgccttctcggggtgaggcaggcccagccactgtgcgaggagctctgccaggcctggttcgcaaactgcgaagacgacatcacctgtggcccaacttggctgccgctgtcagagaagagaggatgtgagccttcttgtcttacatacggacaggctggcgttcagtggcgggacttgtcgtctatgcagccaccccctccaggcttcaaatag

SEQ ID NO: 238409 - DNA, 720 bp, synthetic construct
  misc_feature 1..720: note = Description of Artificial Sequence: Synthetic coding sequence
  source 1..720: mol_type = other DNA
atggcaagacagcttctgagtcaggtggacatggattgccgtgtgcacatgagaccgatcggcctgacctgggtcctgcagttaaccctcgcttggatcctcttggaagcctgtggcggatcccggcctctacaggcaagaagtcaacagcatcacgggctagccgctgatctgggcaaagggaaattgcacctggctggaccatgttgtccaagtgagatggacacaaccgagacctcaggccctggaaaccatcctgaaagatgcggcgtgccaagtcccgaatgcgaaagctttctggaacatctgcaacgcgcactgcgatcacggttcagactgaggctgttaggtgtgcggcaggcacagcctctgtgtgaagaactatgtcaggcgtggtttgccaactgtgaagatgatataacatgtggaccaacttggctccctttgagtgagaagaggggatgtgagccttcatgcctaacatacggacagacatttgccgacggcacagacttgtgccgttctgctctgggccacgcgctcccagtcgcagcaccaggcgcacgccattgcttcaacattagcataagtgcagtgccgcgtcccaggccgggacgacggggacgagaggctccatcaagacgttcccggtcccctcgcacgagcattcttgacgccgctgggtcgggttctgggagcggaagcggatccgggccttag

SEQ ID NO: 238410 - DNA, 996 bp, synthetic construct
  misc_feature 1..996: note = Description of Artificial Sequence: Synthetic coding sequence
  source 1..996: mol_type = other DNA
atggccagggggggtagaggccgtagactcggtttggcattaggcttgctcctggcgttggtgctggctccacgggtgctgcgcgctaagcccacggttaggaaggaaagagtggtgcgtccagattccgaactgggtgaacggcctccggaggacaatcagagctttcagtatgatcacgaggccttcctgggtaaggaagactccaaaactttcgaccagctgacacctgacgaatcaaaggagcgtctgggtaaaatcgttgaccggattgacaatgatggggacggtttcgtgaccacagaagaactgaaaacctggatcaagcgggttcaaaaacgctacattttcgacaacgtggccaaggtctggaaggactacgacagggacaaagatgataagatttcctgggaagagtataagcaagccacatatggatattatcttggtaatcctgcagagttccacgattccagcgatcaccacacatttaagaagatgctcccaagggatgaaaggcggttcaaggccgctgacctgaacggcgatctgaccgccacaagggaagaattcacggctttcctccaccccgaggagttcgaacatatgaaagagatcgtagtccttgagaccctggaagacattgataaaaacggagacgggttcgtggaccaggacgaatacatcgccgacatgttttcccatgaagagaacggcccagaacccgattgggtgctatcagaacgggaacaattcaacgaatttagggatctgaacaaagatggaaaattagacaaggacgagatccgccactggattctgcctcaggactacgaccatgcgcaggcagaagctagacacttggtgtacgagtcagataagaataaggacgaaaagctgacgaaggaggaaattctcgagaattggaacatgtttgtgggcagccaggcaactaattacggggaggaccttacaaaaaaccacgacgaactgtag

SEQ ID NO: 238411 - DNA, 87 bp, synthetic construct
  misc_feature 1..87: note = Description of Artificial Sequence: Synthetic coding sequence
  source 1..87: mol_type = other DNA
gagatcctagaaaactggaatatgttcgtggggagccaggccactaactatggcgaagatctgacaaagaatcacgacgaattatag

SEQ ID NO: 238412 - DNA, 954 bp, synthetic construct
  misc_feature 1..954: note = Description of Artificial Sequence: Synthetic coding sequence
  source 1..954: mol_type = other DNA
atgaggctggggcctcggaccgccgctctgggacttttactcctgtgcgctgcagcagcaggagcaggaaaggctgaagaactacactatccgttgggagagcgcagatccgattacgacagagaggccctcctgggagttcaggaagacgtggatgagtatgttaaattagggcatgaggagcagcagaaacgactgcaggccattattaagaagattgaccttgactccgatggttttttgacggaatccgagctgtcctcctggatccagatgtcttttaaacattatgctatgcaggaagccaaacagcagttcgtggaatacgacaaaaattccgacgatacggtcacctgggacgaatacaacatccagatgtacgaccgggtgattgactttgacgaaaacacagccctggacgatgccgaggaggagagctttagaaaattacacttgaaggacaagaaaagatttgagaaggctaaccaggattccggtcctggcttatcactagaggagtttatagccttcgagcaccctgaagaagtcgattacatgaccgaattcgttattcaggaggcattggaagagcacgacaaaaacggggatggcttcgtttccctggaggaatttttaggcgactataggtgggaccctacagcaaacgaagacccagagtggatccttgtcgaaaaagataggtttgttaatgattacgataaagacaatgatgggaggctggacccccaggagctgctgccttgggtggttccaaataaccagggaattgcccaggaggaggccctgcatctgatagacgagatggacttaaatggcgataagaaactgtctgaggaagaaatccttgaaaatccagaccttttcctgacgtccgaggcaactgattacgggagacagcttcacgacgactacttttatcacgatgaactgtag

SEQ ID NO: 238413 - DNA, 2331 bp, synthetic construct
  misc_feature 1..2331: note = Description of Artificial Sequence: Synthetic coding sequence
  source 1..2331: mol_type = other DNA
atggccgcacccggtgatccacaggatgaactgctccccctggccggtccgggatcccagtggcttcggcacagaggcgagggcgagaacgaggccgttactcccaagggtgctacaccagcccctcaggctggcgaaccgtctcctggcttaggcgctagagccagggaggccgctagcagagaagccggaagcggacccgcacgtcagtcaccagtggccatggaaactgctagcaccggggtggctggagtgtcttcagctatggatcacacattcagtacgacctctaaggatggcgaaggtagctgttacaccagtctcatctccgacatctgctatccaccccaggaagactctacttacttcaccgggatccttcagaaggaaaatggtcacgtgaccatctccgaaagtcctgaagagctagggaccccaggccctagcctgcccgacgtgcccggaatcgagagtagagggctcttctctagcgatagtggcattgagatgaccccagccgagtcaacagaggtcaataagattcttgcagatcctctggaccagatgaaggccgaggcctacaagtatatcgacatcaccaggcccgaggaggtgaagcaccaagaacagcaccatcccgaattagaagacaaggacttggactttaaaaataaggacaccgatatcagcataaagcccgaaggcgtgcgcgagcccgataaaccagccccagtggaaggaaagatcatcaaagaccacctgctggaagaatccaccttcgccccttacatcgacgacctttctgaagagcagcgcagggcccctcaaataaccaccccggtgaagataaccttgacggaaattgagccctcagtagagactaccacccaggaaaagaccccagaaaagcaggacatctgtctgaaaccctcaccagatacagtgccaactgttaccgtgtctgagcctgaggatgactcgcctggcagtatcaccccaccatcttcggggaccgagcccagtgccgctgagtcacagggcaagggaagtatttcagaagacgagctcatcactgcaatcaaggaggccaagggtctgagctacgagactgctgaaaacccacgcccagtgggacaactcgccgatcgcccagaggtgaaggctaggtccggccctccaactatcccatctccactggaccacgaggcctcctcagcggagtctggcgattctgagatcgagctcgtaagtgaggaccccatggctgctgaggacgccctgccctctgggtacgtgagtttcggacacgtgggtggacccccaccttcccccgcatctccttccattcagtatagtatcctccgggaggaacgtgaggccgaactagactcagaactgataattgaatcctgtgacgcatccagtgcctcggaagagtcccctaagcgcgagcaggacagtccacctatgaagccctcagccttggacgccatccgcgaggaaaccggagtccgcgctgaggagcgggctccttcccgacggggacttgctgagcccggttcctttcttgattacccaagcactgagcctcaaccagggccagaactgccccctggcgacggagcgctggagccagaaacaccgatgctgcccaggaagcctgaagaagacagttcatctaaccagtcgccagccgcaaccaagggccctggtcccctgggcccaggcgctccaccgccattattatttctgaacaagcagaaggccattgatctcctctactggcgggacataaaacagaccggcattgtgtttggttcgtttctgttgctcttgttctcgctgacccagttcagtgtggtgtcagtggtggcctaccttgctctcgccgcactctcagctaccatttcgttcaggatttataaatcggtgctccaggcggtccagaaaactgacgagggtcaccccttcaaagcctacttagagctcgaaattacactctcacaggagcagattcagaagtatactgattgtctgcagttctacgtcaactcaacattgaaagagttacgacggctgttcctggtgcaggacctggtcgattctctcaaatttgcggtgctcatgtggcttctgacatacgtgggagcccttttcaatggtcttacacttttgctgatggcagtggtgtccatgttcacgctacctgtggtctatgtaaaacaccaggctcagatcgaccagtacctgggcttggttagaactcatataaacgccgtggtggcgaaaatccaggcaaagatccccggagcgaaaaggcatgcagaatag

SEQ ID NO: 238414 - DNA, 627 bp, synthetic construct
  misc_feature 1..627: note = Description of Artificial Sequence: Synthetic coding sequence
  source 1..627: mol_type = other DNA
atgcaggccaccgcagattctaccaaaatggattgcgtatggtctaactggaagagtcaggccatcgacttgctttattggcgggatatcaagcagacgggaatcgtgtttggctccttccttctattgctttttagtctgactcagtttagtgtggttagtgtcgtggcctacttggctctcgccgcactgagcgccaccatatccttccggatctataagagtgttctccaagccgtgcagaagactgacgagggacatccgtttaaggcatacttggaactcgagattaccctatcacaagagcagattcagaagtacacagactgtctgcagttctacgtaaattccactctcaaagaactgcggaggttgttcttagttcaggacctcgtggacagcttgaaattcgcagtgttgatgtggcttctcacatacgtgggagcgttgtttaatggtttgactctcctgttgatggccgtcgtctcgatgttcaccctgccagttgtgtacgtgaagcatcaggcgcaaatcgaccagtacctggggctggtgcgcacccatatcaacgcggtagtagccaaaatccaggccaaaatacccggtgcgaaacgtcacgcagagtag

SEQ ID NO: 238415 - DNA, 1071 bp, synthetic construct
  misc_feature 1..1071: note = Description of Artificial Sequence: Synthetic coding sequence
  source 1..1071: mol_type = other DNA
atggcagccgaggatgccctgcctagtgggtacgtgtcattcggtcacgtgggaggtccccctcctagccccgcttctcctagcatccagtactctattctccgggaagagcgggaagcagaattggatagcgagcttatcatcgagagctgcgatgcaagttcagcaagtgaagagtcccctaagcgcgaacaagactctccaccaatgaagccctcagcgctggatgctatcagagaggagacaggcgtccgggctgaagagcgagcgccatcccgacggggattggcagagccaggcagctttctcgactatcccagtaccgagccccagcctgggcctgagctgcctcccggtgacggggctcttgagcccgaaacacctatgttgccaaggaaacctgaagaggactcctcctcaaatcaatcccctgctgctaccaagggaccaggccctctgggaccaggtgcgccacccccactgctgttccttaataagcaaaaagcaatcgacctgctgtactggcgggacatcaagcagacagggatcgtgtttgggtcatttctcctgctgctttttagcttgacccaattctccgtggtgagcgtcgtcgcttacctggcactcgcggctttgtctgccactatctcgtttagaatttacaagtccgtcctgcaagccgtgcagaagaccgatgagggccatccattcaaggcttatctcgagctggaaatcacgctgtcacaagaacagatacagaagtacaccgactgccttcagttctatgtgaactctactctcaaagagctgaggaggctgttcctggttcaggatttggtcgacagccttaagtttgccgtcctaatgtggttgcttacatatgtgggagccctgtttaatgggcttacactattgcttatggccgtcgtgagtatgttcaccctgcccgtagtctacgttaagcaccaggcccagatcgatcaatacctcggactagtgaggactcacattaacgcggtggtggccaagatacaagctaagattcctggcgctaaacgccatgccgagtag

SEQ ID NO: 238416 - DNA, 2109 bp, synthetic construct
  misc_feature 1..2109: note = Description of Artificial Sequence: Synthetic coding sequence
  source 1..2109: mol_type = other DNA
atggagacagcgagtaccggtgtcgcgggtgtgagcagcgccatggaccacaccttctccaccacctctaaggatggtgagggtagttgttacacatcccttatctcagacatttgttatcctccgcaggaagactcaacatattttacgggaatcttgcagaaagaaaatgggcacgttacaatttctgagtctccagaagagttgggtactccaggaccgagtttgccggacgtgcctggcatagagtctcgcggactgttttccagcgactccggcatcgagatgacccccgctgagtcaactgaggtgaataagattttggccgacccacttgatcagatgaaagccgaagcctacaagtatatcgatattacacgcccagaggaggtcaagcatcaggaacagcatcaccccgagctggaggataaggacctggacttcaaaaacaaagatacggacatttccatcaaacccgaaggtgtgagggagccagacaagcccgcacctgtggaggggaagatcattaaggatcacttattagaagaaagtacttttgccccatatatcgacgacctgagcgaagaacagcggagagccccacagatcaccaccccggtgaaaattacattaaccgaaatcgagccctctgttgagaccaccacccaggaaaagaccccagagaagcaagacatctgccttaagcccagcccagatactgtgccaaccgtgaccgttagtgagcctgaggacgactcgcccggatcgatcaccccaccatcatcaggcaccgagccctccgctgccgaatcccaggggaaggggtccatcagtgaggatgaactgataaccgcaattaaggaagcaaaaggattgagctacgaaactgcagaaaatcctcgacctgtgggccagctggccgaccggccagaggttaaagctagaagcggccctcctacaatcccatctccactggaccatgaggcctcaagcgctgaatccggggatagtgagattgaacttgtgtcagaggatcctatggcagcggaagacgccctgcctagtggatacgtgagcttcggccacgtcggcggaccacccccaagccccgcttccccctctattcagtatagcatcctgcgggaggagagggaggctgagctagactctgaacttatcatagaatcttgcgatgcttcatcagcctccgaagagagtcctaaacgggaacaggattctccccctatgaaaccaagcgccctggatgcaattcgggaggagactggggttagggctgaagaaagagccccttcccgcagaggactcgccgaaccaggatctttcttagactaccccagcaccgagcctcagcctggcccagagttgccccctggcgacggggcactagaacctgaaactccaatgctgccgcgtaaacctgaggaagatagcagtagtaatcagagtcctgctgcaactaagggcccaggacccctgggtccaggagcaccacccccacttcttttcctgaataagcagaaggccatcgatttgctatattggcgagatattaaacagactggtattgtgtttggcagcttcctgctcttgctgtttagccttacacaatttagcgtcgtgtcagtggttgcatatctggccttggccgctctcagtgcgaccatcagttttaggatctacaagagcgttttgcaggccgtgcagaagacagatgaaggacatcccttcaaggcttacctggagcttgaaatcaccctgtctcaggaacagattcaaaagtacactgattgcttacagttctacgttaattccactctgaaagagctccgcaggctgttccttgtacaagatctagtggacagtctgaaatttgcagtgttaatgtggctcctgacatacgtgggggcactgttcaacgggctcaccttactgctgatggccgtcgtctctatgtttacactgcccgttgtctatgtaaagcatcaggcgcagatcgaccagtacctgggccttgtgcgcactcacatcaatgcagtggtcgccaagatccaagcaaagatccctggagctaaacgccatgcagagtag

SEQ ID NO: 238417 - DNA, 1638 bp, synthetic construct
  misc_feature 1..1638: note = Description of Artificial Sequence: Synthetic coding sequence
  source 1..1638: mol_type = other DNA
atgggccaggttctaccagtgtttgctcactgtaaggaagccccaagtacggcttcaagcacgcccgatagcaccgaaggcggaaatgatgatagcgattttcgggaactgcataccgcccgagagtttagcgaggaggatgaggaggaaactacatcgcaagattggggcacccctagggagctaacattctcttacattgcattcgatggggtggtaggtagcgggggacgtcgtgactctactgccaggagacctcgtccgcaaggtagatctgtctctgagcctagggaccaacatccccagccttctctcggtgactctctcgaatctattccaagtttgtcgcagagtcctgaacccggaagaagaggtgacccagataccgcgccaccttctgaaaggccccttgaggatcttaggctgcgtctcgatcatctcgggtgggtcgccagaggtacaggctcaggcgaagactcatcaacatcttcttccactccactcgaggacgaagagccccaggaaccaaacaggctggagactggggaggcaggggaagagttggacctccgcctacgactggcccagcccagcagcccagaagtgcttacccctcagctgagccctgggtcaggcacgcctcaagccggaacgcctagtcccagcaggagcagggatagtaactcgggcccagaggagcctctgctcgaggaggaggagaaacagtggggtccactggaaagagaacccgttagaggacagtgcttggactccactgaccagctggagttcacggttgagcccagactcttggggactgccatggagtggctcaaaacttctctattgctggcagtgtacaagacagtccctatattggagctgagccccccactgtggactgcaattggatgggtgcagcgaggacctacccccccaacgcccgtgcttcgcgtgttgttgaagtgggctaaaagccctagaagcagcggagtcccaagtttaagtcttggagctgatatggggtccaaggtggccgacctactgtactggaaagatacgagaacaagcggggtcgtattcacggggcttatggtttctctgctgtgtcttctccacttctccatagtttcagttgccgcacatctggcactgctcctgctgtgcggtacaatttccttgcgggtgtataggaaggtgctacaggccgtgcaccgcggagacggcgcaaaccccttccaggcataccttgacgtggacctcactttgacaagggagcagaccgagagactttcacatcagatcacgtctcgcgtagtcagcgcggctacccagctccggcatttcttcctcgtcgaggatctggttgactctctaaaattggctcttctcttttatatactgactttcgtgggcgcaattttcaacggcttaaccctactcatcttaggcgttatcgggttgtttaccatcccactactgtaccgccaacaccaggcgcagatcgatcaatacgttggactggtgactaatcagctgtcccacattaaggcaaagattcgggcaaagatacctgggaccggggctttagcctctgcggctgcagccgtttccggctcaaaggccaaagctgaatag

SEQ ID NO: 238418 - DNA, 1419 bp, synthetic construct
  misc_feature 1..1419: note = Description of Artificial Sequence: Synthetic coding sequence
  source 1..1419: mol_type = other DNA
atgggacaagttctccccgtgttcgcccactgcaaggaggctcccagcaccgcaagcagcactcctgacagcaccgaagggggaaatgatgattccgatttcagggagttgcacaccgccagggaatttagcgaagaggatgaagaggaaacaactagccaggactgggggacccctcgcgaactgaccttctcttatattgcttttgacggcgtcgtcggaagtggcggtaggagagattccactgctagacgacctcggcctcaggggaggtctgttagcgaacctcgtgaccagcatcctcagccctctcttggcgactccctcgagtccattcctagcctgagtcagtctccagagcctggccgaaggggggatccagatactgcacccccatctgaacggcctttggaggatctccgcctccgcctagatcatctcggttgggtcgcgagaggaacgggaagcggcgaagattcctccacatctagctccaccccactggaggacgaagaaccccaggagcccaaccgtctcgagactggcgaggccggtgaagaactagacttgcgactacgtttagcccagccaagcagcccagaggtactgacgcctcagttatcgccgggatcaggtactccacaggcgggaacacctagcccgagtcgatctagagactctaacagcggccctgaggagcctctgctggaggaggaggagaagcagtgggggcctttagagagggagccggtgcgcggacagtgtttggattccacagaccagttggagttcacagtggaacccagactcctggtggccgacctcctgtattggaaagatacaagaacttcaggtgtggtgttcacaggcctcatggtctccctcctctgcctgcttcattttagcatagtgagtgtggcggctcacctcgcgctcctgctgttgtgcggaaccatcagtctgagggtgtaccgcaaagttctacaggccgtacacaggggtgatggggctaacccgtttcaagcctatctcgacgtggacctgaccctgactagggaacagactgaacgactctcccatcagatcacttcacgcgtcgtgtccgctgccacacaactcaggcactttttcctagtcgaagacctggttgacagcctgaagctagctctgttgttttacattctaacattcgtgggcgcaatttttaatgggctgaccctgctgattttgggggttataggactcttcactattcctctactgtaccggcagcatcaggcacagatagaccagtacgtcgggctggtcaccaaccagctcagtcacatcaaggctaagatacgtgcaaaaattcccggaaccggcgctcttgcttctgctgcagctgccgtgagtgggagtaaagctaaagccgagtag

SEQ ID NO: 238419 - DNA, 618 bp, synthetic construct
  misc_feature 1..618: note = Description of Artificial Sequence: Synthetic coding sequence
  source 1..618: mol_type = other DNA
atgggcagcaaggttgcggacctgttgtactggaaggacaccagaacgtctggcgtagtttttacaggcctaatggttagcctgttgtgcctcctgcactttagtattgtgtcggtcgctgcgcatcttgcccttctacttctttgcggcactattagtctcagggtttatcgcaaggtcctccaggcggttcacaggggagatggcgctaatccttttcaagcatacctggatgttgatttgacgctaacccgcgagcagaccgaacgtctgtctcatcaaatcaccagccgagtggtatcagctgccacacagctgaggcacttttttttggtggaggacttggtagatagtttgaagctggccctgctgttctatattctcaccttcgtaggtgccattttcaacggcttaaccttgctcatcctgggggtcattggtctttttactattcctcttctctatcggcagcatcaggcgcagattgatcagtatgttggcttggtgaccaaccagctgtcccatattaaggcgaaaatcagggccaaaatcccgggaaccggcgcactggccagcgccgctgccgctgttagcggtagtaaggccaaggcagaatag

SEQ ID NO: 238420 - DNA, 3042 bp, synthetic construct
  misc_feature 1..3042: note = Description of Artificial Sequence: Synthetic coding sequence
  source 1..3042: mol_type = other DNA
atggccgaaccatcagcagccacacaatcccattccatctcaagcagcagctttggcgcagagccttccgcgcctgggggaggcggttcgcctggggcttgccccgcactcggaactaagagctgcagctcaagttgtgcagaaggactctctagtctgtgttctgacgagccttcttccgagatcatgacgagctcattccttagctcttccgagatccataatacgggtttaacaatcctacacggagagaagagccacgtactgggctcacagccaattttggcaaaagagggtaaggatcacttggacctgctggatatgaagaaaatggagaaaccccagggaacaagtaacaatgtaagcgactctagtgtgtccttggccgcaggagtgcactgtgaccggccaagcattcctgcctctttccccgaacatcctgcctttttgtccaagaagatcgggcaagtggaggagcaaatcgataaggagacaaagaatcctaacggcgtgagctctagggaggccaaaacggcactcgacgctgatgaccggttcaccctgctgacggcccagaagccacccacggagtatagtaaagtggaaggcatctacacctatagcctttctccctctaaggtaagcggagatgatgtcatagagaaagactcccccgagtcccccttcgaggttattattgacaaagccgctttcgacaaagagttcaaggacagctacaaggaatcaaccgacgactttggtagctggtcagtgcataccgataaagaatcatccgaggatatctctgaaaccaacgataaactgttcccattgcggaataaagaagccggacggtatcctatgtccgcgctcctctcaaggcagtttagccatacgaatgcagcactcgaggaggtaagtaggtgcgtgaacgatatgcataatttcactaatgaaatcctgacctgggatcttgttccacaggtgaagcagcaaactgataagagttccgactgcattactaagaccaccggactggacatgtccgagtacaattccgagatcccagttgtcaacctgaagacaagtacccaccagaaaactcctgtgtgttcaattgatggatccactcctattacaaaaagtacaggggactgggcagaagcctctttacaacaggaaaatgctattacagggaagcctgtacccgacagcctgaatagtacaaaggaattctccattaaaggagttcagggaaatatgcagaagcaagatgacaccctggccgaactgcccggttcgcctcccgaaaagtgcgacagtctaggcagcggagtagccacagtaaaggtagtccttcctgacgaccacttgaaagatgaaatggattggcagtcctccgcgctgggtgaaatcacagaagcggattcatcaggcgagtctgatgatacagtaatcgaggatattacagcagatacttcgttcgagaataacaaaattcaggccgagaagccagtgagcatcccctctgccgtcgtgaaaaccggtgagcgcgagatcaaggaaatccctagttgcgagagagaggagaagacttctaagaatttcgaagagctggtgtccgatagcgaactgcatcaggatcagccagacatcttagggagatctccggcttccgaggcagcctgctctaaggtcccagatacaaacgtatctctggaagatgtatcagaggttgcacccgaaaagcctatcacgactgaaaatcctaagctcccgagcacagtgagcccgaacgtattcaacgagacagagttctccttgaacgtaaccacgtccgcttatctcgagagcttgcacggcaagaacgtaaagcatatagacgattcctcacccgaggatttgatcgcggctttcacagagacccgcgacaaaggtattgtggattcagaacgcaatgcatttaaagccatatcagaaaagatgaccgattttaagactacgcctcccgtcgaggttctgcatgaaaacgagagtggcggttccgagattaaggacatcgggtcgaagtattctgagcaatctaaagagacaaacggatcagaacctctgggagtattccctacacaggggaccccagtggcctcacttgatcttgagcaggaacagctgactattaaagcactgaaagaactgggcgagcgtcaggtcgaaaaaagtaccagcgcccagagggatgcagaacttccttccgaggaggtcctgaagcagaccttcacctttgctcctgagagctggccgcaacgtagttacgatatattggagaggaacgttaaaaatgggagcgatctcggaatcagccaaaagcctattaccatacgtgaaaccacccgggtcgacgcagtgtcttcactgtccaaaaccgagttggtcaaaaagcacgtgttggcaagattgctgaccgacttttccgttcatgacttgattttctggagagatgtgaagaagactgggtttgtgtttggcacaaccttgatcatgttgctgagcttggcagccttctctgtgatttccgtagtcagctatctgatcttggccctgctgtctgtcactataagcttcaggatctataagagcgtgatccaagctgtccagaagtccgaagagggacatccatttaaggcataccttgatgttgatatcactctctcgtcagaagcctttcataattacatgaacgccgctatggtgcacatcaatagagcccttaaactaataatccggctgttcctcgtggaggacctggtggacagtctgaaacttgctgtgtttatgtggctgatgacttacgtcggcgctgtcttcaatggtattactctactcatactggccgaactgctgattttctccgtacctatagtatatgagaagtataaaacccaaatagaccattacgtcgggatcgccagagaccagactaaatccatcgtcgagaagatccaagctaaactgcctgggattgctaaaaagaaggccgaatag

SEQ ID NO: 238421 - DNA, 726 bp, synthetic construct
  misc_feature 1..726: note = Description of Artificial Sequence: Synthetic coding sequence
  source 1..726: mol_type = other DNA
atggccgaaccctcagctgccactcaatcacactcaatcagtagttcaagcttcggcgctgaaccctctgcccctggtggtgggggatctccaggtgcttgcccggctcttggcacaaaatcttgttccagctcctgtgctgtgcatgacctgattttttggagagatgttaagaaaactggattcgtattcggcaccacacttattatgctcctcagcctggccgcatttagtgtgatttccgttgtaagttatctgatccttgctcttctctccgtgaccatatcctttcggatttacaagtccgtcattcaggccgtacagaaatccgaggagggacatcccttcaaggcgtacctggatgtcgatattaccctgtctagcgaggccttccataattatatgaatgccgcaatggtgcacataaacagagccttgaagttgatcatcaggttgtttctagttgaggaccttgtggactctctgaagttggctgtctttatgtggctgatgacctacgtcggagccgtcttcaatgggattaccctgctcattctggcagaactgctgatctttagtgttccaatcgtttatgagaaatataaggacccttccaagactccctggaaccgtcagaagaagggcaggatctctacctggaagcctgaaatgcaacagcttttgaaacaccacctgatcgtgattacctctctattggtgctgtag

SEQ ID NO: 238422 - DNA, 645 bp, synthetic construct
  misc_feature 1..645: note = Description of Artificial Sequence: Synthetic coding sequence
  source 1..645: mol_type = other DNA
atggccgagccatcagccgctacccagtctcacagtatatctagctcaagtttcggtgcagagccatctgcacctgggggtggtgggtcccctggcgcatgtcccgcacttggaacaaaaagctgcagtagcagctgcgctgtacatgatctgatcttctggcgcgatgtgaagaaaactggcttcgtgttcgggaccaccctgattatgctgctgtctctagctgctttctctgtgataagtgtagtctcctacttgatcttagctctcctctccgtgacaatctcatttagaatctacaagtctgtgatccaagcagttcagaagtccgaagagggacacccatttaagccacgacttatcactatgttagccagccctgagattcgcccttctcaactgctaaagcgcagcaaacagaatagccttgaatcccccaagaagcggcagaataaatacatggagacacgaaacgccaccgtgaccaagacaccgtttaactcgtacaatgtcgtaacctgtactatgaaggagaacacacaatgccagttggagcctgccttccaggcgttcttccttatttggtgtttcttgcctagcttcccctttaatccccagtaccaggcacagaaactgatggactag

SEQ ID NO: 238423 - DNA, 768 bp, synthetic construct
  misc_feature 1..768: note = Description of Artificial Sequence: Synthetic coding sequence
  source 1..768: mol_type = other DNA
atggcggagccgagcgcggctacccaatcccattccatatcgagctcaagttttggggctgagccgagcgcaccgggagggggtggcagtcccggagcatgccctgctctcggcacgaagagctgcagctcctcttgcgccgatagctttgtgagtagtagctcttcccagcccgttagtctgttttctacgtcccaagtccacgacctcatcttctggagagatgtgaagaagaccggattcgtattcggaaccaccttaattatgcttctgagcctcgccgctttcagtgtaatttccgtggtgagttacctaattctcgctctgttaagtgtgaccatcagcttcagaatctataagtcagtcattcaagccgtgcaaaaaagtgaggagggccatcctttcaaggcatacctggacgttgacattacactgtcttctgaggcctttcataattacatgaatgctgctatggtgcacatcaatcgcgcattgaagctcattattcgattattcctggtggaggacctggtggacagcctgaagctagccgtctttatgtggttgatgacctatgtcggggcagtgtttaacggtataactctcctgatcctggccgagctgctcatcttttcagttcccatcgtgtatgagaaatacaaaacccaaattgatcactacgtcggaatcgccagggatcaaaccaaatctatagtggagaagatccaggcaaaactcccaggaatagcaaagaaaaaagccgagtag

SEQ ID NO: 238424 - DNA, 3099 bp, synthetic construct
  misc_feature 1..3099: note = Description of Artificial Sequence: Synthetic coding sequence
  source 1..3099: mol_type = other DNA
atggccgaaccaagcgcagcaactcaatctcactcaatttcaagctcttctttcggtgctgagccatcagcccctggtggcggaggctcccctggagcatgcccagcgctgggcaccaagtcctgcagctctagctgcgcagattccttcgtttcaagtagcagctcacagcctgtttctttgttttctacttcacaggaggggctctcgtccttgtgcagcgacgagccaagttcagaaattatgaccagctccttcctgagcagcagcgagatccataatactgggctgactatcctgcatggcgaaaagagccatgtgctcggaagccagcccatcctggctaaagagggcaaagatcatctagatctactggatatgaagaaaatggaaaagcctcagggtacttctaacaatgttagcgatagcagcgttagcctggcggcaggggtacattgcgatcgtccttcgattcctgcttcatttccagaacatcctgccttcctgtcaaaaaagataggccaagtcgaagagcagatcgacaaagagaccaagaatcccaatggagtgagttcacgagaggccaagaccgcactcgatgccgatgatcggtttacactgctgacagcccaaaaaccgcctacggaatattccaaagtggaagggatctatacgtatagcctcagccccagtaaagtgagcggagatgacgtgatcgagaaagattcccctgagagcccttttgaggtcattatcgacaaagcggcttttgacaaagaattcaaggacagttataaagaatctacagatgatttcgggtcctggagcgttcacactgataaagagtccagcgaagatatatcagagaccaacgacaagctcttccccctgaggaacaaagaggcgggtagataccctatgtctgccctactgagtagacagttttcccacacaaacgcagccctcgaggaggtgagccggtgcgtgaatgatatgcacaactttactaacgaaattctgacctgggatcttgttccgcaggttaaacagcagaccgacaagtcatctgactgcataacgaaaaccacaggcttggacatgtctgaatataacagcgagatcccagtcgtaaatctgaaaactagcactcaccaaaaaacaccggtgtgcagcattgacggatctacgccaataaccaaaagcacgggggattgggcggaagccagtctacagcaggagaacgccatcacaggaaagcccgtcccggattccctaaattcgaccaaagagtttagcatcaaaggggtgcagggcaacatgcagaagcaagatgatacattggcagaactgcctggtagtccccctgaaaaatgcgattccctaggaagcggagtggccactgtaaaagtagtcctgccagatgatcatctcaaggacgaaatggattggcaatctagcgctctgggagaaattacagaagctgactctagcggcgaatccgacgacactgtcatcgaggacattactgctgatacctcctttgagaacaacaagatacaggccgagaagcccgtgagcattccaagtgcagtggtgaagacaggagaacgcgaaataaaggagattccaagttgtgaacgtgaggagaagacaagcaagaactttgaggagctcgtgagcgactccgagctacaccaagaccaacctgatatcctgggaagatctcccgctagtgaggccgcatgcagcaaagttcccgacacaaacgtgtctttagaggacgtgagcgaagtcgctccagaaaagcccataaccactgaaaatcccaagctgccatcaaccgtaagtccgaacgtctttaacgagaccgaattctccctcaatgtgaccactagcgcgtatctggagagtctgcacgggaagaacgttaagcatatcgatgattcttctcctgaggatctgattgcagcttttacagaaacacgagacaaaggcatagtggatagcgagcgtaatgcctttaaggcaatcagtgaaaaaatgacagacttcaaaaccaccccccctgtggaggttctgcacgaaaacgagtccggaggtagtgaaatcaaggatatcgggtccaagtactctgagcagagcaaggagacaaatgggagtgaacctctgggtgtgtttcccactcagggaacaccagttgcaagcctggacctggagcaggaacagctgacaatcaaggctctgaaggaattaggcgagagacaggtggaaaaaagcacgagcgcacaacgtgacgctgaattgccctctgaggaagtgctaaagcagaccttcactttcgcaccagagtcatggccccaacgatcgtatgacatcctggagcgtaacgtgaaaaatggttccgacttgggcatttcgcagaaacccatcactatccgggagaccaccagggtggacgcagtcagcagcctcagcaagaccgagctcgtgaaaaagcatgtcttggctaggctgttgaccgattttagcgtccatgatctgatcttctggcgggacgtaaagaaaacaggattcgtgttcggaactacgctaattatgctgctttccttagcagctttcagcgttataagtgtcgtgtcctatttaattcttgcgctgctgtctgttactataagtttcaggatctacaaaagcgtcattcaggccgttcagaagagtgaggagggacatccatttaaggcctacctggatgtcgatattactctgtcctcggaggcctttcataattacatgaatgctgctatggtgcacatcaaccgagcccttaagcttatcatccgactgttcctggtcgaagaccttgtggacagtctcaagctggcggtgtttatgtggctgatgacatacgtgggagccgtgtttaatggtatcactctccttatcttggccgagctccttattttctcagttccaattgtttacgagaagtacaaaacccaaattgaccactacgtaggcatcgctagagaccaaactaaatccattgtcgaaaaaatccaggcaaagctgccaggcattgctaaaaaaaaggctgagtag

SEQ ID NO: 238425 - DNA, 372 bp, synthetic construct
  misc_feature 1..372: note = Description of Artificial Sequence: Synthetic coding sequence
  source 1..372: mol_type = other DNA
atggctgagcctagtgcggcaacccagtcacattccatctcatcctcttcatttggggcagagcctagcgcccctgggggtggcggaagccccggagcctgtccagctctcggcaccaagtcatgctcgtccagttgcgcagtccatgaccttatcttttggcgtgatgtcaaaaaaaccgggttcgtattcgggaccacactgattatgctgttgtccctggctgcattttccgtaatctccgttgtgtcatacctaattctggcattgctctccgtgaccatttcctttcgaatctacaagagcgtgattcaggcggttcaaaaaagcgaggaaggacatcccttcaactggttgagctcctgcggctag

SEQ ID NO: 238426 - DNA, 711 bp, synthetic construct
  misc_feature 1..711: note = Description of Artificial Sequence: Synthetic coding sequence
  source 1..711: mol_type = other DNA
atggccgagccctccgccgctacccagtctcattctattagctcttcctccttcggagcggagccgtctgcacctggcggaggaggcagtcctggtgcctgtcccgctctaggaaccaaatcctgcagtagtagctgtgccgtccacgatctgattttttggcgggacgtgaagaaaactggcttcgtctttggcactaccttaatcatgcttctctctcttgccgcattcagcgtcatcagcgtggtaagctatctaatactcgcactcctgtctgtgaccatctcgttccggatttacaaatctgtcattcaggccgttcagaaatcggaagaagggcaccctttcaaggcgtatctggacgttgacattaccctgagctccgaggcctttcacaattatatgaacgcggcaatggtccacatcaaccgggcactcaaactgattataagactctttctcgtagaggatctggtggattcactgaagctcgccgttttcatgtggctgatgacttatgtgggcgctgtctttaatggaatcaccctcctaatcttggcagaactgctcattttcagcgtgccaatcgtatacgagaagtacaagactcagattgaccactacgtgggaatcgctcgcgatcagacaaaatcaattgttgagaaaatccaggccaaactccccggtatcgccaaaaaaaaggcagaatag

SEQ ID NO: 238427 - DNA, 1122 bp, synthetic construct
  misc_feature 1..1122: note = Description of Artificial Sequence: Synthetic coding sequence
  source 1..1122: mol_type = other DNA
atggaggacctggaccagtcaccgctggtgagctcttcggattcgcctccaaggccgcagccagccttcaagtaccagtttgtgcgagagccagaggacgaggaggaagaggaggaggaagaagaggaggacgaagatgaggacttagaggagctcgaagtgctggagcgtaaaccggctgccggtctttctgctgccccagtgcccactgcccctgcagcaggtgccccactgatggactttggaaatgatttcgtaccaccagcgccacggggacccctcccagcggctcccccagtagcaccggagaggcagcccagttgggatccttctccagtgagctctaccgtgccagcgccttctcctctgtcggcagccgcagtctcacccagtaagctccccgaagacgacgagcctccagcacgcccacctcctcctccacctgccagcgtgagtccacaggcagagccagtgtggacccctcccgctccagctccggctgctcctccctcaaccccagcagctcccaaacgcagaggtagcagtgggtctgttgtggtggaccttctctactggagggatattaagaagacaggcgtggttttcggtgccagtcttttccttctgctatcactgaccgttttctccattgtgagtgtgactgcatatatcgcccttgccctactgtcagttacgatatcatttagaatttataaaggggttatccaggccatccagaagagcgacgagggacaccccttccgggcataccttgagtctgaggtggcaattagtgaagagctagtgcagaagtactcaaactcagccctgggccatgtcaactgtacaattaaagaactccgcagattattcctggtggatgacctggttgattccctcaaatttgcggtgctcatgtgggtgttcacttatgtaggtgcactgttcaatggccttacactgctgatcctggctttgataagccttttcagtgtccccgtgatctacgagaggcatcaggcacagatcgaccactatctggggctcgcaaacaaaaacgttaaagacgcaatggcgaagattcaggcaaaaatccctggccttaaacgcaaggctgagtag

SEQ ID NO: 238428 - DNA, 3579 bp, synthetic construct
  misc_feature 1..3579: note = Description of Artificial Sequence: Synthetic coding sequence
  source 1..3579: mol_type = other DNA
atggaagatcttgaccagtccccgcttgtttcgtccagcgactccccaccacgccctcaaccagccttcaaatatcagtttgtgcgggagccagaagacgaggaagaggaagaagaggaagaggaggaggatgaagacgaggacctcgaggagctggaggtgctcgagaggaaaccggctgccggtctttccgcagcccctgttcccactgcacctgcggcaggcgctcctctgatggattttggaaacgactttgtccctccagctcccaggggaccgctgcctgctgcacccccagtagcacctgaaaggcagccctcatgggatccaagccctgtgtcttctaccgtgcccgcaccctctccactttctgccgcagctgtatccccttcgaagctgcctgaagatgacgagccacccgcacgtcccccaccacctcctccagcgagcgtatctccccaggccgagccagtctggactcccccagcccctgccccagcagcgcctccatccacaccagcagcccctaaaaggcggggaagctcaggatcagtggatgaaaccctgtttgcactgcctgccgcatccgagcccgtgatccggtcctccgctgagaacatggatttgaaagagcagccgggtaatacgatttccgctggccaggaagatttccccagtgtgctgctggagactgcagctagcctgcctagtttatctccactgagtgctgcaagtttcaaggaacacgaatacctgggtaatctgtccactgtgctgcctaccgaaggtaccctgcaggaaaatgtctctgaggcctcgaaggaagtgtcagaaaaggcaaaaacacttcttattgatcgtgacctgactgaattttcagaactcgagtactccgagatgggcagcagcttctcagtgtctcctaaagcagaatctgcagttattgtcgcgaaccccagagaagaaataatcgtgaagaataaggatgaagaggagaagttagtctccaataatattttgcacaatcagcaggagctgcctaccgcccttacaaagctggttaaggaggatgaagtggtgtcatcggaaaaggccaaggacagcttcaatgaaaagagagtcgcggtggaggcaccaatgcgggaggagtacgccgatttcaagccttttgagagagtgtgggaagtcaaggactctaaagaggactctgatatgctggccgcaggcggaaagattgagtctaatttagagtccaaggtagataagaaatgctttgccgacagcctggaacaaacgaatcatgagaaagactccgaaagcagcaacgacgatacatccttcccatccacgcctgagggaattaaggatcggtctggagcctacattacgtgcgccccatttaaccccgctgcaacggaatctatcgctacaaatatattcccactgctgggtgatcccacatcagagaacaagacagatgagaagaagatcgaagaaaaaaaagcccagatcgtcaccgaaaagaacacctcaaccaagacctcaaatcccttcctcgtggcagcccaggattccgagacagattatgtcaccaccgataatctcacgaaagttacggaggaagtggttgccaatatgccagaaggacttaccccagatttagttcaggaggcgtgcgaaagcgaattgaacgaagtgacagggaccaaaattgcctatgaaacaaagatggacttggtgcagacatcagaggtgatgcaagaatcattataccccgcagcgcagttgtgtccttctttcgaagaatcggaggctactccatctcccgtcctcccggacattgttatggaggctcctttgaattccgccgtccctagcgccggagcttccgtgatacaaccatctagctctcctctcgaagcttccagcgtcaactatgaatccatcaaacatgagccagaaaacccacctccctacgaggaggccatgagtgtgtctcttaagaaggtctccggcattaaggaagagattaaggaacctgagaacatcaacgccgcactccaagaaacagaggcaccttacatatccatcgcttgcgatctgatcaaggagaccaagctctctgcggaacccgctcccgacttcagcgattattccgaaatggcgaaggtagaacagccggtgcctgatcacagcgaactagttgaggacagctccccagactctgaacctgtggatctgttctccgatgatagcattccggatgtgccccagaaacaggatgaaacagtgatgttagttaaggagagcctaactgaaacatctttcgaatcaatgattgagtacgagaacaaggagaagttgtccgctctccctcccgagggaggcaagccctatctcgagtctttcaagctgagcctcgataatactaaggatacgctgttgccggacgaggtttcaacattaagtaagaaggaaaagatccccctgcaaatggaagagctcagcaccgcagtctattctaatgacgatctatttattagcaaagaggcccagattcgcgagactgaaacattcagcgactccagtcccatcgagattatagacgagtttccaacgctgatttcctctaaaacagacagtttcagcaaattggcgcgagaatacactgacctagaggttagtcacaaaagcgagattgctaacgccccagacggggctggtagcttgccttgtaccgaattgccccacgatctgtctctgaagaacattcagcctaaggtggaggagaagattagcttctctgatgatttctccaagaacggttctgccacttctaaagtactcctcctccctccagatgtgagtgccctggcaacacaggccgagattgaatcgattgtaaaacccaaagtcctggttaaggaggctgaaaaaaagctgccgtccgacactgaaaaggaggaccgcagtccctcagcgatcttcagcgcagagctgtcaaaaacttctgtcgtggacctgttatactggagggacataaaaaagacaggggtagtgtttggggcatccttgtttttgctacttagcctgaccgtcttcagtattgtaagcgtcaccgcctacatcgccttagcccttctgagtgtcactatatcctttaggatttacaaaggggtgatccaggctatccagaaatctgacgaaggccaccctttcagggcatatctggagagcgaggtggccatctctgaggaattagttcaaaagtactcgaattctgctctaggacacgtgaactgtacgattaaagagctgaggcgcctattccttgtggacgatttggtggattcattaaaatttgcagtgctgatgtgggtattcacatacgtcggagccctgtttaacggacttacgctcttaatccttgcattaatctctctattctctgttccagtaatttacgaacggcaccaagcgcagatcgaccactatctcgggctggccaacaaaaatgtgaaagacgccatggccaagatacaagccaagattcctggtctgaagcgtaaggccgagtag

SEQ ID NO: 238429 - DNA, 2883 bp, synthetic construct
  misc_feature 1..2883: note = Description of Artificial Sequence: Synthetic coding sequence
  source 1..2883: mol_type = other DNA
atggaagacctggatcagagtccacttgtttctagttccgactctcccccacgaccccagccagcgtttaaataccagttcgtgcgagaaccggaagacgaggaagaagaggaagaggaagaggaggaagatgaagatgaggacctcgaggaactcgaggtgttggaacgcaagcagtttagcgaactagaatactcagagatgggctccagcttctcagtgtcccccaaagccgaaagcgccgttatcgtggcaaatccccgagaggagataatcgtgaagaataaagacgaagaagaaaagctggtctccaacaatatcctgcataatcagcaggagctgccgacggccctcactaagctcgtgaaggaagacgaagttgtcagcagtgagaaggcaaaagactcgttcaatgaaaaacgggtggctgtggaagcccctatgagggaggaatacgcggacttcaagccgtttgagcgggtttgggaagtgaaagacagtaaagaagactctgacatgcttgccgctgggggtaagatcgaaagcaacttagaatccaaagtggacaagaaatgcttcgctgactccctcgagcagacaaatcacgagaaagattctgagtcatccaatgatgatactagctttccaagtaccccagaaggcatcaaagatcggtctggtgcctacattacatgtgccccatttaatccggcagctacagagtctatagccaccaatatcttccccttattaggtgaccccacgtccgaaaacaagacagacgagaagaaaatcgaggaaaaaaaggcccagatcgttaccgaaaaaaatacatcgactaaaacatcaaatccttttttagtggccgcacaagacagcgaaacagactatgttacaactgacaatctgactaaggtcaccgaagaagtggtggcaaacatgcctgagggacttacccccgatcttgttcaagaagcctgcgagagtgagctgaacgaagtgacgggtacaaaaattgcctacgagaccaagatggatttggtccaaaccagtgaagtaatgcaggaatccctgtatcccgctgcccagctctgtccatcgttcgaagagtccgaggccaccccgtctccagtacttcccgatatagtgatggaagccccactcaactccgccgttccctcggcaggcgcttctgtaatccagcctagcagttcaccacttgaagcaagttccgttaactacgagtccatcaaacatgagcccgagaatccgcctccatatgaagaggcgatgagcgtgagcctcaaaaaggtgtccgggattaaagaagaaattaaggaacctgaaaatatcaatgccgctctgcaggagacagaagcgccttacatatctattgcctgcgacctgataaaagaaactaagctctctgcagaacccgcacccgatttctcagattacagcgaaatggccaaagtggagcaacctgtgcctgaccacagcgaattggttgaagactcgtctccggacagtgaaccagtggaccttttctctgatgattcaatccctgatgtcccacagaaacaggacgagaccgtcatgttggtgaaagagagcctgaccgaaacatctttcgaaagcatgattgagtacgagaataaggagaaactgtctgccctgccaccagaagggggtaaaccgtatctggaaagtttcaagctgtcgctggataatactaaggatactcttctccctgacgaagtctccaccttgtccaagaaggagaaaattccacttcagatggaggagctgtcaaccgcagtgtactccaatgacgacttgttcattagtaaggaggcccagatccgagaaacggagactttcagcgattccagtcccatcgaaatcatcgatgaatttccgacgcttatctctagtaagactgattccttttccaaactggcacgagaatacaccgacctcgaagtctcccataagtccgaaattgctaacgcgcctgatggtgctggaagcctcccctgcacggagctgccacacgacctgtctttgaaaaacatccaaccgaaagtagaggagaaaatctcattcagtgacgacttcagcaagaacgggtctgccacatccaaggttctgcttttaccacccgacgtatctgccctcgccactcaggccgaaattgagagcatcgtgaagcccaaagtcctggttaaggaggctgaaaaaaagctcccaagcgatacagaaaaagaggacagatccccaagcgccattttttccgcagaattgagcaagacctctgtggtggatctgctgtactggagggatataaagaaaactggtgtggtgtttggggcatcgctgtttttattgttgtccctgactgtcttctcaattgtgtcagtgacggcatacatcgcgctcgccctcctaagcgttacgatctccttcaggatttacaagggcgtaattcaggccatccagaagtcagacgaggggcacccgtttagggcctaccttgagtctgaagtagccatctctgaagagcttgtgcagaaatatagtaattctgctctggggcacgtaaattgtacaataaaagaactgcggagactgttccttgttgatgatcttgtggacagtttgaaattcgctgtgctcatgtgggtgttcacgtatgtgggcgcattgttcaacggattgacccttctgattctcgctttgattagtctgttcagcgttcccgtcatctatgagcgccaccaggcccaaatcgatcattatttggggctcgccaacaaaaacgtcaaagatgctatggctaaaattcaagcgaagattcccggactgaaaaggaaggccgagtag

SEQ ID NO: 238430 - DNA, 2961 bp, synthetic construct
  misc_feature 1..2961: note = Description of Artificial Sequence: Synthetic coding sequence
  source 1..2961: mol_type = other DNA
atggatctgaaggaacagccaggtaatacaatcagcgccggacaggaagatttcccctccgtccttctggagacagcggcaagtctgcctagcctgtcacctctgtccgccgctagcttcaaggaacatgagtacttaggtaatctgagtacggtgctgccaacagaaggcactctacaagaaaacgtgagcgaggcttctaaagaggtttccgaaaaggctaagacacttctcatcgatagagatcttaccgaatttagcgaacttgagtacagcgagatgggctcaagttttagtgtgagcccgaaggccgaaagcgccgtgatagtggccaacccgagggaggagatcattgtgaaaaataaagatgaggaagaaaagctggtgtcgaacaacattctgcacaaccagcaagaattgcccacggccctgactaagctggtaaaagaggatgaggttgtgtccagcgaaaaggccaaagactcttttaacgaaaagcgagttgctgtcgaagctccaatgagggaggagtatgctgacttcaaaccttttgaacgggtgtgggaggtcaaagactccaaggaagattctgacatgctggccgcagggggaaagattgagtcaaacctggagtcaaaagtggacaaaaagtgtttcgctgatagcctggagcagacaaaccacgagaaggactccgagagcagcaatgacgacacatcttttccttctacacctgagggaattaaagaccgtagcggagcctatattacatgtgcaccattcaaccccgcagcgacagaaagtatcgcaaccaatatctttcccctgctgggtgaccctacgtccgaaaacaaaacggacgagaaaaaaatagaagagaaaaaagcccagatcgttacagagaagaacacctcaacaaaaacgtcgaacccatttctggtggccgctcaggattccgagactgattatgtcaccactgataatctaaccaaggtgacagaggaggtcgtagcaaatatgccagaaggcctgaccccagacctcgtccaggaggcatgcgagtcagagctgaatgaggtgaccggaacaaagatcgcgtacgaaaccaagatggacctggtacaaactagtgaggtcatgcaagaatcactgtaccccgctgctcagctctgtccatcatttgaagaaagcgaagcaaccccaagtcccgtcctgccagacatcgtgatggaggctccactgaacagcgctgtcccatctgcaggcgcttccgtcatccagccaagcagctccccgctggaggcgtcaagtgtgaattacgagtcaataaaacatgagccagaaaatcctcccccatatgaagaagccatgagcgtttcactgaagaaggtgtccggaataaaggaggagatcaaggagccagagaacatcaacgcagcgctccaggagactgaagccccatatatctccatcgcttgtgacctgattaaagaaacgaagttgagcgctgaacccgctcccgacttcagcgactactccgagatggctaaggtggaacaacccgtacccgaccattctgagctagttgaagattcatcacctgactctgaaccagtggaccttttctccgacgattccattccagatgtgccacagaagcaggacgaaactgtcatgctggtgaaggaaagtctgacagagacctcattcgaaagtatgattgaatatgaaaataaagaaaaactctcggccttacctcccgaaggagggaaaccttacctcgaatcctttaagctgtccttagacaacacgaaggatactttgctgccggatgaagtgtcgactctgtcgaagaaggaaaagataccccttcagatggaggagctttccacagctgtatactccaacgacgacctgtttatctccaaggaggcacagatccgcgagactgagactttttccgattcctcacctattgaaatcatcgacgagttccctacattaattagctccaaaactgactctttcagcaaactcgccagagagtacaccgatcttgaggtgagccataaatcagaaattgcaaatgccccagacggtgctggtagcctgccctgtacggagttgcctcacgaccttagcttgaaaaatatacagccaaaggtggaggagaagatcagcttttccgacgatttcagcaaaaacggcagcgccacctccaaagtgttgctgttgcctccagacgtgagcgctctcgccacccaggcagaaatcgaaagcatcgtgaaacctaaggtcctagtgaaagaggctgagaagaagctgcccagcgatactgagaaagaagaccgtagccccagcgcaatcttctcggccgaactgagtaaaacttcggtggtagatttactgtactggagagacataaagaaaacaggagttgtttttggggcttctctgtttttacttctgtccctgaccgtgttctccattgtatcggtcaccgcctacatagctttggctctactttcagttaccatctcatttagaatctataagggcgtgattcaggccatacaaaagtctgacgagggacatccatttcgggcttacctcgaatctgaggtcgccatctccgaagagttagtgcagaagtatagcaactctgccctgggacacgtgaattgtacaattaaggagctccgccgtctcttcctggttgacgatttagtggattctctcaagttcgcagtgctgatgtgggtttttacatatgtgggtgcccttttcaacggcctcacccttctcatcctggctctgatatcactgttttcagtgcccgtcatctacgagcggcaccaggcccagatcgatcattatctcggcctagccaacaagaacgtcaaagatgcaatggcaaaaatccaagctaagatcccaggcctgaaacgcaaagccgaatag

SEQ ID NO: 238431 - DNA, 1179 bp, synthetic construct
  misc_feature 1..1179: note = Description of Artificial Sequence: Synthetic coding sequence
  source 1..1179: mol_type = other DNA
atggaagatcttgatcaatcccctctagtctcctccagtgactctccgccaaggccgcagccggctttcaagtaccagtttgtgagagaaccagaggatgaggaagaggaagaggaagaggaggaagaggatgaagatgaggatcttgaagagctggaggtgctggagcgaaagccggcagctggcctgtctgccgcacccgtcccgacagccccagccgctggagctccgctgatggattttggaaacgacttcgtaccccctgcgccacggggtccacttcctgcagctccacctgtagcccctgagagacagccttcctgggaccccagtccggtgagctctacggtgcctgcaccttccccactctcagctgctgccgtgtcgccctcgaagctcccggaggacgacgaacccccagccaggccacctcctccacccccagcgtccgtttcacctcaggctgagcccgtgtggaccccaccggctcccgctcctgccgctcctccttccacccctgcggctccaaagaggcgtggatcgtctggtagcgtggatgagactttgtttgctcttccagctgctagtgagcctgtgatccgctcttccgccgtggtagatttgctgtattggcgggatatcaaaaagaccggcgtggtttttggagcttccttattcttactgctttccctaacagtcttctccatagtcagcgtgacggcctatattgccctggcacttctatcagtaactatttctttccggatctacaagggggtcattcaggccattcaaaaatctgacgagggtcacccctttcgagcttacctagagtctgaagtggccatttctgaggaactggtccagaaatattccaattctgctctgggtcatgtcaattgtaccattaaagagctgcgcagactcttcctggtggacgatctggttgactctcttaaattcgccgtgttaatgtgggttttcacctacgtcggcgctcttttcaacgggctgactctgctgattttagcactaatatcactgtttagcgtgcccgttatatatgaaaggcatcaggcacagatcgatcattatctaggcctggcaaataagaacgttaaagatgcgatggctaaaatccaggccaagatccctgggctaaagaggaaagcggaatag

SEQ ID NO: 238432 - DNA, 600 bp, synthetic construct
  misc_feature 1..600: note = Description of Artificial Sequence: Synthetic coding sequence
  source 1..600: mol_type = other DNA
atggacggacagaagaagaattggaaggataaggtggtggacctcctgtattggcgcgatattaagaagaccggggttgtctttggtgcaagtttgttcctgcttctttcacttaccgtgttctccatagtgtccgtcaccgcttacattgcactggctttgttaagcgttaccatctcgtttcgtatatataaaggcgtaatccaggccatccagaaatccgacgaggggcacccctttcgcgcatacctcgagtctgaggttgccatctcagaagaactcgtgcagaagtacagcaactctgcccttggacacgttaattgcacaatcaaagaactgcgcaggctctttttggtcgatgatctcgtggattccctgaagtttgcagtcctcatgtgggtgttcacttacgttggggctctatttaacgggttaaccttactgatcctggcgctgatatccttgttctcagtgcccgttatttatgagcgccatcaggcgcagatcgatcattacctcgggctggccaacaagaatgtaaaggacgcaatggctaagatccaggccaagattcctggcctcaagcgaaaggcagaatag

SEQ ID NO: 238433 - DNA, 2961 bp, synthetic construct
  misc_feature 1..2961: note = Description of Artificial Sequence: Synthetic coding sequence
  source 1..2961: mol_type = other DNA
atggaccttaaggagcagccaggaaatacaatcagtgccggacaggaagactttccgtcggtcctgctggagaccgccgcttcattgccaagtctgtcccccctgtccgctgcgagcttcaaagagcacgaatatttaggcaatctgtccaccgtgctcccgaccgagggaaccttgcaggagaacgtgagtgaggcgtccaaagaagtctccgaaaaggcgaagaccttgctgatcgaccgcgatttgacagagttttcagaactcgagtacagcgagatggggtctagtttttctgtgtcccccaaagcggagtctgctgttatagtggccaacccacgggaggaaattattgtgaagaacaaggacgaagaagagaaattggttagcaacaatatcctgcacaatcaacaggaattacctacagcattgacaaagctggttaaggaagacgaggtagtgtctagtgaaaaggctaaagactctttcaatgagaagagagttgccgtagaagctcccatgcgcgaagagtatgctgattttaaacctttcgaacgagtgtgggaggtgaaggactccaaagaggacagcgatatgctagccgcaggaggaaagatagagagcaacctagaatccaaagttgataagaagtgctttgccgactctttggaacagactaaccatgagaaagacagcgagtccagtaacgacgacacctcatttcctagtactccagagggaatcaaggatcgctctggagcatatataacatgtgccccatttaatccagcagccacagagagcattgccacgaatatcttccccttgctgggcgacccgaccagtgagaacaagacagatgagaagaaaatcgaagagaagaaagcgcagatcgtgaccgagaagaacacctctactaaaacatctaacccgttcctggtcgcagctcaggactctgagacagactacgttacaactgacaatctcacaaaggtgacagaggaagttgtggctaacatgcccgagggcctgacaccagacctcgtgcaagaagcttgtgaatccgaacttaatgaggtgactggaaccaaaattgcctacgagactaagatggacctggtgcagactagcgaggtgatgcaggagtctctgtacccggctgcccagctctgtccaagtttcgaggaatccgaagccaccccttcaccagtacttccggatattgtcatggaggccccactgaactctgccgttccatccgcaggggcttcagtgatccaaccatccagctcaccactggaggctagttccgtgaactacgagtcaatcaagcatgaacccgaaaatcccccaccgtacgaggaagcaatgagtgtgtcactcaagaaggtgtccggaatcaaggaggagatcaaagaacccgagaatatcaatgccgctctgcaggagacagaagcgccatacatcagtatcgcttgtgacctgataaaagagaccaagctatcagctgagcccgctccagatttctcggactatagtgagatggctaaagtagagcagcccgtcccagatcattcagaactcgttgaagattcttctccagattctgagcctgtcgatttattttccgacgacagtattccagacgtcccccaaaaacaggacgagactgtcatgctcgtgaaagagtccttgacagaaacttcttttgaatccatgatagaatacgagaataaagagaaattgtctgccctgccaccagaaggcggtaagccatatctggagtcctttaagctctccttagacaacacaaaggacaccctcttacctgacgaggtaagcaccctctccaaaaaagagaaaattcccctgcagatggaagagctctccactgcagtgtatagcaacgacgacttatttatctcaaaagaggctcagattagggaaaccgagacattcagcgactcctcacctatcgaaataatcgatgagttcccgaccctgattagttcgaagactgacagcttctccaagctcgctagggagtacaccgatttagaggttagtcataaatctgagatcgccaacgccccagatggcgcaggcagcttgccgtgcaccgagctaccacatgatctttcactgaagaacatacagcccaaggtcgaggagaagatatctttctcagatgatttttctaagaacggcagcgccacctctaaggtgctccttttaccccctgatgtttccgcattggccacacaggcggagatcgagtccatcgttaagccaaaagttttagttaaggaagcggaaaaaaagctccctagcgatactgaaaaggaggaccgatcccctagcgccatctttagcgcggagctgagtaagaccagcgtggtagacctactctactggagggacataaagaaaaccggggtagtatttggtgcatcattatttctgctgctcagtctcacagttttctctatcgtctcagtcacagcttatatcgctctggctctgcttagcgtgactatatccttccgcatctacaaaggcgtgatccaggccattcaaaagtccgacgaggggcacccatttagggcctacctcgaaagcgaggtagctatctccgaagagttggtgcaaaaatattcaaattctgctctcggacacgtgaattgcacaataaaggagctgagacgcctgtttctcgttgacgacctggtcgacagcctcaagtttgcagttctgatgtgggtgttcacatacgtgggggctctgttcaacgggctgacccttctgattcttgccctcatctcactgttcagcgtccccgtgatttatgagcgccatcaagctcagattgaccactatctgggactggccaataaaaatgtaaaggatgcgatggccaaaatccaggccaagatccctggcctgaaaagaaaagccgagtag

SEQ ID NO: 238434 - DNA, 1038 bp, synthetic construct
  misc_feature 1..1038: note = Description of Artificial Sequence: Synthetic coding sequence
  source 1..1038: mol_type = other DNA
atggagcccgaggatgaggaggaggaagaagaagaggaggaggaagatgaggacgaagacctggaagagctggaggtactggagcgaaagcctgcagctgggctcagcgccgcacctgttccgacagctcccgctgcaggcgcaccgttgatggacttcggcaatgatttcgtccctcctgccccacgcggtccccttcctgcagctcctcctgtcgccccagaacgccagccttcctgggacccttctcccgttagttcaactgtgcccgcacccagcccactctcggcggctgcagtgtctccctcaaaactccctgaagacgacgagccccctgcaaggccccctcctccaccaccagctagtgtgtcacctcaagcagagcccgtatggacacccccagcccctgcccctgcagcaccaccctccacccccgctgcacccaagcggagaggttcctctggatctgtagtcgtggatctcctatattggcgcgacatcaagaagactggagttgtgtttggggctagccttttcctcctgctgtctcttacggtcttcagcatcgtctcggtgactgcctacatagccctcgccctcctctccgtcactattagtttccggatctataaaggcgtcatccaggccatccaaaagtccgatgagggccacccatttcgcgcatacttggagtcagaggtggctatctctgaggaattggtgcagaaatacagtaacagcgcgctcggccatgtgaattgtacaatcaaggagttgaggcgacttttcttggtagacgatctagtggacagcctgaaatttgccgtactgatgtgggtcttcacttatgtgggcgctctgttcaatggactgacacttctgattctggcactgatctccctgttcagtgttcctgtgatatatgaacgacaccaggcccagatcgaccattatttgggactcgctaataagaacgtaaaggacgcgatggccaaaatccaggcaaagattccaggtctgaagcgtaaggcagaatag

SEQ ID NO: 238435 - DNA, 2961 bp, synthetic construct
  misc_feature 1..2961: note = Description of Artificial Sequence: Synthetic coding sequence
  source 1..2961: mol_type = other DNA
atggatcttaaagagcaaccaggcaatactatttctgcaggtcaggaggacttcccctcagtgcttctggagacagccgcttctttgccgtcactgtcccctctgtcagccgcttcttttaaggaacacgaatatttaggtaatctgtcaaccgtcctcccaacagagggcactctccaggaaaacgtaagtgaagcaagtaaggaggtctccgagaaggcaaagactttgctgatcgatcgcgacctgaccgagttctctgagcttgagtacagcgagatgggctcatcattctcagtgagtcctaaggccgagagcgctgtgatcgttgctaaccctcgcgaagagatcatcgtcaagaataaggacgaagaggaaaagttagtttccaataacatactgcataatcagcaagagctcccaacggcgctgacaaagctagtaaaggaggacgaggtggtgtcaagcgagaaggccaaagactctttcaacgaaaaacgggtggccgttgaggcccctatgagggaggagtacgcggactttaaaccttttgaacgtgtgtgggaggtgaaggatagtaaggaagactctgacatgctcgctgcaggcggaaagattgagagtaatctggagagtaaggtggataaaaaatgttttgccgactcgttggaacaaacgaaccacgagaaggacagtgaaagcagcaatgatgacacaagcttccctagcacaccagaaggcataaaggataggtccggggcatacatcacctgtgccccttttaaccccgctgcaactgagtcgatcgcgaccaacatctttccactgctgggtgaccctacatcagagaataagacagacgaaaagaaaatcgaggaaaaaaaagcccagatcgtgaccgagaaaaacacctcaacaaaaacaagcaaccctttcttggtggccgcacaagattccgaaactgactacgtcacaaccgataacttgaccaaggttacggaggaggtcgtcgcaaatatgcccgaggggctgactccagacctggtccaggaggcttgcgagtctgagctcaatgaggtgacggggactaagatcgcctatgagaccaagatggacctggtacaaacaagcgaggttatgcaagaatctctgtaccccgctgcacagttatgtccaagctttgaggaatcagaggccacgccttcacccgtcctgcccgatatcgtgatggaagctccgcttaattccgccgtcccaagtgctggagctagcgtgattcagccctccagtagtcctctggaagcaagctcagtcaactacgagagcatcaagcatgagccggagaatcctcccccatatgaggaagccatgagtgtttctctgaaaaaagtttctggaatcaaggaagaaattaaagagcccgagaatataaacgcagcgctgcaagaaactgaggcaccgtatatttcaatcgcctgcgatttaatcaaggagactaagctgagcgccgagcccgcaccagactttagtgactactctgagatggccaaggttgaacaacctgtcccagaccactcagaactggtggaggattcctcccccgactccgagcccgttgatcttttctctgacgattcaatacccgacgttcctcagaagcaggacgaaaccgtcatgttagtaaaggagtccctgaccgaaaccagcttcgaatcaatgatcgagtacgagaacaaagagaagctgtccgcacttccacccgagggaggaaaaccatatctggagtcttttaaactgtccctggacaatacaaaagacacactacttcccgacgaagtgtccaccctctctaaaaaagaaaagatacctctccagatggaagagctgtcaacagccgtctattctaacgacgacttgttcatcagtaaggaggcacagattagagagacagagaccttttccgactcttctcccatagagataatcgacgaattccccacgctcattagttctaagaccgattctttttcaaagttggctagagagtacaccgacttagaagtatcccataagtctgagattgccaacgccccagatggggcagggtccctgccctgcactgaactcccccacgatctgtcgctcaaaaacattcagcctaaagtggaggagaagatctctttctccgatgatttctccaagaatggcagcgccacttctaaggtcttgctgcttccaccagacgttagtgccttggccacccaggcggagattgagtcgatcgtcaaacctaaggtgctggtgaaggaggctgaaaagaagcttccctctgatactgagaaagaggatagatcccctagcgcaattttttctgcggagcttagcaaaacctcggttgtagatctgctctactggcgggatatcaagaagactggtgttgtgtttggcgcatcgttattcctgctgctttctcttactgtgtttagtatagtgtctgtcactgcatacatcgccctcgcactgctgtcagtgaccatttcctttagaatctacaagggcgtgatacaggccatacagaagagcgacgaaggacaccccttccgggcatatctggagtcagaagtggccatttccgaagagctagtgcagaagtattccaacagtgccctcggtcacgtgaactgcaccatcaaggaattgcggcgactgttcctggttgacgacttagttgatagtctgaagttcgctgtgctgatgtgggtcttcacctatgtgggtgcactgttcaacggactcactttattgattctagcactcatctccctgtttagtgtgcccgtaatctacgaacgacatcaagcccagatcgaccattatctcggcctggctaacaagaacgttaaggatgcaatggctaaaattcaagctaagatccccggactgaagaggaaggccgaatag

SEQ ID NO: 238436 - DNA, 2961 bp, synthetic construct
  misc_feature 1..2961: note = Description of Artificial Sequence: Synthetic coding sequence
  source 1..2961: mol_type = other DNA
atggacctgaaagagcaacccggaaataccatcagtgcgggtcaggaagattttccatcagtgcttctcgagaccgccgcatcactgccttcactctcgcccttaagcgcagcctctttcaaagagcatgaatacctgggaaatctgtccacagtgctgccaaccgaaggaactctgcaggaaaatgtctcagaagcatctaaagaagtgtctgaaaaagcgaaaacattattaattgaccgggacctaaccgagttctccgagctggaatactctgagatggggagttcattcagcgtgtccccgaaggctgagagtgctgtgatcgttgctaacccacgtgaggaaattattgtgaagaataaagatgaagaggagaaactggtgtccaacaatattcttcacaatcagcaagagctcccaacagccttaacaaagctggtgaaagaggacgaggtggtgagctcagagaaggcgaaggactccttcaatgagaagcgggtggctgtagaagcgcctatgcgagaggaatacgctgacttcaaaccttttgagcgtgtttgggaggtgaaggatagcaaagaggactctgatatgcttgctgctgggggaaagatcgagtcgaatctggagtccaaagttgacaagaagtgcttcgccgattccctggagcagaccaaccatgaaaaagatagcgaaagcagcaacgacgataccagctttccatctacccccgaaggaattaaagatagaagcggggcttacattacctgcgcaccgttcaaccccgctgccaccgagtctatcgcaaccaacatttttccgctccttggagaccctactagcgagaacaaaaccgatgagaaaaagatcgaagaaaagaaggcccagatagttacagaaaaaaatacttctaccaaaacgtcaaacccctttttggtagcagcacaagacagcgagaccgactatgtcacgacagataatctgactaaagtgactgaggaagtggtcgccaatatgcccgagggtctgacacctgatctggttcaggaggcatgtgaatctgagctcaacgaagttacaggaaccaaaatcgcctatgagaccaaaatggatctggtacaaaccagcgaagtcatgcaagagagcctctatcctgctgcccagctgtgtccttctttcgaggaaagcgaagccactcccagcccagtcttgcctgatatcgtgatggaggctcccctcaatagtgcggttccatctgcaggtgcctccgtgatccagcctagcagctcaccccttgaagcatccagcgttaactatgagagcattaaacacgaaccagagaatccccctccttatgaagaagcaatgtctgtgagtcttaaaaaagttagtggcataaaggaggagataaaggagcccgagaatatcaacgcagcgcttcaggagacagaagctccttacatttcaatcgcctgcgatctgatcaaggaaactaaactgagcgcagagcctgccccagacttctcagactactctgagatggcaaaagttgagcagccagttccagatcattcagaattagtagaggatagctcacctgatagtgagcctgttgacctgtttagcgacgactccattccggacgttccccagaagcaagacgagactgttatgctcgtgaaagagtcgctaaccgaaactagttttgagtctatgatcgagtatgagaataaggagaagctcagcgcgttgcctccagaaggtggaaaaccttatttagagtccttcaagctgtctttagataacaccaaagatacgctcctcccagacgaggttagtaccctgagcaaaaaggagaagatccctttgcagatggaagagctgtccacagctgtctattcgaacgacgacttgttcatttcaaaggaagcccagatccgagagaccgaaacattttccgacagcagtccaattgaaataattgacgagtttccaacccttatcagttccaagactgattccttctccaagctggctagggagtacactgatctggaggtcagtcacaaaagcgaaattgctaacgctccagacggagccggatcacttccgtgcaccgagctccctcatgacctcagtcttaagaacattcagcccaaagtagaggagaaaatctcttttagtgacgactttagcaagaatggcagcgcaacgtccaaagttttactcctgcctcccgatgtgagcgcccttgcaacccaagcagagatcgagagtatcgttaagccaaaggtgcttgtaaaggaggctgagaaaaaactgccatccgacacggagaaggaggacaggtcaccgagtgccatctttagcgcagagctgagtaagaccagcgtggtggacctgctctactggagagatatcaaaaaaacaggagttgtgtttggagccagtctgttcctgttgctatctttgacagtattttccatagtgagcgtcaccgcttacatcgcactggcattgctcagtgtgaccatttcttttcggatctataagggagtgatccaggcaattcagaagtctgatgagggccatccttttcgagcatatctggaatctgaagtcgctatttcagaggagcttgtgcagaaatacagcaatagtgccctgggtcatgtaaactgcaccataaaggagttgagaagactcttcttggtggacgacttggtagactccctgaagtttgccgtgcttatgtgggtcttcacttatgttggcgctctgtttaacggactgaccctgcttatactggccctgatcagcctgttttccgtcccggtcatttatgaaaggcaccaggcccagatagatcactacctcggtctcgcgaacaagaacgtcaaggatgcaatggccaagattcaggctaagatcccgggtcttaaaaggaaggcggaatag

SEQ ID NO: 238437 - DNA, 276 bp, synthetic construct
  misc_feature 1..276: note = Description of Artificial Sequence: Synthetic coding sequence
  source 1..276: mol_type = other DNA
atggatcttaaggagcagccaggcaatacaattagcgcaggacaagaagacttcccttccgtccttcttgaaacagctgcctccctcccaagtctgtcccccctctccgcggcatcgttcaaggagcacgagtatctcggaaacctctccaccgtactgcccacagagggcacattacaggagaatgtgtctgaggcctccaaggaggtgagtgaaaaagcgaagaccctcctaatagatagagatctcaccgaattctcagagctggagtattag

SEQ ID NO: 238438 - DNA, 1191 bp, synthetic construct
  misc_feature 1..1191: note = Description of Artificial Sequence: Synthetic coding sequence
  source 1..1191: mol_type = other DNA
atggaatttctcaagacctgcgtactgaggagaaacgcctgcactgccgtgtgtttttggcggagcaaagtggttcagaaaccatccgtccggcgaattagcactacaagcccacgcagtactgtgatgcctgcatgggtcatcgacaaatatggaaagaacgaggtactccgattcactcaaaatatgatgatgcccatcatacactacccgaatgaggtgatagtcaaggtgcatgcagctagtgtgaatcccattgacgtgaacatgagaagcggctacggtgctaccgctctaaacatgaaaagagatcccttacatgtcaagatcaagggcgaggaattccctttaacactcggaagggacgtctctggagtagtgatggagtgcggcctggatgtaaaatattttaaaccaggcgacgaagtttgggctgccgtgcccccatggaagcaggggaccctttcagagttcgtagtggtgagtggcaatgaggtgtctcataagcccaagtctcttacccatacccaagcggcatctcttccctacgttgccctgacagcgtggtcggcgatcaataaagtgggcggactaaatgacaaaaattgtactggcaagcgcgtgttgatcctgggagcctctggaggagtcgggacattcgccatccaggtaatgaaagcctgggatgcccacgtgactgcagtgtgtagccaggacgccagcgaacttgtcagaaaattaggtgctgacgacgtcattgactataagtccggatccgtcgaggagcaactgaagtcactcaaaccattcgatttcattctcgacaacgtcggcggatccacggagacttgggccccagatttccttaagaaatggtcaggggcaacatacgttaccttagttactccctttctgcttaatatggatcgactgggtattgccgacggcatgctgcagacgggcgtgactgtggggtccaaagctttgaagcatttctggaagggggtgcattatagatgggcattctttatggcctcaggtccgtgcctggacgatattgcggagctagtggatgctggcaaaatccgtcccgtgatcgaacaaaccttcccattcagtaaggtccctgaggcgttcctaaaagtggagcggggacacgcgcgaggtaaaacggtgataaacgtggtgtag

SEQ ID NO: 238439 - DNA, 681 bp, synthetic construct
  misc_feature 1..681: note = Description of Artificial Sequence: Synthetic coding sequence
  source 1..681: mol_type = other DNA
atggaattcttgaagacctgcgtcctcagacgtaacgcttgtactgccgtatgcttttggaggtccaaggtcgtgcagaagccttccgtgagaagaatttccaccacgtcccctcgcagtactgtaatgccagcctgggttatcgacaagtacggcaagaatgaggttctgagattcacccagaacatgatgatgcctattattcattacccaaacgaggtgatcgtcaaggtccacgctgccagtgtgaacccaattgacgtgaatatgcggagtggttacggcgcaaccgccctcaacatgaagcgtgaccctctgcacgttaaaatcaaaggcgaagagtttccccttactctgggccgtgatgtgtcaggcgtggtgatggaatgtggtttggacgtcaagtattttaaacccggtgatgaagtgtgggctgcagtgccaccctggaaacagggcaccttgtccgagttcgttgtagtcagcggtaacgaagtgtcccacaagcctaagtcactcacgcacacccaagctgcttctctgccctacgtggctctcacagcgtggagcgcaataaacaaagtcgggggattgaatgacaaaaactgcaccgggaaacgaatctctggtaaagaatcaataatagctggccatttctcatggcctgtggctcatgtgtag

SEQ ID NO: 238440 - DNA, 1422 bp, synthetic construct
  misc_feature 1..1422: note = Description of Artificial Sequence: Synthetic coding sequence
  source 1..1422: mol_type = other DNA
atgaaaagagcctccgcaggcggaagtaggctgctcgcatgggtattgtggctgcaggcctggcaggtggcagctccttgtcctggtgcatgtgtgtgctataacgaacccaaagtcacaacctcctgccctcagcagggactgcaagccgtaccagtgggaatccccgctgcttcacagcgcatattcctgcatggcaaccggatttcgcacgtacccgctgcgagcttccgagcatgtcgtaacttgaccatcttatggttgcactccaatgttctggctcgtatcgatgctgctgcgtttaccggtttggccctgttggaacagctggacctgtctgataatgcccagctacggtctgtggatccagccaccttccatggactgggccgtctgcacacacttcacttggacagatgcgggctgcaggaactggggccaggtctcttcagggggttggccgcactgcagtacctgtacctgcaagacaacgccctgcaggcgctgcccgatgacaccttccgcgatcttggaaatctaactcacctatttctgcatggtaacagaatctcgtcagtgccagagcgcgcattccggggattgcactcgctggaccgattgcttctgcatcaaaacagagtggcacatgtccatccccacgcctttagggacctcgggcgtttgatgacgctttatctgttcgcgaataacctgagtgccctccccactgaagccctggccccactgagagccctgcaatacctgagattaaacgacaacccttgggtgtgcgactgcagggcccgacctttatgggcctggctgcaaaaattcagggggtcctccagtgaagtgccttgtagcctgcctcagcgcttagccggacgggacctgaagcgcctggcggcaaacgacctgcaggggtgtgccgtagccacgggtccatatcacccaatttggaccgggagagctactgatgaggaaccactgggcctgcctaagtgttgtcagcctgatgctgccgacaaggctagcgtgctggagcccggacgcccagcaagtgccggtaacgcgctcaaaggtagagtgccaccaggagacagtccaccaggtaacggatccgggccacgacacattaacgattcacctttcgggacgttacctgggtctgcagagccccctctgactgctgttcgacccgagggcagcgagcccccagggttccccacatcggggcctagaaggagaccgggatgctctcgaaaaaatagaacacgctcccactgcagactgggacaggcaggctcgggaggtggtggaacgggcgactctgaagggtctggcgctctgccgtccctgacgtgttcattgacacctctcggcctcgccctggtcctgtggacagtactggggccatgctag

SEQ ID NO: 238441 - DNA, 1041 bp, synthetic construct
  misc_feature 1..1041: note = Description of Artificial Sequence: Synthetic coding sequence
  source 1..1041: mol_type = other DNA
atgcacctcccaggctgcgcgccagcaatggctgacggatccttcagtctggccggacatctgctgcgttcccctgggggatccacttctcggctccactcaattgaggcaatattgggtttcactaaagacgatggaatcctcggtacttttcctgctgaacggggagctaggggtgccaaggagagggatcggagattgggggctcgaccagcttgccccaaggctcctgaagagggatccgagcccagccccccaccagccccagctcctgcacctgaatacgaggcacccaggccctattgtcctaaagagcctggcgaggcacggccaagccctggccttcctgtagggcctgctaccggcgaggccaaactctctgaggaggaacagccaaaaaaaaagcataggcgtaatcgcactacttttaccacttaccaactgcatgagctcgagcgcgcattcgagaagtcgcattaccctgacgtctactctcgggaagagctggctggtaaggtaaacctgcctgaggtcagggtgcaagtttggtttcagaaccgtcgagcaaaatggagaagacaggagaagttggaggtgtcctctatgaagctccaggattcacctcttctcagcttctcgcggagccccccaagcgcgaccctgagcccgcttggtgcaggtccgggttcaggcggaggaccagcagggggtgcactcccgctggaatcttggctgggccctcctttacccggtgggggtgcaacagccctgcagagtttgcccggttttggccctcctgcacagtctctgcccgcatcctatactccaccgcctcctccccctccattcctgaacagcccccctctgggcccaggcctgcaaccgctggccccacctccccctagctacccttgtggccctggctttggagacaaattccccctggatgaggcagatccacgcaacagctcgatagctgcattgcgtctcaaggccaaggagcacattcaggcaattggtaaaccctggcaggctctctag

SEQ ID NO: 238442 - DNA, 225 bp, synthetic construct
  misc_feature 1..225: note = Description of Artificial Sequence: Synthetic coding sequence
  source 1..225: mol_type = other DNA
atgcatctgcccggatgcgctcctgccatggcagatgggtcgttcagcctcgccggtcacctactgcggagccccggtggcagcacgagccgcctccattcaatagaggctattcttggctttacaaaggacgatggcatcctcgggacttttcctgctgagaggggcgcaaggggtgcaaaggagcgggatagacgcctgggggcacggccagcatgcccttag

SEQ ID NO: 238443 - DNA, 588 bp, synthetic construct
  misc_feature 1..588: note = Description of Artificial Sequence: Synthetic coding sequence
  source 1..588: mol_type = other DNA
atgtcactgatctcctggttgaggtggaatgaagcgccaagcaggcttagtacacggtcccctgctgagatggtgcttgaaactctgatgatggagctcaccggccaaatgagggaggcagaacggcaacagagagaacggagcaatgccgtgagaaaggtctgcactggggtcgactattcatggctggcttcgacaccgaggtccacatatgatttaagtcccatcgagcggctgcagttggaggacgtgtgcgtcaaaattcacccttcatattgcggccctgccattctgcgtttccgccaattgcttgcagagcaagagcccgaagttcaggaagtgagccagctgttccgctctgtgctccaggaggtgttggagaggatgaagcaggaagaggaggctcataaactgacaagacagtggagcctgcgtccaaggggatcccttgccaccttcaaaaccagggcccgaatctccccctttgcctccgatattaggacgatttcagaagacgtggaacgcgacacaccccctccattgagatcatggagtatgccagagttcagagcgccaaaagccgattag

SEQ ID NO: 238444 - DNA, 762 bp, synthetic construct
  misc_feature 1..762: note = Description of Artificial Sequence: Synthetic coding sequence
  source 1..762: mol_type = other DNA
atggcagagacatccgccctgccaacaggattcggcgagctcgaggtgctggccgttggcatggtcttgctcgtggaggctctctcaggactgtccttgaatacactgacaattttctctttctgtaagacacccgaattgaggacaccctgccatctcttggtgctgagtctcgctctggcagacagcgggatttcgctgaacgcacttgtagcagcgaccagctcccttcttaggcgctggccctacggctcggatggatgccaggcccatgggtttcaaggatttgtcacagccctggccagtatctgtagtagtgcagccattgcctggggcagatatcatcactattgcacgcgcagtcagctcgcttggaattctgctgtgtcattagtgctttttgtctggttaagtagtgccttttgggccgcactgcccctgctggggtggggccactacgactacgagccactcggtacatgctgtaccctggactatagcaaaggtgaccgcaatttcaccagtttcttattcactatgtctttctttaacttcgccatgcctcttttcatcacaatcacctcatatagccttatggagcagaagttgggaaagtctggtcatctacaggtgcccgcattaattgcgaaaatggtgcctaccatcaacgccataaactacgctttgggtaacgaaatggtctgtcgaggcatctggcaatgtctctcaccacagaagagggaaaaggatcgcacaaaatag

SEQ ID NO: 238445 - DNA, 888 bp, synthetic construct
  misc_feature 1..888: note = Description of Artificial Sequence: Synthetic coding sequence
  source 1..888: mol_type = other DNA
atggccgaaacctctgcgctgccaactggctttggggagttggaagtgctggccgtcgggatggttctgctcgttgaggctctttctggactctcgctgaatacactgacaattttctcattctgcaagacgcctgaacttaggaccccttgtcatttgcttgtccttagtctggccttggcagactctggaattagtcttaatgccctggtagccgcaacttctagtctgctgagagtgtcccatcggcgatggccatacggctccgacgggtgccaggcacatggcttccagggttttgtgacggccctggccagtatctgctcgtctgccgctatagcatggggcagataccatcactactgtactagaagtcagttggcctggaatagcgcggtgtctttggtcctctttgtgtggttgtcatcggcattctgggccgctttgcctcttttgggctgggggcactatgactacgaacctctcggcacctgctgcactctagactacagcaagggtgatcgcaatttcacttcttttttgttcactatgagttttttcaacttcgcaatgcccctttttattacaataacctcatatagtctgatggagcagaagctggggaaatctggtcatctgcaggtgaacacaacactgccagctcgaactctgctcctcgggtgggggccttatgccatcctgtacctgtatgctgtgatagccgatgtcacttctatttcgcccaaacttcagatggtgcctgctctaatagctaaaatggtgcccacgataaacgccataaattatgctctaggtaatgaaatggtgtgccgcggaatctggcaatgtctcagccctcagaaacgggaaaaagataggacgaaatag

SEQ ID NO: 238446 - DNA, 363 bp, synthetic construct
  misc_feature 1..363: note = Description of Artificial Sequence: Synthetic coding sequence
  source 1..363: mol_type = other DNA
atggctgagacgtctgcgctcccaacgggattcggcgaactcgaggtgttagccgtgggcatggtgctgttggttgaggatcccggtgcagctgacagccttccgccaaccggggcagaactcggttcctgcgggcagtgggatcagcccgagtgtccaagatgcagtcatatccagccctctccctgcctccctcaggctctggccctgagattaggccgacttccaggctctcggctgccagggctgtgtgacagcgtcggccagcacctgcagcagtgttcccatcggatgggcgctctgagtcccctactgcacccgccaaagtgttgtcaccgatcgcaccatttcgagtggcgatag

SEQ ID NO: 238447 - DNA, 1056 bp, synthetic construct
  misc_feature 1..1056: note = Description of Artificial Sequence: Synthetic coding sequence
  source 1..1056: mol_type = other DNA
atggctccggtccttccactggtgctgccactgcagcctaggatcaggctggctcaaggactgtggctgttgagctggttactggctctggcagggggtgtcattctgctgtgtagtggtcacttgctcgtccagcttcgtcatttagggacttttctggctccttcttgccagtttcccgtgctgccacaagctgcactcgccgctggggcagttgcactggggaccggtctcgtgggggtcggtgcaagcagggcttctctgaacgctgctctatatcctccttggcgcggagtgctaggccctctactggtggcaggaacagccggtggaggcggtctgctggtcgttggtctgggactagctctggccctcccgggaagcttagacgaagccctggaagaaggattagtgactgccctggctcattacaaggataccgaagtccccggtcactgccaggctaagaggctggttgacgagctacagctgaggtatcactgttgcggacgccacggatacaaggattggtttggagtgcagtgggtctcaagcagatatttggacccaggagacagggacgtggcggatcggattcagagcaatgtggaggggctgtacctgacagacggtgtccctttttcttgctgcaacccccactccccgcgtccctgcctgcagaacagattatctgattcttatgctcaccccctattcgacccgaggcagcccaatcagaatctctgggcccaggggtgccacgaggtcctgctggagcacctccaggaccttgcaggaactcttgggtccatgctggctgtgactttcttactgcaggcactggtgctcctagggcttcggtatctccaaacagcgttggagggactgggaggagtcattgacgcagggggagagactcaagggtacctattccctagtgggctgaaagatatgctcaaaacagcttggctgcagggcggagttgcctgtagacctgccccagaagaggcgccaccaggcgaggcccctcccaaggaggacctgagtgaggcctag

SEQ ID NO: 238448 - DNA, 1602 bp, synthetic construct
  misc_feature 1..1602: note = Description of Artificial Sequence: Synthetic coding sequence
  source 1..1602: mol_type = other DNA
atgtccatacaggtcgagcaccccgcaggcggatacaaaaaattgtttgagaccgtcgaggagctttcaagtccactcactgctcatgtgactggcaggatcccactatggctcacaggctctttactgaggtgtggcccaggcctgttcgaggtcggcagcgaaccattctaccacctttttgacggccaagcactcctgcataagtttgacttcaaagaagggcacgttacctatcaccgtaggttcattagaaccgatgcttatgtgagggcaatgacagaaaaaaggatcgtcatcacagagttcggcacctgcgcttttccggatccctgcaagaatatttttagtagattctttagttactttcgaggtgttgaggtgaccgacaatgcactcgtcaatgtgtacccagtgggggaggattattatgcctgcactgagaccaattttattactaaaatcaatccagagactctcgagactatcaaacaggtggatctgtgcaactacgtgagtgtcaacggagccaccgctcatccacatatcgagaatgatgggacagtttacaacatcggcaattgttttggaaagaatttttcaatcgcgtacaatatcgtgaaaatcccccctcttcaggctgacaaagaagaccctataagcaaatcagaaatcgtggtgcagtttccttgctccgacaggtttaaaccttcctatgttcacagcttcggccttacccccaattacattgttttcgtcgaaacacctgtgaagattaacttgtttaagtttctgtctagctggagtctgtggggcgcaaactacatggattgctttgaaagcaatgaaactatgggtgtctggttgcacatagctgataaaaagcgcaaaaagtacctgaacaacaagtatcgcacgtctcctttcaacctgttccatcacatcaacacatacgaggacaacggctttctgatagtcgacttatgctgttggaaaggctttgagttcgtgtacaattatttatatcttgcgaatcttcgggaaaattgggaggaggtgaagaaaaatgccaggaaagcacctcagcctgaagtgcgcaggtacgtgctccctctgaacattgacaaagctgacactggtaagaacctggtgaccttacccaacaccaccgccacagcaatcctgtgctcagacgagacaatttggctcgaacccgaggtgctcttctccggtccaagacaggcatttgagttcccgcagataaactatcagaagtactgtggaaagccctatacgtacgcatacgggttaggtctaaatcatttcgtacctgaccggttatgtaaactgaatgtaaagaccaaggagacgtgggtctggcaagagcccgattcatatccttctgaacctatctttgtctctcaccccgatgcattggaagaggatgatggagtggtgctatctgtggtcgtcagccccggtgctggacagaagccagcttacctgctgatcctgaacgctaaggacttatccgaggttgcccgtgccgaggttgaaataaacattcccgtgacctttcatggactctttaaaaagtcttag

SEQ ID NO: 238449 - DNA, 954 bp, synthetic construct
  misc_feature 1..954: note = Description of Artificial Sequence: Synthetic coding sequence
  source 1..954: mol_type = other DNA
atgtcggaaggggtgggtaccttccggatggtgcccgaagaagagcaggagctccgggctcagctggagcagctgaccacaaaggatcacggccctgtattcgggccatgctctcagctgccacgccacactcttcagaaagccaaggacgaacttaacgagagggaggaaacccgagaagaagctgtaagggagctgcaggaaatggtacaagcacaggctgccagtggggaggaactggccgtggcagtcgcggaaagggtgcaggagaaggattctggcttcttcctccgatttataagagcccgtaaatttaacgtcggcagagcttacgagctcctgagaggatacgtgaactttcgcctgcagtatcctgaattgtttgactctctgagtcccgaggcggtgaggtgtacaatcgaggcaggttaccctggggtgctaagtagcagggataagtacggaagggtggtgatgctgtttaacattgaaaattggcagtctcaggagatcaccttcgacgagattctgcaggcttactgctttatccttgaaaaactcctggaaaatgaggagacgcagataaacgggttttgtataatagaaaattttaaagggttcactatgcaacaagccgcttctctcagaacttccgatctcagaaagatggttgatatgttgcaagattccttccctgctcggtttaaggcgatacatttcatacaccagccgtggtactttaccactacgtataatgtagtgaaaccattcttaaaatcgaagctcctcgagcgggtttttgtgcatggcgatgatctttccggattttatcaggagatcgacgagaacattctcccttctgatttcggagggaccctgccaaaatatgatgggaaggctgtcgcggaacagttatttggcccacaagcccaggccgagaacacagccttttag

SEQ ID NO: 238450 - DNA, 807 bp, synthetic construct
  misc_feature 1..807: note = Description of Artificial Sequence: Synthetic coding sequence
  source 1..807: mol_type = other DNA
atggccgagctggatattggtcaacactgtcaagtggaacactgtcggcagagagactttttaccttttgtgtgcgatgattgtagtggtattttctgcctagagcataggtctcgggaaagtcacgggtgtccggaggtaaccgtgatcaacgagcggttgaagacagaccagcatactagctatccatgctcgtttaaagactgcgccgagagagaactggtcgccgtaatatgcccctattgtgagaaaaatttttgtctgcggcacaggcatcagtccgatcatgagtgcgaaaaactggaaatccccaagcccaggatggcagccacccagaagctagtgaaagacataattgacagtaagactggagagacagcctccaaaaggtggaaaggcgctaagaattccgagactgcagcaaaggtcgcattaatgaagctgaagatgcacgctgatggggataaaagcctcccgcagaccgagaggatctactttcaagtgttcctccccaagggttctaaggagaagagtaaacccatgtttttctgccatagatggagcataggtaaggcaattgacttcgcagcgtctctcgctcgacttaaaaatgataataataagttcacggccaaaaaactgaggctatgtcacataaccagcggagaggccctgcccttagatcataccctggagacttggatcgctaaagaggactgccccctctataacggcggtaacattattctggaatacctaaacgatgaagagcagttctgcaaaaacgtggagtcatacctggaatag

SEQ ID NO: 238451 - DNA, 2751 bp, synthetic construct
  misc_feature 1..2751: note = Description of Artificial Sequence: Synthetic coding sequence
  source 1..2751: mol_type = other DNA
atgcagcgacctgtggtaaaattgtatgctaccgacggtcgcagagtcccttctctccaggctgtgatcctgtcctctggcgctgtcgtcgcggctggtcgggaaccattcaaaccgggaaactacgacatccagaagtatctattgcccgcacgcctgcccggtatcagccagagagtgtatcccaaaggcaatgctaagtcagaaagccgtaaatcctctaactggaaagtttttattattacaagcgatctgccggatgccggaacatcaagtcaaatctatatcatcctctatggccaacatagatccagcgcgccaatctacctgtacgggacagatggagcccgattccaagtcggacatgaggatatattcacaattacagtcggagatatcggggctttgttcaaaatccgaatcggacacacaaactcaggctctagccccagctggcattgcaaggagattcaactgcacaacatgaatagcggcaagcagttttatgttcccgtgcagcggtggctggcgagggatcaggaggacggcgagatttgtagagagtttcctttgctgagcaagggccagccagtgctgccggtcaccatctacgaggttaacgtggccaccggagaactttggaacgcaggaaccgtcgcaaacgtgtatatctcaattcatggcgagaagggtgatacaggttcaagacagctgttcagaagtaagtccagcttcaactttttgagagggcaaaccgatacattttttttggaagcggtgcacttgggcgacctctgtaaaattgtgatcggacacgatggcctgggaccaggaaatgggtggtttctggatgatgtggtcattaaggacccgaccaccaactacgagtatgccttcttctgtcataggtggctggatcagggagaagatgattgcaagatcgttagagaactctatgcacgggataactccatcttttccgccaggcagaaattagagctgaagcggaaagagacgtggacggccgagtcatggaaattcaccaagggcaatacactgcaattctataataagctgaccgggggattcgtgcggctacatccagatgggacggtggatgccattggagagaagacggataagtacggcgtgtttgatgtcatcttcaataaaaggaatatttgcatcttccagtcccacgagatgcgtcacctgagtctagcactggacaatggcattgtgacgggaatggtctccggtgaagctactacggaattgagggtgctttatcaaccaaaccggtgtgctctgctggagagtgcactggtgcctggccacactgtcgtgttcgacagacacgggaagatcgctgatgcttccagcgccggatatgcaaatttgtcaaaggagtttgtgatatttgtgaagggcgtttttctcaactcggcagtcgtgctccttgccacctccctgtgtcaggcgctgtgtttgcagcccgacggaagctgcacaggtgtcggtagtcaatcagagaaaagttactggaaggtgcacaagatcagtagcgggatctgcatgttcgaaagtgtcaaaaacgcacaaatgtatctgaggataaaagacggacgttgcgacggcaccgggaccggagacgtcgactgtcactttaagattaaaaagaacctcaagaatgcatctatctccttggagagtaccaaaagccccggtttgtttgtcggattacaatccgatggccaggcgaagcccatgatctataccaaggatgagaatgtgtgtttctatcctcaggtcatccagtttggcagagagaaccctatgggcatgtccgcaactcccagtcaggaagaagagaagatccacgagagcaagaagcagaagaagatccctcccgagagcgaagcgagatctccacttccttcctctacagctaaagagattcgccactttcagagcagcgaaaccctcctgagtgaagacgagtggaaagttctggttctgaccggaaatacaggaacccaggccaatgtgactctctgggtgtacggagataaaggagtgacaggccctatttcacttcggaaagactcctcagagcagcttttccttcccggacacgaagacgagttccaagtagagatcaggaacacaggcaacatttataagatcaggatcgggcatgacgggacaagcgagcagcctgaatggaatctccagcgcgttactatgcagcatatgaaatccaaaaagattctggactttgccgctaatgtttggctctcgcgaatacaagcggatggtgatgtggtgtgtgagctacctgtcgtgaagggcggacaggccatcttccccctagtaagatatcaggtggacgtgtacactggccagctcaaacatgcggaaaccgagagcgaggtcttcctttgcctattcggtgaacggggagactcgggactcaggcagctgtacaagtccaatatgcaggttaaatttcagcgcggacagatcgataaattccaggttgcagctgtcagtctgggcaaattacagaaggtgctcctgcgatgtgaggcctccgacaagtcccaatattggtattgtgagcaggtgatcgtgagagagccgggtactacatctgaaagcatctttacttgccagcggtggttaccgtttatgagccaggggatcattcacagcgagatcgaactgtacctgcaaggggaagactattag

SEQ ID NO: 238452 - DNA, 7202 bp, synthetic construct
  misc_feature 1..7202: note = Description of Artificial Sequence: Synthetic coding sequence
  source 1..7202: mol_type = other DNA
atgaattcaacacccagaaatgcccaggcacccagccatcgcgaatgctttctcccatccgtagctcgcaccccaagcgtgacaaaagtaacccccgcaaagaaaatcacgttccttaaacgtggggatccaagattcgctggtgttcgtctagcagtccatcagagagcttttaaaacatttagtgccttgatggatgaactttcgcagcgtgtgccactctcattcggggtgcgaagcgttaccactcctaggggcctgcattcgctgtccgctctggagcaactggaggacggcggatgttacctgtgctcagacaaaaaaccgccaaagacaccctcaggcccagggcgaccccaggagcggaaccccactgctcagcagctacgcgatgtcgaaggacagagagaggccccaggcacatcctcgtccagaaaatccttgaaaaccccgaggagaatattgcttataaagaatatggatcctcggctccagcagacagtagtgctgtcacatagaaacacccgtaacctggccgctttcttaggcaaggccagcgatttgttgcgcttccctgtcaaacagctgtacacaacctcaggaaaaaaagtcgattctctacaggccctcttgcattcgccctctgtgctggtgtgcgctggacatgaagctttcagaacacctgccatgaaaaacgccagacgctctgaggctgaaacactgagcggactaacatcaaggaacaagaacggttcctggggcccaaagacaaaaccttctgtcattcatagcaggagtccccctgggtcaacccccagactaccagagcggccaggcccttccaacccacccgtgggacctgctcccggtaggcacccccaggacactcccgctcaatccggtccattggttgccggagacgacatgaagaagaaggtgcgcatgaatgaggatggttccctgtccgtggagatgaaggttcgctttcatctggtcggcgaagacactctgctatggtcaaggcgtatgggacgcgctagcgcactgaccgctgcctcaggtgaagaccctgtcttaggcgaagtcgaccccctctgttgcgtctgggaaggctacccatggggattctcggagcccggagtctggggcccaaggccgtgccgggtgggctgcagggaggtctttgggcgaggaggacagcccggtccaaagtatgagatctggacaaatccccttcacgcaagtcaaggggaaagagtcgctgcacgaaagagatgggggctggcccaacatgttaggtgctcgggtctgtggggccacggaaccgccggaagagaaaggtgcagccaagatagcgcgagtcctgcttcatccacagggctgccagaggggtctgaacccgaaagttcttgctgtccccgaactccagaggacggagtggattcagcctctccatccgcccagattggggctgaacgcaaagcaggcggtagcctgggcgaagatcccggactgtgcatcgacggtgctggcctcggaggacctgagcaaggagggagacttacaccacgagcacgatccgaagaaggcgctagcagcgactccagtgcatcaactggcagccatgagggaagctccgaatggggtgggaggccccagggctgccccggaaaagctcgcgcagagacttctcagcaggaggcgtctgagggcggagaccccgctagcccagccctgtcactaagctccttgcgctcagatgacctccaggcagagacgcagggccaggggacggaacaggccactggggcagcagtgactcgcgaaccacttgtgctggggctatcctgttcctgggactctgagggcgctagcagcactccatctacgtgtacttcttcacagcagggccagcgaaggcaccggtccagggcgagtgctatgtcctctccgtccagtcctggacttggtagggtagctcctcgcggacaccccagacactcccactatcgcaaagacacacattctcccctggactcatctgtaaccaagcaggtgccgcgaccccctgagcgcagaagggcttgccaggatggcagcgtgccgcgatatagcgggagctctagctccacccgtacgcaggcttctggcaatctgagaccacctagctccggctccctcccatcacaggacctgttaggaacgagtagcgccacggttaccccagctgtccattccgacttcgtgagcggagtaagcccccacaatgccccttcagccggttgggccggagatgctggcagtagaacttgtagtcccgctccaatccctccccacaccagtgattcttgttcgaagtccggagctgcctcactgggagaagaggcaagggacaccccacagccaagtagtccccttgttctgcaggttggcaggcctgaacagggggctgtgggtccccatcggagtcactgctgttctcagcccggaacacagcccgcacaggaagcccagcggggaccctcaccggaagcctcctggctctgcggtcggtattgtcccaccccgcctagaggcagaccttgcccgcagcggcgatcctctagctgcggcagcacaggctcaagtcatcagtccactgctagaggccctggtggcagcccccaggaaggtacaaggcagccaggcccaaccccttcacctgggccaaattccggagcttcacggagatcctctgcttcccaaggcgctggatccagaggcctttccgaagaaaaaaccctgcgatcaggagggggaccacaaggtcaggaggaagccagcggggtctctccgtcctcgctcccccgatcaagtccagaggccgtggtcagagagtggctcgacaacatccccgaggagcccatattaatgacttatgagttagctgatgaaaccaccggagcggctggaggtgggctgcggggaccagaggtagatccaggcgacgaccacagcctggaaggcctgggagagcctgcccaggccggacaacagagtcttgagggggaccctggacaggacccagaaccagaaggagccttgttaggctcatcagacacaggtccgcagagcggggaaggggttcctcaaggagcggcacctgaaggtgtctccgaagcccctgcagaagcaggcgctgaccgggaagccccagctggttgccgcgtaagcttgcgagccttgcccggaagagtatccgccagcacacagattatgcgagctctcatggggagtaaacaaggtagaccaagcagcgtaccagaggtgtcgcgtccgatggctagaaggttgagctgcagtgccggagcactcatcacttgcttggcttctctgcagctctttgaggaagaccttgggtcccccgcaagtaaggtgagatttaaggattctcctcgataccaggaacttctgtccatctccaaggatctatggcccggatgcgatgtcggcgaggaccagttggacagtggtctgtgggagctgacatggtcacaagcactgccagatctgggatctcacgccatgacagaaaactttactcctacctcaagtagcggagtagatatcagttcgggatctgggggatccggcgaatcatctgtgccttgcgcaatggatgggaccttagtcactcaagggacagaattgcctctgaaaacctccaatcagcgtcctgatagtaggacctatgaatcacccggtgatctggaaaaccagcagcagtgctgtttccccacattcttgaatgcaagagcatgtgcctgtgccacgaatgaggacgaagcggagcgcgattcagaggagcagcgggcatcctcgaatctggagcagttggcagagaatactgtccaagaggaagtccagcttgaagaaactaaggaagggaccgaaggagaaggccttcaggaggaagcagtacagctggaagagactaagacagaagaggggcttcaggaggagggcgtgcaacttgaggagaccaaggaaacagagggagagggtcagcaggaggaagaggcccagctcgaagagatagaggaaactgggggtgagggactgcaggaagagggggtccagctcgaggaagtcaaagagggccctgaggggggtttgcaaggagaggctctagaagaaggcctgaaagaggaaggccttccggaagaagggagcgtgcacggtcaggagcttagtgaggcatctagccccgatggcaagggatcacaggaggacgatccagtccaggaggaagaggctggtagagcttcggcgagcgctgagccctgtccggctgagggaacagaggagccaaccgagcctcccagccatctttctgaaacggaccccagcgcttccgaacggcagagtggctcccagttggagccagggttagaaaagccacccggagctaccatgatgggtcaggagcacacccaggcgcagcccacccagggagctgcggaaagaagcagctctgtggcctgcagcgctgctcttgactgtgaccccatctgggtgtccgttctccttaagaaaaccgagaaggcttttcttgctcacctggccagcgccgtagccgaactgagggccagatgggggttgcaggataatgacctgctggaccagatggctgccgaactgcagcaggacgtagcccagcggttacaggattcaactaagcgggagttacaaaaactgcagggtagagcgggacgtatggtcctcgaaccccctagagaggcattaacaggggagctgctgttacaaacgcagcagcgaagacatcgcctgcgaggccttagaaatttgtcagccttttccgagagaaccctcgggttgggcccattgtcatttaccctcgaagacgagcctgccctgtcaacggccctggggtctcagctaggcgaggaggctgaaggcgaggagttttgtccctgcgaagcgtgtgtcagaaagaaggtgagtcccatgtctcctaaagccacgatgggagctacccgcggaccgattaaagaggcctttgacctccaacagatcctgcagcggaaacgcggtgaacacaccgacggtgaggctgcggaagtagcaccaggcaagacccataccgacccaacaagtacaaggacggtgcaaggagcagagggaggtttaggacctggtctaagccaaggccctggcgtggatgagggcgaggacggcgagggcagtcagcggctgaatcgagacaaagatcccaagctcggtgaagcagagggtgatgcaatggcccaggaacgcgaaggaaagacccacaactccgaaacctctgcagggtctgaattgggggaagccgagcaagagggggaagggatatctgaaagaggcgagaccggcggacagggctcgggccacgaagataatttacagggggaggcagcagcaggcggagaccaggatcctggtcagtctgacggcgctgagggcatagaagcacccgaagccgaaggcgaggcccaaccagagtctgagggtgttgaagccccagaagccgagggcgacgctcaggaagccgaaggagaggcacagcccgaaagcgaggacgttgaggcacccgaggctgagggcgaggcccagccagaaagcgaggatgtggagactcccgaggctgaatgggaagtgcaacccgagagcgagggcgctgaggccccagaggcagagaaggaggcccagcctgaaactgagtccgttgaggccctggaaaccgaaggagaggacgaaccagagtctgaaggggctgaggcacaggaagcagaagaagccgctcaggaagctgaagggcaaacgcagcccgaaagtgaagttattgagtctcaagaggccgaggaagaggcccagccagaatccgaagacgtggaggctctggaggtggaggtggagactcaggaggccgagggggaggcccaacccgaaagcgaggacgttgaagctccggaggccgagggtgaaatgcaggaggccgaggaggaggcgcaacccgagagcgatggggtggaggctcagccaaaatcagagggtgaggaagctcaggaggtcgaaggtgaaacacagaaaacagagggcgacgctcagcccgaatccgacggggttgaggcccctgaggcagaggaagaggcccaggaggcagaaggggaggttcaagaagctgagggcgaagctcaccccgaatcagaagatgtggacgcccaggaggcggagggcgaggcccagcctgagagcgagggagtggaagctccggaagcggaaggtgaggcccagaaggctgaaggaatcgaggctccggagacagaaggggaagctcagcctgagtctgaaggcatcgaggcgccagaggctgagggcgaagctcagccagaaagcgaaggcgtcgaagctcaagatgccgaaggcgaggcccagcccgaatctgaaggcatcgaggcacaagaggccgaggaagaagcccaacccgaactggaaggtgtcgaggcacccgaggccgagggcgaagcacagcctgaatccgaagggatcgaagcacctgaggctgaaggtgaagcccagcccgaacttgagggagttgaggctcccgaggccgaggaggaagcacagccagaacccgagggggttgagactcctgaagcggagggcgaagcccaaccggagagcgagggtgaaacccagggggaaaagaagggcagcccacaggtgagtttaggcgacggacagtcagaagaggctagtgagagcagttcacccgtaccggaggatcgccctacccccccacccagccctgggggtgacacaccacaccagcgcccaggctcacagactgggccaagtagttctcgcgcttcatcttgggggaactgttggcagaaggatagcgagaatgaccacgtcctgggagataccaggtctccagatgctaagagcacggggacacctcatgccgaaagaaaggcgaccaggatgtacccggaatcaagtaccagtgagcaagaggaggcccctctggggtctagaactccggaacagggggctagcgaaggctatgacctgcaggaagaccaagcactgggatctctggcacctaccgaggctgtgggaagggctgacgggttcggacaggacgacctggacttcta

SEQ ID NO: 238453 - DNA, 5019 bp, synthetic construct
  misc_feature 1..5019: note = Description of Artificial Sequence: Synthetic coding sequence
  source 1..5019: mol_type = other DNA
atgaaggtagatcgtacgaaactaaaaaaaacacccacggaagctcccgctgactgcagggctctgatcgacaagctgaaagtctgtaatgatgagcagctgctgcttgagctgcaacagattaagacctggaatatcgggaagtgcgagctgtatcattgggttgatttgctggatagattcgacggcattctggctgatgccggacagacagttgagaacatgagctggatgttagtgtgcgaccgcccagaacgtgagcagctgaaaatgctcctgctcgctgtgctcaactttacagctttgttgatagaatacagtttctctcgccatttgtatagcagtattgaacacctaaccacactgctcgcgagcagcgacatgcaggtggtgcttgccgtgctgaatctgctgtatgttttttccaagagatctaattatatcaccagactcggatcagacaaaaggacaccactgctgacccgactccagcatttggcggagagttgggggggtaaggaaaacggatttggcctggctgagtgttgccgagacctccacatgatgaaataccctccatctgcaactaccctgcacttcgagttttatgccgatccaggggctgaagtgaagatagaaaagcggaccacttcaaatacgttacactacatccatatcgagcagctggacaaaatctcagagtcccccagtgagattatggaatctcttacaaaaatgtacagcatcccgaaggataagcagatgctgctttttacgcatatccggctggcccacgggtttagcaaccataggaaaaggctccaggcggtccaggcgaggttgcacgcgatcagtattctagtgtattccaacgccctgcaggaaagcgccaactccatcctctacaacggccttatcgaggaattggtggatgtgctccagattacagataaacagctcatggaaataaaggctgcttctctccggacattaaccagcatcgttcacctagagagaacccctaaactgagctctattatagattgcacgggaacagcttcataccatgggttcctgccagtgctggtgagaaactgtatacaggccatgatcgaccccagtatggacccgtacccgcatcaatttgctactgccctcttcagctttctttaccacctcgccagctatgacgctggcggagaagcactggtttcttgcggcatgatggaggcattacttaaggtgatcaaatttctaggggacgagcaggaccagataacattcgtgaccagggcggtgcgggtcgtcgatctcattacaaacctcgacatggcagcattccaatctcacagtggcctgtccatatttatctatcgactagagcatgaggtcgacctatgccggaaagagtgccctttcgtgatcaagcctaaaattcaacgtcctaacaccacacaggaaggggaggagatggaaaccgacatggatggtgtgcaatgcattccccagcgagcagctcttctcaagtcaatgttaaacttcctcaagaaggccatccaagacccagctttctccgatgggatacgccacgtgatggatggtagtctgcctaccagcctgaagcacatcatcagcaacgctgagtactacggccctagtttgtttctgttggcgaccgaggtggttacggtgtttgtctttcaagaaccaagcttgttatcaagcctgcaagacaacgggttgacggacgtgatgctgcacgcactgctgatcaaggatgtacccgcaacaagagaggtgctgggaagcctgccgaatgtctttagcgccctttgcctgaacgcccgtggtctgcagagcttcgttcagtgtcaaccctttgagagactgttcaaggtgctcctgtcacctgactatctgcccgctatgcgccgacggagatcttccgacccgttgggcgacaccgcatcaaaccttggcagcgcagtcgacgagctgatgagacaccagcccactctgaagaccgacgccaccactgccatcattaagctcctcgaggaaatctgtaacttgggacgtgaccccaagtatatatgccagaaaccttctatccagaaggccgacggaaccgcaacggccccacccccacgatccaatcatgccgctgaagaagcttcctctgaagacgaagaggaggaggaggtccaggctatgcaatctttcaacagcacgcagcagaacgagaccgagcctaatcagcaggttgtggggacagaggaacgtatcccaatacccttgatggattacattttaaacgtgatgaaattcgtggagagcatcctgtctaataacactactgatgatcactgtcaggaattcgtcaatcagaagggcctgctgcctctggtaacaatcctgggcctgccaaacctacctattgattttccaacgtctgccgcatgccaagctgtggctggggtgtgcaaatcaatactgacgctgtcccacgagccaaaggtccttcaggagggactcttacaattagattcaatcttgtctagcctcgaacccttgcaccggccaatagagtcccccggagggagcgttctgttacgggagctggcctgcgcaggcaatgtcgccgacgcgacactgtccgcacaagccactcccctgcttcacgctctgactgccgcacatgcctacatcatgatgttcgtgcatacatgtcgggtcggacagtctgagatcaggtctatttccgtcaaccaatggggaagccagttaggcttatccgttctttctaagttgtctcagttatactgctctctggtgtgggaatcaacagtactgctgagcttgtgcacccctaattcactgccctctgggtgcgagtttggacaggccgacatgcagaaattagtgcctaaggacgaaaaagcagggaccacacaaggcggaaaacgaagcgatggcgagcaggatggggctgctggctccatggatgcgtctactcaaggactgctcgagggcataggactcgacggtgacaccctggccccaatggaaaccgatgaacccactgcatcagattctaagggcaagagcaaaataactcccgcaatggcggctcgtataaagcagatcaagccactactgtcggcaagttcgagattggggagagccctcgcagagttgttcgggctcttggtcaaattgtgtgtggggtcccccgtccggcaacgtcggagccaccacgctgcatcaactactacagcacccacacccgctgccaggtctaccgcctctgcgctcaccaaattactgaccaagggattgtcctggcagcccccaccatatacccccaccccccgattcagactcactttcttcatctgtagcgtgggctttacctcaccgatgctgttcgacgagcgtaagtatccatatcacctcatgctccagaagttcctctgcagcggcggtcacaatgcacttttcgaaacctttaactgggcactctcaatggggggaaaggtccccgtgagtgaaggtttggaacattctgatctgccagacggcacaggcgaattcctcgacgcttggttgatgctggttgaaaaaatggtaaaccccactacagttctggaatctccgcatagcctgccggctaagttgcccggtggcgtgcagaacttccctcaattctccgcactcaggttcctggtggtcacccagaaggctgctttcacatgtattaaaaatctgtggaacaggaaaccactcaaggtgtacgggggtcgcatggccgaatctatgctagcgattctatgtcatatcttgaggggggaaccggttattcgggagagactgtctaaggagaaagagggctcccgtggcgaggaagacaccgggcaggaagagggaggaagccgcagagagccacaggttaatcagcaacagttacagcagttaatggacatggggtttacgagggagcatgctatggaggcactactgaacaccagtactatggaacaggccaccgaatacttactcacccatccaccccctatcatgggcggagtggtacgtgacctttctatgagtgaagaggaccagatgatgcgagccatcgcaatgtccttaggtcaggacatccctatggatcagcgtgccgaaagccccgaagaggtggcatgcagaaaagaagaagaggagcgcaaagccagagaaaagcaagaggaagaagaggccaagtgtctggaaaaattccaggacgctgatccgctggagcaggatgaattgcataccttcacagacacaatgctgccaggctgtttccacctcctggacgaactgccagacaccgtataccgagtctgcgatctcattatgacggcaattaagcgcaatggcgcagattacagagacatgatcctgaagcaggtggttaaccaagtctgggaggccgcagacgtattgatcaaggcagcactccctctgacgacatccgacaccaagactgtgagtgaatggatcagccaaatggctactctgcctcaggccagcaatcttgccacacgaatcctcctccttacgttactcttcgaggaactgaagctcccatgtgcatgggtggtggagtcaagtggtatcctgaacgtgctcataaaacttctggaggtggtccagccctgtttgcaggccgctaaagaacaaaaagaagtgcagacaccgaagtggattacgcccgttctgctgctgatcgatttttatgagaagactgccatctcgtccaaacggagggcccaaatgaccaagtatctgcaatccaatagcaataattggagatggttcgatgacagatccggacgttggtgtagctatagcgcttctaacaattccactatagatagcgcgtggaagagtggggagaccagcgtccgctttacagccggtcgaaggaggtacacagtccagttcactaccatggtgcagggcacaagcgcagaatag

SEQ ID NO: 238454 - DNA, 666 bp, synthetic construct
  misc_feature 1..666: note = Description of Artificial Sequence: Synthetic coding sequence
  source 1..666: mol_type = other DNA
atgagcagcaggcccggaagggaggatgttggagcggctggcgctcgcaggccgagagagcctccagagcaggagttacagcggaggagagagcaaaagagaagacgacacgatgcccagcagctccagcaactgaaacatctagagagcttctacgaaaagccccctcctgggctcatcaaggaggacgaaacgaaacccgaggattgcatcccggatgtaccagggaatgagcacgccagagaattcctggcccatgctcctactaaggggctgtggatgcctctggggaaggaggtcaaggtcatgcagtgttggaggtgcaaaaggtatggccaccgcacaggcgataaagagtgtcccttctttatcaaggggaaccagaagctggaacagtttagagtggcccacgaggatcccatgtacgatattatccgggataataagaggcatgaaaaggacgtgaggatccaacagctgaagcagttgctcgaagacagcactagcgacgaggaccgaagcagcagctccagtagcgagggcaaggagaagcataagaaaaaaaagaaaaaagagaagcacaagaagcgaaagaaggagaagaagaagaaaaaaaagcgcaagcacaagtcatcaaagagtaacgagggaagtgacagtgaatag

SEQ ID NO: 238455 - DNA, 2262 bp, synthetic construct
  misc_feature 1..2262: note = Description of Artificial Sequence: Synthetic coding sequence
  source 1..2262: mol_type = other DNA
atgcgggagcctgaagagctcatgccagactctggcgcagttttcacatttggaaagtcaaagttcgcagaaaacaaccctggtaaattttggtttaagaatgacgtgcccgtgcatctgagctgtggggacgaacattcggccgtcgtcacaggtaataacaagttatatatgttcggttccaataattgggggcagttggggctgggaagcaagtccgccatctctaagcccacgtgcgtgaaagcattaaagcctgaaaaggtgaagcttgccgcttgtggccgaaaccatacgctggtgtctacggagggaggcaacgtctatgcaacaggagggaataacgagggccagttaggactgggggataccgaggagagaaatacatttcatgtcataagtttttttacaagtgaacacaagatcaagcagctcagtgctggttccaacacttcagctgcccttactgaggatggaaggttattcatgtggggagacaactcggaggggcagataggtctcaagaacgtgtcaaacgtgtgtgttccccagcaggtgaccatcggcaagcctgtgtcttggatctcatgcggctattaccacagcgcattcgttacgacagacggcgaactttacgtttttggcgagccagagaacggcaagcttggattgccaaatcagctgctcgggaaccaccggacgccccagctggtgtcggagatccctgaaaaagtcattcaagtggcatgcggtggcgaacacaccgtggtactgaccgaaaatgcagtctacaccttcggcttgggacagtttggccagctgggcctgggcactttccttttcgaaacgtccgaaccaaaagtgatcgaaaacatacgggaccagaccatctcttatatttcatgcggtgaaaatcatacagccctgataaccgacataggattgatgtatacattcggcgacggcaggcatgggaaactgggcctggggctggagaatttcaccaaccatttcatccccaccctatgctctaattttctgcggtttatcgtgaagctggagagaagccccgacagcttctctatgaggcgtacgttaccgccaatcgaaggtaccctgggtttgagtgcatgctttttgcccaattctgtcttcccacgttgttccgagaggaatcttcaagagtctgtcttgtcagaacaggatctgatgcagcccgaagagcccgactacctcttggacgagatgactaaagaggccgagattgacaatagttctactgtggagtctctaggagaaaccaccgacatcctgaacatgacccacataatgagtcttaacagcaacgaaaagtctttgaagcttagccccgtacaaaaacagaaaaaacaacagacaattggtgaactcacgcaggacacagccctcaccgagaatgacgattccgatgagtacgaggagatgtcagaaatgaaggaaggaaaggcctgtaaacagcacgtaagtcagggcatcttcatgactcagcccgcaaccactattgaagcattcagtgacgaggaggtcgagattcccgaggagaaagagggagcagaggactcaaaggggaacgggattgaagaacaggaggtggaagccaacgaagaaaatgtgaaagtgcatggaggccgtaaggaaaaaacggaaattttatccgatgacctcactgataaggcagaagatcacgaattcagcaaaacggaagagctcaaactcgaggacgtggacgaggagatcaatgccgagaatgtggaatcaaagaagaagactgtaggagacgacgaaagcgtccctaccggctaccattcaaagaccgaaggcgctgagcggaccaacgacgactccagcgcggagacgatcgaaaagaaggagaaagccaatctggaggagcgagcaatctgcgaatataacgaaaaccccaaggggtacatgctcgatgacgcagattcctcctccctcgagattctggagaacagcgagaccacacctagtaaggatatgaaaaaaaccaagaaaatcttcctgtttaagagagtcccatcaatcaaccagaaaatcgtcaaaaacaataacgaaccactgccagaaattaagagtatcggcgatcagatcatcctgaagtccgacaataaggacgcagatcaaaaccatatgagtcagaaccaccagaacattcctccgacaaacacagaaagaaggtcaaagtcctgtacgattctgtag

SEQ ID NO: 238456 - DNA, 2448 bp, synthetic construct
  misc_feature 1..2448: note = Description of Artificial Sequence: Synthetic coding sequence
  source 1..2448: mol_type = other DNA
atgagggaaccagaggaattgatgcctgattctggcgcagtgttcactttcggcaaatctaagttcgctgagaacaatcccggaaagttctggtttaaaaacgacgtccccgtgcacctgagctgcggcgacgaacactcggcggttgtcacagggaataacaaactctatatgtttggaagtaataattggggccagctggggctgggctccaagtccgccatttccaagccaacctgcgtgaaagctctcaagccagaaaaagtgaagttggccgcttgtggcaggaatcatacgctggtgtccaccgaaggcggtaacgtgtacgcgacaggcggaaataatgagggccagctggggcttggggatacagaggagcggaatacctttcacgttatcagcttttttacctctgagcataagatcaagcagcttagcgccggttccaacacttcggccgctctgaccgaggatggcaggcttttcatgtggggggacaatagtgaagggcagattgggctgaaaaatgtgtcaaatgtatgcgtgccacagcaggtgactatagggaaaccagtctcctggatctcctgtggctactaccatagtgcattcgtcacaaccgacggtgagctatacgtttttggagaacccgagaatgggaagttgggacttcctaaccagcttttgggcaaccaccgtacccctcagctggtgtccgaaattcctgagaaagtgatacaggtcgcctgtggaggtgaacatactgtggtactgactgaaaatgcagtatacaccttcggtctcggacagttcggccagcttgggctcggcaccttcctgtttgaaacaagcgaacccaaggttatcgagaacattcgggaccagaccataagctatatatcttgtggggagaaccatacagcactaattacagacatcggcctgatgtatacttttggcgatggaaggcacggcaagctggggctcggcctggagaactttacaaaccacttcattcccaccctatgttctaatttcttgcgttttatcgtcaagttagtggcctgcggtgggtgtcatatggttgtgttcgcggctccccatcgaggtgtggccaaagagattgagtttgatgagatcaacgacacctgcttgtcagttgcgacatttctcccttactcctcactgacttcaggcaacgtactccagcgaactctgtctgctcggatgcggaggagagagcgggagcgatccccagattctttcagcatgcgcagaaccctaccccctattgagggtacactgggactgagtgcgtgttttttgcctaatagcgttttcccacgctgctccgaacgcaacctccaagaaagcgtactgagtgagcaggacctcatgcagcccgaagaaccagattacttgttggatgagatgacaaaggaggccgagatagataacagctcaactgtggagtccttgggggagacgacagatatcctgaatatgacgcacattatgtccctgaattcgaatgaaaagtcgctgaaactctcacctgtgcaaaagcaaaaaaaacaacagactatcggggagctcactcaagacacagccctgactgaaaacgatgatagtgatgagtatgaggaaatgtctgagatgaaagagggcaaagcctgcaaacagcacgtgtcacagggtatctttatgacccagcctgccaccaccattgaggccttctccgatgaagaagtggagattcccgaagagaaagaaggcgctgaggattctaagggcaacggtatcgaggagcaagaggtagaggccaatgaggaaaacgttaaggtgcacggcggaaggaaagagaagactgagattctgagtgacgacctcaccgataaagcggaggaccacgagtttagcaagactgaggagcttaaactggaggacgttgacgaagagattaacgcagaaaacgttgaatctaagaagaagaccgtcggtgatgacgagtcggtgcctactggataccattccaaaactgaaggggctgaacggactaacgatgactcgagtgcagagacgatcgagaagaaggaaaaagcaaacttagaggaacgcgctatctgtgaatacaacgagaacccaaagggctatatgctggatgatgcagattcttcctcgcttgagatccttgagaactccgagaccacgcccagtaaggacatgaaaaaaacaaaaaaaatctttttgtttaaacgggttccgagcatcaatcaaaagatcgttaagaacaataatgagcctttaccagaaattaagtcaatcggcgaccagatcattcttaagagcgataataaggatgcggaccagaaccacatgtcccagaatcaccagaacatcccccctactaacaccgagcgcagaagcaaatcttgtacaattctgtag

SEQ ID NO: 238457 - DNA, 1443 bp, synthetic construct
  misc_feature 1..1443: note = Description of Artificial Sequence: Synthetic coding sequence
  source 1..1443: mol_type = other DNA
atgcgtgaacccgaggagctcatgcctgattcaggcgctgttttcacctttgggaaaagtaagttcgcagagaataatcccggtaagttctggttcaagaacgacgttcccgtgcacctcagctgtggcgacgagcattcggccgtggtcacgggaaataacaaactttacatgttcggatctaataactgggggcagctcggactgggatcaaagtcagcaatctctaaacccacctgcgtcaaagcgcttaaaccggagaaggtgaagctggctgcctgcgggaggaaccacaccctcgtatctacggaggggggtaatgtgtatgctactgggggtaataatgagggccagctggggctgggagataccgaggaaagaaataccttccacgtgatttcctttttcactagcgagcacaaaatcaagcagctgtctgctggctccaacacgtctgcagcattgaccgaggatgggaggctattcatgtggggggacaactcagagggacaaatcgggctgaagaacgtgagcaatgtgtgtgtccctcagcaggtgacaattgggaagccggtgtcctggatctcctgtggctactaccattctgcttttgtgacaacagacggggagctctatgtctttggggagcctgaaaacgggaaactgggactgccaaaccagctattaggcaaccacagaactccgcagttagtcagcgagatcccagagaaagtgatccaggtagcttgcggtggtgaacatacagtggtgcttaccgagaatgcagtgtacacattcggactgggacagttcggccaactggggttggggactttcctattcgaaactagtgagcctaaagtcatagagaacatcagagaccagactatttcttatattagctgtggtgaaaaccacactgctctcatcaccgacatcggcttgatgtacacgttcggcgatggtcgccacggcaaactgggtctcggtcttgagaattttaccaaccacttcatcccaacactttgttctaattttttgcggtttatagtgaagctggtggcttgcggaggttgccacatggtggttttcgcggctccacaccgaggggttgctaaagaaatcgagttcgatgagattaacgacacgtgcctttctgtagctaccttcttgccctactccagcctgacatctggaaacgtgctgcagcgcaccctcagcgcacggatgagaagacgtgagagggaaagatcccctgactcattctccatgcgccgaacacttccgcctatcgagggaactctgggcctgagtgcctgctttctccccaactcggttttcccaaggtgttctgagcgaaacctccaagaaagtgtgttaagtgagcaagatcttatgcaacctgaagaacctgacacgcaccatgagccggaatttcagtag

SEQ ID NO: 238458 - DNA, 3063 bp, synthetic construct
  misc_feature 1..3063: note = Description of Artificial Sequence: Synthetic coding sequence
  source 1..3063: mol_type = other DNA
atgcgagaacccgaagagctgatgcctgattcaggcgcagtgtttacatttggcaaaagtaagttcgctgagaacaacccgggaaaattttggttcaaaaacgatgtgccagtacatctgtcttgtggtgacgaacattcagcggtggttacaggcaataataagctatacatgttcgggagtaacaattggggacagcttggattaggatcaaaatccgctattagtaaaccaacatgcgtgaaagctctgaagcctgaaaaagtaaagcttgcagcctgtggcaggaaccatacgctcgtaagtactgaaggcggaaacgtctatgccaccgggggtaacaacgaagggcagctcggtctgggcgatactgaggagcgaaatacctttcacgtcattagttttttcacatccgagcataagataaaacagctctctgcgggatccaacacctcagctgcactaaccgaggatggccgactgtttatgtggggtgataatagcgaaggtcagattggcctgaagaacgtcagtaacgtatgcgtgcctcaacaggtgactatcggcaaaccagtgtcatggatatcctgcgggtactaccattctgctttcgtgacaaccgatggcgagctctacgtctttggcgagccggagaatgggaagttggggcttccaaatcagctcctgggtaatcaccgaactcctcagctggtgagtgagattcctgagaaggtgatccaggtggcttgcggtggggaacacacagtcgttcttactgagaacgccgtctacaccttcgggctgggtcaatttggacagctaggccttggaacatttctcttcgaaacgtcagaaccaaaagtcatagagaatattagagatcagaccatcagttacatctcttgcggggagaaccatactgctctgattacagacattgggctaatgtataccttcggcgacggacggcacggtaagcttggactgggccttgaaaactttaccaatcatttcatccccactctctgctctaattttttgcggtttatagtgaaactggtggcctgtggaggctgtcacatggttgtgttcgcagccccacataggggcgtggcaaaagaaattgagtttgatgagatcaatgatacatgcctgtctgtggccacgttcctcccatatagttccctgacatcaggaaatgttttgcaacgcacgctttcagcccgaatgaggaggcgggagcgggagaggtcccctgacagtttctcaatgcgcagaacattgccaccaatagaaggtaccctgggtctgtctgcttgctttctgcctaatagtgtttttccaagatgctctgaacggaatctgcaggagagcgtccttagcgaacaggacctcatgcagcccgaggagccagactacctccttgacgagatgaccaaggaggccgaaatcgataattctagcacggtggaatcactgggtgaaactactgatatcctgaatatgacgcatattatgtccttgaactctaatgagaaatctctcaagcttagccctgttcagaaacagaagaagcaacaaactatcggggaacttacgcaagatacagccctgaccgaaaatgatgacagtgatgagtatgaagagatgtccgaaatgaaagagggaaaagcgtgcaagcagcacgtgtcccagggaatttttatgacacagcccgcaacaacaatcgaggcattttctgacgaagaagttgggaacgatacaggacaggttggccctcaggctgatacggacggagaaggcctgcagaaagaggtgtatagacacgagaacaataatggggtggatcaacttgacgcgaaggagattgaaaaagagtccgacggcggacatagccagaaggaaagcgaggccgaagagattgacagtgagaaagagaccaagctggctgagattgcaggcatgaaagatctgcgggagcgggaaaaatcgacaaaaaagatgtctccattcttcggaaatctgcccgaccggggaatgaacaccgagagcgaggaaaacaaagacttcgtgaagaagagagagagttgcaagcaggatgtgattttcgactcagaacgagagagcgttgagaaaccagacagctacatggaaggtgcatcggagtctcagcagggtattgcagatggattccagcagccagaggcgattgagttttcatccggcgaaaaggaagatgatgaggtggaaacagaccaaaacatccggtatggtcgtaaactaattgagcaggggaacgagaaggagacaaagccaattatctctaaatcaatggccaaatacgattttaaatgtgacagacttagtgagatacccgaggagaaggagggagccgaggactctaaaggcaacggtatcgaagagcaggaagtggaggccaatgaggaaaacgtcaaagtccatggcggaagaaaagagaaaactgagattcttagtgatgatctgacagacaaagcggaggatcacgagttttctaaaacagaagagctcaagcttgaggatgtggacgaggaaataaatgctgagaatgtggagtccaagaagaagacagtgggggacgacgaaagtgttcctaccgggtatcattctaagaccgagggagctgagagaacaaatgatgacagttccgcagagaccatcgaaaagaaagagaaagctaacctcgaagagcgcgcaatttgtgaatataacgaaaatccgaagggatacatgcttgatgacgccgatagcagttctctcgaaatccttgagaattcagagaccacaccgtccaaagatatgaagaagaccaaaaaaatattccttttcaaaagggtcccctccattaaccaaaagattgttaagaataacaacgagcccttgcccgaaattaagagcattggggatcagataattctgaagtccgacaacaaagacgccgatcagaatcacatgagtcagaaccatcagaacatcccgccaactaacacagagcgtcgctctaagagctgcacaatattgtag

SEQ ID NO: 238459 - DNA, 1941 bp, synthetic construct
  misc_feature 1..1941: note = Description of Artificial Sequence: Synthetic coding sequence
  source 1..1941: mol_type = other DNA
atgcgggaacccgaagaactgatgccggactcaggcgcagtgttcacattcgggaagtccaaatttgccgagaataatcctgggaagttctggttcaagaacgacgttcctgtgcacttgagttgtggggatgagcactccgcggttgttaccggcaataataagctgtacatgtttggaagcaataattggggtcagttaggactcgggagtaagtccgccatttctaaaccgacatgtgtaaaggccctcaaaccagagaaagtgaaactcgccgcttgcgggaggaatcatactttggtgtccacggaagggggtaatgtgtacgccaccggaggaaacaacgaaggacagctgggccttggggataccgaggagcgaaacacttttcacgtaatctcttttttcacgtccgaacataaaattaaacagctcagcgccggatcaaatacgtccgcggcactgactgaggacggcaggctgttcatgtggggcgacaactccgagggacagattgggttgaaaaacgtatccaacgtgtgtgtgccacagcaggtgaccatcggaaagccagtttcttggatttcttgcggctactaccattccgcatttgtgaccaccgatggggagctctatgtcttcggcgagccagagaatggtaaattgggtctgccaaatcagcttctgggaaaccacagaactcctcaattggtgtctgaaatcccagaaaaagtgatccaggtggcttgcggcggtgagcatactgttgtccttactgagaacgcagtctatactttcgggctggggcagttcggccagctgggcctgggtaccttcctgtttgaaacatctgaaccgaaagtaatagagaatattagggaccagaccatttcctatatctcatgtggcgagaatcacaccgccctcataacagatattggattgatgtataccttcggggacggcaggcacggaaaattggggttgggtctggagaatttcaccaaccacttcattccaacactgtgctcaaacttcttgcgcttcatcgtcaagctggttgcatgtggcggatgccatatggtcgtgtttgccgctcctcatcgcggtgtggcaaaagagatcgaattcgacgagatcaacgacacttgcctgtcagtcgctacattcctgccgtactcaagccttacctccgggaatgtgctacagcgtactttgtccgcaagaatgcggcgacgcgagcgggaacggagccctgatagtttttctatgaggcggaccctgcctcccattgagggaaccttgggcttatctgcatgttttctccctaactcagtatttcctaggtgtagcgaacggaatctgcaggagtccgtgctctcagaacaggacttgatgcagcccgaagagcctgattacctgctcgacgagatgacaaaggaggctgagattgacaactctagtacggttgagtccctcggcgaaactactgatattctgaacatgacgcacatcatgtccctgaacagtaacgagaagtccttgaagctcagcccagtgcagaagcagaaaaagcaacagacaattggggaactgacacaggacacggcactaactgagaacgacgattcagacgagtacgaagagatgagcgaaatgaaggaaggtaaagcatgtaagcaacatgtttcccagggcattttcatgactcagcccgcaaccaccattgaagcctttagcgacgaggaggtcgagattcctgaggagaaagaaggcgctgaggatagcaagggtaatggaatcgaggagcaggaagtggaggccaatgaagagaatgtaaaggtgcacggagggaggaaagagaagacggagatcctctcagacgatctgactgataaggccgaatactccgccagtcatagccagattgtatccgtatag

SEQ ID NO: 238460 - DNA, 3459 bp, synthetic construct
  misc_feature 1..3459: note = Description of Artificial Sequence: Synthetic coding sequence
  source 1..3459: mol_type = other DNA
atgagagaacctgaggagttgatgccagatagcggtgcagtattcaccttcggcaaaagtaagtttgctgagaacaaccccggaaaattctggtttaaaaatgacgtacctgtccatctgtcttgcggtgatgagcatagcgccgtggtgacaggcaataataaactgtacatgttcgggtcgaacaactgggggcagttgggccttggatctaagagcgctataagtaagccaacttgtgtcaaggccctcaaacccgagaaagtgaagttggcagcttgcggccgtaatcacacacttgtatccacggagggtggaaacgtgtatgcgacggggggtaacaatgaggggcagctcgggctgggagatacggaggagcgcaacacgtttcacgtgatcagctttttcacctcagagcacaagattaaacagctgagcgcaggctctaatacatctgctgcactgacagaggatggcaggctgttcatgtggggggacaactccgaaggccaaattggcttgaagaacgtctctaatgtatgcgtcccccaacaggtgacaattggtaagccggtctcatggatatcttgcggctattatcatagtgcgtttgtgacgacagacggcgaactgtatgtgtttggggagcctgagaatggcaaactcggactgccaaatcagttgctcgggaatcacagaacaccccagctagtgagcgagattccagaaaaggtgatccaggtggcctgtgggggagaacacactgtggtcttgaccgaaaacgcagtctacacctttgggcttggccagttcggccagctgggtttggggacctttttattcgaaacatcggagcctaaggtaattgagaatattcgggaccagaccatcagctatatcagctgcggggagaatcacactgcactgataaccgatatcggtcttatgtacacttttggcgatgggagacacggcaaactggggttaggtctagagaacttcacaaaccatttcatccccactctgtgctctaacttcctacgtttcatagtcaaacttgtagcatgcggcggttgccatatggtcgtcttcgccgctccgcacagaggtgtggcaaaggagattgagtttgatgagatcaatgacacttgtctgtcagtggcaacatttctgccctattcctctctgacttctggcaacgtgttgcaaagaacgctttccgcacggatgcggaggcgggaaagggaacgctcccctgattcttttagtatgagaaggacactgcctcccattgaaggcacactaggcctttccgcttgcttcctgcctaactccgtgttccctcgctgttccgagcgcaacctacaggaatcagttctgagcgagcaggatctgatgcagcccgaagaaccagattatcttttagacgagatgaccaaggaggccgaaattgacaattcctctaccgtggaatctctcggtgagacgacagatattctgaacatgactcacatcatgtctctcaactccaatgaaaaatcacttaagttgagcccggttcagaagcaaaagaagcagcaaacaatcggcgaactgacccaagatacagctcttactgagaacgatgacagcgatgagtatgaagagatgtccgaaatgaaggaaggaaaagcctgtaagcaacacgtaagccagggaatcttcatgactcagcccgctaccaccatcgaggcatttagcgatgaggaggtcgagattcccgaggaaaaggagggggctgaggatagtaaggggaatggaatagaagagcaagaggtagaggcgaatgaagaaaatgtgaaagtgcatggcggacgtaaggagaagaccgagattctgagcgatgatctgacagacaaagccgaggtgtccgagggcaaggctaagagtgtcggagaggctgaggacggccctgagggacgtggcgatggaacctgtgaggaaggaagcagtggggcagagcactggcaggacgaggagcgcgagaagggtgagaaggacaagggcaggggcgagatggaacgcccaggggagggcgagaaggaacttgcagagaaagaggagtggaagaagcgagacggcgaggaacaggagcagaaagagagagagcagggacaccagaaggaaaggaaccaagagatggaggaaggaggtgaggaggagcatggggagggcgaagaggaagaaggagatcgcgaagaggaggaggagaaagaaggcgagggcaaggaggaaggagagggcgaagaggtggaaggcgaacgagagaaggaagaaggcgagcggaagaaagaggagagggcaggcaaagaagaaaagggcgaggaagagggagatcagggggagggcgaagaagaagagactgaggggagaggggaagagaaagaggagggaggcgaggttgaaggaggagaggttgaggagggaaaaggcgaaagagaggaagaagaggaggagggcgagggcgaagaagaagagggggaaggggaagaggaagaaggagagggcgaagaagaggagggcgagggtaaaggcgaagaggagggagaagagggggaaggggaagaggagggagaagaaggagaaggtgagggtgaggaggaagagggcgagggagagggagaggaggaaggcgagggggagggtgaggaagaagagggggaaggcgagggggaagaagaaggggagggagaaggtgaagaggaggaaggcgaagggaagggtgaagaagaaggcgaagaaggcgaaggagagggagaggaagaagagggggagggtgagggagaggacggggagggggagggcgaggaggaagagggggagtgggaaggcgaggaggaagagggggaaggggaaggcgaggaggagggggagggggaaggagaagagggcgagggggagggcgaagaggaggagggagagggtgagggagaggaagaggagggggaggaggagggcgaggaggaaggggaaggcgaggaagaaggtgagggcgaaggcgaagaggaagaggaaggggaagtagaaggcgaggttgaaggggaggagggcgagggtgaaggagaggaggaagaaggggaagaagagggtgaggagagggaaaaggaaggggagggcgaggagaataggcggaaccgagaagaagaagaggaggaagagggaaagtaccaggaaactggagaagaagagaatgaaaggcaggatggggaagagtacaagaaagtttctaaaataaaaggcagtgtgaaatatggaaaacataagacttaccagaaaaagtctgtgaccaatacccaaggcaacggtaaggaacagcgctccaaaatgcccgtgcagagtaaacgcctattgaagaacggaccatccggttccaaaaagttttggaataatgtactgccccattacctcgaacttaaatag

SEQ ID NO: 238461 - DNA, 2121 bp, synthetic construct
  misc_feature 1..2121: note = Description of Artificial Sequence: Synthetic coding sequence
  source 1..2121: mol_type = other DNA
atgaacgagtccaagcctggcgattctcagaacttagcgtgtgtgttctgccgcaagcatgacgactgtcctaacaagtatggggaaaagaaaacaaaagagaagtggaacttgactgtgcattattattgcctgttgatgagcagtgggatctggcaacgcggaaaggaggaggagggcgtgtatggttttctcattgaagatattcggaaggaagttaacagagcttccaagctcaaatgctgtgtgtgcaaaaagaatggagcctccatcggatgcgttgcgccaaggtgcaaaagaagttaccattttccttgcggcctacaacgcgagtgcatcttccagttcaccggcaatttcgcttccttttgctgggatcatcggccagtgcagataatcacgtctaacaactatcgagaatccttgccgtgcactatctgcctagagtttattgaacccatacccagctacaacatcctgaggtctccctgctgcaagaacgcctggtttcatcgggactgtctgcaggttcaagcaattaacgctggtgttttcttcttccggtgtaccatatgtaacaattcggacatctttcagaaggaaatgctgaggatggggatccatattcccgaaaaagacgcctcttgggaactggaagagaatgcctatcaagagctcctacagcactatgagcgatgtgatgttcgtaggtgccgctgcaaggaggggagagactacaatgcacccgatagcaaatgggaaattaagagatgtcagtgttgtggctcatcgggcacacatcttgcgtgtagttccctgagatcctgggagcagaactgggaatgcctcgagtgccgtggtatcatttacaatagtggagagtttcagaaggccaaaaagcatgtgctgcccaatagcaataacgttggtatcaccgattgcctcctggaggagtccagtcctaagctgccaaggcagagtcctggtagtcagtcaaaagatctgcttaggcaaggctcaaaattccgcagaaacgtcagtaccctgcttatagagcttgggttccagataaagaaaaaaacaaaacggctctatatcaataaagccaatatttggaactctgccctcgacgcttttagaaacaggaattttaatccctcctacgcaatcgaggtggcctatgtcatcgagaatgacaatttcgggtccgaacaccctggcagcaagcaggaattcctttccctgttgatgcagcaccttgagaattccagccttttcgagggatccttgagcaaaaatctgtccctgaactcccaggcactgaaggaaaacttgtactatgaagcaggaaagatgctcgcgatatccctggtgcacggcggacctagccctggcttctttagcaaaacccttttcaactgcctggtgtatggcccagagaatacccagcccatcttggatgatgtctctgatttcgatgtcgctcagatcattatccgaattaataccgcgaccaccgtggcagacctgaaaagtatcataaatgagtgttacaattacctggagctcatcggatgcctcaggctgattacaactctttccgataaatacatgcttgtaaaggatattctgggataccacgttatccagcgcgttcatacaccatttgagagttttaaacagggtttaaaaacactcggcgtgctagaaaagatccaggcctatcccgaggctttctgctctatcctttgccataaacctgaatctttgtccgctaagattctttccgaactgtttaccgtacacacacttcccgacgtgaaagctttaggattttggaacagctatctgcaggccgtggaagatggcaagtccactacaaccatggaagacatcctgatcttcgccacaggctgcagtagcattcccccagccggattcaaacccacaccctctatcgagtgcctgcatgtggatttccccgtgggcaacaaatgtaacaactgcctggcaatccctattacaaacacctataaggaattccaggagaacatggatttcactataagaaacacactgaggctcgagaaagaggaaagcagtcattatatcggccattag

SEQ ID NO: 238462 - DNA, 1938 bp, synthetic construct
  misc_feature 1..1938: note = Description of Artificial Sequence: Synthetic coding sequence
  source 1..1938: mol_type = other DNA
atgctgttgatggcccctgacaggtgtagatacgtgtggaaacactgccaacctatggaaatgcggatcaaatggatatttctgtgctgcatccgccctctgtacgatttcaccagccagtacgttatggagactgattccctgttcttgcattacctgcaagaagccagcgcacgtctggacatccatcaggccatggccagtgaacatagcaccctcgctgcaggttggatatgctttgaccgcgtgctggagaccgtcgaaaaagtccacggcctggcaaccctcattggggctgggggagaagagtttggagtattggagtactggatgcgcctccgttttcccattaagcccagtctacaggcttgcaataaacggaaaaaagctcaagtctacctgtccactgacgttcttggcggacgcaaagctcaggaagaggagttcaggagtgagtcctgggagccccagaacgagctgtggatcgaaatcaccaagtgttgcggcctccgatcacgctggctgggtacccagccctcgccttatgccgtttaccgcttctttaccttttcggatcacgataccgcgattatccccgcaagcaataacccatactttcgcgatcaggcccgattcccagtcctggtgacgtccgacttggaccactatctgcgacgggaagccctgtccatccatgtttttgacgatgaggacctggagccagggtcgtatctgggaagagcaagagtaccgctcctgccgttagcaaagaacgagagtatcaagggcgactttaacctcaccgatccggctgagaagcctaatgggtccattcaggtgcaacttgattggaaatttccctacattccaccagagtcctttctgaagccagaagcccaaaccaaaggaaaggataccaaggatagctccaaaattagttccgaagaggaaaaggcatccttcccttcccaggatcaaatggcttctccagaagttccaattgaggcgggacagtaccgtagcaagaggaagccccctcatggaggcgaaagaaaagagaaggagcatcaggtggtgtcctactcccggcgtaagcacggcaagcgcattggcgtgcaaggaaaaaaccgaatggagtatctctcactgaacattctgaatggcaatacaccagagcaggttaattacacagaatggaagttttccgaaaccaacagctttattggcgacggcttcaaaaaccagcacgaagaagaggagatgaccctgtcccattcagcgttgaagcagaaggagccattacatcccgtcaatgacaaagagagttcagagcaggggagtgaagtgagcgaggctcagaccaccgactccgacgatgtcatcgtcccacctatgtctcagaaataccccaaagcggatagcgaaaagatgtgcattgagattgtatccctggcattttacccagaagctgaggttatgagcgacgaaaacattaagcaagtgtatgttgagtacaagttctacgatctcccgttgtcagaaacagagacccccgtaagtttgcgtaagccacgggctggcgaagagatccatttccacttttccaaggttattgacctcgaccctcaggaacagcaggggcgaaggcgtttcctttttgatatgcttaacggacaggaccccgaccagggccatttgaaattcaccgtcgtgtctgatcctctggatgaggagaagaaagagtgcgaagaggtaggttacgcttacctgcagctgtggcagattctggaaagtgggcgagacattcttgagcaagaacttgatatcgtcagcccagaggatctggcgacacccattggtcgtctgaaggtctccctacaggccgctgctgtcttgcacgcaatttacaaagaaatgaccgaggacctgtttagctag

SEQ ID NO: 238463 - DNA, 1839 bp, synthetic construct
  misc_feature 1..1839: note = Description of Artificial Sequence: Synthetic coding sequence
  source 1..1839: mol_type = other DNA
atgttgaagctcgacaacaaagatgttattagtcacccactgggatatcctagcgagtcattgttgtcaatcgccagcatgttagactcttccgattcaagttctcagccacactggagtaacgaactcattgcagagcagctgcagcagcaggtgagtcagcttcaggaccagctggatgctgaactggaggataaaaggaaagtcctgcttgagctgtcccgggagaaggctcagaatgaggacctgaaattggaggtgacaaacattttacagaaacacaaacaggaggtggagctcctacagaatgctgcgaccattagccagccccctgaccgtcaatctgagcccgctactcaccctgccgtgttgcaggaaaacacacagatcgagccctctgaaccaaagaatcaggaggaaaagaagctcagccaagtcctgaacgagctccaagtttcccatgccgaaaccacattggagctcgaaaagacaagggacatgctaatactgcagcgtaaaatcaatgtttgttaccaagaggagcttgaggcaatgatgactaaagccgacaatgataatcgcgatcataaagagaagttggaaagattgactcgattactggacttgaaaaacaacagaattaaacaactcgaagggatcctccgttctcacgacttgcccacatccggagatttcaacctgactgatccagccgagaagcctaatggatctattcaggttcagctggattggaagtttccctacatcccacccgaaagtttcttgaagccagaggcgcagactaaaggcaaagatactaaggacagcagtaagatctcctctgaggaggagaaggctagcttcccctcccaggaccaaatggcgtcccccgaagtacccatcgaggcagggcagtacaggtctaagcgcaaacccccacatggcggtgaacgaaaggaaaaagagcatcaggttgtttcatattcgcgccgtaagcacggcaagcggattggggtacagggaaaaaataggatggaatacctgagcctgaatatccttaatggcaacaccccagagcaggtaaactacacagagtggaaattcagtgagacgaattcattcattggagacgggtttaagaaccagcacgaggaagaagagatgaccctttcgcattcggcacttaaacagaaggagccccttcaccccgttaacgacaaagaatcatctgagcagggcagcgaggtgtcggaggcccagaccacagattctgacgacgtaatagtaccaccaatgtcgcagaagtacccgaaggctgatagcgagaagatgtgcatagaaatagtgtccctggcattttacccagaggcagaagtgatgtcagacgagaacataaagcaagtttacgtggaatataaattctacgacctacccctgtctgaaaccgagacccccgtctccctgaggaagccgagggcaggcgaagaaattcatttccacttttctaaggtgatcgacctcgacccccaggagcaacagggaaggaggcggttcctgtttgatatgctaaatggtcaggatcccgaccagggccacctgaagttcacagtggtatccgatccgctggatgaagagaagaaggagtgcgaggaggtgggctacgcatatctgcagctgtggcagatccttgaaagcggccgtgacatcctggaacaagagctggacatcgtgtctcctgaagacctggcaacacccatcgggcgtctgaaagtctcactccaggctgccgcagtgctacacgccatatacaaagaaatgactgaggatcttttcagctag

SEQ ID NO: 238464 - DNA, 3861 bp, synthetic construct
  misc_feature 1..3861: note = Description of Artificial Sequence: Synthetic coding sequence
  source 1..3861: mol_type = other DNA
atgtcacacctggtggatcctacaagtggcgacctgcccgtgagagatatcgatgccattccgctcgttctccctgcttcaaagggcaagaacatgaaaacgcaacccccattatctagaatgaatagggaggaactggaggatagcttttttcgcctgagagaggatcacatgctagtaaaagagctgtcctggaagcagcaggacgaaattaagcgactcaggactactttgttgcgactaactgccgctgggcgtgatctgcgggtcgctgaggaagcggcaccgctgtccgagaccgctcgacgcggacagaaggcagggtggcggcagagactttccatgcatcagcggccacagatgcatagacttcaaggacactttcactgcgtaggaccagcgtcaccccgaagagctcagcctcgagttcaggtcgggcatcgccagctgcacactgctggagccccagtgcccgagaagccaaagcgcggacctagggataggttatcctacactgccccacccagcttcaaggagcacgctacaaacgagaatagaggtgaggtggcttcaaaaccctcagaactcgtgagtgggtcaaattctatcatttccttctcttcagtcataagtatggctaagcccatcggactgtgcatgcccaatagcgctcatatcatggcctctaacactatgcaagttgaagagcctcctaagtccccagaaaagatgtggcctaaagatgagaacttcgagcaaagatcgagtctggagtgcgcccaaaaggctgcagaattaagggctagcataaaggagaaagtggaactcatcaggctgaagaaactcctgcatgagagaaatgcctccctcgtgatgacaaaggcccaactcacagaggtccaggaggcctacgagacgttgttgcagaaaaaccagggcatcctctctgcggctcatgaagctcttcttaaacaggtgaacgagctccgagccgaactcaaggaggaatctaagaaagcagttagcctaaaatcccagctcgaagatgtttctatcctgcaaatgactctcaaggagttccaggagcgagttgaagatctcgagaaagagcgcaaattgcttaacgataattacgataaactcctggagtcaatgctcgatagtagtgacagcagttctcagcctcattggagcaacgaattgatagctgaacagttgcagcagcaagttagtcaattacaggatcagttggatgcagaactggaggacaagaggaaggtgttgctcgaactgtctcgggagaaagcccagaacgaagatttaaagctggaagtgactaacatcctccaaaagcacaagcaggaagtggaactcttgcagaacgcagcaacaatctcccagccgcctgacagacagtccgagccagctacccatcccgctgttctccaagagaacacccagatcgaaccttcagaaccaaaaaaccaggaggagaagaaactctcccaggtgctgaatgagctgcaggtaagtcatgcagaaactaccttagagctggagaagaccagggatatgctcatcctccagagaaaaattaatgtatgctaccaagaagagctggaggctatgatgaccaaagcggacaacgacaatcgggatcacaaggaaaaacttgaaagacttactcgcctcctggacctgaagaataaccggatcaagcagctagagggcatcttgagatcgcacgatttacccactagcgagcagctcaaggacgtagcgtatggtacacgcccactgagtctgtgcttggagactctgcctgcccatggcgatgaggataaagtggatatttctctgctgcatcaaggcgaaaatctgtttgaactgcatatccaccaggcgtttcttacatccgctgccctggcccaggccggtgatacacagcccacaaccttttgcacgtacagtttttatgacttcgagacgcactgtactccattgagcgtaggtccgcagccgctctacgatttcacgtcccaatatgtgatggagacagattccctctttcttcactatttgcaggaggcctccgctcgactggacatccaccaggctatggcatcagagcatagcaccttggctgccggatggatttgcttcgatcgcgttctggagaccgttgagaaagtacacggactggcgactctcatcggggctggtggggaggagttcggtgtgcttgagtattggatgaggttacgattccctataaagccatctcttcaagcatgcaataagagaaaaaaagcacaggtgtacttaagtaccgatgttctgggaggtaggaaggcccaggaggaagagttccgtagcgagtcttgggaaccccaaaatgagctttggatcgaaatcactaagtgttgcggcctgaggtctcgttggctggggactcagcctagcccgtatgcagtgtaccgttttttcactttctccgatcacgatactgcaatcattcccgcatctaacaatccttattttcgggaccaggctcgattccccgttctggtcacatcagacttagatcactacttgaggcgggaggccttgagcatccacgtgtttgacgacgaggatctcgaacccggttcctacttagggagggccagggttccccttttacctttagccaaaaacgaatcaataaaaggggactttaatctgaccgatcccgctgagaagccaaatggaagtattcaggtgcagctagactggaaatttccctacattcctcccgagagcttcctcaagccggaggcgcaaacaaagggaaaggacaccaaggatagttcgaagattagctctgaagaagagaaagcaagttttcccagccaggatcagatggcatctcccgaggtcccaattgaagccggtcagtacaggtctaagcggaagccaccccacgggggagaaaggaaggagaaagagcaccaggtggtttcgtactcccggcgtaagcacggtaagcggatcggagttcagggcaaaaacaggatggagtacttgtcgctgaatatattgaatggaaacacgccagagcaggtaaactataccgagtggaagttctcagaaacaaactccttcattggtgacgggttcaaaaatcagcacgaggaagaggagatgactctcagccactcagcactaaagcagaaggaacccctgcacccagtgaacgataaggaatctagtgagcaaggcagtgaggtgtccgaggctcagacgacagattctgatgacgtgattgtaccaccgatgagccagaagtaccccaaagcggattcggagaaaatgtgcattgagatcgtctccctggcgttttatcccgaagcagaggttatgagcgatgagaatatcaagcaagtgtacgtggagtataaattctacgacctgcctctcagtgagacggagacacctgtctcgctgcggaaacctagagccggtgaagaaattcacttccactttagcaaagtaatcgatcttgacccgcaggagcagcagggtaggcgccgttttctttttgacatgctcaacggccaagaccccgaccaaggccatctgaagttcaccgtggtaagcgatccgctggatgaggagaaaaaagagtgcgaggaagttggctacgcttacttgcagctgtggcaaattctggagagcggtcgggacatactggagcaagaactcgacattgtgtcccctgaggacctggcaactcctatcggacggcttaaggtgtccctccaggcagccgctgtgctacatgctatatacaaagagatgacggaagatttgtttagttag

SEQ ID NO: 238465 - DNA, 1617 bp, synthetic construct
  misc_feature 1..1617: note = Description of Artificial Sequence: Synthetic coding sequence
  source 1..1617: mol_type = other DNA
atgaatctggagctcttggaaagcttcggccagaactaccctgaagaagccgacggcactctggactgcattagcatggcccttacctgtacgtttaatagatggggcacgctactggctgtgggctgtaatgatggcagaatcgtgatttgggacttcctcaccagaggaatcgctaagatcatttcagcccacatccatccagtttgctccctctgctggtctcgagacggtcacaaacttgtgagtgcctccaccgacaatattgtttcacagtgggacgtgctgtccggagattgcgatcagcgctttcggttccccagcccgattttgaaggtgcagtaccatccaagggaccagaataaagtgctggtttgtccaatgaagagcgccccagtgatgctgacactgtctgacagtaagcacgtggtacttccagttgatgacgactccgatttgaatgtggtagcttcctttgaccgtcggggagagtatatctatactggcaacgcgaaagggaagatcctggtcctcaagaccgactcccaggacttggttgcatcatttagggtcaccactggaacatcgaacaccactgccattaaatccatcgagttcgccaggaagggctcttgttttttgataaatactgcagatcgcatcatccgagtgtacgatggtcgcgagattctgacatgtggacgagacggagaaccggaacctatgcaaaaactgcaggacctggttaaccgaacaccctggaaaaaatgttgcttctcgggcgatggggaatatatcgtggcgggaagcgccaggcagcacgcactgtatatctgggagaagtctatcgggaacttggtgaagatcctgcacggaacaagaggagagctgttgcttgatgttgcatggcacccggtgcgcccaattatcgcatcaatctcatctggtgtcgtctctatatgggcccagaatcaggtggagaattggtccgccttcgcacccgatttcaaagagttggacgagaacgtcgaatatgaggagcgtgaatccgaattcgacattgaggacgaggacaaatcagaaccagagcagactggtgcagatgcggcagaagacgaggaggtggacgtaacctctgtggatcctattgcagcgttttgttcctcagacgaagagctggaggattcaaaagcacttctctatctgccaatcgcaccagaagtggaagacccagaggaaaacccatatgggccaccacccgacgcagtgcagactagcttgatggacgaaggagcttcatccgaaaaaaaacggcagtccagcgccgacggctctcagccacccaaaaagaagccaaagacaaccaacatagaactccagggtgtccctaatgatgaagtgcatccattactgggtgtgaaaggtgacggcaagagtaagaaaaagcaagccggtagacccaagggatccaagggaaaggagaaagactctcctttcaagcctaagttgtataagggagatcgcggactccccctggaaggctctgctaaaggtaaggtgcaagcagagctgtctcaacctctcactgccggtggggctatatctgagttgctttag

SEQ ID NO: 238466 - DNA, 1503 bp, synthetic construct
  misc_feature 1..1503: note = Description of Artificial Sequence: Synthetic coding sequence
  source 1..1503: mol_type = other DNA
atgaatctcgagctcttggagtcattcggacagaactatccggaagaggccgacggaaccttggactgcatctccatggctttaacttgcacctttaaccgctggggcactctgctggccgttggctgtaacgatggcaggatcgtcatttgggattttctgactagagggattgctaaaatcatctcggcacatatccacccagtatgctccctgtgctggtcccgcgatggtcacaagctcgtgtctgccagcacggacaatattgtgtcccagtgggacgtgctgagtggagactgtgaccagcggttccgctttccgtcccctatccttaaagtgcaatatcaccctagagaccagaataaagttctcgtctgtccgatgaaatctgcgccagtcatgctaacattgtccgattctaagcacgtggtgcttcctgtcgacgatgactctgatctcaacgtagtggcatctttcgatagaagaggggaatacatttacaccgggaacgcaaagggcaaaatcctcgtactgaagacggattctcaagacctggttgcatcgtttcgggtgacgaccggtacatccaatacgaccgccattaagtctatcgaatttgctcgcaaagggagttgcttcctcatcaatactgccgaccgcatcattcgggtgtatgatggcagggagattctgacttgcggtcgcgatggcgagcctgagccaatgcagaagctacaggatttagtaaacagaactccctggaagaaatgttgtttttcaggggacggagaatacattgtggctggcagtgcacgccaacatgccctttatatctgggagaaatccattggcaatctggttaaaattctccacggaaccaggggggagttgctgctagacgtggcttggcacccagtcagaccaatcatagcttccatatcatcaggagtggtctcgatctgggcgcagaatcaggtggagaactggagcgcattcgcacctgattttaaagagttggacgagaacgtcgagtacgaggagcgcgagtctgaattcgacatcgaagatgaggacaaatctgagccggaacagaccggagcagatgctgctgaagatgaagaggttgacgttactagcgttgatccaattgccgctttctgctcttccgacgaggagctcgaagacagtaaagctctgctgtacctcccaatcgccccagaggtggaagaccccgaagaaaacccctacggcccacctcccgacgccgtccagacaagtttgatggatgagggagcgtcttcagagaaaaagaggcagagcagcgcggacgggtctcagcctcctaagaagaaacctaagacaactaacattgagctacaaggtgtccccaatgacgaggtgcatcctttgcttggggtcaagggagacggaaagtcaaaaaaaaagcaggcaggacgccctaagggcagtaaagcgggaggggctatttccgaattgctttag

SEQ ID NO: 238467 - DNA, 5378 bp, synthetic construct
  misc_feature 1..5378: note = Description of Artificial Sequence: Synthetic coding sequence
  source 1..5378: mol_type = other DNA
atgagttgcgttcattacaagtttagctctaagcttaactatgacactgttaccttcgacggccttcacatttcattgtgcgatctcaagaaacagatcatgggcagggagaagctgaaggcagcagactgtgatttacagataaccaacgcgcaaacaaaggaagaatatacagatgacaatgcactgattccaaagaattcttcagtcattgtcagaaggattcctatcggaggcgtgaagtcaacctctaaaacatacgtcatctcaagaactgagccagccatggcaactactaaggctatcgacgattcaagcgcaagtattagcctggctcagctgacaaagactgccaacctcgctgaagcaaatgccagcgaggaggacaaaatcaaagcaatgatgagccaatctggccatgagtacgaccctattaattacatgaaaaaaccactgggaccaccgcctcctagttatacgtgctttcggtgtggcaaaccaggccattacatcaagaattgccctaccaacggcgacaaaaatttcgagagcggaccgaggatcaagaagagtaccggcatcccaagatcctttatgatggaagtgaaagaccctaatatgaagggcgcaatgcttaccaatacaggcaaatacgccattcccactattgacgctgaggcttatgctatcgggaagaaggagaagcctccatttctgcctgaggagccatcttcgtcctcggaagaggacgatcctattccggatgaactactgtgcctgatatgcaaggacattatgaccgacgctgtcgtaattccatgctgcggcaactcttattgcgatgagtgcatccgcaccgctctcctggagagcgacgaacatacctgccctacctgtcatcagaatgatgtgtctcccgatgccctgattgcaaataagtttttacgtcaggccgtcaacaacttcaagaatgagaccggctataccaagcgcctgcggaaacagctcccaccaccaccaccaccaatccctccccctaggcccctgatccagcgaaatcttcagcctttaatgcgttctcctatctccagacagcaagaccccctaatgatcccggtgacctcctcttctacccatccagccccatcaatctcttctctgacgtccaaccagtctagcctcgctccccctgtcagcggaaacccatcttcagctcccgctcctgtgccagatatcaccgcaacggtctctatctccgtgcatagtgaaaagtccgacggcccttttcgcgactctgacaataagattttacccgctgctgcgctggcttccgagcactcgaaagggacatcaagtatcgcgattacggcattgatggaggagaagggctatcaggtgccagtgctggggactccctccttgttggggcagtcactactacacggccagctcataccaacaactgggcctgtcagaattaatacggcaagacccggtggagggaggcctggctgggaacatagtaacaaactgggatatttggtatccccaccgcagcagattcgccgtggagagcgatcttgttaccgtagtatcaatagaggtcgccaccatagcgaacggagccaacgaacacaagggccttctttgcccgctaccccagtgtttgtgcctgtgccccctccaccactgtacccaccgcctcctcacacgctgccactccccccaggcgtgccacccccacagttcagtccacagtttcctcctggtcaaccccctccggcaggatatagcgtgccaccccctggcttcccacccgcaccagctaacctcagtacgccatgggtgtcttccggagtgcagactgcacactccaacaccataccgaccactcaggcccctccgctgtctagagaggaattctatcgggaacagagacgtctcaaggaagaggagaagaaaaagagtaagcttgacgaatttactaacgacttcgcaaaggagttgatggagtacaaaaaaatacagaaggagcggaggagatccttctcgagatccaagagcccctatagcgggtcatcatattctcggagctcatacacatacagcaagtcacgttccggttcaacacggtcccggtcgtacagtcggtccttcagcaggagccattcacggagttattcccgctcccccccttaccctcggagaggtcgaggtaaaagtagaaactatagatcgcgatcccgctcacacggctatcacagatcacgttctcggtccccaccgtatagaagatatcattctcgctcgagatccccccaggcgttccgagggcagtcacctaacaaaaggaatgtaccccagggtgagaccgaaagagagtatttcaaccgctaccgagaggttcctccaccttacgatatgaaagcttattacgggagatctgtggatttccgggacccttttgaaaaggagcgctacagagagtgggagcgcaaatatagggaatggtacgaaaaatactacaaaggctacgctgctggagctcagcccagacccagcgccaatagagagaattttagtcccgagcggtttttacccctgaacattcgcaattccccattcactcgcggacggagagaagactacgtcggcggacagtcgcaccgctcacgcaacatagggtctaattaccccgagaagctgtcggctagagatggtcacaaccagaaggataatactaaaagtaaggagaaagagtctgaaaacgctcctggagacggcaagggaaataagcacaagaagcatcggaaacgacgaaaaggggaagagtctgagggcttcctgaatccagagctccttgaaaccagcagaaaaagcagagagccaacaggcgtggaggaaaataagaccgatagtctgttcgttcttccatctcgggacgatgctactccagtgagagatgagcctatggatgcagagtcaataaccttcaagtccgtctcagaaaaagataagcgcgagcgagacaaacctaaggccaagggggataagacaaagcgcaaaaatgatggcagtgccgtgagcaagaaggagaatatagtgaagcctgccaaaggaccccaagaaaaagtggacggcgaacgagaacgtagtccacgcagtgaaccgcctattaaaaaagccaaagaagagacgcctaaaaccgacaatactaagagctccagtagtagccaaaaagatgaaaaaattactggaacacctcgaaaggcccattccaaaagcgctaaggaacatcaagagaccaaacctgtaaaggaggaaaaggtgaagaaggactacagcaaggacgttaagagcgagaagttaacaaccaaggaagagaaagccaagaaacctaacgagaaaaataaacccttggacaacaagggggagaaaaggaaaagaaagaccgaagagaagggcgttgataaggacttcgagagctcttcaatgaaaatatcaaaattggaagttaccgaaatagtgaagccaagtcccaagcgcaagatggagcccgatactgaaaagatggacagaacccctgaaaaggacaaaatttctttatctgcacccgctaagaaaatcaaactgaatagggagacgggtaaaaaaattggtagtactgaaaacatcagcaatacgaaagagccatcagaaaagctggagtccacctcaagcaaggtgaaacaggagaaggtaaaggggaaagtgcggaggaaagtgaccggaacggagggctcttcctctactctggtagactatacttccacctcctcaacaggaggatcaccggtccgaaaaagcgaggagaagacagataccaagcgcacggtgatcaaaactatggaggaatacaataatgacaacacggcccctgccgaggatgttataattatgattcaggtgccccagagcaaatgggacaaggatgactttgagtcagaggaagaggacgtgaagtcaactcaacccatttcctcagtgggcaaacctgcctctgtcatcaagaacgtgtctacgaaaccttccaacattgtgaaatacccagagaaggagtctgagcccagcgaaaagattcagaagttcacgaaggacgtgagccacgagatcattcagcacgaagtaaagtccagtaagaacagtgcgagctcagagaaaggaaagactaaagaccgtgattacagtgtgttggaaaaagagaaccccgagaaaaggaagaattccacacagccagagaaggaatccaacctggatagattgaatgagcagggcaacttcaagagcctgtcacagtcttctaaagaggcacgcacttccgacaaacacgacagcacacgggcatctagtaacaaggacttcacccccaacagagataagaagaccgattacgatacccgtgaatattcctcaagcaagcgccgtgacgaaaagaatgagctgacacgccgtaaagattcaccctcacggaacaaagactcagctagtggacaaaagaataaacctagggaggagagggaccttcccaaaaagggtactggtgattcgaaaaaaagcaattcatctcctagcagagacagaaagcctcatgatcataaagctacatacgacaccaagcgccctaacgaagaaaccaagagtgtggacaaaaacccttgtaaggaccgggagaagcacgttctcgaggcacggaacaataaggaaagctctggcaacaaactgctgtacatcctaaacccccctgagacccaggtggagaaggagcagattaccggccagatagataaatccacagtgaagcctaagccccaattaagtcattcctctcgcctgagctctgatcttacccgggaaactgacgaggcagcatttgagcctgactacaacgagtcagattctgagagcaacgtgagcgtgaaggaggaagagtctagcggaaacatcagcaaagacctgaaggacaaaatcgtggagaaagccaaggagagcttagacactgctgccgtcgtgcaagtcggcatcagcaggaatcaatcccattcgtcccccagcgtctctccttctcgctctcacagtccaagtggctcccagacccgaagccattctagtagcgcttcttccgccgaatctcaggacagcaaaaagaaaaagaaaaagaaggaaaagaaaaagcataaaaaacacaagaagcataagaaacacaagaaacacgcaggcacagaagtggaactagagaagtcccagaaacataagcacaaaaagaagaaatccaaaaaaaacaaggataaagagaaggaaaaggaaaaagacgaccaaaaagtaaaaagtgtcacggtgta

SEQ ID NO: 238468 - DNA, 5276 bp, synthetic construct
  misc_feature 1..5276: note = Description of Artificial Sequence: Synthetic coding sequence
  source 1..5276: mol_type = other DNA
atgtcatgcgtgcattataagttctcaagcaaactaaactacgacaccgtgacgttcgatggcctgcacatcagtctctgcgatctaaagaagcagatcatgggccgagaaaagcttaaagcagctgactgtgatctccagattactaacgcccagaccaaagaggagtacaccgatgacaatgcccttatacccaagaacagttccgttatagtgagaagaatccctataggtggggtgaaaagcacttcgaaaacctatgttatatcccggacagagcctgcaatggccacgacaaaggccatcgatgactcctctgcaagcatcagcctggcccagttaacaaagacagccaacttggcagaagcgaacgcttctgaagaggataaaatcaaagccatgatgtctcaaagtggccacgagtatgatcctataaattacatgaaaaaacctctcggcccacctccaccctcctatacctgtttcagatgcggaaagcctggtcactacatcaagaactgtcctacaaacggcgacaaaaacttcgaatccggaccgcgaatcaagaagtctactgggatcccacgtagtttcatgatggaagtgaaagacccaaacatgaaaggcgctatgctcacaaacactggcaagtacgcaattccgacgattgatgctgaggcatacgccatcgggaagaaggaaaaaccgccattcctgcctgaagaaccatcctcctcaagcgaggaggatgatccaattccagatgagctgctgtgcctaatctgtaaggacatcatgactgacgccgtggttatcccttgttgcggaaatagctactgtgacgaatgcatcagaacagccttactggagtccgacgaacacacctgccccacttgccaccagaacgatgtctcacccgatgccttgatcgctaacaagttcctccgtcaggctgtgaataatttcaagaacgagactggctacaccaagcgactccgcaagcaactgccgcctcctccccctccgatcccaccccctcggccattgattcagcggaacttacagcctttaatgagatcccccatttcccgccagcaggaccccctgatgattccagtcacaagctcctccacgcatcccgctccctctattagctctttgacatccaatcagagcagcctggcgccacccgtgagcggaaaccctagtagtgccccagcccctgttcccgatataaccgctaccgtcagcatcagcgttcactccgaaaaaagtgacgggccttttagggacagcgacaataaaatcctgccagccgcagcacttgcctcagagcacagcaaggggacctcctcaatcgctattacagctttaatggaagagaagggctatcaggtgcctgtgttgggcacacccagcctcctgggccagtctttactgcacgggcagttgatcccgactaccgggccagtgcggatcaataccgctcggcctgggggtggccgtcccggatgggagcattccaataaactcggatatctggtctctccacctcagcagattagaagaggcgaaagaagctgttacagaagtattaatcggggtaggcatcactctgagcgcagtcaacgcacacaggggccatctttgccagccacccccgtcttcgtcccggtcccgccaccccctctgtacccccctccaccccacacactgccactgccacctggtgttccaccacctcaattctctccccagttcccacctggacaaccgcctccggctggctacagtgtaccgccaccaggattcccacctgctcctgccaacctatctacaccttgggtgagttccggcgtccagactgctcactccaataccatccctacaactcaagcccctccactctcacgggaagagttttaccgggagcagagaagactgaaggaagagagtaaaagcccatactccggaagcagctattcacgtagttcctacacctattctaagtcaagaagtggctcaaccagaagccgatcatacagcaggagtttcagccgctcgcacagtaggagctattcgcggtcccccccttacccgagaagaggcaggggcaagagcagaaattataggagtcgcagtcgtagtcacggctaccaccgatctcggagcaggagccccccatatcggaggtaccactcaagatctaggtccccccaagccttcaggggtcagtcaccaaacaaacggaacgttccccagggcgaaacagaaagagagtactttaatagataccgagaggtgccacccccatatgacatgaaagcttactacggacgtagcgtcgatttcagggaccctttcgagaaggagcggtatagagagtgggagagaaagtaccgggagtggtatgagaagtattataaggggtacgcagccggtgctcagccacgaccttctgctaacagggagaatttcagccctgaaaggttcctgcctctgaacattcgcaactctccttttacgcggggacggagagaggattatgtcggtgggcagagccataggtctagaaatatcggatcaaattacccggagaagctgagtgccagggacggtcataaccagaaggacaacactaagtctaaggagaaggagagcgagaatgctccaggagacggaaagggcaacaaacacaagaaacacagaaaaaggaggaagggcgaggagtcagagggttttctgaaccccgagctgctggaaacctctaggaaaagcagggaaccaaccggtgtcgaggaaaacaagacagactctctttttgtcctgccatccagagatgacgccactcccgtgagggatgagcctatggatgccgagagtattacttttaagagcgtgtctgaaaaagataaacgggagcgggataaaccaaaggctaagggcgataaaactaaacgaaaaaatgacgggagcgcagtgagtaaaaaggaaaacatagtgaaacccgctaaaggtccccaggagaaggtggatggggagcgcgagagatcccctcgtagcgaacctccaataaagaaagctaaagaggaaacccctaaaaccgataatacgaagagtagctccagttctcagaaggatgagaaaattaccggcactccccgaaaagcacactctaagtccgcaaaggaacaccaggaaacgaaaccagtgaaagaggaaaaggtgaagaaggactatagcaaggatgtcaaatctgagaagttgacaactaaggaagagaaggccaagaaaccaaacgagaagaataaacctctggataacaagggtgagaaacgcaaaaggaagaccgaagagaagggggtggataaagacttcgagagctcctctatgaaaatctccaaactggaggtcaccgaaattgtaaagccaagcccaaaaaggaaaatggaaccagatactgagaaaatggacagaactcccgagaaagacaagatatcactgtccgctcctgcgaaaaaaattaaactgaaccgggaaaccggtaaaaagatcggctcgaccgaaaacattagtaatactaaagaaccatccgaaaagttagagtcgacctcctctaaagtgaaacaggagaaggtaaaaggaaaagtgaggaggaaggtgacaggtacagaaggcagttctagcaccctcgtggattatacgagcacttcatcaactgggggtagcccggtgaggaagtcggaagaaaagaccgatacaaagcggactgtgatcaaaaccatggaggaatataataacgataatacagcccctgctgaggacgtcatcatcatgatccaagttccgcaaagtaaatgggacaaggatgactttgaatccgaggaggaggacgttaagtctacacagccaatctcctcagttggaaagcctgccagcgttataaaaaacgtgagcactaagccgtccaacattgtcaaatacccagagaaggaatctgagcctagcgagaaaattcagaaattcacgaaagacgtatctcatgaaattatccagcacgaagtgaagtccagcaaaaattcggcatcctccgaaaaaggcaagacgaaagatcgcgattacagtgtattggaaaaagagaatcccgagaagcgcaagaattccacccaaccagaaaaagagagcaatcttgaccgcctaaacgaacagggcaatttcaagtcactgtcccaatcatcaaaggaagccaggacaagcgacaaacacgacagcacgcgagccagttccaataaggatttcactcccaatcgcgataagaagacagactatgatactcgtgaatactcatctagtaagcggagggacgaaaagaacgaacttacccgccgaaaggactcacctagccgaaataaggactccgccagtggacagaagaataagccccgagaagagcgagacttgcccaagaaaggaacaggtgattccaagaaatcaaatagttcaccatctcgtgataggaagccccacgaccacaaagctacgtatgatacaaaacgtcctaacgaggagacaaagagtgtggacaagaacccttgtaaagacagggagaagcatgtgttggaggctcggaacaacaaagaatccagcggaaacaagctcttatacatactgaatccccctgaaactcaggtggaaaaggaacagatcacaggtcagattgacaaaagtactgtcaaacccaagcctcagctgtcacattcgagtcggctgagctccgatctgacaagagagacagatgaggccgctttcgagcccgactataatgagtccgattccgagagtaatgtgagtgtgaaagaggaggaatcgagcggaaatatatcgaaggatcttaaagacaagattgttgaaaaggccaaggaaagcctcgataccgccgctgtcgtgcaagtcggcatatcccggaatcagtcccactcatccccatcggtgtcgccatcgagatcccacagccctagtgggtcgcagactcggtcacacagcagctctgccagctccgccgaaagccaggacagtaaaaaaaagaagaaaaaaaaagagaagaaaaagcacaaaaagcacaaaaaacataaaaagcataaaaagcatgccggtactgaggttgaattagagaaatcccagaagcataagcataagaagaagaagtccaaaaagaacaaggacaaggagaaggagaaagaaaaggacgatcagaaggtcaaatccgtgaccgtcta

SEQ ID NO: 238469 - DNA, 2859 bp, synthetic construct
  misc_feature 1..2859: note = Description of Artificial Sequence: Synthetic coding sequence
  source 1..2859: mol_type = other DNA
atgtcctgtgtacattacaagttttcatcaaaactcaattatgacacagtgacatttgatgggcttcacatcagtttgtgtgacttaaagaaacaaatcatggggcgagaaaaacttaaggccgctgactgcgatttacaaatcaccaacgctcagactaaggaggaatatactgatgataatgctctaatccccaagaactccagcgtaattgtgaggaggatcccaataggaggagtgaagtccacaagcaaaacgtacgtcatttcaagaaccgaaccagctatggcaaccactaaagcgatagatgacagctcggcttcaattagcctggctcagctgaccaaaactgccaacctggctgaagcaaatgccagcgaggaagacaagataaaggcaatgatgtcccagagcggccacgaatatgatccaattaactacatgaaaaaaccactggggcctccacccccaagctacacctgctttcggtgtggtaagcctgggcattacattaagaactgcccgactaacggagacaaaaacttcgagagcggtcctaggatcaaaaagagcactggtatcccgagatcttttatgatggaggtgaaggaccccaacatgaaaggcgctatgctgactaacacaggtaagtatgccataccaactatcgatgccgaagcttacgccatcggcaagaaagaaaagcccccattcctgcctgaggagccgagcagctcgtctgaggaagatgatcctataccagacgagctgctctgcctcatatgcaaagacatcatgacagatgcagtcgtgattccgtgctgcggtaactcttactgcgatgagtgtattagaacagccctgctcgaatctgacgaacatacctgtcctacttgtcaccaaaacgacgtatctcctgacgctctgatagctaataagttcctcagacaagcggtgaacaactttaagaacgaaaccggatacacaaagcgcctgaggaagcaactgcctcctcctcctccccctattccccctccaagacccctaattcagcggaatctccaaccactgatgaggtctcccatcagccggcagcaagatccacttatgataccagtcacatctagcagcactcacccagcgccaagcattagcagtctcacttcaaaccagtcaagcctggctcccccagtttcgggcaatcccagcagcgccccagccccagtgcctgacatcactgcaactgtgagcatatcagttcattctgagaagtctgacggaccgttcaggacctcatccactggtggatccccagtccgtaaaagcgaggaaaagacagatactaagaggaccgtgatcaagacaatggaggaatacaacaacgacaacaccgcacctgccgaggacgtgatcattatgattcaggttccgcagagcaaatgggacaaggacgattttgaaagtgaggaagaagatgtaaaatccacccaacccatctcctccgtgggcaagccagctagtgtgattaagaacgtttccactaagcccagcaatatcgtgaagtatcccgagaaggagtctgaaccatctgagaagatccagaaattcactaaggacgtgagtcatgaaattatccagcacgaggtgaaatcctcgaagaactctgcctcctctgagaaggggaagactaaagatagggactatagtgtgctggaaaaggagaacccggagaaacggaagaatagcacacagcctgaaaaagaatccaatctggacagattaaacgaacaaggcaatttcaaatccttgtcccagagcagcaaagaggcgagaacctcggataagcacgattccactcgggctagcagtaacaaagactttacacccaatcgtgacaagaagacagactatgacacgcgggaatactccagttccaagaggcgcgatgagaaaaacgaactgaccaggcgcaaagacagccccagccggaataaagacagcgcttccgggcagaaaaataaacctcgtgaagaacgggacctgcccaaaaaaggaacaggagacagcaaaaaatctaattctagcccatcaagggaccgcaagccccatgaccacaaggctacctatgataccaaacggcctaatgaggagactaagtctgtcgacaagaatccatgcaaagatcgagagaagcacgttttagaagcacgcaacaacaaagaaagcagcggaaataaattattgtacatcctgaatcctccagaaacacaggtcgaaaaagaacagataaccggacaaatcgataagtcaacagtgaagccaaaaccccagctgtcccatagctctagactgtcaagcgatttgacaagagagaccgacgaagccgctttcgaacctgactacaacgagtcggattccgagtcgaacgtgagcgtcaaagaagaggagtcatctggcaatatctcaaaggaccttaaagacaaaattgtggaaaaggctaaagagagcctcgataccgcagccgtggtgcaggtggggatatctcggaaccagagccatagctcaccgtcagtgtcccccagcaggagccattctccttcaggtagccagaccagatctcattcttcttcagctagctccgccgaatcccaggatagcaagaagaaaaagaagaaaaaagagaaaaagaagcacaagaaacataagaaacacaaaaagcataagaaacatgccggaactgaagttgagcttgagaagagtcagaagcacaagcataagaaaaagaagtccaaaaagaataaggacaaggagaaggagaaagagaaagatgatcagaaagttaaaagcgttaccgtttag

SEQ ID NO: 238470 - DNA, 357 bp, synthetic construct
  misc_feature 1..357: note = Description of Artificial Sequence: Synthetic coding sequence
  source 1..357: mol_type = other DNA
atgagttgtgtccactacaaattttcttccaaactgaattacgatacagtgacgttcgacggtctccatatttctctgtgtgatctaaagaaacagattatgggtagagaaaaactaaaagctgctgactgtgatctccagattacgaacgcacagacgaaagaagagtatactgacgataatgcactaatcccaaagaactcatcagtgatcgtcagaaggatccccatcggtggggtgaagagtacctcaaagacatatgtgatatctaggactgagccagccatggcgacgacaaaagcggtgtgcaagaatacaatcagccattttttttacacactccttcttccgctgtag

SEQ ID NO: 238471 - DNA, 1410 bp, synthetic construct
  misc_feature 1..1410: note = Description of Artificial Sequence: Synthetic coding sequence
  source 1..1410: mol_type = other DNA
atggccgcagaggccggagtcgttggcgcaggcgcatcccccgacggagactggcgcgaccaggcgtgcgggctgttgctgcacgtgcacctctcaagccggctcgggcgagcagccccagtgcggacggggaggcaccttagaacagtgttcgaggatacagtagaagagcgcgttattaacgaagagtacaagatttggaagaagaataccccctttctctacgacctggtgatgacgcatgcccttcagtggcccagtctcactgtgcagtggcttcccgaagtgaccaaacccgaaggaaaggactatgcactgcactggctagtactgggcacacatacatcagacgaacaaaatcatttggtagttgctagggtgcacattccaaacgacgatgcacagttcgatgcttcacactgcgactctgataagggtgagtttggtgggttcggctccgtgaccgggaaaatagagtgtgagatcaagatcaatcatgagggcgaggtgaaccgggcacgctacatgccccagaaccctcacatcattgcaactaaaacgcccagtagcgacgtgctggtcttcgactatacgaaacatcctgcgaagccggatcctagcggggagtgtaaccccgacttacgcctgaggggccatcaaaaggaggggtacggcctgagctggaacagtaatctttcagggcacctactaagtgcctcagatgaccatactgtttgtctctgggatataaacgctggacctaaggagggcaagatcgtggatgccaaggcaatattcactggacattccgccgttgttgaggatgttgcctggcacctgttgcatgagtcacttttcggtagcgtcgccgacgaccagaaactaatgatctgggacaccaggagcaacaccaccagcaaaccttcacatctcgttgacgcccacaccgccgaggtaaactgtcttagttttaatccatatagcgaatttatcctggcaaccggctcagctgacaagaccgtcgctctgtgggacctgaggaatctgaagcttaagctgcacacattcgagagccacaaggatgagatcttccaggtccattggtctccacacaacgaaaccatcctggcttcaagtggaacagaccggaggctgaatgtgtgggatctgtccaaaatcggggaagaacagagcgccgaggatgcagaggacggcccacccgagctcttgtttatccatggaggtcacacagcgaagattagcgatttcagctggaaccctaatgagccttgggtgatatgctccgttagtgaagataatataatgcagatctggcaaatggcagaaaatatatacaatgacgaagagagcgacgttacaacatcagagctggaaggccagggtagttag

SEQ ID NO: 238472 - DNA, 1278 bp, synthetic construct
  misc_feature 1..1278: note = Description of Artificial Sequence: Synthetic coding sequence
  source 1..1278: mol_type = other DNA
atggcgtccaaagaaatgtttgaagacactgtcgaggaacgcgtgataaatgaagagtataagatctggaagaagaacactccttttttatatgatctggtgatgacgcatgcactgcaatggccaagcctgactgtgcagtggctacctgaggtgactaagccagagggcaaagactatgctctgcactggctggtgctggggacacacacaagtgatgagcaaaaccatctagtcgttgctcgggtgcacataccaaacgacgacgcacagttcgacgcatcccactgcgactcggacaagggagagttcggcggattcggaagtgttaccggcaaaatcgagtgtgaaatcaagattaaccatgaaggcgaggtcaaccgggcacgctacatgccccagaatccacacatcatagcaactaagacaccttcctcagacgtgctcgtgtttgactacaccaaacatcctgcgaagcctgatccgagcggggagtgtaaccccgatcttcggcttagagggcaccagaaagagggttacggcctgtcatggaacagtaacttgtccgggcacctcctatctgcctcagacgatcataccgtttgtctttgggacataaacgcgggtcccaaggagggcaagatagtcgatgctaaagccatttttactggtcactcagcagtggtcgaggacgtggcctggcatctgcttcacgaatcactattcggcagtgtggctgacgatcagaagctgatgatctgggataccaggtccaatacaacttccaagccctcacatctcgtggatgcgcacactgctgaagtgaattgcttgtcttttaacccttacagtgaattcatcctggcaaccgggtcagccgacaaaactgtggccttgtgggaccttcggaatcttaaactgaagctgcatactttcgagtctcataaagatgaaatctttcaggtccactggagtccccacaacgagaccatactggcctcctcaggcacagataggcggttaaacgtgtgggacctgagcaagattggagaggaacagtccgccgaggacgccgaggatgggccacccgaacttctctttattcatggtgggcacactgctaaaattagtgacttctcctggaatccgaacgagccatgggtgatctgctctgtgtccgaggataatatcatgcagatctggcaaatggcggaaaatatctacaacgatgaggagtccgacgtcacaactagcgagttagaggggcaaggaagctag

SEQ ID NO: 238473 - DNA, 1251 bp, synthetic construct
  misc_feature 1..1251: note = Description of Artificial Sequence: Synthetic coding sequence
  source 1..1251: mol_type = other DNA
atggccagcaaagagatgtttgaggatactgtggaggagagggtgatcaacgaggaatacaaaatctggaaaaaaaacacgccctttctgtatgacctggtaatgacccacgcactgcagtggccctcactgacggtccagtggctgcccgaggtgaccaagcctgagggcaaagattatgctctccactggctggtcctgggaacacataccagcgacgaacaaaaccacctggtcgtggccagggtgcacataccaaatgacgacgcgcagttcgatgcctcccattgtgatagtgataagggtggcaaaatcgagtgtgagattaagatcaaccacgaaggagaggtgaacagggccagatacatgccccagaacccacatattattgcaacgaagaccccaagttctgatgtcctagtttttgattacaccaagcaccctgcgaaaccggatccctccggcgagtgcaacccagacctgcgtttgcgagggcatcagaaggagggctacggcctatcttggaactcaaacctgtccggccacctgctgtcagcctcagatgatcacacggtttgcctgtgggatatcaatgctggaccaaaagaggggaagatcgtagacgctaaggctatctttacaggccactctgccgtggtggaagacgtggcatggcacctcctccatgagtccctatttggctcggtggccgacgaccagaaactaatgatctgggacactagaagcaacacaacctccaagccatcccatcttgttgacgcccacaccgcggaagtcaactgcctctcgtttaatccctacagcgaatttatactagccactggctcagccgataagacagttgccctgtgggacctgagaaaccttaaactgaagctgcatacctttgagagccacaaagacgagatattccaggtccattggtctccccacaatgaaacaattctagccagttccgggacggacaggcgcctgaacgtttgggacctgtctaaaataggcgaggagcaatctgctgaagatgctgaagacggcccaccggagctgctcttcatccatggcggtcatacagccaaaatcagtgactttagctggaatccaaatgagccttgggtaatctgcagtgtgagtgaggataatattatgcagatttggcaaatggccgagaatatttacaatgatgaagaaagtgatgtcacaaccagcgagctggagggccaggggtcttag

SEQ ID NO: 238474 - DNA, 561 bp, synthetic construct
  misc_feature 1..561: note = Description of Artificial Sequence: Synthetic coding sequence
  source 1..561: mol_type = other DNA
atggcgtctccaagtaaggcggtgatcgtgcccggtaacggtgggggtgacgtcactacccacggttggtacgggtgggtcaagaaagaactcgaaaagatccccggttttcagtgcttggccaagaacatgcctgaccctatcaccgccagagagtctatttggctgccctttatggagacagaactgcattgtgacgagaagacgattattatcggccacagcagtggtgccattgcagctatgagatacgctgaaactcacagagtctatgctatcgtgttagtgtccgcctatacatctgacctaggagacgaaaacgagcgagcttccgggtatttcacgcggccatggcagtgggaaaaaatcaaagccaattgcccctatatcgttcaattcggcagtacagatgatccttttctgccatggaaagagcagcaggaagtcgccgaccggctggaaaccaagctgcacaagttcacagactgcggtcatttccagaacaccgagtttcacgagcttatcacagtggttaaaagtttactgaaagtaccagcatag

SEQ ID NO: 238475 - DNA, 519 bp, synthetic construct
  misc_feature 1..519: note = Description of Artificial Sequence: Synthetic coding sequence
  source 1..519: mol_type = other DNA
atggcctctccttcaaaggcagtgattgtgcccggaaatggcggtggagacgtgacaacccatggatggtacggctgggtgaaaaaagagctggaaaaaatacctggtttccagtgcctcgcaaagaacatgcctgatcccatcacagcccgagagtccatttggctgccatttatggaaacagaactccactgtgacgaaaagacaataattattggccacagcagcggcgctattgccgctatgcgatacgctgaaacccatcgggtgtatgccattgtgttggtaagtgcctacacttctgatctcggcgatgagaatgaacgcgcttcaggctattttacccgaccctggcaatgggaaaaaataaaggccaactgcccatacattgtgcaattcggaagcacagatgaccccttcctgccatggaaggagcaacaggaggtggctgattggaagccaaactgcactaactctctgacagtggccacctttagaacgcagagctttatgaattag

SEQ ID NO: 238476 - DNA, 741 bp, synthetic construct
  misc_feature 1..741: note = Description of Artificial Sequence: Synthetic coding sequence
  source 1..741: mol_type = other DNA
atggctgccgcagccattcccgcactacttttgtgtcttccgctgttgtttctgctatttggttggtctcgcgctcggagggacgacccacattcactgtgttacgatattaccgtaataccgaagttccgccctggccctagatggtgcgcagtgcaggggcaggttgacgaaaagacatttctacactacgactgtggaaacaaaactgtcacacctgtgagcccactcgggaagaaacttaatgtgacaatggcgtggaaagcgcagaatcctgttttaagagaggtggtcgacatactgactgagcagctgctcgacattcaactggagaactatacaccaaaggaaccgctcactctccaggctaggatgtcttgcgaacagaaagccgaggggcatagctccggctcctggcagttttccatcgatggtcagacatttctgctgttcgatagcgagaagcgcatgtggaccacagttcaccctggagccagaaagatgaaagagaaatgggagaatgataaagatgttgccatgtccttccactatatatctatgggggactgtatcggttggttagaagactttcttatgggtatggattcaactctggagcccagcgcaggagctccacttgccatgtctagcggtaccacccagctgagggctacagccacaaccctgatcttgtgctgcctgctgatcattctcccctgctttattctgcccggaatctag

SEQ ID NO: 238477 - DNA, 741 bp, synthetic construct
  misc_feature 1..741: note = Description of Artificial Sequence: Synthetic coding sequence
  source 1..741: mol_type = other DNA
atggccgctgcagccatccccgctctgcttctgtgtttgccattactatttcttctgtttggatggtctcgcgctaggagagatgatcctcactccctctgctacgacatcactgtgatccccaaattcaggccaggaccacggtggtgtgcggttcagggacaggtggacgagaaaacattccttcattatgactgcggaaacaaaactgtgacaccagtgtctccactaggaaagaaactgaatgtaacgatggcctggaaggcacagaaccccgtattgcgagaggttgtggatatcctaaccgagcagctattggatatccagctcgagaattatacacccaaggagccacttacactgcaagccagaatgtcgtgcgagcagaaagccgaaggccattcaagtggaagttggcagttttccatcgacgggcagacctttctcctttttgacagcgagaaacgaatgtggaccacagtgcacccaggcgctcgcaagatgaaagagaagtgggagaacgataaggacgtggcaatgtcattccactacatttccatgggggactgcataggctggctagaggatttcctgatgggcatggactctacgctagaaccaagcgctggtgccccacttgccatgtcttccggaactactcagctgagagccaccgccaccacactgattctttgttgcctgcttatcatcctgccgtgcttcattctcccaggcatttag

SEQ ID NO: 238478 - DNA, 4923 bp, synthetic construct
  misc_feature 1..4923: note = Description of Artificial Sequence: Synthetic coding sequence
  source 1..4923: mol_type = other DNA
atgcagagctttagagagaggtgcggattccacggaaaacagcagaattaccagcagactagccaagaaacgtccaggctggagaactacaggcagccctcgcaagccggtctttcgtgcgaccggcagcggctactggcaaaggattattacaaccctcagccctaccctagctacgagggcggagccggaactccatctggcaccgccgctgccgtggccgcagacaaatatcacagggggtctaaggctcttcccacccaacaagggctgcaaggtcgccctgcttttcccggttacggggtccaggatagctctccctatccaggacgctacgcaggagaagagtcactgcaggcttggggagccccacagcccccacccccacagccacaacccctgcccgcaggagtggcgaaatatgacgagaatctcatgaaaaaaactgcggttcctccatccaggcagtacgcagaacagggagctcaagtgccctttaggacacactctctacatgttcagcaaccacctccaccacagcagcctttggcatatcccaaactgcaacggcaaaagctgcagaacgatatcgcatcccccctgccttttccacaggggacccatttcccccaacattctcagtctttccccacctcttcgacatattcatctagtgttcagggcggaggtcagggggctcatagctacaaatcttgcacggcccctaccgcccaaccccatgatcggccattgacagcgtcatctagtctcgcgccaggacagcgcgtccagaacctccatgcttaccagagcggtcgactctcgtacgaccagcaacagcagcagcaacagcagcagcaacagcagcagcaggctttgcagagcaggcatcatgcccaagaaacactccactaccagaatctggccaagtaccagcactacgggcagcaggggcaaggctattgtcagcccgacgctgccgtcaggacacctgagcagtattaccagacattctccccctcctcctcacacagcccagcacggagcgtgggaagatcaccaagctatagctcaacccccagccctcttatgccaaatctggagaattttccatattcgcagcagcccctatccactggagctttccccgcaggtattaccgatcacagtcatttcatgcccctgttgaatcccagccccactgatgctaccagttccgtcgacacacaagccggaaattgcaaacccctgcagaaagataagttgccagaaaatctccttagtgacctctctctacaaagcctgaccgccctgacgagccaggtggagaatattagtaatactgtgcagcagctgcttctgagcaaggccgcagtgcctcagaagaagggtgtcaagaacctagtctcacgcacacccgaacaacataaaagccagcactgcagccccgaaggaagcggctattctgcagaaccggctggaaccccactgtctgagccgccatcttccactccccagagcactcacgcagaacctcaggaagccgactatttaagcggctctgaagaccctctggagaggtcctttctctactgcaaccaagccagaggaagtcctgctagggtgaacagtaattcaaaggccaagccggaaagtgtatcaacatgtagcgtgactagcccagacgacatgtctaccaagtccgatgacagtttccagtctttacatggctctcttcccttggactcatttagtaagtttgtggcaggcgaacgggactgtccacgtttactcctgagcgccctagcccaagaggatctcgcttcggagattttagggctgcaggaagcaatcggagagaaggcagataaggcctgggccgaggctccatcactggtaaaagatagttcaaaaccaccttttagtctggaaaaccacagcgcttgtcttgattcggtcgctaagtccgcctggcctaggccaggggagcctgaggctctgcccgacagcctccagctggataaaggcggtaatgccaaagacttctcgcctggcctgtttgaggatccttccgtggcttttgcgacgcctgatccgaaaaagaccaccggtccactgtccttcgggacaaaacctaccctgggtgttcccgctccagatcctaccaccgccgcattcgattgtttccctgatacaacggctgcttccagtgcagactctgccaaccctttcgcttggccagaagagaacctgggagatgcgtgccctaggtggggattacaccccggagaacttaccaaggggctcgaacaaggcggtaaggcatcagatggtatatctaaaggagacacgcatgaggcatctgcctgcctgggattccaggaggaggatcctccaggggaaaaagtcgcttctcttcctggagacttcaagcaagaggaagtggggggtgtcaaagaggaagcaggcggtctgctgcaatgccccgaggtggccaaagccgacaggtggctggaggattctaggcattgctgctctacagccgacttcggggacctcccattactcccacctacaagccgtaaagaagacttagaagccgaggaggagtattcatccctgtgtgaactcctggggtctcctgaacaacgccctgggatgcaggaccctctgtcccccaaagcccctcttatctgtacaaaggaagaagtcgaggaggtgttggattctaaggcgggatggggatcaccctgccacctgagcggcgagtcagtaatactcctgggaccaaccgtcggaaccgagtcgaaggtccaatcttggttcgaatccagcctgagccacatgaagcccggagaagaagggccagatggagaacgcgctcccggagattccaccacaagcgacgctagcctcgctcaaaaacctaacaaaccagccgtgccggaagcgcctatagccaagaaagagccagtgccaagggggaaatccctgaggtccaggcgagtgcacaggggcctgccagaggctgaagatagcccttgcagggcgccagttctcccaaaagacctactgcttccggagagttgtaccggccctccacagggacaaatggagggagctggcgcacctggaaggggggcttccgagggacttccgagaatgtgtaccaggtctctgacagctctttctgaacctcgaacccccggaccacccggactgactactacacccgctccacctgacaaactggggggaaagcagagagccgctttcaaaagcggcaagcgtgtggggaaaccctcgccgaaggcggcaagcagccctagcaaccctgcagcgttacctgtggcgtcagattcctcccccatgggatcgaaaacaaaggagactgactcaccatctacccctggaaaagaccaacgctctatgattctgcgctccagaactaagactcaggagattttccacagcaagaggagaaggcccagcgaaggccgactgcccaactgcagggctacaaagaaactgctcgacaactcacatttgcccgctaccttcaaagtctcctctagcccacagaaagaagggagggtgagtcagcgggctcgcgtacctaagcccggagcgggatctaaactgagtgatcggcctctgcatgctcttaagcgcaagagtgcctttatggcacccgtccccactaagaaacgaaacctggtattaaggtcgaggagctcgagctcaagcaacgcgtccggaaatggcggagacggaaaagaggaacggcctgagggcagcccaacactgttcaaacgaatgtcctcacctaagaaggccaaacccacaaagggtaatggggaacccgcaaccaagctgccccctcctgagacccccgacgcctgcctgaaactcgcgagccgagcagcatttcagggagcaatgaagacaaaggtgctacctcctcggaagggacgtggattaaaactcgaagccatagtgcagaaaattaccagcccgtccctgaaaaaatttgcttgcaaggcacccggtgccagcccaggcaatcctcttagtcctagcctttctgataaggataggggcctaaaaggagccggaggatcccctgtcggagtggaagaggggctcgttaacgtgggtaccggacagaaactcccgaccagcggagcagaccccctgtgtcggaatccgacaaatcgcagccttaaaggaaagctgatgaactctaagaaattaagttccaccgattgctttaaaaccgaagccttcacaagcccagaagcgctccagcccggtggcacggcgctggctcctaagaagaggagtcgcaaagggagggctggagcccacggcctgagcaagggtccgctcgaaaaacggccatacctgggacctgccctgttgctgacccccagagacagggccagcggaacacagggagcctctgaagacaacagcgggggtgggggtaagaagcccaaaatggaggagctgggccttgcctcccaacccccagaagggagaccctgccagccacagaccagggcacaaaaacagcccggtcacacaaactatagttcatactcaaaaagaaagcgactcacacgaggaagggccaagaatactaccagcagtccttgcaagggcagagcaaagagacgccgtcaacagcaggtactacctcttgacccagctgaaccagagatccgtctgaaatatataagttcgtgcaaaaggttgaggagcgacagccgtactcccgcatttagcccttttgaacccagtctcggcgcacagaatcctagaagtggccagaacgcgcctcccgcaccagccgacgccagacccctctgtactacccgggataggagggcctattcagcgcgagagcagggacagcgttag

SEQ ID NO: 238479 - DNA, 5588 bp, synthetic construct
  misc_feature 1..5588: note = Description of Artificial Sequence: Synthetic coding sequence
  source 1..5588: mol_type = other DNA
atgcaatcttttcgcgaaagatgcgggtttcatggaaaacagcagaattaccagcagacatcacaagagactagccgacttgagaactaccgacagccgagtcaggctgggctgagttgtgacagacagcgattacttgctaaagactactacaacccacaaccttacccgtcctatgaaggaggggctggcaccccctccgggacagccgcagcagtggctgctgataaatatcatagagggagcaaagcgctcccaactcaacaaggcctgcagggcagaccagcttttcccggttacggtgtgcaggactcgtcaccgtatccagggagatatgctggcgaggaatctctgcaagcttggggggcaccacagcccccaccccctcaaccgcagcccttgccagctggtgtggcaaagtatgacgaaaatctcatgaagaaaaccgcagtgccgcctagccgccagtacgctgagcagggagcacaagtcccattccgcacacattccttacacgtgcaacagcctcctccccctcagcagcctctcgcttacccaaaactacagagacagaaactgcaaaatgatattgcctccccattgccgttccctcaaggatggtgggccggacacagctacaaatcctgcactgccccaacggctcaaccacacgacagacccctgactgccagcagctccttggcacccggacagagagtgcagaatctccacgcatatcaaagcggaagattgtcttacgatcaacagcaacagcagcaacagcagcaacagcagcaacaacaggcgctgcaaagtcggcaccacgcccaggagacactgcactatcaaaaccttgccaagtaccagcactatggccagcaaggccagggatattgtcagcctgacgcagctgtgcgtacaccggaacagtactaccagacatttagccctagcagtagccactcacctgccagatcagtcggacgttccccttcttactcatccaccccatcccctctgatgccaaacctcgagaatttcccctacagtcaacagccattgtcaactggagcttttcctgctggtatcacagaccattcgcattttatgcccctactcaacccgtctcccactgatgccacgtctagcgtggatagcctgacagccttgacctcccaggtggaaaacatatctaatacagtacagcagctgctgctctctaaggctgccgtgccccaaaaaaagggcgtgaagaacctcgtttccagaacccccgaacagcacaaatctcagcactgctccccggagggctcaggttactctgccgagcctgcaggaacaccgctgtctgaacccccttcaagcacccctcaatcaacacacgccgagccccaggaagcagattacctcagtggctcagaggatccactggagcggtctttcctgtattgcaatcaagcacgcggatctcctgcacgggtcaattctaactctaaagccaaacccgaaagcgtgagcacctgttctgtgacatccccggacgacatgagcactaagagtgacgacagcttccagtctctccatggctctctgcctctcgactcattctctaagtttgtggccggagaacgcgattgtcctagactgctcctctccgcattagcccaagaggacttggcaagcgagatccttggactgcaggaggcgattggagagaaagctgacaaggcctgggcagaggccccttccctcgtcaaagattcctcaaagccacccttctctctggagaaccattcggcctgcctggacagtgtagcgaaaagtgcatggcccaggccaggagagccagaggccctcccggattcgctgcagctagacaaaggcggtaatgctaaggacttctctcccggtttgttcgaggacccatcagtcgccttcgccacccccgaccctaagaagaccactggcccattaagcttcggaacaaagccaactctgggtgttccagctcctgatccaacaacagcagcttttgattgcttcccagataccactgcggctagttccgccgattctgctaatcccttcgcgtggccagaggaaaatttgggcgatgcctgcccgaggtgggggctgcaccccggtgagctgactaaggggctggaacaggggggtaaagctagtgatggtatttctaagggggatactcacgaagcctcagcatgccttggcttccaggaagaggatcctccaggggagaaagtagcttccttaccaggcgactttaagcaagaggaggttggtggagtcaaggaggaagctggcggtctcctgcaatgtcccgaggtcgccaaagccgacaggtggctggaggattcaagacactgttgtagtactgctgacttcggcgatctgcccctgttgccacctacctctcggaaggaagatctcgaggccgaagaggagtactcctcactctgtgagctgctgggctctcctgaacagcgtccgggaatgcaggacccactctcccccaaggccccactgatctgtaccaaggaagaggttgaggaggttcttgatagcaaggccggatggggatctccttgccacttgtctggggagtctgttatcttactgggacccactgtaggcacagaaagcaaagtgcagtcatggttcgagagctcacttagccatatgaagcccggagaggaggggccagacggtgaacgggctcccggagactccacaacatcggatgcaagtctcgctcagaaaccaaacaagccggctgtgcctgaagctccaatcgctaaaaaagagccagtcccacgcggtaaaagcttgaggtctcggagggttcatcgagggctgccagaggccgaggatagtccgtgtagagcgccagtcctccctaaggacctgctcctcccggaaagctgcacaggtcctccacaagggcagatggaaggcgctggagcacctgggcgaggcgcttctgaagggctaccacgaatgtgcactcggtccttaactgcactctccgagccccgaacgcccggtcccccagggcttacaacgactcctgctccacctgacaagttaggaggaaagcagcgagccgcattcaagagtgggaagagggtgggaaagccctcccctaaggccgcttcctcacccagtaaccccgcagctctcccggtggccagcgattcatcccccatggggtcaaagactaaggaaacagacagtccctctacaccaggtaaggatcagcgctcaatgatcctgagatcacgaacaaaaacacaggaaatattccactctaagcgcaggcgcccaagcgaaggacggctgcctaattgcagggccaccaagaagctcctggataactctcaccttcctgccacctttaaagtgagctcttctccacagaaggaaggaagggtgagccaacgtgcacgagtgcctaaacctggtgccggaagcaaactctcagatcggccactacacgctctcaagcggaaaagcgcatttatggctcctgtgccaacgaagaagcggaatctggttctgcgcagtcgctccagctcaagttctaacgccagcggtaacgggggtgatggaaaggaagagcggccagagggttcccccacactgttcaaacggatgtcctcacccaaaaaggctaaacctacgaagggaaatggtgagcctgccaccaagcttcctccacccgaaacacccgacgcctgcctgaagctggcaagtcgcgctgctttccagggtgctatgaagacaaaggtgctgccccctcgaaagggccgtggtctcaaacttgaagctattgtgcagaaaatcaccagtcccagcctcaagaagttcgcttgcaaggctcctggagctagtccgggaaatccactttcaccatccttgagcgacaaggatagagggctgaagggggcaggtggatcccctgtgggcgtcgaagaaggcctcgtgaatgtaggaaccggccaaaaacttcccacatctggcgctgaccctctgtgtagaaatcctacgaacagatcactgaaaggaaagttaatgaataaccgcgctagcggaacccaaggggcatcagaggacaactccggcggtggaggtaagaaacctaagatggaagagttggggctcgcttcccagccacccgagggacgtccgtgtcagcctcagacccgagctcaaaagcagccgggacataccaattattcctcatatagcaaacggaaaagactgaccagaggcagagctaaaaatacaaccagtagcccttgcaaaggccgagccaaaaggaggcggcaacaacaagtgctccccttggatccggctgagcccgagattaggttgaaatatatttctagttgtaagagactgagatcagattccaggacacctgctttctcaccgttcgtgcgagtcgagaagcgcgatgctttcacgaccatttgtaccgttgtcaattcgcccggagacgcacctaaaccccataggaaaccgtcatcatctgcctcatcatcttcttcctcatcgagcttctctctggatgctgcaggcgcaagccttgccaccctgcctgggggttcgatcctgcagcccaggcccagcctccccctcagctccaccatgcacctggggccagtcgtgagtaaagccctctcaaccagctgtctagtatgttgtctctgtcaaaaccccgctaattttaaggatctaggtgacctgtgtggcccatactaccccgagcactgtctgcccaaaaaaaagcctaagctgaaagaaaaagtgcgtccagagggtacgtgcgaagaagcttcactgccattggaacgtaccctcaagggtccggagtgtgccgcagccgcaaccgctggcaagccgcctcgccctgatggcccagctgatccagcaaaacaaggcccacttaggacaagtgccaggggactgagccgacgcctccagtcctgttattgctgtgacggacgtgaggacgggggtgaggaagcggctcctgctgacaagggtcactgggtccatgaggcctgcgctgtttggacaggtggagtttaccttgtagctgggaaacttttcggactccaggaggcaatgaaagtggcagtcgatatgcatggagggacagttgcactcgcacctggggatttttcccttcccggattgaggtttgcaagtctgttccagggcccatcttggtgtgactgtcctgtactggcaacttctaccccttcatcatggtcccgatgcgtgcccgctgccaagaaacccggaccacctctgggcgcagcaaccaaggacgcttccacgcctactacgacacgcgtccccgcaatgcaagtgcgggcacgcccaggaacaggcggtcactggagccctagtaaacagtcacgcggaacactgcccggacactccagtcctaaccctggtcctatctccttgttcagctttcctccactcctgccccaacagttcttctatccatccgtttgtcttgacctgtgctgggcgatgccaggcacctggaagta

SEQ ID NO: 238480 - DNA, 5720 bp, synthetic construct
  misc_feature 1..5720: note = Description of Artificial Sequence: Synthetic coding sequence
  source 1..5720: mol_type = other DNA
atgcagagtttccgcgagcgatgcgggttccacggcaagcaacagaattatcagcaaacctctcaggaaacgtctcgcttggagaattacagacaaccatctcaagcagggctatcatgtgaccgccaacgccttctggccaaagactattataatcctcagccatacccatcctatgaggggggtgcaggcacccccagcggcaccgcagccgctgtcgccgctgataagtatcatcgcggatcgaaagccctcccaacacagcaagggctgcagggaaggcccgcatttcctggttatggggtgcaagatagttcaccttaccctgggcgatatgcgggtgaggaatcgctgcaggcctggggcgctcctcagccccctccccctcagcctcagcccctgccagctggcgtggctaaatacgacgagaatctgatgaaaaaaacagccgtccccccatctcgacagtacgctgagcagggtgcacaagtccctttcaggacgcacagcctgcacgttcagcaacctccaccaccacagcaaccgctggcttatccaaagcttcagcggcaaaagcttcagaatgatatcgcatccccgcttccctttccccagggtactcacttccctcagcacagccagtcgttccccactagttcgacgtatagctcttctgtacaggggggtgggcagggcgctcacagttataaatcatgcacagcaccaactgcccagcctcacgaccgaccgttgaccgcatcctcttctcttgcacccggacagagagtgcagaatttgcatgcctaccagagtggacgcttgtcctatgatcagcagcaacaacagcagcagcagcagcagcagcagcagcaagccctgcagagcagacatcacgcgcaggaaaccctccactatcagaatttggccaagtaccaacactacgggcagcaggggcaaggatactgccagcccgatgccgctgtgaggacacccgagcagtactaccagaccttttccccttcaagtagccacagtcccgcacggtctgtcggacgaagtcccagctattcaagtactcccagtccactcatgccaaacctggagaacttcccgtacagccagcagcccttaagcactggcgctttcccagccggaataacagaccactcgcattttatgccccttcttaatcctagccctacagacgccacgtcatcagtggacacgcaggccggaaactgcaaacccctgcaaaaagataagctccccgagaatctgctgagcgacctgagcctgcagagtttaaccgcgctaacttctcaggttgagaatatcagcaacaccgtccaacaactactgctttccaaagctgcggttccgcagaagaaaggagtgaaaaacctggtctcacggacaccggaacagcataagagtcaacactgtagccctgaggggagcggctacagcgcagagcccgcaggcacccccctgtctgagccgccttcatccaccccacagtcgacgcacgccgaaccccaggaagcagattacttgagtggctccgaagaccctctggagcgctcatttctgtattgcaaccaggctagaggttcccccgcacgggtcaactctaatagtaaagccaaacccgagtccgtgagtacatgtagcgtgaccagccccgatgacatgtctacaaaaagtgatgactcttttcagtccttgcatgggagtttgcctctggattctttctcaaaattcgttgcgggagaacgtgattgcccacgtctgcttctctccgccctggcccaggaggatctggcaagcgaaattcttgggctgcaggaagcaatcggagaaaaagctgacaaagcatgggcggaggccccatccttagtgaaggattcctctaagccgcctttttctttggaaaatcacagcgcatgcctggacagcgttgctaaatcggcgtggcctcgccctggggaacccgaagcgctcccggattccttacagctggataaaggaggcaatgccaaagacttcagtcccggactgttcgaggacccaagcgttgcgttcgctactcccgatcccaaaaaaaccacaggaccacttagcttcggcaccaaacccaccctgggggtgccggcacctgatcccacgacagcagctttcgattgcttcccggacacaaccgcggcaagctccgccgactccgctaacccctttgcctggccagaagagaatttgggagatgcttgcccacgttggggcctccatcctggggaactgaccaaaggactggagcagggaggaaaggccagcgatggaatttccaagggggatacacacgaggcatcagcctgcctcggctttcaagaggaggatccgcctggagagaaggtggcatcgttaccgggtgacttcaaacaggaagaagtaggcggagtcaaggaggaggcaggtggactcctgcaatgtcctgaggttgcaaaagccgaccgatggttagaggattcccggcattgttgtagcacagccgacttcggggatctacctctgctgccaccgacaagccggaaggaggatttggaggccgaggaggagtattcttctctttgtgagttgctgggctctcctgaacaaaggccaggtatgcaagaccctctgagccccaaggcaccactcatctgcaccaaggaagaagtggaggaagtgttggatagcaaggccggatggggttcaccctgtcacctgagcggcgaatctgttatcctgttgggcccaaccgttggtacggaatccaaagttcaatcgtggtttgaatcgtctctgtctcacatgaaaccaggcgaagagggaccggatggcgagagggcccctggcgactctacaaccagcgacgcatccttggcacagaagccaaataagcctgcggtgccagaggcccctatcgcaaagaaggaacccgtacccagaggcaaatctctgaggtccaggcgagtccacagaggacttcccgaagccgaagattccccttgccgcgcacctgtgctacccaaggatctgttactgcctgagagctgcacaggccctcctcaaggtcagatggaaggcgcaggcgctcccggacggggtgcttcagaggggctgcctcgtatgtgtactagatcccttacggcattgtcagaacctagaactcccggacccccaggacttacgacaactcccgctccccctgacaaactgggaggcaaacagagggctgccttcaaatcgggcaaacgcgtgggcaagcccagcccaaaagccgctagtagtcctagtaatccagcagctttacctgtggcaagtgacagctctcctatgggttcaaaaacgaaggaaacagattctccgtcaaccccaggcaaggatcagaggagtatgattctccgatctagaaccaagacccaggaaatcttccatagtaagaggcggaggccctctgagggacgcctgcctaactgccgcgctaccaagaaattactcgacaactcccatctcccggcaacatttaaggtgtcctcttctccccagaaagagggccgtgtgagccagcgagctagggtacctaagcctggggctgggtctaaactgagcgaccgcccactccacgcactcaagaggaagtccgcatttatggctcccgtccccacaaagaagcggaatctggtgctcagaagccgttcctcatccagttctaatgctagtggcaacgggggagatggcaaggaggagcgccctgaagggagccctaccctgttcaaaaggatgagttcacccaagaaagcaaaaccaacgaagggcaacggagagcccgctacaaagctccctccacccgagactccagacgcttgtctcaaacttgcgtctagggccgctttccagggggctatgaagactaaagtcctgccccctcggaagggcagggggctaaaactcgaggcaatcgtgcagaagattacaagcccgtccctcaaaaagttcgcttgcaaggcaccaggtgcctcacctggaaatcccctgtctccaagcctttcagacaaagacagaggcttgaaaggtgccggaggatcccctgtgggtgtggaagagggcttagtcaacgtggggaccggccagaaactgcccacatcaggggcagaccccttatgtagaaaccctaccaataggtcactcaagggtaagttgatgaatagtaagaaactcagcagcacagactgctttaaaactgaggccttcacctccccggaagccctccagcccggaggcacagccctcgcaccaaaaaagcgtagccggaagggaagggccggagcgcacggcctcagcaagggtccgcttgaaaagcggccatacttgggacccgctctccttctaaccccccgagatcgtgccagcggcacacagggagcatccgaagataacagtgggggaggaggtaagaagccaaaaatggaggaactcggcctggcttctcagccacccgagggcaggccttgccagccccaaacgcgggctcagaaacagccaggccacaccaactatagctcctattccaagcggaagaggttgactcgcggacgggcaaaaaatacaactagctcaccatgcaaaggtagagcgaagcgaaggcggcagcagcaagttctgccactggacccggctgagcccgaaatcagactaaagtatatatcgtcatgcaaacggttgaggtcggattcacgcactccggcattttctcctttcgtgcgggtggagaagcgggatgcctttacaacaatctgcactgtagtgaacagccctggcgacgcccctaaacctcacaggaaaccgtccagcagcgcttcatcatcttcatcatcaagctctttctccttggatgctgcaggggcaagcctggccaccctgccgggagggagcatcttgcagccacggccatcgttaccactgagtagcacgatgcatctggggcctgttgtttctaaagcactgagtacttcttgcctcgtgtgctgcctgtgtcagaacccagccaactttaaggacctgggagatttatgtggcccttattatccagagcactgcttgcccaaaaagaagcctaagttaaaagaaaaggtccgtcctgagggcacatgcgaggaggcctcccttccactagagcgcacactcaagggccctgagtgcgccgcagctgctactgccggtaagccacccagaccagacggaccagccgatccggctaagcagggaccgcttcgcaccagcgcaaggggcctgagccggcgattgcagtcttgttattgttgcgacggcagggaagacgggggagaggaggccgcacccgcagacaagggtagaaaacacgagtgctccaaagaggcaccagccgagccgggaggcgaggctcaggagcactgggtacacgaggcgtgtgctgtgtggacaggtggggtgtatctagtagctggaaagctgttcggccttcaagaggccatgaaggtcgcagttgacatgatgtgtagttcttgtcaggaggccggagccaccatcggctgttgccacaaaggctgcctgcacacgtatcactacccttgcgccagcgatgctgggtgcatatttattgaagaaaacttttccttgaagtgccccaagcataagaggctccccta

SEQ ID NO: 238481 - DNA, 2901 bp, synthetic construct
  misc_feature 1..2901: note = Description of Artificial Sequence: Synthetic coding sequence
  source 1..2901: mol_type = other DNA
atgcagagctttcgggagagatgtggattccatggaaaacagcagaattaccagcagacatctcaagaaacaagccgtctagaaaattaccgacagcccagccaggcgggattgtcctgtgaccgccagaggcttctcgcaaaagattactataatccacaaccctatccatcttatgagggcggagccggaacgccaagcggtacagccgcagctgtagccgctgataaatatcatagagggtccaaagccttaccaacccagcaagggcttcagggcaggccggcttttccgggatatggcgtgcaggactcaagcccttaccccggtcggtacgcgggagaggagtccctccaggcttggggcgctccgcagccccctccaccccagcctcagccgctgcctgccggtgtcgctaaatacgatgagaacttgatgaagaagactgctgtccctccaagtcggcagtatgcggagcaaggagcccaagttccattcaggacccactctctccacgtacagcagccccctccaccccagcagcccttagcttacccaaagcttcagcggcaaaagcttcagaatgacatagcttctccgctgccctttccccaagggacgcatttccctcaacacagtcagtctttccctactagctccacgtacagcagcagcgtccagggaggagggcaaggggcacattcgtataaatcctgtacggccccaactgctcaaccccatgaccggcctctgaccgcgtcatcaagtctagctccaggccagcgagttcagaatctgcacgcctaccagagtggacgactcagctatgaccagcagcagcagcagcagcagcagcagcagcaacagcagcaggccctgcagtctaggcaccacgctcaagagactttgcactaccaaaacctggccaagtaccagcactacggccagcagggccagggttactgtcagccggatgcagcggtgaggacccctgagcagtattatcagactttctctccctcatcatcgcactcccccgcacgctcggtagggcgaagccccagctacagttccaccccatccccactgatgcctaatctggagaacttcccttattcgcagcagccactgtccactggcgcatttcccgctggcattacagaccattctcactttatgccacttctcaacccatcaccaacagacgcaacgagctccgttgatacccaggctgggaactgcaagcctctgcagaaggacaaactgcctgaaaatttgctgagcgacctgtccctgcagtccttgacagccttgacctcacaagttgagaatatcagcaacaccgtgcagcagctgctgctttcaaaggccgctgtcccgcagaaaaagggagtcaagaatttagtgagtcggacacctgaacagcacaaatcacagcattgtagtccagaaggcagcggatacagtgctgaacccgctggtacccccctatcggagccaccatcttcaactcctcaatctacacatgctgaacctcaggaagcagactatctgagtggctcagaggatcccctcgaaagatcatttttatactgcaaccaggcacgcggtagccctgcaagagttaactccaatagtaaagccaaacccgagtccgtttcaacgtgttccgtgacctccccagatgatatgagcaccaagtctgatgactcgtttcaatctctccacggaagcctgccattagacagcttttctaagtttgtggctggggagcgcgattgtcctaggctcctactaagcgcgctcgcccaggaagatctcgcaagcgaaatcttaggactgcaggaggccatcggagaaaaggcggataaggcctgggctgaggcccctagcctggtgaaggacagttccaagccccctttcagcctggagaatcactctgcttgtctcgacagtgtggctaaaagcgcgtggccgagacctggggagcctgaggcccttccggactctctgcagctcgataaggggggaaatgccaaggatttctctccgggactgtttgaagatccaagcgtggctttcgcgacaccagatccaaagaagaccaccgggcctctgtctttcggaactaaaccgaccctaggcgtaccggctcccgatccaacaactgccgctttcgattgctttccggacacgacggcagcctcgtccgcagatagcgcgaacccatttgcctggccagaagaaaatttgggcgacgcttgtcccaggtggggcttacaccctggcgagttaaccaagggcttggaacaggggggaaaagcgagtgacggaatttcgaaaggcgatacacacgaggcctccgcatgcctcggatttcaggaggaggatccccctggcgagaaagtggcatccttaccaggcgatttcaaacaggaagaggtcggaggggtcaaggaggaagccggaggactcttgcagtgccctgaggtcgccaaggccgaccggtggctggaggacagcaggcattgctgcagcactgccgactttggtgatctaccgctgttgccccctactagccggaaagaagatctcgaggccgaggaagagtattcctcactgtgcgagcttctcggatccccagagcagagacccggtatgcaagatccgctgtccccaaaggcgcctctgatctgcacgaaagaggaagtagaagaagtcctcgacagcaaagcaggctgggggagcccatgccatctgagcggggagtctgtgattctcttggggcctacagtgggcacagaatcaaaagtccagagctggtttgaagcctcactctacagcgtctacatctgcatccacatccacatttataacatctacgaggactgtaagtgctag

SEQ ID NO: 238482 - DNA, 2829 bp, synthetic construct
  misc_feature 1..2829: note = Description of Artificial Sequence: Synthetic coding sequence
  source 1..2829: mol_type = other DNA
atgcaatcttttagggagaggtgcggttttcatgggaaacagcagaattaccagcaaacatcccaggagacaagtcggttggagaactatagacagccttctcaggccggactgagttgcgatagacagagactgctcgcaaaggactattacaacccgcaaccctatccttcgtatgagggaggggctggaaccccgagcggaactgccgctgccgtggctgccgacaagtatcatagaggctccaaggccctccctacccaacagggactccaaggacgtccagctttcccaggctatggagtccaggacagctctccctatcctggaaggtatgctggagaggagtcactgcaagcttggggcgctccacaacctccaccccctcagccacagccgctgcccgcaggagtggctaaatacgatgaaaacctgatgaagaagacagcagtacccccatccagacagtacgcggaacaaggggctcaagtgcccttcagaacccattctctccacgtgcagcaaccaccacccccacagcaaccattggcttaccctaaattgcagcgacagaagctgcaaaatgacatagccagtcctttgccattcccccagggtacgcacttcccccagcacagccaatccttccctacaagttcaacatacagcagctctgtccagggagggggacagggtgcacatagctataagagttgtaccgccccaactgctcagcctcatgataggccactgactgcaagcagttcactagccccagggcagcgtgtgcagaatcttcatgcctatcaatccggccgactgtcttacgaccagcagcagcagcaacagcagcagcagcagcagcagcagcaggcccttcagagtcggcaccatgcccaggagaccctccactatcagaacctggctaagtaccagcactatggccagcaaggacagggctattgccagcccgatgccgcagtccgaacccctgaacagtattatcagaccttctctcccagctcatcccacagccctgctaggagtgtcgggagatccccaagttacagtagtacaccttctcctctgatgccaaatctcgagaatttcccgtacagccagcagcctctgtccactggcgcatttcctgccggaattactgaccacagtcatttcatgcccctgctcaatccgtcccccactgacgctacctcttctgtggacacccaggccggaaactgcaagcccctccagaaggacaagctgcccgagaaccttctctcagatctcagtcttcagtcacttacagccttgacatctcaggtggaaaacatttctaacacggtgcagcagttgcttctgtcgaaggctgccgtgccacagaagaaaggagtgaagaaccttgtctctcgcacccctgaacaacataagtcccaacactgctcccctgaaggctccggatactctgccgagcctgctggaacacccctcagtgagccaccatcttctacgccacagtcaactcatgcagaaccgcaagaggcggattatctgtccggctcggaggaccccctggaacgctccttcctgtactgtaatcaggcacgcggttcccccgctcgcgtgaattcaaactccaaggccaagcctgagtccgtctctacatgtagcgtgacttcccctgacgacatgtccaccaaaagcgacgacagcttccagtcactgcacggatctctacccctggactcattttccaagttcgtcgctggtgaacgagactgtcccaggctgctcctcagcgctctggcccaagaggacctggccagcgagattctgggcctgcaggaggcaatcggcgaaaaggctgataaggcctgggcagaagcgccttccctggtgaaagacagctccaaaccaccatttagccttgaaaatcatagcgcttgcctggacagcgtagccaaaagcgcctggcctcgacctggagagcccgaagccctgccggacagtctgcagcttgacaaggggggaaacgcaaaggacttctctccgggtctgtttgaggacccctcggtcgccttcgctacccccgaccctaaaaagacgaccgggccactgtcatttggcaccaagcctaccctcggagtcccagcacccgaccctacaacagccgcatttgattgtttccctgacactacggcggcaagttccgccgattccgcgaacccatttgcctggccagaggagaacctaggcgacgcctgcccacgttggggactgcaccctggggagctgaccaagggactggaacagggtggtaaagcgtcagacggcatcagtaagggcgatacccacgaagcttctgcttgcctgggctttcaggaggaagaccccccaggagaaaaggtagctagcctcccaggagacttcaaacaagaggaggtaggaggtgtcaaggaagaggccggaggacttctgcagtgcccagaggttgctaaggctgatagatggctggaagacagccggcactgttgttctaccgctgacttcggagatttacctctcctgccacccactagccgcaaggaggatctggaagccgaggaggaatattcatccctgtgtgaattgctgggatctcccgaacaacgtcctgggatgcaggaccccctctcgcccaaggcaccactgatctgtactaaggaggaggtggaggaggtgctcgactctaaagcagggtggggatcaccttgtcatctgagcggagaaagtgtgattctcctggggccaactgtgggtaccgagagcaaagtgcaatcctggttttag

SEQ ID NO: 238483 - DNA, 5981 bp, synthetic construct
  misc_feature 1..5981: note = Description of Artificial Sequence: Synthetic coding sequence
  source 1..5981: mol_type = other DNA
atgcagtcattcagggagaggtgcggattccacggaaaacaacagaactaccagcaaacttcccaggagaccagccggttggaaaattaccgccagccatcacaggcaggtctctcttgtgacaggcaaagactccttgccaaagattactacaacccccagccctacccctcctatgagggcggtgctggaactcccagcggcacagcagcagctgtcgctgccgacaagtaccaccgtggctctaaggcacttccaactcaacagggactgcagggcaggcccgcattccctggctatggcgtgcaggatagttccccatacccaggcagatacgctggagaggagtcactacaggcttggggcgcaccccaaccacccccaccacaaccccaaccgctgcctgcaggggtggctaaatatgacgaaaatctgatgaaaaagacagcagttccacccagcaggcagtatgcagagcagggagcccaggtgccgtttagaacgcatagtctgcacgtccaacaaccgcctccaccacagcagcccctcgcctaccctaagctccaacgtcagaaattgcagaacgacatcgccagccccctacctttcccacaggggacccatttccctcagcattctcagagcttccccacttcaagtacgtacagctccagcgtccaaggaggtggacagggggctcactcatacaaaagctgcacagcacccactgcacaaccacacgaccggcctttgacagcatccagcagcctggcgccaggtcaacgcgtgcagaacctccatgcctaccagtcggggagacttagttatgaccagcagcagcagcagcagcaacaacaacaacagcaacaacaggcgctgcagtcgcggcaccacgcccaggagactctccattatcagaatcttgccaagtaccaacactatggacaacagggccagggctactgccagcccgacgccgcagtgcggaccccagaacagtactaccagacctttagcccctcgtccagccatagccccgcaagaagcgtcgggagatcccccagttattccagcaccccctctcctcttatgccaaacctcgaaaacttcccatattctcagcaaccgctgagtactggcgcatttccagctggaattactgatcactctcactttatgccattgctgaatccatctcctaccgacgctacaagttccgtggacacacaggccggtaattgtaaacctttgcaaaaggataaactgcctgaaaacctcctatctgacctcagtttacagagcctgacagcacttaccagccaggtggaaaatatcagcaacacagtccaacagttgctgctctcaaaggccgcagtcccacagaagaaaggcgtgaaaaatctcgtgtcccgcactccagaacagcataaaagccagcattgctctccagaaggttccgggtactcagcggagcctgcaggcaccccactctcggaaccgccaagtagcacaccgcaatccacccacgcagagccccaggaagctgattacctttctggctctgaggaccctcttgaaaggagttttttatattgtaaccaggctcgaggtagtcccgctagggtgaatagcaattctaaggcaaagccagaatccgtcagcacatgttccgtgaccagcccagacgatatgtccactaagtccgacgacagctttcagtctttgcacggaagtctcccgctggattccttttctaagttcgtagccggtgagcgtgactgtccaagactgctgctttctgcccttgcccaggaagatctagccagcgaaatattaggcctgcaagaggccattggggagaaagcggacaaggcctgggcagaggctccatcactggttaaagacagctcaaaaccaccattttccctggaaaatcactccgcatgcctagactccgtcgcaaagagcgcctggccacgccctggagagcccgaggccctgccagatagcctgcagctggataagggtggcaatgcgaaagatttttctcccggtctatttgaggatccatcagtggcgttcgcaaccccagaccccaaaaagactactggccctctgtccttcgggaccaagcccacactgggagtgccagcaccggatcctaccactgcggctttcgactgcttcccagacaccaccgccgcttcctcggccgattcagcaaacccatttgcatggcctgaggagaatctcggggatgcttgcccacggtggggtctgcatccgggtgagcttaccaagggactggaacaggggggaaaagcctccgacggcatatcaaaaggggatacacatgaggcttccgcgtgcctcgggttccaggaagaggacccccctggagagaaagttgcaagcctgcctggggacttcaagcaagaggaagtagggggtgtaaaggaagaggcaggcggtctgctgcagtgccccgaggttgctaaggctgatcgttggttggaagacagccggcactgttgttccaccgctgacttcggcgacctgcccctccttcctccgacgtcgcgtaaggaagatttagaagccgaagaggagtacagttccttatgtgaactccttgggtcccctgagcaacgcccaggcatgcaagatcctctttcccctaaagcaccccttatttgcaccaaagaggaggtggaagaggtgctggacagcaaggcaggatggggaagcccctgccacttgtccggcgagagcgtgatcctcttgggtcctaccgtgggcaccgagtccaaagtgcagagctggttcgaatcttcgctttctcacatgaagcccggagaggaaggccctgatggcgaaagagccccaggggattccacgaccagcgatgccagcctcgcacagaagcccaataaaccagctgtgcctgaggctcccatcgccaaaaaggaacctgtgcctcgcggaaaaagcctgcggtcccgccgagttcaccgcggattacccgaggcggaggacagcccttgtagggcccctgtcctcccaaaggaccttctcttacccgagagctgcaccggccctccacagggtcaaatggagggtgcgggtgcccctgggagaggcgctagcgaggggcttcccagaatgtgcacccgctctcttacagccttatctgaacccagaacacctggccctccaggcctgacaaccacccctgcaccccctgataaactgggcggaaagcagcgggctgcctttaaaagcgggaagagggttggcaagccatccccaaaggcagcctcctcgccctccaatcccgctgctctccctgtggcaagcgactcctcacccatgggatccaagactaaggaaacagacagtccttccacccctggcaaagaccagagatccatgatacttcggagcaggaccaagacccaggagatttttcacagtaaacggagacgccctagtgaagggagacttccgaattgtcgggctactaaaaaacttttagacaacagccatctgccagcaactttcaaggtgagctcgtcccctcaaaaagaggggcgagtctcccagagggcgagggtgcccaagcctggggctggcagcaaactgtcagacagaccgttgcacgcactgaaacggaagagtgcgtttatggcacccgtgcctactaaaaaacgtaaccttgtcctgcggagccggtctagctcttctagtaatgctagtgggaacggcggtgatggaaaggaggaaaggcctgaaggctctcctactctgtttaagcggatgtcttcccctaagaaagctaagccaaccaagggtaatggtgagcctgcaactaaactccctcctccagaaacgcctgacgcttgtctaaagctcgccagccgcgcagctttccaaggcgcaatgaaaaccaaagtcctgcccccaagaaaagggagaggacttaagctggaagcgatagtgcagaaaataacctccccgtctttgaagaagttcgcatgcaaagcacctggagcctcgcccggaaatcccctatcgccttccctgtcagataaggatcggggattgaagggcgcaggaggttccccagtcggcgtggaggaaggcctggtgaatgttggcaccggtcagaagctgccaacgtctggcgcagatccactctgccgcaaccctacaaatagaagcctgaagggcaagttaatgaactctaagaaactgtcttcaacagactgctttaaaacagaggcattcacctcccccgaggctctccaaccaggtgggaccgctctcgcacctaagaagcgcagtcggaaaggtagagcaggcgctcatgggctgagcaaggggccattggagaaaaggccatacctgggcccagctctcttgttaacccctcgcgatcgggcatccggaactcagggcgcatcagaggacaactcaggcggtgggggtaaaaagcctaagatggaagagctgggcctggcctcccagcctccagaaggccgaccatgtcagccacagacgcgggcacagaaacagcccggacacacaaactactccagttactctaagcgaaagcgtctgacaaggggtagggccaagaacacaacttcgagcccttgcaaaggaagagccaagcgtagacgacagcagcaggtgctgcctctggaccccgctgagccagaaatccggttgaaatacatcagttcatgcaagcgattacgcagcgactccagaactcctgcattttcacccttcgtacgagtcgagaagagagacgcatttactacaatctgcaccgttgtgaactctcctggtgatgcaccaaagccacacaggaagcccagctcatctgccagttcgtcatctagtagttcaagtttctcactggatgcggctggcgcttcactagcaaccctgccaggcggatctatcctccagcccaggcccagccttccccttagtagcaccatgcatttgggaccagtagtttcgaaagccctgagcaccagctgtctcgtctgttgcctgtgtcaaaatccagctaacttcaaagacttaggagatctctgtggcccttactaccctgagcactgcctgcctaagaaaaagccaaaattgaaagagaaagtgcgtccagaggggacatgcgaggaggctagtctccccctggaacggacacttaagggacccgaatgtgccgctgcggctacagcgggaaagcctccacggcctgacggtcccgcagaccctgccaagcagggccctctccggaccagcgccaggggattatcaagaaggttacaaagttgttattgctgcgacggaagggaggacgggggagaggaggctgcgcctgcagataagggaagaaagcatgagtgttctaaagaggcccctgctgaaccaggtggcgaggcccaggagcactgggtacatgaagcgtgtgccgtctggaccggtggagtgtaccttgtggcaggaaagttgtttgggttgcaggaggccatgaaggtcgccgtggacatgcacggcggtacagttgctctcgcgccaggagatttcagcttgcctggcttgagattcgcgtccctgtttcagggaccctcctggtgtgattgcccagtgctggctacgtccacgccttcctcttggtctcggtgtgtacctgccgctaagaaaccagggcctcctctcggtgccgctaccaaggacgcctcaacacctaccaccactcgcgtccccgcaatgcaggtacgggctcgcccaggtaccggaggccactggagtccatctaaacagagtaggggcaccctgcccggacattcatcacccaatcctgggccaataagtttgttcagttttccgccactactccctcagcagtttttctacccttctgtgtgcctcgacctctgttgggccatgcccggaacctggaaata

SEQ ID NO: 238484 - DNA, 2943 bp, synthetic construct
  misc_feature 1..2943: note = Description of Artificial Sequence: Synthetic coding sequence
  source 1..2943: mol_type = other DNA
atgaagtcgttaaaggcaaaattcagaaagagcgataccaatgaatggaacaagaatgacgataggctgcttcaagccgtagagaacggcgacgcagaaaaagtagcctctttattgggcaagaagggagcaagcgccacaaaacatgacagtgagggaaagacggctttccatctggcggcagcgaagggccatgtagagtgtctcagagtgatgattacacatggggtggacgtgactgcccaggacactactggacattctgctctgcatctcgctgcaaaaaactctcaccatgagtgcatacggaaactgctgcagtcgaaatgtcccgctgagagcgtagacagttctggcaagaccgctctgcattatgccgcagcgcaggggtgcctgcaggcggttcagatcttatgtgagcataaaagccctatcaatctgaaggatctggatggcaacattccacttttgctggccgtacagaacgggcatagcgagatttgccatttcctattggaccatggtgccgatgtcaattccaggaataaatccgggaggaccgctctgatgctggcttgtgagataggctcttctaacgcggtcgaggccctgattaagaaaggggctgacctcaatctggtggactccctcggatataacgctctgcactatagcaagctaagcgaaaacgctgggatccagagtctgcttttaagtaagatctcccaggatgcggatctcaagaccccaactaagcccaagcagcacgatcaggtcagcaaaatcagcagtgaacgcagcggcacacctaaaaaacgcaaggcacctcctccacccatttctccgactcagctgtccgacgtaagttcaccccgatctattacgtccacaccattgtccggaaaggaatccgtgtttttcgcagagccccctttcaaggccgagatcagctccattagagagaacaaagatcggctgtcagatagtactacgggcgcagactctttgctcgacatctcttccgaagcagatcaacaggacctgttaagcttgcttcaagccaaagtcgcgtccctcacgctgcacaataaagaactgcaggacaaactgcaggcgaaatcacctaaggaagcggaggcagacctgagttttgacagctatcactccactcagaccgacctgggcccatcattgggaaagccaggcgaaacctcacctccagactctaaatcgtcaccatctgtgctaatccacagcctgggaaagtcaacaacagataatgatgtccgaattcagcagctgcaggaaattctccaggatctgcaaaaaaggctcgaaagctcagaggccgagaggaaacagctgcaggttgaattgcagtcccgcagggcagaactcgtgtgtctcaataacaccgaaattagtgagaactccagcgacttatcccagaaactgaaagagacacagtcgaagtacgaagaggcaatgaaagaggtgttgtcagttcagaagcagatgaagctgggattagtgtcccctgaatcaatggacaattactcacactttcacgagttacgcgtcacagaggaggagatcaacgtcctgaaacaagatcttcagaatgcactggaagaaagcgaacgcaacaaagagaaggtccgtgagctggaagagaagttggtcgagagagagaaaggtaccgtgattaagcccccagtggaagaatatgaggagatgaagtcttcctattgcagcgtcattgaaaacatgaacaaggagaaggcatttctgttcgagaaataccaggaggcccaggaggagatcatgaagttgaaggatacactcaagtcgcagatgactcaggaggctagtgacgaggctgaggatatgaaagaagccatgaacagaatgatcgacgaactgaataaacaagtgtcagagctgagccagctatataaagaggctcaggctgagttggaggactaccgtaagagaaagagtttggaggatgtgacagctgagtacattcacaaggccgagcatgagaagttgatgcaactcacaaatgtctctcgcgctaaagccgaggacgctctgtctgagatgaaatcccagtatagcaaagtgttgaacgagctgacccagctcaagcaattggttgacgctcagaaggagaattctgtgagcatcactgagcaccttcaagtgataactactttgcgtactgccgcaaaggagatggaagaaaaaatatcgaacctgaaggaacatctggccagtaaggaggtggaggtggctaagttagagaaacagctgctggaggaaaaggcagcgatgaccgatgctatggtgccccgatcgagttacgaaaaactgcagtcctcactcgaatcagaagtctctgtgttggcaagtaagctcaaggagagtgtgaaagaaaaggagaaggttcacagcgaggttgtgcagatccggtctgaagtgagtcaggttaagcgggaaaaagaaaacatacagacgctcctgaaatccaaagagcaggaagtaaacgagctgctgcagaaattccagcaggcgcaggaggagctggccgagatgaaaaggtacgcggagtcctcttctaaactggaagaagataaggacaagaagatcaacgaaatgagcaaggaggtaaccaagctcaaagaggctcttaatagtttgtctcagttatcttatagtacatcctcttctaagcggcagagtcaacaactggaagcgctccaacagcaggtaaagcagctccagaatcagctggctgagtgtaaaaaacagcaccaggaagtcatttcagtttaccggatgcacctcctctatgctgtgcaggggcagatggacgaagacgtgcagaaggtcctgaaacagatattgacaatgtgtaagaatcagagccagaagaagtag

SEQ ID NO: 238485 - DNA, 2922 bp, synthetic construct
  misc_feature 1..2922: note = Description of Artificial Sequence: Synthetic coding sequence
  source 1..2922: mol_type = other DNA
atggtcaaaggtaagaccaatgaatggaacaaaaacgacgataggctcttgcaggcagtggaaaatggggatgctgaaaaggtagcgtcactgctgggcaaaaaaggtgcctccgccaccaaacacgatagtgagggtaagaccgccttccatctcgcagccgctaaaggtcatgtggagtgtttaagagttatgatcactcatggggtggatgtgacagcgcaagacaccacaggtcactccgctcttcacctggccgctaagaatagccatcatgaatgtattcggaagttactgcaaagcaagtgccctgccgaaagtgtggattctagcggaaagacggccctgcactatgccgctgcccaggggtgtttgcaggcggtgcagattttgtgtgagcacaaatctcctattaacctcaaagacctggacgggaacatcccactccttcttgccgtacagaacgggcactctgaaatctgtcatttcctgttagaccacggagccgacgtcaattctagaaataaaagcggtcgtaccgcgctcatgcttgcatgtgagatcggaagctctaacgcagtcgaggccctgatcaagaaaggcgcagacctgaatctcgttgactcattgggctacaatgcactgcactatagcaagttaagcgagaacgccggaattcagagcctgctgctcagcaaaatctctcaggatgctgacctgaagacccccactaagcccaagcagcatgatcaggtgtccaagatttcttcagaaaggtcaggcacgcctaaaaaacggaaggctccccctccccctatatcccccacacagctgtctgacgtctcgtcccctaggtcaatcacctcgactcctttgtcaggcaaggaatccgtcttttttgcggaaccgccttttaaagccgaaatcagctctataagggaaaataaagatcggttgtcagattccacgacaggggcagattcattactggacatctcaagcgaggctgatcagcaggatttactgtccttgcttcaagccaaggttgcctcactaacactgcataacaaggaactgcaggacaagctgcaagcgaagtcccctaaagaggctgaagccgatctctcttttgacagctatcatagcactcaaactgacctgggccctagtctaggtaagcctggcgaaacgagcccacccgactccaaatcctctccctctgtcctgattcactctctgggcaaaagtacgactgacaacgatgtgaggatacaacagttgcaggagatcctccaggacctgcaaaagcggctggaaagcagcgaagccgaacgcaaacagctgcaggtggagttacagtctagaagggctgagttagtgtgtctgaacaatacggaaatctcagaaaacagctcagatttgagccagaagttgaaggaaacacagtccaaatacgaagaagccatgaaagaggttcttagtgtccaaaaacagatgaagttgggattggtctcccctgagagcatggataactatagccatttccacgaacttagggtaactgaagaggaaatcaacgttctgaagcaagatctgcaaaatgccctggaggaatctgaaaggaacaaggagaaggttcgcgagctcgaggagaagctggtggagcgtgaaaagggcacagtaatcaagccacccgtggaagaatatgaagaaatgaagtcatcatactgctcggtgatcgagaatatgaataaagagaaagcattccttttcgagaagtatcaggaagctcaggaagagataatgaagttgaaagataccctgaaaagccagatgactcaggaagcttctgacgaggccgaagacatgaaagaggctatgaaccggatgatagacgagctgaacaagcaggtgagtgaactgtctcagctgtataaggaagcccaggccgagttggaggactatcgtaagcgcaagagtctcgaagatgtaactgccgagtacatccacaaggctgagcacgagaagcttatgcaactcactaatgtgtcccgagcaaaagccgaagatgccttgagcgaaatgaagtcgcaatactccaaggtcctgaacgagctgacacagctcaagcagctcgtcgacgcgcagaaggagaactccgtttcaattacggagcatctgcaagtgattacgacacttaggactgccgcaaaggagatggaggagaaaatatctaacctgaaagagcatcttgccagtaaagaggttgaagtggctaagctggagaaacagttacttgaggagaaagcggctatgaccgacgctatggtgccgagaagtagctatgaaaaactacaaagttctctggaatcagaagtctcggtcctcgcctctaagttaaaagagagtgtcaaagagaaagaaaaagttcattcagaggtagttcagatacgaagtgaggtcagccaagttaaacgagaaaaggaaaacattcagactctactgaagagtaaggagcaagaggtgaatgaacttctccagaaatttcagcaggctcaggaagagttggccgaaatgaagcgatatgccgagtcatcctcaaagctcgaggaggacaaggacaagaaaatcaatgagatgtcaaaagaggtcaccaagctgaaagaggccctgaatagtctgagccaactgtcatactccacctcctccagcaagcgacagtcccagcaactggaggcattgcagcagcaggtcaagcaattgcagaatcaattagcggagtgtaagaaacagcaccaagaggttatctcagtgtataggatgcacttattgtacgccgtgcaagggcaaatggacgaggacgtgcagaaagttctcaagcagatcctcacgatgtgtaagaaccagtctcaaaaaaagtag

SEQ ID NO: 238486 - DNA, 2943 bp, synthetic construct
  misc_feature 1..2943: note = Description of Artificial Sequence: Synthetic coding sequence
  source 1..2943: mol_type = other DNA
atgaagagcttaaaggccaagtttcggaagtcagatacgaacgagtggaacaagaacgatgaccggctgctgcaagccgtcgagaatggagacgcagagaaagtggcctcgctgttggggaaaaagggcgcttctgctacgaaacacgactccgaaggcaaaaccgccttccacctggccgctgcgaagggccacgtcgaatgtttgcgcgtcatgattacacatggggtggatgtgacagcacaggacactacgggccactccgccctgcacctggctgcaaagaatagccaccacgagtgtatccggaaactgctccagagcaagtgcccggcagaaagcgtggacagctcaggtaagaccgcgttgcactacgctgccgctcagggatgtctacaggcagtgcagatcttgtgcgagcacaaatcaccgatcaacctgaaggacttggatggcaatatcccacttctgctggccgtacagaatggacacagcgagatctgccactttctcctggatcacggtgccgacgtgaacagtagaaataagtcagggaggacagcgttgatgctggcctgcgagatcggatctagcaacgctgtcgaagcgctgattaagaaaggtgcagatcttaacttggtagatagccttggctacaatgccctacactactcaaagctgtcagaaaatgccggaattcagtccctgctcttgtccaagatctcacaggatgcagatctgaagacgcccacaaagccaaaacagcacgatcaggtgtctaagattagtagcgagaggagtgggactcccaaaaagcgcaaggctcctccaccgccaatctctccaacccagttgtcagatgtgtcctcaccccgtagtataacaagcactcctctgagcgggaaagaatctgtgttttttgccgaaccaccctttaaagctgagatcagttctattcgcgagaacaaggataggttgagcgactccaccaccggtgcggatagtttactggatatctcaagcgaggccgaccagcaagatctgctctccttgctccaggctaaagtcgcttccctcactcttcataataaagaactgcaagataagctccaggccaaatccccaaaggaagctgaggccgacttgtccttcgactcctaccactcaacccagacagacctcgggcctagtctgggaaagccaggggaaacgtcaccccctgattccaaatctagcccctccgttttgatccactccctgggcaaatccaccaccgataacgatgttcgcattcaacagcttcaagaaatcctccaagatttacagaagcggctggaatcctcagaggccgagaggaagcagctccaagtcgagttgcagagccgcagagccgaattagtgtgcctgaataacactgagatatctgaaaatagtagtgatcttagccagaagctgaaagaaacacagagtaaatacgaggaggctatgaaagaagtgctgagcgtgcagaaacagatgaagctcgggcttgtttccccagaaagcatggacaactactctcatttccacgaactcagagtaactgaggaagagatcaacgtcctcaagcaagatttacaaaacgccctggaagagagtgagcgtaacaaggagaaagtgcgcgagttagaagaaaaattggtggagcgtgaaaagggcacagttatcaaaccgccagtggaggagtatgaagagatgaaatcaagctattgctctgtgattgaaaatatgaataaggagaaggccttcctgtttgagaagtatcaggaggcccaagaggagatcatgaagttgaaagacacgctgaaatcgcagatgacccaagaggcctcagacgaggcagaggatatgaaagaagcaatgaaccggatgatcgacgaactcaataagcaggtgagcgagctgtcccagctgtacaaagaagctcaggctgagttggaggattatcgcaaaaggaaaagcttagaagatgtgacagccgaatatatacataaggccgaacatgagaagctcatgcaactcactaacgtgtcacgcgcaaaggctgaagatgcgctgtccgagatgaagtcgcagtattctaaggttcttaatgagttgacacagctgaagcagctcgttgacgcacagaaagagaattcggtgtcgatcactgagcatttgcaggtgatcacgacgctccgcaccgccgcaaaggaaatggaggaaaaaatttcaaacttaaaagaacatctagcctccaaggaggtggaggtggctaagcttgagaaacaactgttagaggagaaagcggcaatgaccgatgccatggtaccaagatcgtcctatgagaagctccaatcctctctggaaagcgaagtatccgtgttggcgagcaaactcaaagagagtgtaaaggagaaggagaaagtgcattctgaagtggtgcaaatccgtagcgaggtatcacaggtgaaacgggagaaagagaacatacagactctcttaaaaagtaaggaacaggaggtcaacgaactcttacaaaagttccaacaggcgcaagaggaacttgccgaaatgaagcgatacgctgagagtagcagtaagctggaagaagacaaggataagaagattaacgagatgtccaaagaggtcacgaagttgaaagaggcactgaactcgctgagccagctgtcatattctacctctagtagcaagcggcaatcccagcagctggaagctctgcagcaacaggtaaagcaattacagaaccagctggctgaatgtaagaagcagcatcaagaggttattagcgtttataggatgcacctcctgtacgccgtgcagggccagatggatgaggatgttcagaaagttctaaagcagatactgactatgtgtaagaaccagagtcaaaagaagtag

SEQ ID NO: 238487 - DNA, 2943 bp, synthetic construct
  misc_feature 1..2943: note = Description of Artificial Sequence: Synthetic coding sequence
  source 1..2943: mol_type = other DNA
atgaaaagcttgaaggctaaattccgtaagagtgatacaaacgagtggaataagaatgacgaccggttgctgcaggcggttgagaacggcgatgcagagaaagttgccagtttactcgggaagaaaggtgcaagcgcaacaaaacatgatagtgagggtaagacagcctttcacttggccgctgccaaggggcatgttgaatgtctcagggtgatgatcacgcacggtgtggatgtcaccgctcaggacactaccggacactctgcgctccatctcgcagcaaaaaattcgcatcacgagtgcatcaggaagttgttgcagtctaaatgtcctgcggagtctgttgactcatcggggaaaacggctctccattacgccgctgcccagggatgtcttcaggccgtgcaaatactctgtgagcacaagtctcctattaatcttaaagatctggatgggaacatacccctgctcctcgccgtgcagaacggccattcagaaatctgccatttcctgctcgaccacggagctgatgtgaattctcggaacaagagtgggagaactgccctgatgctggcctgtgaaataggtagtagcaacgcggtggaagctctgattaaaaaaggcgctgacctcaatcttgtggactccctgggatataatgcgctccattactcgaagttatccgagaacgcagggatccaatcgctgcttctatcaaagatcagccaagatgctgacctgaaaactccaacaaagccaaagcagcatgaccaggtttccaaaatttctagcgaaaggagcgggactcccaaaaagaggaaggctccacctccccctattagccccactcagttgagcgacgtcagcagcccgcgatctattacgtcaacccctctgagtggcaaggagagtgtcttcttcgctgagccgccattcaaagctgagatatctagcattcgcgagaacaaagaccgactaagcgacagcaccaccggcgctgattcactgctcgacatcagtagtgaagctgatcagcaggacctactgagtctgctccaagctaaggttgcttctctgaccctccataataaagagcttcaagacaaactgcaagccaaatctcctaaggaggccgaggcggatttgagctttgactcttaccacagtacacagactgacctaggcccttcgctgggcaagcccggagagacttcacccccagactccaagtcttccccctccgtgttaattcacagcttaggaaagtccacgaccgataatgacgtccgtatccagcaactccaggagatcctgcaggatctccaaaaaagactcgaaagttctgaagcagagcgcaagcagctccaagtggagctgcagtcccgaagagccgagctggtgtgcctgaacaataccgaaattagcgagaattcctctgatctttctcaaaaactgaaggagactcaatctaagtacgaagaggcgatgaaggaggtgctttcagtccagaagcagatgaagctcgggttggtgtcgcctgaatcaatggacaattattctcatttccatgagctgcgagtcaccgaagaagagatcaacgtactgaagcaagatttgcaaaacgctctggaagaatcagaaaggaataaagagaaggtgagagagctggaagaaaaactggttgagagagagaaagggactgtgattaagccacctgtggaggagtacgaagaaatgaagagtagctattgttcagtcatcgagaacatgaataaggagaaggcctttctttttgagaaatatcaggaagcgcaagaggaaatcatgaagctaaaggacaccctcaaaagccaaatgacacaggaggcaagtgacgaggcggaagacatgaaagaagccatgaatagaatgattgatgaacttaataaacaggtctcggagttgagtcagctttataaagaggcacaagctgagctggaggattacagaaagagaaagtccctagaggatgtgaccgcggaatacatacataaagctgagcatgagaagctgatgcaactgaccaatgtcagtcgggctaaagcagaggacgctttgtcggagatgaagtcacagtacagtaaagtattaaatgagctgacacaactgaagcagctggtggatgctcagaaagaaaactccgtgagcataacagagcacttgcaagtgattaccacgcttaggactgcggcaaaagagatggaagaaaaaatcagcaatctcaaggaacatttggcctctaaggaggtggaggtagcgaaactggagaagcagcttctcgaagagaaggccgctatgaccgatgccatggtgcccaggtcttcctacgagaaattgcaatctagcctggaatctgaagtgagcgttctggcatctaaattgaaggaaagtgtcaaagaaaaggaaaaagtccatagcgaagtggtgcagatccgatccgaggtatcccaggttaagcgagagaaagagaatattcagacattgctcaagtccaaagagcaagaggtcaatgagctgctgcagaaattccagcaagcacaggaggagcttgccgagatgaaaaggtacgctgaaagcagcagcaagttggaagaggacaaagataagaaaattaacgagatgagtaaggaggtgacaaagctgaaagaggctttaaacagcctatctcaactcagttactctactagctcatctaagcgacagagtcagcagctcgaggccttacagcagcaggtgaaacaactccaaaatcagctggctgagtgtaaaaaacagcaccaggaagttatctccgtctatcgtatgcatttactttacgctgtccaaggtcagatggatgaggatgtgcagaaggtgttgaagcagatcctgacgatgtgtaaaaaccagtcccagaaaaaatag

SEQ ID NO: 238488 - DNA, 345 bp, synthetic construct
  misc_feature 1..345: note = Description of Artificial Sequence: Synthetic coding sequence
  source 1..345: mol_type = other DNA
atgaaatctttaaaggcaaaatttaggaagagcgacacaaacgagtggaacaaaaatgatgatcggcttttgcaggccgttgagaatggggacgccgaaaaggttgccagcctcctggggaagaagggtgcgtccgctacaaagcacgatagcgagggtaagacagcattccatctggccgcagccaaaggccacgtggagtgcttgagggtgatgataacacatggcgtggatgtgacggcacaagacaccactggacactccgctctccacctggcggcaaaaaactctcatcacgagtgtataagaaagcttctacagtcaaagtgtccagccgagagctag

SEQ ID NO: 238489 - DNA, 2919 bp, synthetic construct
  misc_feature 1..2919: note = Description of Artificial Sequence: Synthetic coding sequence
  source 1..2919: mol_type = other DNA
atggaagccaaaacaaacgaatggaacaagaatgacgaccgtcttctgcaggccgtagagaacggcgatgcggagaaagttgcaagcctactgggaaagaagggtgcaagtgccaccaagcacgatagcgagggcaaaactgcgttccatctggcagccgctaagggccatgtagaatgcttgcgggttatgataactcatggtgtagatgttactgcccaggacaccactggccatagcgcactgcatcttgcagcgaaaaactctcatcacgagtgcatcaggaagcttctccagagcaaatgtcctgctgagtccgtagattcatcagggaaaacagccctgcactatgccgcagcccaggggtgccttcaggccgtgcaaatcctctgcgaacacaaatcaccgattaatctgaaggacctagatgggaacataccactgctgctggctgtgcagaatggtcattctgagatctgtcattttctgctggatcatggggcagatgtcaattctcgcaacaagagtgggcgtacggcactgatgctggcatgtgagatcggaagctctaacgccgtggaagcacttatcaaaaaaggcgcagatctgaatcttgtggactcactagggtataacgctctacactactccaaactctcggaaaacgctgggatacaaagcctcctgttgtctaagataagtcaggacgccgacctgaagacacctacaaagccaaaacagcacgaccaggttagtaagataagtagtgagcggagcggaacaccgaagaagcgcaaggcccctccgccaccaataagccctacccagctgagtgacgtctcatcgccacggagtattaccagcacacctctgagtgggaaggagtctgtttttttcgccgaaccccctttcaaggccgagatcagcagtatccgggaaaataaggatcggctgagcgattctaccactggcgcagactcacttctggacattagcagcgaagcagatcagcaggacttactctcactcctgcaagccaaggtcgccagtctgacgttacacaataaagaactgcaagataaactgcaggctaagtctcccaaagaggctgaagcggatctgtcgttcgactcttatcactctacacaaaccgacttgggaccaagcctgggcaagcccggagaaaccagccctcccgattctaagagttctccgtccgtcctgatacattccttgggtaagagcactacagataatgatgtgagaattcaacagctccaagaaatcttgcaggacctgcagaagcggctcgagtcgagcgaagcggagcgcaagcagttacaggtcgaattacagtccaggagggcagaattggtgtgtctgaataacacagagattagcgaaaatagctccgatctgtcacagaaattaaaagagacgcagtctaagtatgaggaggccatgaaagaagttctgagcgtccagaaacaaatgaagctgggtctggtcagtcccgagtctatggataactactcccactttcatgagctgagagttacagaggaggaaataaacgttctgaaacaggacctgcagaatgcactggaggagtcagagcggaacaaagagaaggtccgggaactcgaggaaaagctagtcgagcgagagaaagggacggtgatcaagcctccggtggaggagtatgaggaaatgaagtcttcctactgctctgtgatcgaaaatatgaacaaggagaaggccttcctcttcgagaagtatcaggaggcacaggaggagattatgaagcttaaggacaccctcaaaagccagatgacacaggaggcctccgacgaagcagaggatatgaaggaggcaatgaatcggatgattgacgaattgaacaagcaagtgtctgagctctcccaattgtacaaagaggcacaggccgagttggaggattacagaaaaaggaagagtctcgaggacgtcacagcagaatacatacataaagctgagcatgaaaaactcatgcagcttaccaatgtgtctcgagcgaaagccgaagatgcactgtctgaaatgaagtcacagtattccaaagtcttgaatgagctgactcagcttaagcagctggtggatgcgcagaaggaaaactcagtgtccatcaccgagcacctgcaggtgatcacaaccctccgcaccgccgcaaaggagatggaagaaaaaatctcaaatttaaaggaacacctcgccagtaaggaggttgaggtagcgaagctcgagaagcagctcctggaggaaaaagcggcaatgactgacgcaatggtgcctcgctcatcttatgaaaagctccaatcctctctggagagtgaagtgtctgtactggcctccaaactgaaggagtctgtgaaggagaaagaaaaagtgcactccgaagtcgtccaaatccgctccgaagtgtctcaggtgaaaagagaaaaggaaaacatacagaccctgctgaaatcaaaagaacaggaggtcaatgaacttttgcaaaagttccagcaagcgcaagaagaactcgctgagatgaagagatacgccgagtcttccagcaagctggaagaggataaagacaagaaaatcaacgaaatgtccaaggaggtcaccaaactcaaggaagcactgaactccctaagccaattgagctattctacctcctcctcaaagaggcagtcacagcaactggaagctctccaacaacaagtcaaacagcttcagaaccagctggccgagtgcaagaagcagcatcaggaagtcatctcggtgtatcgcatgcacctgttatatgcggtgcagggccaaatggacgaggatgtgcagaaggtcctgaagcagatcctgacaatgtgtaaaaatcagtctcagaagaagtag

SEQ ID NO: 238490 - DNA, 378 bp, synthetic construct
  misc_feature 1..378: note = Description of Artificial Sequence: Synthetic coding sequence
  source 1..378: mol_type = other DNA
atgaaaagcctgaaagccaaatttaggaagagcgacacaaatgaatggaacaagaatgatgatcgcctcctccaagctgtggaaaatggggacgccgagaaggttgcatccctactcggaaaaaagggagcctccgccaccaagcacgatagtgagggcaagaccgctttccacctcgcggcagcaaaagggcacgtggaatgcctgagggtgatgattactcatggagtggatgtgactgcccaggacaccaccggacactccgccttacacctggccgctaagaactcccaccacgaatgtattagaaagttgctgcagagtaagtgcccggcagagtcggtggactcgtcgggcaaaaccgctctccactactag

SEQ ID NO: 238491 - DNA, 324 bp, synthetic construct
  misc_feature 1..324: note = Description of Artificial Sequence: Synthetic coding sequence
  source 1..324: mol_type = other DNA
atgaaatctttaaaagctaaattccggaagtcagatacaaacgagtggaataaaaacgacgacaggctgctgcaggccgtggaaaatggcgatgctgaaaaagttgcgtcactcctaggcaagaagggagcttccgctacaaaacatgactctgaggggaagaccgcgtttcacctggcggctgcgaagggccatgtggagtgcctgagagttatgatcacccatggagttgatgtaaccgcacaagatactaccggacatagcgcccttcacttagctgcaaagaactcgcatcatgagtgcattcggaagctactccagtag

SEQ ID NO: 238492 - DNA, 453 bp, synthetic construct
  misc_feature 1..453: note = Description of Artificial Sequence: Synthetic coding sequence
  source 1..453: mol_type = other DNA
atgaaatcgctgaaggctaagtttaggaagtccgacaccaatgagtggaacaagaacgatgaccggttgttacaggctgtcgaaaatggggacgcagaaaaggtggcgagtctactgggcaaaaagggagcttcagccaccaaacacgattctgaaggtaaaactgccttccacctggcagcagccaagggtcacgtggagtgcctgcgcgtgatgatcacacatggcgtcgatgtcacagcccaagacaccactggtcactcagccctgcacttagcggcaaagaactctcaccatgagtgcatacgaaagctgttgcagtctaaatgccccgcagagtccgtagacagctccgggaagaccgccctccactatgccgctgcccaaggctgcctgcaggccgtgcagattctctgcgagcataaatctccgataaatcttaaggacctttag

SEQ ID NO: 238493 - DNA, 381 bp, synthetic construct
  misc_feature 1..381: note = Description of Artificial Sequence: Synthetic coding sequence
  source 1..381: mol_type = other DNA
atgaagagcctcaaggccaagtttcgaaaatccgataccaacgagtggaataaaaatgatgatcggcttctgcaagctgtagaaaacggagatgcagagaaggtcgcctctctgcttggcaaaaaaggcgcttctgctactaaacacgactctgagggcaagactgcattccacctagccgcagctaaagggcatgttgaatgcctcagggtgatgattacacatggagtcgatgttacagcacaagataccacaggacatagtgcgttgcacctggctgccaaaaactcccaccacgagtgcatccgaaagctgcttcagagcaaatgcccagccgaaagcgtagattctagtggcaagaccgctctgcattacgcttag

SEQ ID NO: 238494 - DNA, 315 bp, synthetic construct
  misc_feature 1..315: note = Description of Artificial Sequence: Synthetic coding sequence
  source 1..315: mol_type = other DNA
atgaagagtctgaaagccaaattccggaagagtgacacaaatgagtggaacaaaaacgacgatcgtctcctgcaggccgtcgagaacggagatgctgaaaaggtcgccagcctgctaggaaagaagggggcatccgctaccaagcacgacagtgaaggcaagaccgcgttccacctcgccgctgcgaaggggcacgttgaatgcctgcgcgtcatgataacacatggcgtggatgtgactgcccaggacaccaccgggcactccgccctccacctcgccgcaaagaattcccaccacgaatgcattcggaaatag

SEQ ID NO: 238495 - DNA, 420 bp, synthetic construct
  misc_feature 1..420: note = Description of Artificial Sequence: Synthetic coding sequence
  source 1..420: mol_type = other DNA
atgaagagtctaaaagcgaaattccgcaagtccgatactaacgaatggaataagaatgatgaccggctgctgcaggcggtggaaaatggagatgccgaaaaagttgccagcctgttgggtaaaaagggggcttcagcaacaaagcacgactctgaggggaagacagcgttccacctagctgccgctaaaggtcacgtcgaatgcctacgcgtcatgatcacacatggagtggacgtgaccgcccaggatacaacaggccattccgccctgcacctggctgctaagaactctcaccacgaatgcattagaaagctgttgcaaagcaagtgccctgcagagagcgtggattcaagtggcaagacggcgctccattacgcagctgcacagggctgcctccaggccgtgcagattctctgctag

SEQ ID NO: 238496 - DNA, 381 bp, synthetic construct
  misc_feature 1..381: note = Description of Artificial Sequence: Synthetic coding sequence
  source 1..381: mol_type = other DNA
atgaaatctctgaaggctaaatttcgcaagagcgacaccaatgaatggaataagaacgacgaccgtttacttcaggccgttgaaaacggtgacgcagagaaggtggcaagcctgctgggcaagaaaggcgctagtgccaccaaacacgattccgaagggaaaacagcctttcatctagccgctgcgaaaggccacgtagaatgcctccgagtgatgataacgcacggtgtggatgtgactgcacaagacaccacagggcactccgcgttgcacctggcagcgaagaattcccaccatgagtgcatacgcaaactgttgcaatccaagtgtcccgctgagtcagtggacagttcaggtaagacagccctacattatgcatag

SEQ ID NO: 238497 - DNA, 2952 bp, synthetic construct
  misc_feature 1..2952: note = Description of Artificial Sequence: Synthetic coding sequence
  source 1..2952: mol_type = other DNA
atgcaaccgacttacttgccctggctttccgccaaggagaaaaagaccaacgaatggaacaaaaatgatgaccgccttttacaggccgtagagaacggagacgcagagaaggtagcctcactcctcgggaaaaaaggtgcttcagccaccaaacacgactcagaaggtaagactgcattccacctggccgcagcgaaaggccacgtggagtgtctgagggtgatgatcacccacggcgtggatgtgaccgcgcaagacaccacggggcacagtgccctccacctagctgccaaaaattctcaccatgaatgtattagaaaactcctgcagtctaagtgtcctgcagagagtgttgacagctctggcaagacagccctccattacgcggcagcgcagggttgcctgcaggccgttcagatcctctgcgagcataaatcccccatcaatctgaaggacctggacggcaacatccctttgctgctggcggtgcagaacggtcactccgagatttgtcacttcctcctcgatcacggggcagacgtgaattcccggaacaagagcgggagaacagccctcatgctagcttgtgaaattgggtcctcgaacgctgtggaagctttaattaagaagggggctgatttgaatctggtcgactcactgggctacaatgccttgcactacagtaagctcagcgagaatgcaggcatacagtcactcctgctatctaaaataagccaggatgcggatctaaaaaccccgactaagccaaaacagcacgaccaggtgagcaagatctcctccgaaagaagcgggacccctaagaaaagaaaagcaccaccccctcctatttcgccaactcaactctcagacgtgtctagtcctagaagtattacctccacacccctctcgggcaaagaaagcgttttcttcgccgagcccccatttaaagcggagatatcatcgattagagaaaacaaagaccgtctttcagatagtaccaccggtgccgactccctcctggacattagctctgaggcagaccagcaggatctgctctcactgcttcaagcaaaggtggctagtctgactttgcacaacaaggaacttcaggataaactccaggctaaaagccccaaggaagccgaggccgatctctcctttgatagttatcactctacccaaacagatctcggtccaagtctagggaagcctggagaaactagccccccagattccaagagttcacccagcgtcctgatacatagcctcggaaagtcaacaactgataatgatgttaggatccagcagctccaagagatattacaggatctccaaaagcgtcttgagagtagtgaggcggaaaggaaacaacttcaggtggaactccaaagccggagggctgaactggtatgtctcaataatacagaaatatctgagaattcctctgacctgtcacagaagttgaaggaaactcagtccaaatacgaggaggccatgaaggaggtgctttcagtgcaaaagcagatgaagctgggactggtatcaccagagagcatggacaactacagtcatttccacgagctccgagtaactgaggaagaaattaatgtgttaaaacaggacttgcagaacgccttagaggaaagtgaacgaaataaggaaaaagttcgggaattagaagaaaagttggtggagcgcgagaagggcaccgttatcaaacctccagtagaggagtacgaagagatgaagagtagctactgttctgttattgaaaatatgaacaaggagaaggctttcctatttgagaagtaccaagaggcacaggaggagatcatgaagctcaaagacacactcaaatcccagatgacccaagaggcctccgatgaggctgaggatatgaaggaggccatgaaccggatgattgacgagttgaacaagcaggtgtctgagctaagccaactgtataaagaggcacaggccgagctggaggattacagaaagcgcaaatctctcgaggatgtgacagcagaatatatccacaaggccgaacacgagaagctgatgcaactaactaacgtgtccagagctaaagctgaagatgccctgtccgagatgaagtcacaatacagtaaagtgctgaacgaattgacacagctgaagcagctcgtcgatgcccagaaggaaaacagtgttagcatcacagagcacctacaagttattacgacactcagaaccgcagctaaggagatggaggagaagattagcaacctgaaggagcacctggcttctaaagaagttgaggtcgctaaacttgagaaacagctcctggaagaaaaggccgctatgaccgatgccatggtgccccgttctagttacgaaaaacttcaatcaagtctcgaatctgaagtgagcgtgctggcgagcaaactgaaggagtctgtgaaggaaaaggaaaaggtacattcagaggtggtgcagatccgttcagaggtttctcaggttaagagggagaaagagaacatacagacactgttgaagagtaaagaacaagaggttaatgagttacttcagaagtttcaacaagcccaggaggagctggctgagatgaaacgctatgcggagtctagcagcaaactcgaagaggacaaggacaaaaagatcaacgaaatgtccaaggaggtcaccaagttaaaggaagccttgaactctctctcccagctgagttatagtaccagctcttccaagcggcaaagccaacagctggaggcgctccagcagcaggtcaaacagctgcaaaaccagctggctgagtgtaaaaagcagcaccaagaggtgattagtgtgtaccgaatgcacctcctttacgccgtgcagggacagatggatgaagacgtgcaaaaggttctcaaacaaatcctgaccatgtgcaagaatcagagccagaagaagtag

SEQ ID NO: 238498 - DNA, 2856 bp, synthetic construct
  misc_feature 1..2856: note = Description of Artificial Sequence: Synthetic coding sequence
  source 1..2856: mol_type = other DNA
atgaaaagtctcaaagccaagttccgaaagtccgatacaaacgagtggaataagaacgacgatcgcttgctgcaagccgttgagaacggggatgcagaaaaggtcgctagccttcttgggaagaaaggcgcaagcgctaccaaacatgactccgaggggaagaccgctttccacctcgctgctgccaaaggccatgtggagtgcctgagagtgatgatcacacatggagttgacgttacggctcaagacaccaccggtcattccgcactgcacctggctgctaagaacagccatcatgagtgtatcagaaaactgctccaatctaagtgccccgctgagagcgtggatagctcaggtaaaaccgctctccactacgccgcagcccaggggtgcttgcaggcggtccagattctttgtgaacacaaatctcctataaaccttaaagatcttgacggtaatatacccctcctgctggccgtgcagaatgggcactctgagatctgccacttcctgctggaccacggcgcagacgtgaattcacgtaacaagagcggcaggacagccctcatgctcgcttgcgagattggctcgtcgaatgccgtcgaagccctgattaaaaagggcgctgaccttaatctggtggactccctgggatataatgctctccactattctaagctgtccgagaatgcaggcattcagagtctcctgctttcaaagattagccaggatgccgacctgaaaacacccactaaacctaagcagctgagcgacgtgtcctcacccaggagcattacctccacccctctaagcggcaaggaaagcgtgttttttgcagaaccccctttcaaagctgagatcagttctatccgcgaaaacaaggaccgcttgagtgatagcactacaggtgcagactccctccttgacatttccagcgaagctgaccagcaggatcttttgagtctcctccaggcaaaggtggcctcccttactctccataataaagaactgcaggacaaactccaggcgaagagtcccaaagaggctgaagccgatttatcatttgattcttatcacagtactcagacagatctgggaccatctttggggaagccaggggaaacatcccctcctgatagtaagtcttctccttctgttcttattcacagtttggggaagagtaccacagataacgatgttcgtatacagcagctccaagaaatcctgcaggatctgcagaaacgccttgagagtagcgaggccgagagaaagcagttgcaggtggagcttcagagccgcagggctgagctggtgtgcctgaataacaccgaaatcagtgagaactcgagtgatctgagtcagaagcttaaagagacccagagcaagtatgaggaggctatgaaggaagtactttcagttcagaaacaaatgaaactcggcctggtctcccccgagagcatggataactacagccacttccacgagctgcgtgtgacggaggaagaaatcaacgtcctcaaacaggacctccaaaatgcccttgaggaatctgaaaggaacaaggaaaaagtcagggaactcgaagagaaactcgtggagcgcgagaagggaaccgtgattaaaccacccgtagaagagtatgaagaaatgaaaagctcctattgctcagtaatagagaacatgaataaggagaaggcttttttgtttgaaaaatatcaggaggctcaagaggagatcatgaaactgaaggataccctgaaatcacagatgacgcaggaggctagcgacgaggccgaagatatgaaggaggcgatgaaccgtatgatcgacgaactgaataaacaggtgagcgaattgtcccagttgtacaaggaggcacaggcagaattggaagattaccgtaaaagaaagagtctggaggacgtgacagccgagtatattcacaaggcggagcatgagaaactcatgcagctcaccaacgtgagtcgggcaaaggcggaggatgctttgtccgaaatgaaatcccaatacagcaaggtgctgaatgaattgacccagctcaagcagctcgtggatgctcaaaaagagaactcagtgtctattacagagcacctccaggtgatcacaaccctgagaactgccgctaaggagatggaggaaaagatctcaaatctcaaagagcaccttgccagcaaagaggtggaggtcgcaaagctggagaaacaactcctggaagaaaaggctgctatgactgacgcaatggtgcccaggagcagctatgaaaaacttcagtcatcactcgaaagcgaggtatctgtgctagcttctaagctaaaagaatctgtgaaggaaaaagagaaggtgcattccgaggtagtccagatacgctctgaggtctcgcaagtcaaaagagagaaagaaaatatccagacgcttttaaagagcaaggaacaggaagtcaatgagctgctccaaaagttccaacaggcacaggaagaactggccgaaatgaagagatacgcagagtccagctctaaactggaagaagataaggacaagaagataaatgaaatgagcaaggaagtgacgaagttgaaggaagcattgaacagtctgtcacagctgagttatagcactagctcctccaaaagacagagccaacagttagaggcattgcagcagcaggtcaaacagcttcagaaccaactcgccgaatgcaaaaagcagcaccaggaagtgatttccgtctataggatgcacctactgtacgccgtgcagggccagatggatgaggacgtccaaaaggttctgaagcaaatattgaccatgtgtaagaatcaatctcaaaagaaatag

SEQ ID NO: 238499 - DNA, 1593 bp, synthetic construct
  misc_feature 1..1593: note = Description of Artificial Sequence: Synthetic coding sequence
  source 1..1593: mol_type = other DNA
atggatgacctgcagagtcagaacttatctatggatatgacggactctccacccgctctggccaataaccgactggagaacggtatggcccagttgattaccacagaagcttggaacatcaattccacggacctcgtcaagaaggccctcgttaccgtgccggcaccttctattcttaacccccctgctgaatcccagtccggaatggctctaaaggtggcagccacagtcctgcagccattatgcctgggggaaagtcctgtcgttatgccaattcatatgcaagtcgagggtagcagcgcccctgagcttaacccaaatggaaacgccacatacgtcatgaccactcaggggcctgtgcagctgcctgtggtactggaacagcacgtctttcagcatctaaatagtcccttggtactgccgcaggaagcaccctgttcttcctcaactatacacaacaacctctttcagggggcagaggacccagaggcccagccgcagcttctggacctccggataccaagccagccccaagagcctacactacccttcgaggccgttctgcagaacctgttcccttcacagggcaccctagggcctcctccatgccagccaccccctgggtacgctcccgttcctccgcagcctttttcaagtcctctgtccccccttgtgccccctgcgactttactggtcccctatcccgtgatagttcctctccccgtgcccgtgccaatccctatccccattccaatgcctcagtcctccgagagcaaattcagtagcagttttccgaaacccccttcatcattcggtcttcaccctttcaagggaacacaaactcctctagagaaggacgagctcaaaccctttgacatactgcaacctaaggagtatttccaactgagcagacatacggtgattaagatgggtagcgagaacgaggctttagacttatccatgaagagcgtgccttggttgaaggcaggtgaggtgagtccccctattttccaggaggatgctgcgctcgacctttcggtggccgcacaccgaaagagcgagccgccacctgagactctttatgactctggcgcatcagtggactccagcggccacacagtcatggagaagttaccttcagggatggaaatctcttttgcccctgcgacctcacacgaggcacctgctatgatggattcccacatttcttccagtgacgccgctacagagatgctctctcagcccaatcatccctctggggaggtgaaggccgagaataatatagagatggtaggtgagtctcaggccgctaaggtgatcgtgagcgtagaggacgcggtgcctaccattttctgtggcaaaatcaagggactgtcaggcgtctcaaccaaaaacttctcgttcaaacgggaggactccgttctgcagggttatgacatcaatagccagggcgaggagagcatgggcaacgccgagccactgcggaagccaattaaaaaccgtagtatcaaattaaagaaagttaactcacaagagatccacatgctgcctatcaagaagcagcgacttgccaccttttttcctcgaaagtag

SEQ ID NO: 238500 - DNA, 1593 bp, synthetic construct
  misc_feature 1..1593: note = Description of Artificial Sequence: Synthetic coding sequence
  source 1..1593: mol_type = other DNA
atggatgacctgcagagccagaacctgagcatggatatgactgatagtccaccggctttggccaacaatcgcctggagaatggaatggcacagctgataaccaccgaggcatggaatattaatagcaccgacttggttaaaaaagctctggtaactgtccctgccccaagcatcctgaaccctccagccgagagccagagcggaatggcccttaaggtggcagctaccgttcttcaaccgctttgcctcggagagtcaccggtggtaatgccaattcacatgcaggttgaaggctcctcagctcccgagttgaatcccaatggcaatgcaacctacgttatgaccacgcagggacctgtgcagttgcctgttgttctggagcagcatgttttccagcacctcaattctcctcttgtcctgcctcaggaggccccatgtagctctagcacaatccacaacaatctttttcaaggcgctgaggaccctgaggcacagccacagctgctggacctgcggattccatctcagccccaggaacccacgctcccattcgaggcagtgctccagaatttattcccttctcagggaactctgggtccacccccatgccagccaccaccgggatatgctcccgttccgcctcagcccttcagttcccccctgtcccctctggtgcctccagcaaccctgctggtcccatatcctgtcatcgtaccattgccagtgccagtgccgattcccattcccattcctatgccccaaagtagcgagtcgaagtttagttccagttttccaaagcctccctcaagtttcggactacaccccttcaaaggaacccagacacctctagaaaaggacgaactgaagccatttgatattcttcagccaaaagagtacttccagttgtcccgtcatactgtgattaaaatggggtccgaaaacgaggcacttgatctatccatgaagtctgtgccctggctgaaggcaggtgaagtctcccccccaatcttccaggaagacgcggcactggatttgagcgtcgccgctcatcgcaagagcgaacctccccctgagaccctctatgactccggtgcatctgtggactcgagtgggcacaccgtcatggagaaattgccttccggcatggaaattagcttcgcgcctgccaccagtcatgaggcacctgctatgatggattcacacatttcctcttccgacgctgcaaccgagatgctgtctcaacctaatcatcccagcggagaggtgaaagcagagaataacattgagatggttggcgaatctcaggccgctaaggtgattgtttcagtcgaggatgcagttccaacaattttctgtggaaaaatcaagggcctttcgggggtgtcgaccaaaaacttctccttcaaaagggaggatagcgtgctgcagggatacgatattaacagtcagggtgaggagtcaatgggcaacgcagagcccctgcgtaagcctatcaaaaaccgctccatcaagttaaaaaaggtgaattctcaggaaatacacatgttgccgattaagaagcagcgccttgcaacctttttcccaaggaaatag

SEQ ID NO: 238501 - DNA, 1443 bp, synthetic construct
  misc_feature 1..1443: note = Description of Artificial Sequence: Synthetic coding sequence
  source 1..1443: mol_type = other DNA
atggatgatctccaatctcagaatctgtcaatggatatgacagactctcccccagcactggcaaacaatcggctagaaaacgggatggcacaactcataaccaccgaagcatggaacatcaatagcacagacttagtggagggaagttctgctcccgaactcaacccaaatgggaacgccacctatgtaatgaccactcagggccctgtgcagcttccagtagttcttgaacagcacgtgtttcagcatctgaatagtcccctggttctaccacaggaagccccatgcagctctagcactattcataataacctgttccagggggcagaagaccctgaggcccagccccaactgctggatctccggatcccaagccagccgcaggaacctacgctaccttttgaggccgttctgcagaacctctttccttcccaagggacgcttggccctccaccctgccagccccctccagggtatgcccctgtgccaccccaaccctttagctcccctctttctccacttgttcctcccgcaactctgttggtcccatacccagtcattgtgccactgccggtgcccgttccaattccaatcccgatccccatgcctcagtcatctgagagcaagttcagctcgagcttccccaaaccaccctcctcattcggcctccatccttttaaaggaacccagacccccttagagaaggacgaactgaagcccttcgatattctgcagcctaaggagtattttcagcttagtaggcatacggtgatcaaaatgggaagtgaaaatgaagccctggatctgagcatgaagtccgtcccttggctaaaggccggtgaggttagccctcctatttttcaggaagatgcagcactggacctgtcagtggccgctcacaggaagtccgaacctccccctgaaaccctatatgacagcggggctagcgtggactctagtggtcacacggttatggagaagctgccatccggcatggagatctcgtttgcacctgccaccagccatgaagctcctgccatgatggattcccatataagctcttccgacgccgctactgaaatgctgtcacagcctaaccatccatcgggcgaagtcaaggccgaaaacaacatcgagatggtaggcgagtcccaggctgccaaagttatagtgtcagttgaagatgccgtgcccaccatcttttgcgggaaaattaagggactgtccggtgtgtcaactaagaacttctcctttaagcgggaagattctgtgctgcagggatacgatatcaacagccagggcgaagaatctatgggtaatgcggaacccttgcgaaaaccgatcaagaacaggagtatcaagctcaagaaagtcaatagtcaggagatacacatgcttcctatcaaaaaacaacggctggcaacattttttcccaggaaatag

SEQ ID NO: 238502 - DNA, 1593 bp, synthetic construct
  misc_feature 1..1593: note = Description of Artificial Sequence: Synthetic coding sequence
  source 1..1593: mol_type = other DNA
atggatgaccttcaaagccaaaatctctccatggacatgacggactccccccctgccttggctaataaccgcttagagaacggcatggcccagctcatcactacagaagcctggaacattaacagcaccgacctagtgaagaaggcactggtcaccgtgcctgccccatctatattaaatccacccgctgagtcgcaaagtggcatggctttaaaggttgcagcgactgttctacagcccctgtgcctgggggaatctccggtggtgatgccaattcacatgcaagtggagggcagttctgcacctgaacttaatcccaacggcaatgccacatatgtaatgacaacccaggggcctgtgcagttgcccgtggttctggaacagcacgtgttccagcacctcaactctccactcgtccttcctcaggaggcaccgtgttcatcctcaactatccacaataatctgttccaaggtgcagaggaccccgaagcccagcctcagctgcttgacctccgaatccctagtcagccccaggaacctacactacccttcgaagctgtattgcaaaatctgttccctagccagggtaccctgggtcccccaccttgccagccacctccagggtatgctcccgtccccccacagccctttagctcccccctgtcccccctcgtccccccagcgacactgctggtaccgtacccggtcatagtgcctctgccagtccctgtccccattccgattcccattcccatgccccagtcctcggagtccaaattcagttccagttttcctaaacctcccagttcctttggtcttcatccctttaagggcacacagacaccacttgagaaagacgagctaaagccctttgatatcttgcagcctaaagaatacttccaactcagtcgccataccgtgattaagatgggctctgagaatgaggcacttgatcttagtatgaagtctgtgccgtggctgaaggctggggaagtttctcccccaatcttccaggaggacgccgcactggatctgtcagtggctgctcaccggaagagcgaaccccctcctgaaactttgtacgacagcggcgcaagcgtcgactcgtccggtcacacagttatggaaaagctaccatctggaatggagatcagctttgccccagccaccagccacgaagccccagcgatgatggattctcacataagtagcagcgatgccgcaaccgaaatgctcagtcaacctaatcacccctcaggagaagttaaggccgagaacaacattgagatggttggagaatctcaggcagcaaaggttatcgtctcagtcgaggacgccgttcccaccatattttgcggaaaaatcaaagggctaagcggtgtgtcaaccaagaatttttcgttcaaaagagaggactcagttctacagggatatgacataaactcacagggggaggaatctatgggtaacgcagaacctctgcggaaaccgataaaaaatcgctcaataaagctcaagaaagtgaactcccaggaaattcacatgctgccgatcaagaaacaaagacttgcaaccttcttcccacggaagtag

SEQ ID NO: 238503 - DNA, 1593 bp, synthetic construct
  misc_feature 1..1593: note = Description of Artificial Sequence: Synthetic coding sequence
  source 1..1593: mol_type = other DNA
atggacgatcttcagtcacagaacctctcaatggacatgacagactcgccacccgctttagccaacaataggcttgagaacggtatggcacagctgattaccacagaggcctggaacattaacagtactgatctggtgaagaaagctctcgtgaccgtgcccgctccaagcatcttgaatcccccagctgagtctcaatccggtatggcccttaaggttgcagcgaccgttctgcagcctctttgcctcggcgaatcgcccgtggtcatgcctattcacatgcaagtggagggttcttcggcaccagagctaaatccaaatgggaacgctacttatgtcatgacaactcagggcccagtgcaactgccagtcgttctcgagcagcacgtgtttcagcacttaaatagccccctcgtgctcccccaggaagcaccctgctccagcagcacgatccacaataatcttttccagggtgcagaagatccagaggcacagccacagttactggacttaagaatcccctcccagccccaagagcccactctgccgtttgaggccgtgctgcagaacctgttcccttctcagggcactcttggaccacctccatgtcaacctccgcctggatacgccccagtgccccctcagcccttttcaagtcccttgtctcccctggtgccaccagcaacgctgctggtgccttaccccgtgatcgtgccactaccagtccctgttccaattcctattccaatccccatgccccaaagtagcgagtccaaattctcttccagcttcccaaagccccctagcagcttcggcttacacccatttaagggcacccagacacctcttgagaaggatgagttaaaaccattcgatatacttcagcctaaagaatattttcaactgtctagacacactgtaattaaaatggggtcagagaacgaggccctggatctttctatgaaatctgtgccatggctaaaggccggagaagtcagcccccctattttccaggaggatgccgctctggacctctccgtggcagctcatcgcaagtcagaaccacctcccgagaccctgtacgactcgggtgcctcagtagacagttccggccatacagtaatggagaagctgccttcaggaatggaaatcagcttcgccccagccacgtcacacgaagcaccagccatgatggattctcacatcagcagttccgatgctgccacagaaatgctgagtcagcccaatcacccctccggtgaagtgaaggccgagaataacatcgaaatggtcggagagtctcaggctgcaaaggtgattgtctcagttgaggacgccgtccctacaattttctgcggcaagatcaaggggctgtctggagtcagtacaaaaaatttttctttcaagcgcgaggatagcgtcttgcagggctacgacatcaatagccaaggggaggagtccatgggtaatgccgagccgctgcggaaacccattaaaaatcgctctataaaacttaagaaagtgaacagccaggagattcacatgcttcctatcaaaaagcaaagactagcgacattctttcctcgaaagtag

SEQ ID NO: 238504 - DNA, 885 bp, synthetic construct
  misc_feature 1..885: note = Description of Artificial Sequence: Synthetic coding sequence
  source 1..885: mol_type = other DNA
atgcagcctcggaggcagcgtctgcccgcaccctggtccggtccgagaggacctagaccgactgctcccctgctggcgcttctgctgttgctcgcacccgtggcagcccctgctggatctggggatccagacgacccaggtcagccccaggatgccggtgtccccaggcgcctcctgcagcaagccgctagagccgcactacatttttttaactttaggtcaggctcgccatcggccctgagggtccttgcggaagtgcaggagggtagagcctggattaacccgaaagagggatgcaaggtgcacgttgtgtttagtacggagaggtataatcctgagtctcttctgcaggagggagaggggagactggggaagtgctctgctcgcgttttttttaagaatcagaagccaaggcctactatcaatgtcacttgcaccagactgatcgaaaagaagaagcggcagcaagaagattacctgctgtataagcagatgaagcagttaaagaaccccctcgagattgtgagcatccccgataaccacggccatatcgacccctccctgcgcctgatctgggatctagccttcctggggagctcctacgtgatgtgggaaatgactactcaagtgtcccactactacttagcccagctaacctcagtgcggcagtggaagacaaatgatgacaccattgacttcgactacactgtgttactacatgaactttcaacccaagaaattattccatgtcgcatccaccttgtgtggtacccaggcaagccactaaaggttaaatatcattgccaggagctccaaacaccagaggaggcgtccggtactgaagagggctccgctgtcgttcctaccgaattatccaacttttag

SEQ ID NO: 238505 - DNA, 687 bp, synthetic construct
  misc_feature 1..687: note = Description of Artificial Sequence: Synthetic coding sequence
  source 1..687: mol_type = other DNA
atgcaaccacggagacagaggctgcccgctccctggagtggaccaagagggcctaggcctaccgccccacttctagccctgcttctgctgctggccccagtcgcagcaccggcaggatccggcgaccctgacgatcccggacaaccccaagatgccggagtccctcggagacttcttcagcaggccgctcgtgccgcactgcattttttcaatttcaggagtggatcaccctcggcgttgcgagtgttggctgaagtacaagaaggcagagcttggatcaaccccaaggaggggtgtaaagtgcacgtagtcttcagcacagaacggtacaatccggaatctcttctgcaggaaggggaaggcaggttgggcaagtgtagcgccagggtcttctttaaaaatcagaaacctaggccaacaataaacgtcacgtgcactcgcttgatcgaaaagaaaaagagacaacaggaggactacttgctttacaagcagatgaagcaattaaagaaccctttagagatcgtatcaattcccgataatcatgggcatatcgaccccagtctccgcttgatttgggatctggctttcctgggaagttcatacgtcatgtgggaaatgaccacgcaggtctctcactactacctggcgcagctgaccagcgtgaggcagtgggtgaggaagacctag

SEQ ID NO: 238506 - DNA, 1008 bp, synthetic construct
  misc_feature 1..1008: note = Description of Artificial Sequence: Synthetic coding sequence
  source 1..1008: mol_type = other DNA
atggtccgccgtgatcggctgcgcaggatgagggagtggtgggtgcaggtaggcttactggccgtccctttgcttgcagcttacctgcacattccaccaccccagctctcaccagccctgcacagctggaagtctagcggcaagttcttcacgtacaaaggcttaagaattttttatcaggattcagtgggcgtggtaggatccccagagatcgtcgttctgctgcacggatttcctacatcgtcttatgactggtacaagatttgggaaggactgaccttgaggttccatagagtgattgctttagactttctggggttcggcttttccgacaagccccgtcctcaccactatagcatattcgagcaggcctctattgtcgaagcactcctaagacatcttggtctacagaataggcgaataaatttgctgtcgcatgactacggcgatattgtcgcccaggaattactctatagatacaagcagaatcggtcagggagactgacaattaagagcctctgcttaagcaatggcggaatcttccccgaaacccaccggcctctactattacagaagttgctcaaagacggcggtgttctcagccccattctcacccggctgatgaacttcttcgtgtttagcaggggactgacacccgtgtttgggccatacactaggccaagcgaatctgaactttgggacatgtgggccggtattcggaacaatgatggcaacctggtcattgattctctgttgcagtacatcaatcaaaggaagaagttccgccgaagatgggtgggagctctggcgagcgtgaccatccccatccatttcatctacggccctcttgaccccgtgaacccatatccggagtttctcgagctgtatcggaagaccctgccgcgatcaacggtttccattctggacgatcacattagtcattatcctcagctggaggatccaatgggcttcttaaacgcgtatatgggcttcattaatagcttttag

SEQ ID NO: 238507 - DNA, 492 bp, synthetic construct
  misc_feature 1..492: note = Description of Artificial Sequence: Synthetic coding sequence
  source 1..492: mol_type = other DNA
atgcggaggctgctgattccactggcactgtggctaggcgctgtgggcgtcggcgtggccgaactaacagaggcccagcgtagaggactgcaggtcgccctggaggaattccacaaacaccccccagttcagtgggcctttcaggagacatcagttgagtctgccgtggacacgccctttcctgccggaatcttcgttaggttggaattcaagctgcagcaaactagctgccgaaagagagattggaaaaagcccgagtgtaaagtcagacccaatgggaggaagagaaaatgtctggcgtgcataaaattaggcagtgaggacaaagtgctgggccgactcgtccactgcccaattgaaacccaggtactaagagaggcagaggagcaccaggagactcagtgtctgcgggtgcagcgagccggagaggacccacattccttttacttcccaggacagttcgcattctcaaaagcgctgccacgttcttag

SEQ ID NO: 238508 - DNA, 492 bp, synthetic construct
  misc_feature 1..492: note = Description of Artificial Sequence: Synthetic coding sequence
  source 1..492: mol_type = other DNA
atgaggcggctccttatcccattagccctatggctgggtgctgtgggtgtcggcgtagccgaactgacagaggctcagaggcggggactgcaggttgccctcgaagagttccataagcaccctcctgtccagtgggcgttccaagagactagtgtggagtcagccgtcgataccccttttcccgcaggaatcttcgtaagattggagtttaagctccagcagacttcttgcaggaaacgcgactggaagaagcccgagtgtaaggtacggccaaacggtcgtaagagaaaatgcctcgcctgtatcaagcttgggtctgaggataaggtgctcggcagactggtgcattgtccaatcgaaacacaagtgctgcgcgaggctgaggagcaccaagagacacagtgcctacgagtgcagagagccggagaggatcctcatagcttctactttccaggacaattcgcattctccaaggccctcccgaggagttag

SEQ ID NO: 238509 - DNA, 495 bp, synthetic construct
  misc_feature 1..495: note = Description of Artificial Sequence: Synthetic coding sequence
  source 1..495: mol_type = other DNA
atggcctctccgcaccaggagccaaagccaggtgacttaatcgaaattttcaggctggggtacgaacattgggccctttatatcggggatggatatgtgatacacctagcccctcccagcgagtatcctggcgctggaagctcgagtgtatttagcgtgctgtctaattcagcagaagttaaaagggaaagactggaggatgttgttgggggatgctgctatcgcgtcaataattccctcgatcacgagtatcagccccgtcctgtggaagtcatcattagctccgcaaaggagatggtggggcagaagatgaaatatagcattgtgtccagaaactgtgaacatttcgtaacccaactccgctatggcaaatccagatgtaagcaggtcgaaaaggccaaggtggaagtaggtgtcgcaacagccctgggcattctggttgtcgctggatgttcgttcgccatccgccgttatcagaaaaaggccacggcgtag

SEQ ID NO: 238510 - DNA, 495 bp, synthetic construct
  misc_feature 1..495: note = Description of Artificial Sequence: Synthetic coding sequence
  source 1..495: mol_type = other DNA
atggggctcccagagcctaagcccaagccaggcgacctgatcgaaatcttcagactagggtacgaacactgggcactatacatcggcgacggctacgtgatccatctggccccaccttctgagtatccaggagccggtagcagttctgtgttcagcgtgttatcaaactctgcagaggtaaagagagagaggctcgaggacgttgtgggcggatgctgctatcgggtcaacaactcgctcgatcatgagtatcagcctcgccctgttgaggttatcatttctagcgctaaagagatggtgggtcagaaaatgaagtattctattgtatcacggaattgcgaacactttgtcacccagttgagatacgggaaaagccggtgcaaacaggtggagaaggctaaggttgaggtcggcgtggccactgcgctaggaatcctggttgtcgctggttgctccttcgccatacggagataccaaaaaaaagccactgcttag

SEQ ID NO: 238511 - DNA, 1389 bp, synthetic construct
  misc_feature 1..1389: note = Description of Artificial Sequence: Synthetic coding sequence
  source 1..1389: mol_type = other DNA
atggcttcaaatagcagcagctgtcctacacctgggggtgggcatctgaacggttacccggtgccgccttacgcctttttctttcctcccatgttgggaggacttagcccacccggagctctgactacactccagcaccagcttccagtgagcggatactccacaccctcaccagccactatcgagactcagtcctcctcctccgaggagatcgttccctcccctccatctccgccacctctccctcgtatatacaaaccctgtttcgtctgccaggataagtcttctggatatcactacggggtgagcgcctgtgaggggtgcaaaggattcttccgccgatcaatacaaaagaatatggtatacacttgccatcgggataaaaattgcatcattaataaggtcacccggaatcgatgccagtattgtcgactgcagaaatgcttcgaggtggggatgtctaaagagagcgttcgcaatgacagaaacaagaagaagaaggaagttcctaaacccgagtgctccgagagttacactttaactcctgaagtgggcgaacttattgagaaagtgaggaaggcccaccaggagaccttcccagcgttgtgccagctgggaaaatacacaaccaacaattcatccgagcagcgcgtttccctagatattgatctctgggataaatttagtgagctgtcaactaagtgcataatcaaaactgttgagttcgctaaacaacttccgggtttcaccaccctgactatcgccgatcagatcaccctcttgaaagcagcttgtttagacatcctgatcctcaggatatgtacccggtatacacccgaacaggataccatgacattttcagacggtctgacgctgaacaggacacagatgcacaatgcaggttttggacccctgaccgacctggtttttgccttcgccaatcagctgctgcctctagagatggatgacgcagagaccgggctgttgtccgctatatgcctcatttgtggagatcggcaggacctggagcaacccgatcgggtcgatatgctgcaggaacccctgctagaggctctcaaggtgtacgtgcggaagcgcaggcctagcaggccccatatgttcccaaagatgctgatgaagataaccgacttgcggtcgatttccgccaaaggggctgaacgagtcattactctgaaaatggagatccctgggtcaatgccccctttgatccaggagatgctcgagaattctgaaggcctggacactctatctggacagcccggaggcggtggacgagacggcggagggctagctccaccccctgggagttgtagtccttccttgtcgccgagtagcaatcgctcctccccggcaacgcattcaccttag

SEQ ID NO: 238512 - DNA, 1902 bp, synthetic construct
  misc_feature 1..1902: note = Description of Artificial Sequence: Synthetic coding sequence
  source 1..1902: mol_type = other DNA
atgtacgagtcggtggaggtgggagggcctacacccaacccattcctcgtggtggacttttataatcagaaccgcgcttgcctcctccccgagaagggactgccggctcctgggccttactccacgcccctgaggacccctctttggaacggaagtaatcactctatcgagacccagtcctcctcttccgaagagatcgtgccttcacctcctagtccacctcccctgcccaggatttataagccctgttttgtctgccaagacaaatcaagcgggtatcactacggagtaagcgcttgcgagggttgtaagggattttttaggcgatcgatccaaaaaaacatggtgtacacctgccacagggacaaaaattgtataataaacaaagtaactcggaacaggtgtcaatactgtcgcttgcaaaaatgcttcgaggtgggcatgagtaaggaatcagtgcgtaatgaccggaacaagaaaaaaaaggaggtgccaaagccagagtgcagcgagtcttataccctgacgccggaggtgggagaattgatagaatgcgccaaaagaaccagaaaaccatctctgccttcagcatcttgggcaaataccctgcgaaccacagctcagaacaacgttagcctgtggaccctgacaagtggcacctcatcggtgaatagccctaagtgtatcattaagacagtcgagttcgccaagcaactgcccggattcacaactctcaccatagccgatcagattaccctgttgaaagcagcatgtctagatatcctgatcctgaggatatgcacacgctatactccagagcaggataccatgacattctccgatggtcttactctcaatagaactcagatgcacaatgccggatttggccctcttacggatctggttttcgcattcgcgaatcagcttctgcccctggagatggacgatgccgaaacgggcctcctcagcgccatatgcctgatctgtggggaccgacaggacttggaacagccggatcgagtcgacatgcttcaggagcctctgcttgaagccctaaaagtctatgtgcggaagcggaggccctcaagaccacacatgttccccaagatgctaatgaaaatcactgatctgagaagcatttcggccaaaggagccgaacgcgtgataactctaaaaatggaaatccccggttcaatgcccccattgattcaggagatgctcgagaattctgaaggactggatactctgtctggccagcccggtggaggaggacgagacggagggggacttccgaggcaggctgcggtggcaccagccagcgcacctgccccaaccgaggcggcaaggcctcctaccccccgtgacagacccaggcacatggatacagcgctagcgctcagacccggtttcagcctgcctttctatagaccctgcgaccctgcaccagctctacccccacctgcgttgccgggaagtaccggagacttaccttggggtactggccgagaagaagcggcaacaccttggacggaggcctgggccctgtctggccttccagctccaacagcgtgggccgacgtgcgcggtcggggacaagaactgtccgaagctcccggtccgggaagccaggatggatcctggggaccgagggtgcatcaagacacacctctgcccagctcaccacacctgcaccaccagcaaactcctggcttggggtcaccgatcttgagaacacataaacctttgcttccatcatggggcaccagcaccagtcccctgccccgacttgtgacggagggggtgggccaggggagaggggtaccacctgttcataccctcccttaccagcctcaggtacttatcctcgcaggcttcgtgttcatcttaatcttcctcttctag

SEQ ID NO: 238513 - DNA, 1374 bp, synthetic construct
  misc_feature 1..1374: note = Description of Artificial Sequence: Synthetic coding sequence
  source 1..1374: mol_type = other DNA
atgtatgagtcagttgaggtgggcggacccacaccgaacccatttctggtggtggatttttataaccagaacagagcttgcttgctgccggagaaggggctccccgctccaggtccttattctacaccactgagaacacccctttggaacggatccaaccactccatcgagacacagtcctccagcagcgaagagatcgtgccgtcaccgccaagtccacccccattacctcgcatctacaagccctgtttcgtatgtcaagataaaagctctggctaccattacggagtttctgcatgcgaaggctgtaaagggtttttccgcaggtccatccagaaaaacatggtgtacacatgccaccgggacaaaaactgcattataaataaggtgaccaggaaccggtgccagtactgccgtctgcaaaaatgtttcgaggtgggaatgtctaaggagagcgttcgcaatgataggaataaaaagaagaaagaggtacctaaacccgaatgtagcgagtcctatacactcactccggaagtgggcgagctcatcgagaaggtgcgaaaggcgcaccaagagacgtttcctgctctgtgtcaattaggaaaatacactacaaacaatagctctgaacaacgcgtgtctctagatattgacctttgggacaaatttagtgaactgtcaaccaagtgcattatcaaaaccgtggagttcgcaaagcaactgccaggcttcaccacattaaccattgccgatcagattacactccttaaagccgcttgcttagatatacttattctgaggatctgcacacgttatacccctgagcaagatacaatgaccttcagcgacgggctgactctcaacaggacccagatgcacaatgcaggctttgggcctctgacggacctagtgtttgccttcgctaatcagttgctcccattggagatggacgacgcagagaccggacttctgtccgcaatttgcctgatctgcggcgaccgacaggacttagaacagccagaccgggtcgacatgctgcaagagccattactagaggcgctcaaggtttatgtgaggaaacgcagaccgtcccgacctcacatgttccctaaaatgctgatgaaaatcaccgatctgcggtccatatcggcaaaaggagccgaaagagtcatcactcttaagatggagattcccggttctatgccacccctgatacaggaaatgttagagaattccgagggtctcgatacactcagtggtcagccaggcggtgggggacgtgatgggggaggcctcgctccaccccctgggagttgctcaccatccctgtctccttcgagcaaccgtagtagtcctgccactcatagcccttag

SEQ ID NO: 238514 - DNA, 1437 bp, synthetic construct
  misc_feature 1..1437: note = Description of Artificial Sequence: Synthetic coding sequence
  source 1..1437: mol_type = other DNA
atgatgagtcagactatgacacaggctggagtgagctttcggcactcagtaagagctgcccagtgccatactcgggtgcccaacacatggcctcgcgctactcgcccatacgcatcatgcaggcggagtccgaggcttcgcggaagatggccgggaagtgctgggcagggtgccggaggtcgggctcccagagccggatggcgggctggggacgtgacagggtccgccatagaaacacagtcgagttcaagtgaagaaatcgtgcccagccctccatcccccccaccactgcccaggatctataaaccctgctttgtctgtcaggacaagtcctcaggttaccactacggggtgtccgcgtgcgagggctgcaagggattcttccggaggtcaatccagaagaatatggtttatacctgccatcgcgataagaactgtatcataaacaaggtcactaggaatcgatgtcagtattgccgtttacaaaaatgttttgaggtgggaatgtcaaaggagagcgtccggaacgaccggaacaagaaaaagaaggaggtgcccaagccggagtgctccgaatcctataccctgacaccggaagtgggcgaactcatcgaaaaggtgcggaaagcccaccaagagacctttccggctttgtgccaattgggtaagtacaccacaaacaattcttccgaacagagagtgagtctggacattgatctctgggacaagttcagtgagttgtctacgaaatgcattattaaaactgtggaatttgctaagcagctgcccggttttactacattgactatcgcagaccaaattaccctgttgaaggcagcctgtttggacatactgattctgcggatttgcactcgatatactcccgagcaggatacaatgaccttttcagatggcctcaccctgaatcgcacccagatgcacaatgccggatttggccctctgactgacctggtgttcgcctttgccaaccagctgctgccactagaaatggatgatgcagaaactggcctgctgtccgctatctgccttatttgcggagatcgccaggacttggagcagcctgatcgggtcgatatgcttcaggaaccgttacttgaagccttgaaagtgtatgtgaggaagcgacggcctagccggcctcacatgttcccgaaaatgctcatgaagatcactgatctgcgcagcatctcagctaagggagccgagcgggttatcactctaaaaatggaaattcctggatccatgccaccgcttatccaggagatgctggagaattcagaggggctggatacactctcagggcagccaggagggggtggaagagatgggggtggcttagcaccaccgcctgggagctgcagccctagtctatctccatcttctaaccgtagctctcccgcaacacacagtccttag

SEQ ID NO: 238515 - DNA, 1389 bp, synthetic construct
  misc_feature 1..1389: note = Description of Artificial Sequence: Synthetic coding sequence
  source 1..1389: mol_type = other DNA
atggccagcaattcttccagctgccccactccaggaggcggtcacctgaacggatatcccgtccccccatacgcgttcttcttcccacctatgctgggcggactgtcccctcccggtgcgctaacaaccctgcagcaccagcttccagtgtctggttactccaccccatcacctgccactattgaaactcagtcttcgagcagcgaggagatcgtgcctagtcctccaagtccacccccactgcccaggatctataagccatgttttgtgtgccaggacaaatcatccggctaccattatggagtgtccgcttgtgagggctgtaagggtttcttcaggagaagcattcagaaaaatatggtctatacatgccatagagacaagaattgtatcataaataaagttactcgcaatcggtgtcagtattgccgcctgcagaaatgcttcgaagtcgggatgagcaaggagtcagtccgaaatgatcgaaataagaagaagaaagaagtgccaaagccagagtgctcagagtcctacaccctgacccccgaggtgggtgagctaatcgaaaaggtgcgtaaagcgcaccaggaaacctttcctgcattatgtcaactggggaagtacacaactaacaactcctccgagcagcgcgtgagtcttgatattgacctatgggacaagtttagcgagctgtccaccaagtgtattatcaagaccgtagagttcgcaaaacagctccccggtttcacaacactcaccatcgccgaccagatcacactgcttaaagccgcatgcctggatatattgatcttacgcatctgtactcggtatacgcctgagcaggatactatgactttttctgacggactgaccctgaatcggacccagatgcataatgcaggctttggtccacttaccgacctggtgttcgcgtttgccaatcagctgctgcctcttgagatggatgacgcagaaaccgggcttctgagcgcaatttgcctgatatgcggagacaggcaggacctggaacagcccgacagagtggatatgctccaggaaccattgttagaggctctcaaagtgtacgtccggaaaaggcgcccttccagacctcatatgttccctaaaatgctcatgaagataaccgatttgcggtcaatttcagctaagggagccgagagagtaatcactcttaaaatggagattcccggatccatgcccccattaatccaggaaatgttggagaacagtgagggactggatacacttagcggccagcccggtggaggagggcgtgatggagggggtcttgcgcctccccctggtagctgctcaccatcactgtctccaagctcaaatcgttccagtccagccacccattccccatag

SEQ ID NO: 238516 - DNA, 1041 bp, synthetic construct
  misc_feature 1..1041: note = Description of Artificial Sequence: Synthetic coding sequence
  source 1..1041: mol_type = other DNA
atgggtcaagagatccttcccgcacgatctcccaccctgcggcttggctcgcctaccccccacctgcctcaggaactactgcgcgcatccccaaagggacccccaggacggttacaactgggagggctggctgtgcgtaatgaccgtaataaaaaaaaaaaggaggtgcccaagccagaatgctccgagagttacacccttaccccagaggttggagaactgatagaaaaggtccgaaaggcccaccaagagaccttccccgctctgtgtcagttaggcaagtataccaccaataactcatcagaacagcgagtcagcctggacatcgatctgtgggacaaattctcggagctgagcaccaaatgcatcattaagaccgtggagtttgcaaagcagttgccagggtttaccactctgactattgccgatcagatcacgttattgaaggcagcgtgcttagacatcctgattttgaggatttgcacacgttacactcccgaacaggacacgatgactttctccgatggattgactctaaatcggacacagatgcataatgccggatttggccctcttacagatcttgtgttcgcttttgccaatcagctgctcccacttgagatggacgatgcagagaccggtcttttaagcgccatctgtctgatttgcggcgaccggcaggatctggagcagccggaccgggtcgacatgctacaggagccactgttggaggccctgaaggtctacgtacgaaaacgtagaccctctcgcccacatatgttccccaaaatgttaatgaaaatcaccgacttgaggagcatatccgctaaaggtgcggagagggtcattaccctgaaaatggaaatcccgggaagcatgccaccactaattcaggagatgctggagaacagtgaaggtctggatacattatcaggacagccaggcggaggaggcagagatggaggtggactcgcgccaccacccggaagctgtagtccctccctgtccccttcatccaatagatccagtcccgctacttag

SEQ ID NO: 238517 - DNA, 1098 bp, synthetic construct
  misc_feature 1..1098: note = Description of Artificial Sequence: Synthetic coding sequence
  source 1..1098: mol_type = other DNA
atggcctctaattcctcctcttgtcctacaccaggtgggggtcacttaaacggatacccagtgcccccttatgcatttttttttcctccaatgttggggggtctgagtcccccaggagcattgaccactttgcagcatcagctgcccgtttctgggtactccactccttctccagctaccgtgaggaatgatagaaataagaagaaaaaggaagtgcctaagcctgaatgctcagagagctacactctgacacctgaagtgggtgaactgatagagaaagtcagaaaagctcaccaggagacatttcctgctctgtgccagctgggtaagtatactacgaataactcaagcgagcaacgcgtgtctttggatatcgacctctgggataagttttccgagctcagtaccaaatgtattataaagactgtggagtttgcaaaacagttgcctgggttcactaccctgactattgcggaccagatcacattactcaaagccgcatgcttagacatcctcatcctgagaatctgcacaagatatacccctgaacaagatacaatgaccttctctgatggcctcacactgaaccggacacagatgcacaacgctgggttcggtcctctcacggatctggtgtttgcattcgcaaaccaattgttaccacttgagatggacgatgcggagaccgggctgctgagtgccatttgcttgatttgtggggatcgccaggacctcgagcaacccgaccgggtggacatgttgcaagagcccctcctcgaagccctgaaggtatatgttcgtaagagacgaccatcccggcctcatatgttccctaaaatgttaatgaagatcaccgacttacgtagcatcagtgctaaaggtgccgaaagagttatcacgctgaaaatggagattcctggatccatgcctcctctaattcaggagatgctcgagaactccgaaggcctggacacactttctgggcagccaggcggaggaggtcgcgatgggggaggcctcgcccctcctcctggctcgtgctcaccctccctgtctccttcaagcaatagaagctcccccgctacgcacagtccatag

SEQ ID NO: 238518 - DNA, 1149 bp, synthetic construct
  misc_feature 1..1149: note = Description of Artificial Sequence: Synthetic coding sequence
  source 1..1149: mol_type = other DNA
atggtgccaagttccccaagcccgccacccccacctcgcgtgtacaaaccttgctttgtgtgcaatgataagtccagcggctaccactacggagtgtcctcatgcgagggatgtaagggtttctttcgcagaagcattcagaagaatatggtgtacacatgtcatcgcgacaaaaactgcatcattaataaagtcactagaaaccggtgccaatactgtcgtcttcagaaatgcttcgaagtcgggatgtctaaggaagcagtgcggaatgaccgaaacaaaaaaaagaaagaagtcaaagaagaaggaagccctgatagctatgagctgagccctcagctggaggaactgatcacaaaggtgagcaaggcgcaccaggaaaccttcccatctctgtgccagctgggaaagtacaccactaatagtagcgcggaccatagggtgcagttagacctgggcttatgggacaagttctctgagctagcaactaagtgtattatcaagattgtcgagttcgctaaaaggttacccggatttacaggtctatccattgccgatcaaatcacactgctcaaggccgcttgtctggacatcctgatgctacgtatctgtacccgatatacacccgagcaggacacaatgacctttagtgacggactaactctgaatagaacccaaatgcacaacgccggtttcgggcctttaaccgatctggtgttcgcgttcgctggacagcttttacctctcgagatggatgatacggagaccggactgctgtccgcaatttgcctgatttgcggcgaccgcatggatctggaagagccggaaaaagtggataagctgcaggagccattgctcgaggcattgagactgtatgcacgaaggcgcaggccatcacagccatatatgtttccgcgaatgttgatgaaaatcacggacctaaggggcatctcaaccaaaggtgccgaaagagctatcacgctgaagatggagattccgggtccaatgccacccctgatccgggaaatgctggagaatcctgaaatgtttgaggacgacagctcccagcccggaccacaccctaacgcgtccagtgaggacgaggtccctggaggccaaggaaaaggcggactaaagtcacctgcctag

SEQ ID NO: 238519 - DNA, 1332 bp, synthetic construct
  misc_feature 1..1332: note = Description of Artificial Sequence: Synthetic coding sequence
  source 1..1332: mol_type = other DNA
atgtacgactgtatggagactttcgctcctggaccacgccgactgtacggcgcagcaggccctggcgctgggctactccgcagagcgactggtggttcttgtttcgcaggtctggaaagttttgcttggccacagcccgcaagtctgcagtcagtagaaacgcagtccaccagctctgaggaaatggttccaagctctccttcacctcccccacctccaagggtgtacaagccctgctttgtctgcaacgacaaatcaagcggatatcattatggcgtttcttcttgtgaaggctgtaagggtttctttcgtcgaagcatacagaagaacatggtgtatacatgtcatcgggataaaaattgcataatcaacaaagtaacacgaaatcgctgccagtattgtaggctgcagaaatgttttgaagtggggatgagcaaggaagctgtacgcaatgacagaaataaaaagaagaaagaagtcaaggaggagggcagtccagacagctatgagctgagtcctcagctagaggaacttatcactaaggtttcgaaggctcatcaggaaaccttcccatccctgtgccagctggggaaatataccactaatagtagcgctgaccacagggtgcagctcgatctgggcctgtgggataagttttctgagctggctacaaagtgcattataaaaattgtggagttcgctaaacgcctcccaggattcacaggattaagtattgccgatcagattactctgctgaaagccgcttgcctggacatcctgatgttgcgcatctgtacacggtatacccccgaacaggatacaatgaccttttctgatggacttacactgaaccggactcaaatgcataacgcaggcttcgggccactgacagatcttgtcttcgcgttcgctgggcaactcttaccactggaaatggacgacacggaaacaggtctgctgtcagcgatttgcctgatctgcggcgacaggatggacctcgaggagccagaaaaggtggacaagctccaggaaccacttctggaggccttgcgcctgtacgcacggagaagaaggcctagccaaccttacatgttccccaggatgctcatgaagataactgacctgcgcggtatctccaccaaaggcgctgagagggctattaccttgaaaatggaaataccgggacctatgcccccactgataagagagatgttggagaatcctgaaatgtttgaggacgatagttcccagccaggaccacatcccaatgcctcaagcgaagatgaggtgcctggcggacagggcaaaggtgggttgaagtcacctgcctag

SEQ ID NO: 238520 - DNA, 1365 bp, synthetic construct
  misc_feature 1..1365: note = Description of Artificial Sequence: Synthetic coding sequence
  source 1..1365: mol_type = other DNA
atggctacgaacaaggaaagactgttcgctgcaggcgcactgggcccagggtcaggttatccaggagctgggttcccgtttgcgtttccaggcgcactaaggggatcccctccatttgaaatgctgagcccatcttttagaggtcttggccagcccgatctccctaaagagatggcgtccctatccgtggaaacacagtctacgtcaagcgaggaaatggtccccagctccccatcacctccgcctcccccaagggtttataagccttgcttcgtatgcaatgataagagttctggctaccactacggggtgagttcctgtgaaggctgtaaaggcttcttccgacggtctatccagaaaaacatggtttacacttgccatcgtgacaaaaactgtatcattaataaggtgaccagaaacagatgccagtactgccggctacagaagtgcttcgaggtgggaatgtccaaggaagccgttaggaacgacaggaacaagaaaaaaaaagaagtgaaagaggaaggcagccctgattcatatgagctgtccccacagctggaggagttaatcactaaagtaagcaaagctcatcaggagacattccctagcctctgtcagctgggcaagtatacaaccaatagcagtgccgaccatcgagttcagttggacttgggcttgtgggataaatttagcgagctggctacaaagtgcatcataaaaatcgtggagttcgcgaagcgcctgcctgggtttacaggtctttccatcgcagatcagatcacactgctgaaggccgcttgcttggacattctgatgctcagaatctgtacacgatatacccctgaacaggacactatgaccttttcagacggtcttactcttaatagaacccagatgcataatgcaggctttggcccactaacagaccttgtatttgctttcgcaggacagctcctccctttggagatggatgacaccgagactgggctgttgtccgccatctgcttaatctgcggcgataggatggatctggaagaacccgagaaggttgacaagcttcaagaacccctgctggaagctcttcgcctgtatgctagacgcaggcgaccatctcagccctacatgtttcccaggatgttgatgaagatcacagacctgcggggaatttctacaaaaggggcagagcgtgcaattacgttaaaaatggaaattcccggacctatgccacccctgattagggaaatgctggagaatccagaaatgtttgaggatgactcatcccagccagggcctcatcctaacgcatcaagcgaggatgaggtgcctggaggccaggggaaaggaggtttaaaatcccccgcatag

SEQ ID NO: 238521 - DNA, 1365 bp, synthetic construct
  misc_feature 1..1365: note = Description of Artificial Sequence: Synthetic coding sequence
  source 1..1365: mol_type = other DNA
atggcaacaaataaagagcgactcttcgccgctggcgctctggggccaggaagcggatatcctggtgctggcttcccatttgccttccctggggctctcagaggatccccaccattcgaaatgctgagccccagtttccgaggattgggccagcctgatcttcctaaagaaatggcttccctgtctgtagagactcagtcaacatcgtctgaagagatggtgccatcatctcccagcccaccacctcctcccagggtgtacaagccctgcttcgtctgcaacgacaaatcctctggctaccactatggcgtttcttcctgtgaggggtgtaagggcttttttagacggagcatccagaaaaacatggtctatacctgccacagagacaagaactgtatcattaataaagttacgagaaatcgctgccagtactgcagacttcagaaatgctttgaggtagggatgtccaaagaggctgtcaggaacgaccgtaacaaaaagaaaaaggaggtgaaggaagaagggagtcccgactcttatgagctctcgccccaactggaggagctcataactaaagtcagcaaagcacaccaggagacatttccaagcttgtgtcagctcggaaagtataccaccaactctagtgcggatcatcgggtgcagctggacctcgggctatgggacaagtttagtgagttagcaacaaagtgcatcataaagattgtcgaatttgcgaaacggctcccagggttcacaggccttagtatagcagaccaaattactctcctgaaggcagcatgccttgacatactcatgctaaggatatgtactcggtacaccccagagcaagacaccatgacgttttccgatgggctaacattgaaccggacgcagatgcacaacgctggcttcgggccactgaccgatctagttttcgcgttcgctggccagcttctgccactggaaatggatgacaccgaaaccgggttactgagcgccatctgtcttatatgcggtgatagaatggacctggaagaaccagagaaagtagataagctgcaagagcctctgctggaagctctgcggctctacgctaggaggaggcgacctagtcagccctatatgttcccaagaatgctaatgaagatcactgacctgcgcggtatatctaccaaaggagctgaacgggctatcacattaaaaatggaaattcctggccctatgccgcctctcatacgcgaaatgctggagaacccagagatgttcgaagacgattctagccagcccggaccccatccaaatgccagttcagaggacgaagtgcctgggggacagggtaagggcggacttaagagccccgcttag

SEQ ID NO: 238522 - DNA, 306 bp, synthetic construct
  misc_feature 1..306: note = Description of Artificial Sequence: Synthetic coding sequence
  source 1..306: mol_type = other DNA
caccaccaggacgagtttgccaagcggctgccgggattcacaggcctctcaatagccgaccagatcaccctgctaaaggcagcttgcctggatatcctgatgttacgaatctgtacccggtatacgccagaacaggataccatgacgttctctgatggactgacactgaaccgcacccaaatgcataacgccggtttcggcccactcaccgacctcgtgtttgcctttgctggccaacttctgccactggaaatggacgacacagaaactggactgctgagtgctatttgtctgatttgtggctag

SEQ ID NO: 238523 - DNA, 1299 bp, synthetic construct
  misc_feature 1..1299: note = Description of Artificial Sequence: Synthetic coding sequence
  source 1..1299: mol_type = other DNA
atgctggcattgcctctgcctccctgctggtccggtgcccctccaggcgaggagggtgaaagcgccgctgggccatggtgcttccagcaccccgtgagccttcaagcgggtagtaggtgtaccacagtgtggaagcgcttgcccagggtgcgcgacggctgtaccggtaggccaggcccaggcccagcttgttgcgccgaaccacccgctgctccggtgtcgccggatctgaacctgttacccggacggaaccccccagcctgcaacggattcttcaggcgatccatacaaaagaatatggtgtacacatgtcacagggacaagaattgcatcattaataaggtgacccggaacagatgtcagtattgccggctgcagaagtgctttgaggtcgggatgagtaaggaagctgtcagaaatgatcgaaacaagaaaaaaaaggaggttaaggaggaaggtagtccggactcctacgagctgtccccccagctcgaagaacttatcactaaagtaagcaaggcccaccaggagaccttccctagcttatgccagctgggaaagtataccacaaattcatctgctgaccacagggtgcagcttgatctcggattgtgggataagtttagtgagttggctactaagtgtattatcaaaattgtggaatttgcaaagagactccccggattcacgggactgtctatcgccgatcagatcacactcctgaaggctgcctgtttggatatcttaatgctgcgaatttgcacacgctacacacccgagcaggacaccatgacattcagcgacggacttactttgaacagaacccagatgcacaatgcaggctttggcccactgacggatctcgttttcgccttcgcgggacaactactccccttggaaatggacgataccgaaacagggctgctttctgcaatttgcttgatatgcggcgatagaatggacctcgaggagccggagaaggtggacaaattacaggagccactcttggaggccctccgactgtacgctagacgcaggagaccatcccagccctatatgttccctagaatgctcatgaagattaccgacctgcgtggcatctctaccaagggagccgaacgggcaataacccttaaaatggaaatccccggtccaatgcctcctttgattagggagatgctggaaaacccagagatgttcgaagatgactcttcccagcctggtccacaccccaacgcctccagtgaggatgaggttcccggtggtcaaggaaagggcggactgaagtcacccgcatag

SEQ ID NO: 238524 - DNA, 1389 bp, synthetic construct
  misc_feature 1..1389: note = Description of Artificial Sequence: Synthetic coding sequence
  source 1..1389: mol_type = other DNA
atggataccaagcactttctacccctggatttcagtacccaggtgaatagctctctaacctccccaactggacgcggatccatggcagccccttcgttgcacccctcactaggtcctggcatcggttcacccggacagttgcacagcccgataagcaccctctcatcccctatcaacgggatggggccaccgttctccgtcatctccagccctatgggccctcacagcatgagtgtaccaacaacgcctactcttggcttctccacaggaagcccccagctttcctcgccaatgaaccctgtgagttcatcggaggatattaaacccccactggggttgaatggggtccttaaagtacccgcacaccccagcggtaatatggccagttttacaaagcatatttgcgccatctgcggtgataggtcatcaggcaaacattatggagtttatagctgcgagggctgtaaaggcttctttaaacgcacagttcgcaaagatctaacttatacatgtcgggacaacaaggattgcttgatcgacaagcgacagcgtaatcgctgtcaatactgcagataccagaagtgtctagcgatggggatgaagcgggaggctgtgcaggaggaaaggcagcgtggcaaagatcggaatgagaatgaggtggaatccaccagttctgctaacgaagacatgcccgtcgagaggatcctagaggccgaactagcagttgagcctaagactgaaacctacgttgaggcgaatatgggtctgaatccatcttctccgaatgatccagtgactaacatctgccaggcagcagataagcagctgtttacactggtcgaatgggccaagcgcattccacacttctccgaacttcctctggacgaccaggtgatccttcttagagcaggctggaacgaacttctgattgcttcctttagtcatcgctctattgcggtcaaggatgggatcctgctggctaccggtctgcatgtgcaccgaaatagtgcacacagcgccggtgtcggcgctattttcgaccgcgtgttaaccgaactggtgtcgaagatgagagatatgcaaatggacaagactgagttaggatgcctccgcgcaatcgtcctgttcaatcccgattccaaagggctgagcaatccagccgaagtggaggccctaagggaaaaggtttatgccagcctggaagcctactgcaaacacaaataccccgagcagcctgggaggtttgccaagttactgcttaggctgcctgccctcagaagcatcggcctcaagtgtttggagcatctgtttttttttaagctaataggcgatacccccatcgatacgtttctgatggagatgctagaagcaccacaccagatgacatag

SEQ ID NO: 238525 - DNA, 1098 bp, synthetic construct
  misc_feature 1..1098: note = Description of Artificial Sequence: Synthetic coding sequence
  source 1..1098: mol_type = other DNA
atgaacccggtaagtagctcagaggacataaagcctccactggggctcaacggagtactcaaggtccctgctcatccatccgggaacatggcctctttcaccaaacatatttgcgccatctgtggtgaccggtcgtcaggcaaacactatggcgtttactcctgcgaaggctgtaagggatttttcaagaggactgttagaaaggatcttacgtacacttgtcgtgacaacaaggactgcctgattgacaaacgtcaacgaaataggtgccagtactgcagatatcagaagtgcctagcaatgggcatgaagcgcgaggccgtgcaggaagaacggcagcgtggaaaagaccgcaatgagaacgaggttgagtccactagctcggcaaatgaagatatgccagttgagaggatcctggaagccgagcttgccgttgagcctaagacagagacctatgtggaagccaatatgggcttaaatccttcttcacctaacgatcccgtgacgaacatatgccaggcggctgacaagcaactgttcacattggtcgaatgggccaagagaattccacattttagcgaactccctctggacgatcaggtgatacttctgagggcaggttggaatgaattgctgatagcatccttcagccacaggagtatagcagtgaaggatggcatactgttggccacaggtctgcatgtgcaccgcaacagcgcgcattccgcaggcgtgggggcaattttcgacagggtgctgactgagttggtgtccaagatgagagacatgcaaatggataaaaccgaactcggctgcttacgagctatcgttctctttaatcctgacagcaaaggactctctaaccccgctgaagtggaggcgttacgtgaaaaggtatacgcatccttggaagcctactgcaagcacaagtaccctgaacaacctggaagattcgctaaactacttctgcgtctccctgccctaaggagtatcgggctcaagtgtctcgagcatctgttcttttttaagctgatcggagacactcccatcgatacattcctaatggagatgctcgaggcccctcatcaaatgacttag

SEQ ID NO: 238526 - DNA, 1602 bp, synthetic construct
  misc_feature 1..1602: note = Description of Artificial Sequence: Synthetic coding sequence
  source 1..1602: mol_type = other DNA
atgagctgggccgcaagacccccatttctgccacagcggcacgccgcaggccaatgtggccctgtgggggtccgcaaggagatgcactgtggagtggcatcccgttggaggcgccgtagaccctggttggatcccgctgccgctgccgcagctgcagtggccggaggcgaacagcagactcctgagcctgagcccggagaggccggtcgcgacggcatgggagatagcggtcgggattcaaggtccccagactcttcaagccccaacccgctccctcaaggggtccctccgccttctcccccaggtcctccgcttccccctagcaccgcaccttcattgggcggaagtggggcacctcctccccctcctatgccacctcccccactggggtccccttttcccgtcatcagcagcagtatgggaagtcctgggctgccgcctcccgcaccaccaggtttttcaggtcccgtctcctcccctcagattaattccaccgtgtcccttccaggagggggatccggacctcctgaggatgtgaagcccccagtgctaggggtaaggggcctccactgcccgcctcccccaggtggcccaggggcaggaaagcgactgtgcgctatatgcggggacagatcctcggggaagcactatggtgtgtactcatgcgagggatgcaaagggttttttaaacgcacgatcagaaaggacctgacctacagctgccgggacaataaagattgtaccgtcgacaagcgccaaaggaacagatgtcagtactgcagataccagaaatgcctggctacagggatgaagagagaagccgtccaggaggagaggcagcgcggaaaagacaaggatggggatggagagggagccggtggggcaccggaggagatgccagtggatcgaattctagaggccgagctcgctgtagagcagaagtccgatcagggtgtcgaaggcccaggaggcacaggaggttctggttcctctcccaacgacccagtgactaatatatgtcaggctgccgataagcaactctttacattggtggaatgggccaagaggatccctcacttctcatctcttcccctggatgatcaagttattctgctgcgcgcaggctggaatgagctgcttattgcctctttcagccataggagcatcgatgtaagagatgggattctgctcgccaccggattacatgttcacaggaactccgcccattccgcaggggtgggggctattttcgacagggtcctcacagagctcgtcagtaaaatgcgagatatgagaatggacaagaccgaactgggctgcctgcgagcgatcattctgttcaaccctgacgccaaagggctctcaaatcctagcgaggtggaggtgctccgcgaaaaggtttatgcttccctggaaacttattgtaaacagaaataccctgaacagcaagggaggttcgccaagttgctgttgaggctacccgcactgcggtctattggtcttaaatgtttggagcatctgttcttcttcaagcttatcggggatactccaatagacactttcttgatggaaatgctggaagctcctcatcagctggcctag

SEQ ID NO: 238527 - DNA, 1614 bp, synthetic construct
  misc_feature 1..1614: note = Description of Artificial Sequence: Synthetic coding sequence
  source 1..1614: mol_type = other DNA
atgagctgggctgccagacctccatttctgccccagagacatgctgcagggcagtgtggcccagtcggcgtgcggaaggaaatgcattgcggagtagcgtcgaggtggcggcgacgacgcccatggctagaccctgccgcagcagcggcagctgccgtcgccggtggggagcaacagaccccagaacctgaaccaggggaggccggacgggacggaatgggcgactccggaagggactccagatccccagattctagttctcctaaccctctaccgcagggggtaccccctccatccccccctgggccacctcttcctccgtccactgccccatctctcggtggaagtggggctccgccaccacccccaatgcctccccctcccctgggaagtccgtttcccgtcatctcttcttccatgggaagtcctggtctcccacctcccgctcctcctggattcagcgggccagtgagcagtccacagattaatagtaccgtcagtctgcctggaggcggaagtgggcctcccgaggatgtgaaacccccagtgttaggcgtgagaggccttcattgcccgcctcctccagggggtcccggtgccggtaaacgtctatgcgcaatctgcggcgataggtcttctggtaagcattacggggtgtacagctgcgaagggtgcaagggcttcttcaaacggaccatccgcaaggatctgacctactcctgtagagacaacaaggactgcacagtggataagcggcaacgaaaccgctgccagtactgcagataccagaagtgccttgcaacagggatgaaacgggaggcagtgcaggaagaacgacagcggggaaaagataaggatggagatggagaaggggctggcggagctccagaggaaatgcctgtagatagaatactggaggcagagctggcagtagagcagaagagcgaccagggagttgagggcccagggggaaccggagggagtggttcgtctcctaatgaccctgttacaaacatatgccaagcagcagataagcagttatttaccctggtagaatgggcaaagcgaatacctcatttctcaagcctaccgctcgatgatcaggtcattctcctgagagctggttggaatgagctgctcatcgcatccttctctcatcgaagtattgatgtgcgggatggaattctgttggctaccggcctccacgtgcataggaacagcgcccatagcgccggagttggagccatctttgacagatcattatcacgtgtgctcaccgaactggtctcaaaaatgcgggatatgcgcatggacaagacggagctagggtgtctacgcgcaatcattctctttaacccagacgccaaaggactaagcaatccatccgaggtggaggtactgagggagaaagtttatgcaagtctggaaacctactgtaagcaaaagtacccagagcaacagggcaggtttgcaaaactgctcctgcgcttgccagcactccgctcaattgggttaaagtgcctggagcacctgttttttttcaagttaattggtgatacgccaatcgacactttcttgatggagatgctggaagctccccatcagctcgcttag

SEQ ID NO: 238528 - DNA, 1614 bp, synthetic construct
  misc_feature 1..1614: note = Description of Artificial Sequence: Synthetic coding sequence
  source 1..1614: mol_type = other DNA
atgtcttgggccgctagaccgcctttcctcccgcaaaggcatgccgcaggtcaatgtggccctgttggagtccgcaaagagatgcattgtggcgtcgctagtcgttggagacggagacggccttggctggatcctgctgcagcagccgctgccgctgtcgccggaggcgagcagcaaacgcctgagcctgaaccaggagaggctggcagagacggaatgggggattcaggcagagacagccgctctccagacagctcctccccaaatcctctcccacaaggcgtgcctcccccatctccaccagggccacccctgcctccaagtaccgctcctagtttagggggatccggtgcacctccccctccccctatgcctcccccacccttaggcagtcctttccccgtgatttctagctcgatgggctcaccaggactaccaccccctgcgcctccgggttttagcggcccagtgagttctccgcagatcaacagcacagtttcactgcctggtgggggatccgggcctccggaggatgtaaagcccccagtgttgggtgttaggggcctccattgccccccaccacccggaggcccaggcgcagggaaacgactgtgcgccatctgcggagatagatcgtcaggcaagcattacggcgtttattcgtgtgaaggctgtaagggttttttcaagaggacaattcgcaaggatcttacgtactcttgtcgagacaacaaggattgcacggtcgataagagacagcgcaacagatgtcagtactgcaggtaccagaagtgcttagccaccgggatgaagagggaagccgtccaggaggagcgtcagcgaggcaaggacaaggatggagacggcgaaggcgctggtggagccccagaggagatgcccgtggatcggattttagaagctgagctggcagtggagcagaaatcagatcagggcgtggagggccctgggggtacagggggaagcgggtcttctcccaatgatcctgttactaacatttgccaggccgctgacaagcagctatttacgttagtagaatgggccaagaggattcctcacttttcttcgttgcccctcgatgaccaggttatacttctcagggctggatggaacgagctgctcattgcttccttcagccacaggagcatcgacgtaagggatggtatcctcctcgctacgggtttgcacgtgcaccgaaacagtgctcattcggctggcgtcggggctatcttcgaccgcagcctctctagggtgctgacagagctggtgtcaaagatgcgggatatgcggatggacaaaacagagttggggtgtctgagggctatcatactgtttaatcccgacgccaaaggtctgtctaacccttccgaggtcgaggttctccgcgaaaaggtgtacgcaagtcttgaaacatactgtaagcagaagtaccctgagcagcagggcaggtttgccaagctgctgctccgcctccctgcactgaggagtattgggctaaagtgcctcgaacacctgtttttcttcaaacttatcggggacactcccatcgatacttttctcatggaaatgctagaggccccacaccagcttgcttag

SEQ ID NO: 238529 - DNA, 1602 bp, synthetic construct
  misc_feature 1..1602: note = Description of Artificial Sequence: Synthetic coding sequence
  source 1..1602: mol_type = other DNA
atgtcctgggccgcaaggcctccatttctccctcagaggcatgcggcaggccagtgtggtccagtaggcgtaagaaaagagatgcattgcggtgtcgcctccaggtggagacggaggagaccctggctggacccagccgcagcagcggctgccgcagttgccggaggagaacaacagactccagaacctgaacctggcgaggccggacgtgatgggatgggagacagcggacgggactcgcggtctcccgatagcagctcacccaatcccttaccccagggtgtgcctccaccaagccctccgggaccccctctgcctccatctaccgccccatcactcgggggatcaggggctccccctccccctccaatgcccccacctcctcttggctcgccattccccgtcatttccagtagcatgggaagccctgggttaccacctcctgcaccccctggatttagcgggcctgtgtcaagccctcagatcaactcaaccgtgtcccttcctggcggaggatctgggccacccgaggacgtgaaacctccagttctcggggtcagggggttgcattgccccccacccccaggaggacctggtgccggaaaaaggctatgtgcgatctgcggtgatcgatcatctggcaagcactatggggtgtactcctgtgagggctgcaagggcttttttaagagaacgatacggaaggacctgacctattcctgtcgcgacaataaagattgcacagttgacaaaagacaacggaatcggtgccaatattgcaggtaccaaaagtgcctggcaactggcatgaagagagaggctgtccaggaggaacgccagagagggaaggacaaggatggagatggggagggcgcaggcggagcacccgaggagatgccggtggatcgaattcttgaagccgagcttgcagtggagcagaaatcagatcagggtgtagagggccctggagggacaggtgggtcagggtcatctccaaatgatcccgtcaccaatatttgtcaggccgcagacaagcagctgttcacactcgtggagtgggcaaagcgcattccacacttttcctcacttcctctggacgatcaagtgattctactcagggcaggatggaatgaactgctaattgcgtcttttagccaccgctctatcgatgttagagacggaatccttttggccactggcctgcacgtgcaccgaaattctgctcactctgctggcgtgggtgccatcttcgaccgggtcctcactgaacttgtgtctaaaatgcgagacatgagaatggataagactgaactgggttgtctgcgagcaattatacttttcaacccggacgccaaggggttaagcaatccgtccgaagtggaggtcttgagggaaaaagtgtacgccagtctcgagacttattgcaaacagaagtatcctgagcagcaaggacgattcgccaaactgctcctgaggctgccagccctgcggtctataggactcaagtgtctcgagcacttgttcttttttaaactgattggggatacccccatagacacatttctgatggagatgttggaagcaccccatcagttagcgtag

SEQ ID NO: 238530 - DNA, 861 bp, synthetic construct
  misc_feature 1..861: note = Description of Artificial Sequence: Synthetic coding sequence
  source 1..861: mol_type = other DNA
atgccccagggaagcgttggtcgatggggctgcgaaaagaagtgtatagtgggctccagaccaggcggtggaggcgacgggccaggatggataccacagagaagacggcgtcggcgatggcaggcagagaataacaaacccagaagtagaagccaaggaaggctggacggcactgggtgggccacggccggtgggattaacagcactgtttcactcccagggggaggttccggaccacctgaagacgtgaaaccacccgtgctgggggtaaggggactacactgtccgcctcctcccggaggcccaggcgctggaaagaggctatgcgctatctgtggtgatcggtccagcgggaaacactacggagtgtactcctgtgaggggtgcaaggggttctttaaaaggactatccgcaaagacctcacatactcctgtcgcgataataaggactgcacagtggataagaggcagcgcaataggtgccagtattgccgctaccaaaaatgcctggctaccggaatgaagcgtgaggctgtccaggaggaacgccagcgcggaaaggacaaggatggggacggagaaggagccggaggtgcaccggaagagatgccggtggaccggattctggaggcggaactcgccgtggagcaaaaatccgatcagggcgtcgaagggcctggtggcaccggcggaagtgggtcttcagtctccgtgggcgtaaacccattaagcttcgtgatgggcgttgggggagggtccctgggtctcttttacattcctagcccttcctttccccttattacttttctgacccttttaggcactggaggcgcagcaaagcaaggtctgtctaatatctag

SEQ ID NO: 238531 - DNA, 1602 bp, synthetic construct
  misc_feature 1..1602: note = Description of Artificial Sequence: Synthetic coding sequence
  source 1..1602: mol_type = other DNA
atgagctgggcagcaagacccccattcctacctcaaaggcatgccgctggtcaatgcggtccagtgggcgttagaaaggaaatgcattgtggtgtggcctccaggtggcggaggagaagaccttggttggacccagctgcagccgctgcagcagcagtggccggaggtgaacaacagactcctgagccggaaccgggagaggctgggagggatgggatgggggactccgggcgtgactcccgatcccccgactcaagttccccgaacccgctcccccagggggtcccgccaccttcgccacctgggccaccactgcccccatctaccgcaccttcactgggtggctctggcgcaccacctccacctcccatgcccccaccgcctctagggtccccgttccccgtcattagcagttcaatggggtcaccagggctgccccctccagctcctcccggattctcaggacctgttagtagcccgcaaatcaatagtactgtcagcttacccggaggcggttccgggcctcccgaagatgttaagccaccagtactaggtgttaggggcttacactgcccaccaccacccggaggccctggagccggtaaacggttgtgtgctatatgtggggacagatccagcgggaagcattatggagtttactcttgtgaggggtgcaaaggattctttaaacgcactataagaaaagacttgacctatagctgcagggacaacaaagattgtaccgtcgacaagaggcaaaggaaccgatgccagtactgccggtatcagaaatgtctggccaccgggatgaaacgggaagcggtacaggaggaaaggcagaggggtaaggataaggatggggatggggaaggagctggcggtgccccagaggagatgccggttgatcggatccttgaggcggagcttgctgttgagcagaagtctgatcagggcgtggagggaccaggcggtacgggaggtagcgggtcatcacccaacgaccctgtgaccaacatttgtcaggctgccgacaaacaactctttaccttggtggaatgggcgaagcgaatccctcacttttcctctcttcctctggatgaccaggtcatcctgctgagggcaggttggaacgagctgttgatagcttccttttctcaccgttcaattgatgtgcgggacggcatcctccttgcgacagggctgcatgtacatcgaaacagcgctcattcggccggagtcggcgcaatttttgatcgcgttctgacggagttagtgtctaaaatgcgagacatgcgtatggataaaacagaactcggatgtctcagagcgattattctgttcaatcccgacgccaaaggtctttcaaatccctccgaagtggaggtgctccgcgagaaggtctacgcctcattagagacttactgcaagcagaaataccctgaacagcagggcagattcgctaaactgctgctgcggctccccgctctgcgcagcattgggttgaagtgcctagagcatctcttttttttcaaacttatcggagatactccaatcgacacctttctgatggaaatgctagaggccccacatcagttggcttag

SEQ ID NO: 238532 - DNA, 291 bp, synthetic construct
  misc_feature 1..291: note = Description of Artificial Sequence: Synthetic coding sequence
  source 1..291: mol_type = other DNA
taatcaccaaacgaccccgtcaccaatatctgtcaggctgctgataagcaactcttcaccttggttgagtgggcgaagcgaattcctcacttcagtagcttgcccctggacgaccaagtgatcttactgcgcgctggactccacgtccatagaaattccgcccattcagccggagtcggcgctatttttgatagggttctgacagagctggtcagtaagatgagagatatgaggatggacaaaactgaactcggatgtcttcgagccattatcctttttaatccggattag

SEQ ID NO: 238533 - DNA, 1602 bp, synthetic construct
  misc_feature 1..1602: note = Description of Artificial Sequence: Synthetic coding sequence
  source 1..1602: mol_type = other DNA
atgtcatgggccgcaaggcctcctttcctgcctcagcggcatgctgcgggacagtgcggaccagtgggggtgcgaaaggaaatgcactgcggtgttgcctcacggtggaggagacgcaggccatggctcgatccagccgctgctgcagccgcagccgtggcgggaggagagcagcagacacccgagcccgagcctggggaggccggaagagacggcatgggcgacagtggtcgggattcccgctccccagacagtagtagtcccaatccgctgccacagggagtgcccccaccttctccgccaggtcccccactgcctccaagtacagccccttcactcggcggaagtggtgctcctcctcccccacctatgcccccaccaccactgggcagtccatttcctgttatcagttccagcatgggatcccccggactgccacccccagctccaccaggtttctcagggccagtatcttctcctcaaatcaatagtacagtttccctacctggtggtgggtctggaccccctgaggacgtcaagcctccagtgctcggagtccggggtctgcactgccctccaccccctggcggacccggagctggcaagaggctgtgtgcgatttgcggggatcggtcctcagggaaacactatggcgtttacagttgcgagggttgcaaaggattctttaaaagaaccatccgcaaagatctcacctatagctgccgcgataataaggactgtacggtggataagagacaacgcaataggtgtcagtactgccgctaccaaaagtgccttgccactgggatgaagagagaagccgtgcaggaggagcgccagagaggcaaggataaggacggcgatggggaaggagctgggggagcaccagaggagatgccagttgacagaattttagaggccgaactggctgtcgagcagaagagcgatcaaggtgtggaaggtcctggaggtaccggtggttccggaagctcacccaacgacccagtgactaatatttgtcaagcagcagataaacagctgttcaccttagtagaatgggctaaacgaataccccattttagctctctgcctctggacgaccaggtgatcctgctgcgcgctggatggaatgagctgctcatagcatctttcagccataggagcattgacgtgagagatgggatcctgctggctacgggactgcacgtccacagaaactctgcacatagtgccggagttggagccatcttcgaccgcgtgctgaccgaacttgtgtcaaagatgagagatatgcggatggacaaaacagagctcggctgtctgcgcgctatcattctgtttaaccctgacgcaaaggggctcagtaaccctagtgaggtcgaagtcctgcgggaaaaggtgtatgcctccctggaaacatattgtaagcaaaagtatcccgagcaacagggccgtttcgcaaagctgctgctgcggctgccagctttgcgctcgatcgggctcaagtgtctggagcacttatttttctttaagctgattggcgacacccccattgacaccttcttaatggagatgctggaagcccctcaccagctagcttag

SEQ ID NO: 238534 - DNA, 291 bp, synthetic construct
  misc_feature 1..291: note = Description of Artificial Sequence: Synthetic coding sequence
  source 1..291: mol_type = other DNA
tgatctcctaatgaccccgtcactaatatctgccaggcagcagataaacaattgtttaccctggtcgaatgggctaagcgcatcccccacttttcctccctccccctggatgatcaagttattttgctgcgggctggtctgcatgtgcataggaatagtgcacatagtgctggagtaggggcaatcttcgatagagtgctgacagaactggtatctaagatgagggacatgcgcatggataagacggagctgggatgtctcagggcgataattcttttcaaccctgactag

SEQ ID NO: 238535 - DNA, 1614 bp, synthetic construct
  misc_feature 1..1614: note = Description of Artificial Sequence: Synthetic coding sequence
  source 1..1614: mol_type = other DNA
atgagctgggccgcacgcccaccgtttctgccacagaggcacgcggcagggcagtgcggtcccgtgggggttcgcaaggaaatgcactgtggcgtagccagccggtggcgcaggaggaggccgtggttagacccggcagccgctgctgccgctgctgtcgcaggtggcgaacaacaaactcccgagcctgaaccaggcgaggctggcagggatgggatgggggatagcggacgagactccagatccccagacagctcgagtccaaaccccctcccccagggagtcccgcctcctagcccaccagggccacccctccctcccagcacagccccttcattaggtggttccggtgcccctccgccaccccctatgccgcctcctcccctgggtagcccatttcccgtgatcagttcttccatgggctcccctggcctgcctccccctgcgccaccaggctttagtggaccagtgagcagccctcaaataaactctacggtgtcactgcctgggggtggctctggacctcctgaggacgtgaagccgcctgtgttgggagtccgcggtctgcattgtccaccaccacccggtggtcccggagcagggaaacgattatgcgctatctgcggagaccgcagttctggaaaacattatggagtatatagctgtgaagggtgtaagggcttttttaagcgaactatccgtaaagacctcacatactcttgcagagacaataaagactgtacagtagacaaacggcagaggaaccgttgtcagtattgcaggtatcagaaatgtttggccactggaatgaaacgggaagcagtccaggaggagaggcaacgcggtaaagacaaagatggtgacggggagggcgctggcggagccccagaagaaatgccagtggaccgcattctcgaggccgaacttgcagtggaacagaagtcggatcaaggtgtggaaggaccaggagggacaggtggatcgggaagttctccaaatgacccagtgaccaacatttgccaggctgcagataagcagttattcactttggtggagtgggcaaaacgtatccctcacttcagtagtttgcccctcgacgaccaggttatcctgctcagagctggttggaacgagttactgatcgcatcgttctcacaccgcagtatcgacgtgcgtgacggaatcctccttgcaaccgggttacacgttcatcgaaattctgctcacagtgctggtgtgggggcaattttcgaccggtccttgagcagagttttgacggagctcgttagtaaaatgcgtgacatgcggatggacaagacagagctggggtgtttgagagctattatcctgtttaaccccgatgccaagggcctatccaatcccagcgaggttgaagtgttacgcgaaaaggtgtacgctagccttgaaacctactgtaaacagaagtacccggagcagcaaggtcgcttcgcaaaacttcttcttagattgcctgccctgcgcagcataggtctgaagtgcctggagcatcttttctttttcaaactgattggggatacaccaatcgatactttccttatggaaatgttggaagctccccaccagctagcgtag

SEQ ID NO: 238536 - DNA, 1602 bp, synthetic construct
  misc_feature 1..1602: note = Description of Artificial Sequence: Synthetic coding sequence
  source 1..1602: mol_type = other DNA
atgtcttgggccgctcggcctccttttctgcctcagaggcatgccgcaggacaatgcggtcctgtcggagtgcgcaaagaaatgcactgcggcgttgcctctaggtggcgcaggagacgcccatggttggatccagctgctgctgccgcagctgcagtcgcgggaggtgagcagcagaccccagagccagagcctggcgaggcgggacgtgatggaatgggcgactcaggcagagatagccgcagccctgacagttcaagtccaaatcccctgccccagggagtcccgcctccttcccccccaggccctccactgcccccatcaactgccccatctctcggcggatctggggcaccgcctccccctcctatgcccccaccaccgctggggagccccttcccggtgatttccagctctatgggttcacctggtttgccaccccctgcacctccgggattctctggtcccgtgagctccccacaaatcaacagtacggtgagcctgcctggcggtggctctggccctcctgaagatgtgaagccccctgtgctgggtgtaagggggcttcactgcccacctccgccaggcggacctggagccggtaaacgcctatgtgccatttgcggggacaggtcaagtggcaagcactatggagtgtactcttgcgagggatgtaagggcttctttaagcgcactatccgaaaggatctgacatactcctgcagagataacaaggactgcacagtcgacaagcggcagcgcaacaggtgtcagtattgtcggtatcaaaagtgtctggcaacaggcatgaaacgggaggccgtgcaggaggagcgccagcgcggaaaagacaaggacggtgacggcgaaggcgcaggtggcgctccggaagagatgcccgtagacaggatcttagaggccgaactcgctgtggaacaaaagtctgaccaaggggtggaggggcctggaggtacaggcggatcaggtagttcccctaatgacccagtgaccaatatatgtcaggccgctgataagcaactcttcaccttggtggagtgggcaaagcgcatcccacacttttctagccttcccctggatgaccaggtcatccttcttcgggcaggatggaacgagttgcttatcgcctccttttctcatagatccatcgatgttcgggacggcatactcctggcaacgggcttacatgtgcaccgtaactcggcccactcggctggggtgggggctatctttgatagagttcttaccgagctcgtaagcaagatgcgcgacatgcggatggataaaacggagctgggatgcctgagagccattatcctgttcaaccctgacgccaaaggtttgtccaatcctagcgaagtggaggttctcagagagaaggtatacgcaagcctcgaaacttactgcaaacagaagtatcccgaacagcaggggaggttcgctaagctgctgctgcgtctgcccgctctgcggagcattggacttaaatgcctggagcacctgttcttcttcaagctcatcggtgatacacctatcgatacatttctcatggagatgttggaagctccccatcaactggcctag

SEQ ID NO: 238537 - DNA, 1602 bp, synthetic construct
  misc_feature 1..1602: note = Description of Artificial Sequence: Synthetic coding sequence
  source 1..1602: mol_type = other DNA
atgtcatgggctgcgagacctcctttcttgccccaaagacatgccgctggtcaatgcgggcctgtgggggtcaggaaagagatgcattgcggggttgcgtcaaggtggcgtagaagacgtccatggctggacccagctgcagccgcagcagcagcggtggccggtggcgagcagcagacgccagaacccgagccaggcgaggcaggcagggatggaatgggcgactctggacgcgattcacgaagtcctgattcaagtagccccaatcccctacctcagggagtgccaccaccatcgcctccaggaccacccttgccaccctctactgccccttcccttggcggatccggtgcccctccacccccacctatgcctccaccaccgttgggaagcccattccctgtaatctctagtagcatgggttccccagggctccccccacccgcaccccctggcttctcagggcctgtgagctctcctcagatcaatagcacagtctctctgcctggcggaggttcggggcctcccgaagacgtaaaaccccctgtgctgggcgttaggggattacattgtcctccgccacctggtgggcctggcgctggaaagaggctctgtgccatctgtggagaccgaagttccggcaagcactatggcgtttattcatgtgagggctgcaagggtttctttaaacgcacaatccggaaggatctgacttattcgtgtcgagacaacaaagactgtactgtggacaagcgccagcgaaaccgatgccagtattgtaggtatcagaagtgcctagctactggcatgaagcgggaggcagtgcaggaggagcggcagcgaggcaaagataaggatggggatggagaaggcgcaggcggagctccggaggagatgccggtggatagaatcctcgaagcagagctagcggtggaacagaaatcggaccagggggtggaaggcccagggggtaccgggggatcgggatcttctcctaatgacccagtgaccaatatatgccaggccgctgataagcaattgtttacactggtagaatgggctaagcgcataccccatttctccagtctccctttggacgaccaggtgattctcctcagagctggatggaatgagttattaattgcatcattcagtcatcggagcatcgacgttagagatggtatcctcctcgctacagggttacacgtacacagaaattcagcccactctgccggagtgggtgctatatttgacagagtgctgactgagctcgtctccaaaatgagagacatgagaatggacaaaacggaactgggatgcctgagggccatcattctgttcaatcctgacgcgaagggcttgtcaaacccgagcgaggtggaggtactccgcgaaaaggtctacgcttctttagaaacatactgcaagcagaagtaccccgagcagcagggacggttcgctaaactcctactaagacttcctgcactgagatccatcggtttgaaatgcctggaacacctttttttttttaaactgatcggagacactcccattgacacattcctcatggaaatgctggaggcccctcaccagctcgcctag

SEQ ID NO: 238538 - DNA, 291 bp, synthetic construct
  misc_feature 1..291: note = Description of Artificial Sequence: Synthetic coding sequence
  source 1..291: mol_type = other DNA
tgatccccaaacgatcccgtgacaaacatatgtcaggccgcagacaagcagctgtttacgctggtggaatgggctaaacgaattccacatttctctagtctgccactggacgaccaagtcattctgctgagagctggtttacacgtccacagaaactctgctcattcggcaggtgtgggtgcaatctttgatagagtccttacagaacttgtctcaaagatgcgagatatgaggatggataagacagagttgggttgcctccgagcgataatcctttttaatcccgactag

SEQ ID NO: 238539 - DNA, 291 bp, synthetic construct
  misc_feature 1..291: note = Description of Artificial Sequence: Synthetic coding sequence
  source 1..291: mol_type = other DNA
tgatcgcctaatgatccagtcactaacatatgccaagctgctgacaaacagttgtttacgcttgtagagtgggccaaaagaatcccccacttctctagtttacctctggacgaccaggtgatattactgagagccggtctgcacgtgcaccgcaatagcgcgcactccgcaggggttggtgcaatcttcgatcgggtgctaaccgaattggtctcaaagatgagggatatgcgtatggacaaaaccgaactgggttgtttgagagccattatcctctttaaccctgattag

SEQ ID NO: 238540 - DNA, 1614 bp, synthetic construct
  misc_feature 1..1614: note = Description of Artificial Sequence: Synthetic coding sequence
  source 1..1614: mol_type = other DNA
atgagctgggccgctaggcccccatttctccctcagcgacacgcagctgggcagtgcggaccggtcggagtcagaaaggagatgcattgtggcgttgcaagccgatggcgtcgaagaagaccatggctggatcccgcagcagccgctgccgcagctgtcgcgggtggcgaacagcagacacccgaaccggaacctggtgaggcagggcgagacggcatgggggattccgggcgagatagccggagtcctgattcgagcagtccaaacccccttccccagggcgtgccccctccatcaccacccggtccaccccttcccccttcaaccgctccaagtttaggtggaagcggcgcacctccccctcctccaatgccaccccctcctcttggctctcccttcccagtgatatcatcatctatgggaagccccggtctccctcccccagcgcctcccggtttctccggcccagtcagttctcctcagataaatagcaccgtgtcccttcccggtggagggtcgggcccaccagaagatgtcaagcctcctgtcttaggggtgaggggtcttcactgcccaccccctcccggtggtccaggagctggtaagcggctgtgcgctatatgcggagatagaagctcagggaagcactatggggtctatagttgtgagggctgcaagggattcttcaagagaacgattcggaaggatcttacctactcatgtcgcgacaataaggactgcactgtggataagcgtcagaggaacagatgccaatattgccgctaccagaaatgcctggcaacaggaatgaagcgtgaagctgttcaagaggagagacagcgtggaaaagataaagatggtgatggagagggtgccggtggtgccccagaggaaatgcccgtcgatcgcatcctcgaggccgaattggccgtggaacagaagtccgaccagggagttgaaggaccaggaggtactggcggtagtgggtcctcaccaaatgatcctgtgaccaatatctgccaagctgcagataagcagctatttactctggtggagtgggccaaacgaattccccatttcagtagcttgccactggatgaccaggttatactgctcagagctggttggaatgagctgctcatcgctagctttagtcaccgctccatcgatgttagagacggaatcctgctggctacgggactccatgtgcatcgtaattccgctcactctgcaggagttggtgcaatattcgataggagcttatcacgcgttctcacggaactggtgtcaaagatgagagacatgcgcatggacaaaactgaactagggtgcctaagggcgatcatcctgtttaatcccgatgccaagggcctctccaatccatccgaagtggaggtactcagggagaaggtctacgcctccctcgagacttactgcaaacagaagtacccagagcaacaagggaggttcgctaagcttctgcttcgactgccagccctgaggtccatcgggctcaagtgcctggaacacctgttcttctttaaactgatcggggatacgcctattgacaccttcctgatggaaatgttggaggcacctcaccagcttgcctag

SEQ ID NO: 238541 - DNA, 291 bp, synthetic construct
  misc_feature 1..291: note = Description of Artificial Sequence: Synthetic coding sequence
  source 1..291: mol_type = other DNA
taatcccccaacgacccagtgacgaatatctgtcaagctgccgataaacagctcttcacactcgtagagtgggcgaagagaatcccccacttctccagcttgcctttggacgaccaggtcattttgctgagggccggtttgcacgtacaccgaaatagcgctcacagcgctggcgtaggcgctatctttgaccgagtgctaaccgagctcgtgtcaaagatgcgagacatgaggatggataagaccgaactgggctgtctgagagccatcattctgtttaatccagactag

SEQ ID NO: 238542 - DNA, 1614 bp, synthetic construct
  misc_feature 1..1614: note = Description of Artificial Sequence: Synthetic coding sequence
  source 1..1614: mol_type = other DNA
atgtcctgggccgcacgcccacccttcctgccacaacgacatgccgcaggtcagtgtgggcctgttggcgtacgtaaggagatgcactgtggggtcgcaagtcgatggaggcggagacggccatggctggacccggctgctgcagccgctgctgccgtggccggaggcgaacagcagacaccagagcccgaaccgggagaagcgggaagggatgggatgggcgactcgggccgtgacagccgatcccctgactcatccagccccaatccactcccccagggcgttcctcccccaagccctcctggaccacccctgcccccatcaaccgcaccctctcttgggggttcaggtgctccccctccgccaccgatgccgcctccgcctctggggagtccctttcctgtaatttcctcctccatggggagccctgggttacctccacccgctccacctgggttcagcggccctgtcagctctccccaaatcaatagcaccgtctcgctgcctggcggaggcagcgggccacctgaggatgtgaagcccccagtattgggcgtgcgcggattgcattgcccaccacctcctgggggtcccggagccggtaagcgtctgtgcgctatttgtggagatcgcagctccggaaagcactatggcgtctattcatgcgagggctgtaagggattctttaagagaactattagaaaggacttgacctatagctgccgagataataaggactgcaccgtagataaaaggcagagaaaccgctgccagtactgccggtaccagaaatgcttggccacaggaatgaaaagggaggccgtccaggaagaaaggcagcggggtaaggacaaggatggcgacggtgaaggagctggcggtgccccagaggagatgccagtagaccgaatactagaagcagagctggcggtggaacagaagagtgaccaaggagtggagggtcctggaggaaccggagggtccggatcgagcccgaacgaccccgtgaccaacatttgccaggccgcagataagcagctctttaccctggtggagtgggcaaaacgcattccacacttctcaagcctgcccttggatgaccaggtgatcctcctgcgggcaggttggaatgagctgctcattgcctccttttcgcaccgtagtattgacgtgagggatggaatactgttggcaaccggccttcacgtgcaccggaattccgcacactccgcaggcgtgggagccatattcgatcggtcactctcaagggtcctaaccgagctggtgagcaagatgagggatatgcggatggacaagacagagctgggctgcttgagggcgatcattctcttcaatcccgacgcaaagggactgtcaaatccctctgaggttgaggtgcttcgggaaaaagtgtacgccagcctggagacctactgtaaacagaagtaccctgagcaacaagggcgattcgccaagttgctcctgcgccttccagccctgaggtccatcggtcttaagtgtctcgagcacctgttcttctttaaacttatcggggatactccgatagatacatttttgatggaaatgcttgaggccccacaccagcttgcctag

SEQ ID NO: 238543 - DNA, 1614 bp, synthetic construct
  misc_feature 1..1614: note = Description of Artificial Sequence: Synthetic coding sequence
  source 1..1614: mol_type = other DNA
atgagctgggccgctcgcccaccctttcttccccagcgtcacgcagccggacagtgtggtcccgtgggggtgaggaaagagatgcactgtggtgtggcgtctcggtggcgacgcaggagaccctggctggatcccgctgctgctgcagcagctgcagtggctgggggtgagcagcagactcccgaaccagaaccaggagaggccggacgggatggtatgggagacagtggacgagactcaagaagccctgattcatcctcccccaatccattgccccagggagtccctcccccatcacctccaggccctcccctcccgccatccaccgcaccttcacttggaggtagcggtgcaccaccccctcctcctatgccaccaccacctctcggcagtccattccctgtcatttcctcaagcatggggtctcccggtctgccacctccagcacccccaggctttagtggcccagtatcttcaccacagatcaattcaacagtctccttgcccggaggaggcagtgggcctcccgaggatgtgaaacctccagtattgggtgtgcgagggttgcactgccctccgccaccaggcggacctggtgctggaaaacggctctgcgccatttgtggcgacaggagctcaggaaaacattacggagtatatagctgcgagggctgcaagggcttttttaagcggacaattcgcaaggatctgacttattcctgcagagacaataaggactgtactgttgataagaggcagcgtaaccggtgccagtattgcagatatcaaaagtgtctggccacaggaatgaagcgtgaagcggtgcaggaggagcggcagcggggaaaggataaagatggtgacggtgagggcgctggaggtgcccctgaagagatgcctgtcgatcgaatcctcgaggctgaactcgccgtggaacagaagtctgaccagggtgttgaaggtccgggaggcacaggtggaagtggcagtagccctaacgaccccgtgactaacatttgtcaggccgcagacaaacagctgttcactcttgttgaatgggcaaagcggattccccacttttcctccctcccattggacgaccaggtaatcctccttcgtgccggttggaacgaactcctgatcgcttcgttcagccacagaagtattgatgtgcgggatggaatcctcttggcaaccggcctgcatgtccaccgaaattccgcccattcagccggagtcggcgcaatctttgataggtcactgtccagagttctcacagaactggtatctaagatgcgggacatgagaatggataagactgagctcgggtgtcttagggccatcatcctcttcaaccctgatgccaagggactctcaaatccaagtgaagtggaggtgttgcgcgaaaaagtgtatgcatcccttgagacatattgtaagcagaagtatcctgaacagcagggacgattcgctaagttgttgcttaggctacccgctttgcggagcattggtcttaaatgtctggagcatctgttttttttcaagctaatcggcgataccccaatagatacattccttatggagatgctggaggcccctcatcagctggcatag

SEQ ID NO: 238544 - DNA, 1044 bp, synthetic construct
  misc_feature 1..1044: note = Description of Artificial Sequence: Synthetic coding sequence
  source 1..1044: mol_type = other DNA
atgcgcgaatgcggcggtggccctggcgctggaaagagactatgcgcgatttgtggtgaccgaagttccgggaagcactatggcgtgtattcctgcgaaggttgcaagggcttcttcaaaaggactattagaaaggacctgacttacagttgccgtgataacaaggattgtactgtagataagcggcagcggaatagatgccaatactgtcgttatcagaaatgtctggccaccggcatgaaaagagaggctgtgcaggaggagcgtcagcgaggcaaggacaaggacggtgacggtgagggcgcaggaggtgccccagaagagatgccggtcgacagaattctggaggctgagcttgctgtagaacagaagagcgatcagggggtggaaggacctgggggtacagggggatccggatcctcaccgaacgacccagttaccaatatctgtcaggccgctgacaaacaactgtttacgctggttgagtgggctaaaagaattcctcacttctcctccctgcccttagacgaccaggtcatactgcttagagccggttggaatgaattgctgattgcaagcttttcccaccgcagcattgacgtaagggatggtattctgttagccacagggttgcatgttcacaggaactctgctcattcggcaggagtgggagccatcttcgatcggtctctgtccagagtgctgaccgaacttgtgtccaagatgcgggacatgcggatggataagactgagctgggatgcctaagggctattatattgttcaaccctgacgcaaaaggtctctcaaacccaagcgaagttgaagtgctgagggaaaaagtttatgccagcctcgagacatattgtaagcagaaataccccgagcagcagggcaggtttgctaaactgctgctgcggttgcccgctctgaggagtataggtctgaagtgtctcgaacacctctttttttttaagcttattggcgatacccctatcgataccttccttatggaaatgctggaggctccgcaccagctggcctag

SEQ ID NO: 238545 - DNA, 1179 bp, synthetic construct
  misc_feature 1..1179: note = Description of Artificial Sequence: Synthetic coding sequence
  source 1..1179: mol_type = other DNA
atgggctccccaggactacctccccctgcaccgcctggatttagtggccctgtaagtagccctcagatcaactcgacagtcagtctcccaggcggagggagcggccctccagaagacgtcaaacctccggtcctgggagtgagaggactacattgccctcctcctcccggaggccctggagctggcaaacgcctctgtgccatctgcggcgatagatcttctggaaagcactatggagtatatagctgtgaaggttgtaagggcttcttcaagcggaccatccggaaagacctaacctactcttgtcgggacaataaggactgtacggtggataaacggcagaggaacaggtgccagtactgtaggtaccagaagtgccttgctaccggaatgaagcgcgaagcagtacaagaagagcgccagagggggaaggacaaggacggggatggcgagggcgctggcggtgcacctgaggaaatgcctgtagaccgcattttagaagcagagctggccgttgaacagaagtcggatcagggtgtggagggcccagggggaacaggagcccctagtcccaatgatccagtcaccaatatctgccaggcagccgacaagcagctgttcaccctggtggaatgggccaagcgaattccgcacttctcaagcctgcctttggacgaccaggttatcctgctgagagccggttggaacgaactcctgatagccagcttcagccacagatcgatcgatgtgagggacggaatcctcttggccaccggattacatgtgcacagaaatagtgctcactctgccggtgtgggcgctattttcgaccgcgtcctgaccgaactggtgtccaaaatgagagacatgcggatggataaaacagaacttggctgcctgagagccatcatcctttttaaccccgatgccaaagggctgtccaacccgtcagaggtggaagttcttagggagaaggtgtacgcaagcctggagacttattgtaaacagaaatatcctgagcaacagggcaggttcgccaagttgcttctccgccttcctgcgttaagatccatcggcctgaagtgtcttgaacatctcttcttcttcaaactgattggagatactccgattgatacattcctgatggagatgctggaagcgcctcaccagctggcatag

SEQ ID NO: 238546 - DNA, 1170 bp, synthetic construct
  misc_feature 1..1170: note = Description of Artificial Sequence: Synthetic coding sequence
  source 1..1170: mol_type = other DNA
atggggtctcctggactcccaccgcctgccccacctggcttctccggcccagtcagcagcccgcagatcaatagtactgtgtctcttcccggaggaggtagcggtccaccagaggacgtgaagccaccagtactgggtgttcgagggctgcactgccctccccctcccggtggtcctggcgcaggcaaacgtctttgtgctatctgtggcgaccgatctagcggtaagcactacggagtgtatagttgcgaagggtgtaaaggcttctttaagcgcacaattcgcaaggacctgacatatagctgccgggataataaagactgcactgtggataagcggcaacgcaatcggtgccagtactgtcgataccagaaatgtcttgcaacgggcatgaagcgcgaggctgtacaggaggagaggcaacggggaaaagacaaagatggagatggagaaggcgctggaggggctcctgaggaaatgcctgttgacagaattctcgaggcagagctggcggttgagcagaagtctgaccagggaggaagccagcacatttctaaatctcctaatgaccctgttacaaacatttgccaggctgccgataaacagttatttaccctggttgagtgggccaagcgaatcccacacttctcctccctgccattggacgatcaagtcattctgcttcgcgcaggctggaatgagctgctgattgcctctttttcacaccggtctatagatgtgcgtgacggcatcttgctggccaccggcctccacgtgcaccgcaatagtgcacatagcgcgggagtgggagccatctttgaccgcgtactgaccgaactggttagcaagatgcgagacatgagaatggacaaaacagagctgggatgcctgagagccataattcttttcaaccccgacgccaaaggattaagcaacccatcagaggtcgaagtgctcagagagaaagtctacgcctcccttgaaacttactgcaaacagaaataccccgagcagcagggcaggttcgccaagctgttgctacggttgcccgcactcaggtcaatcgggctaaaatgccttgaacatctcttctttttcaaactcatcggagacactccaattgatactttcctcatggagatgttggaggctccccaccagctggcatag

SEQ ID NO: 238547 - DNA, 1044 bp, synthetic construct
  misc_feature 1..1044: note = Description of Artificial Sequence: Synthetic coding sequence
  source 1..1044: mol_type = other DNA
atgagagaatgcggagggggtcccggagctggcaaacgactatgtgccatctgcggcgatagaagcagtggaaaacattacggggtctactcctgcgagggatgtaagggctttttcaagcggacaattagaaaggatttgacatactcctgccgtgacaacaaagactgtaccgtggacaagaggcagcggaaccgttgccagtattgcaggtaccagaagtgcctcgccaccgggatgaaaagagaagctgtccaggaggaacggcagagggggaaagacaaagatggagatggcgaaggagccggtggcgcaccggaagagatgcccgtggaccgcatcctagaagccgagctggctgtggagcagaagtccgaccaaggagtggagggacctgggggaacagggggaagtggctctagtcctaatgatcctgttaccaatatctgccaggccgcagataagcagctcttcacactggttgaatgggcaaagcggattccccatttcagtagccttccccttgatgaccaggtgatcttactgcgcgctggatggaacgagctgctgattgcgagtttctcacatcggtccatagacgtaagggatggaatccttttggcgacaggcttacatgtgcaccggaatagtgcccacagcgcaggcgttggcgctattttcgatagaagcctctctagggtgctgacagagctcgtgtccaaaatgcgagatatgcggatggacaagactgaactagggtgcctgcgcgctataatcctgtttaacccggacgcaaaaggactgagcaacccttctgaggtggaggtcctcagagagaaggtttacgcctccctggaaacttattgcaaacagaaataccctgaacagcaggggaggtttgccaaacttctgcttaggttacccgctttacggagcattggtttgaaatgtctagaacatctcttcttctttaagctgatcggagacacaccaattgacaccttcctcatggagatgctggaagctccccaccagcttgcttag

SEQ ID NO: 238548 - DNA, 1179 bp, synthetic construct
  misc_feature 1..1179: note = Description of Artificial Sequence: Synthetic coding sequence
  source 1..1179: mol_type = other DNA
atgggcagcccaggcctgcccccacccgcaccccctggcttctccggacccgtgtcctccccgcagatcaactcaaccgtgtcattgcccggagggggttccgggccacccgaagatgtgaagccccctgttctcggggtccgcggtctgcactgcccgcctccccctggcggacctggcgctgggaagagactgtgcgcaatatgcggggatcggagctcaggaaaacactatggcgtgtacagttgcgaaggctgcaaggggtttttcaagcggaccataaggaaggacctgacatactcatgcagggacaataaagactgtacagtcgacaagcggcagcggaataggtgtcagtattgccggtaccaaaagtgcctggctaccggtatgaaaagagaagcggtgcaggaggaacggcagcggggaaaggacaaggacggagacggcgaaggggctggcggtgcacccgaggaaatgcccgtggacagaattttagaagccgaattggcggttgagcagaaatcagaccagggagtggaaggtcccggaggcacaggtgcaccaagtcctaatgatccggtcacaaacatctgtcaggcagccgataagcagctgttcacattagtggagtgggccaaacgcatcccacacttctccagcctgcccctcgacgatcaggtgattctcttacgagctggatggaacgagcttttgatagcctctttctcccacagaagcattgacgtgcgagacggtattttactagctacaggattgcacgttcaccggaatagtgcccacagtgcgggagttggggcaatcttcgaccgcgtgctgactgaactggttagcaagatgcgtgacatgcggatggacaagactgaattgggatgcctcagagccattatattgttcaacccagacgcaaagggtctaagtaacccatccgaagttgaggtgctccgcgagaaggtatacgctagcttggagacctattgcaaacagaaatatccagagcagcagggtaggtttgccaaactgctattacggcttccagcattgcggtccatcggtctgaaatgtttagagcatctattctttttcaaactaatcggggatacccccatcgacacttttctcatggagatgttggaagcaccacaccagctagcgtag

SEQ ID NO: 238549 - DNA, 1170 bp, synthetic construct
  misc_feature 1..1170: note = Description of Artificial Sequence: Synthetic coding sequence
  source 1..1170: mol_type = other DNA
atgggctcccctgggctgccgcctcccgctcctcctggctttagcggtcccgtgtcttcaccccagattaattccactgtgagcctgcccggtggtggcagtggacctccggaggacgtgaaaccacccgtcctgggagtgagaggcctacattgccctcctcctccgggagggcctggtgccggtaagcgcctttgcgctatctgcggcgacagatcctcaggcaagcattacggggtttactcctgcgagggctgcaagggattctttaagagaaccatacggaaggacctgacatacagctgtcgtgacaacaaggattgcaccgttgacaaacggcagcggaacaggtgccagtattgtaggtatcaaaagtgcctggccacgggaatgaagcgcgaggccgtgcaggaagagcggcagcgcggaaaggacaaggacggagatggggaaggcgcaggaggagcacctgaggagatgcccgttgaccgcattctggaggccgaactcgccgttgagcagaagagtgaccagggcggttcacagcacatcagcaaatctcctaacgatcctgttaccaatatctgtcaggccgcagataaacagttgttcaccctagtcgagtgggccaagcggataccccatttcagttcactcccattagacgaccaggtaatccttcttcgggctggatggaatgagctactcatcgcatccttttcccatcgttcgatcgatgttcgcgacggaattctgctggcaaccgggcttcatgtccaccgcaacagtgctcatagtgccggtgtgggagctatttttgatcgggtcctgactgagctcgtgagcaagatgcgggacatgaggatggacaaaaccgagctgggatgtcttagggcaatcattctgttcaatccagatgctaaggggcttagcaacccctcagaggtggaggtcctgcgcgagaaagtttatgcctccttagaaacctactgtaaacaaaaatatcctgagcagcagggaagatttgccaagttactgctgcgtctgcctgcattgcggtccatcggcctgaagtgtctagagcatctcttcttttttaaattgatcggcgatactccgattgacaccttcctcatggagatgctggaggctccacaccagctggcttag

SEQ ID NO: 238550 - DNA, 861 bp, synthetic construct
  misc_feature 1..861: note = Description of Artificial Sequence: Synthetic coding sequence
  source 1..861: mol_type = other DNA
atgcctcagggttccgtcggaaggtgggggtgtgaaaaaaaatgtatagtcggaagccgacccggtggaggaggcgacggccctgggtggattccccagagacgacggaggcgaaggtggcaagctgagaacaataaacctcggagccgttctcaaggcagactggacggaaccggctgggccacagcaggcggaattaactccacagtttcgcttcccggaggaggatccggccctcccgaggacgtgaaaccgcctgttctgggagtgagggggctccattgcccccctcccccagggggtccaggagccggtaaacggctctgtgcaatttgcggagacagatcctctgggaagcactacggagtatactcatgtgagggctgcaaaggtttctttaagagaacaattagaaaggaccttacctacagttgccgcgataacaaggattgcacggtcgataaacgacaaaggaacaggtgccagtattgcaggtaccagaagtgcctcgcgaccggcatgaagcgagaggctgtgcaagaggagaggcaacggggaaaggacaaagacggtgacggcgagggtgcgggaggcgcaccagaggagatgcccgtggaccgcattctcgaggctgagttggccgtggaacagaaaagcgatcagggcgtcgaaggccctggaggtacaggcggatccggttccagcgtgtctgtaggagtgaaccccctatcctttgtcatgggtgtcggaggcggtagcctggggctcttctatatcccttcgccttcttttccgctcattactttcttaaccttgctgggcaccgggggagctgcaaagcaggggctatccaacatctag

SEQ ID NO: 238551 - DNA, 1170 bp, synthetic construct
  misc_feature 1..1170: note = Description of Artificial Sequence: Synthetic coding sequence
  source 1..1170: mol_type = other DNA
atgggaagccccggtcttccccctcccgcaccccctggattcagtgggcctgtaagttccccgcaaatcaattctactgtgagcctacctggcggaggttccggaccaccggaagatgttaaaccaccagttctcggggtgcgcggattgcactgccccccaccaccaggaggtccaggggctgggaagcggttatgcgcaatatgcggtgacagaagctctggcaaacactatggggtgtattcttgcgagggctgcaaagggttctttaagaggacaattaggaaggacctaacgtactcttgccgtgacaataaggactgtaccgtcgacaaaagacagcggaatcgttgccagtactgtcggtaccagaaatgcctggctacgggaatgaagcgggaggcagtccaagaggaaaggcaacgaggcaaggataaagacggagatggagagggtgccggaggggctccggaggaaatgcccgtagaccggatattagaagccgagctcgccgtagaacagaaatccgatcaggggggatcccagcatataagtaagtctcctaatgacccagtgacaaatatctgtcaggctgctgataaacagctttttacattagtagagtgggcaaagaggatcccgcattttagctccctgccgctggacgatcaggtgatattgttgcgcgctggatggaatgaattgctgatagcttccttttcacaccgaagtattgatgttcgggacggaatcctgctagcaaccggcctgcatgtccacagaaacagcgctcattccgctggggtgggagccattttcgatagggtcttgacagagctcgtttccaagatgagggacatgcgcatggacaaaaccgagctaggttgcctgagggccatcatcctgttcaatcctgatgcaaaaggcctttctaacccgtccgaagtcgaggtgctccgagaaaaggtgtacgccagcctagagacgtactgcaagcaaaaatacccagagcaacaggggagattcgcaaagctgctgctacggcttcctgctcttcggagcatcggactcaagtgcctcgagcacctgttcttctttaaattgattggggatactcctatcgacacgttcctgatggaaatgctggaggccccacaccaactcgcgtag

SEQ ID NO: 238552 - DNA, 861 bp, synthetic construct
  misc_feature 1..861: note = Description of Artificial Sequence: Synthetic coding sequence
  source 1..861: mol_type = other DNA
atgcctcaaggtagcgtcggtcggtggggttgcgagaagaagtgcatagtcggctcccggccaggcggaggcggagacgggcctgggtggatcccacagagaagaaggcggcgtcgctggcaagctgagaataataagcccagaagcagaagccagggacgccttgatgggacgggatgggccactgccggaggcataaattccaccgttagtctgcccggagggggtagcgggccacccgaagatgtcaagccacccgtgctgggagtcaggggcctacactgtccgcctcccccaggcggaccgggagccggaaagcggctatgcgctatctgtggcgataggagcagcggaaaacattatggagtctattcctgcgagggctgtaaaggtttctttaaacggacgatacgtaaggatctgacttatagttgtcgcgacaacaaggactgcaccgtggataaaaggcagaggaatcggtgccaatactgccgctatcagaaatgtctggccacaggcatgaagagggaagcggttcaggaggaacgccaaagaggtaaggacaaggatggcgatggcgaaggggctggtggggcacccgaggaaatgcctgtggatcgtatcctagaggccgagcttgcagtcgagcaaaagtcggatcagggagtggaggggcctgggggaaccggaggcagcgggtccagcgtctccgtgggagtcaatcccctgagcttcgtcatgggggtgggagggggaagtctaggtctgttctatattccctctcccagttttcctctgatcaccttcctcactctgctggggacgggcggagcggcaaagcagggtctctcgaacatttag

SEQ ID NO: 238553 - DNA, 1179 bp, synthetic construct
  misc_feature 1..1179: note = Description of Artificial Sequence: Synthetic coding sequence
  source 1..1179: mol_type = other DNA
atgggtagtcctggcctcccgcctcccgcaccgccaggcttctccggcccagtatcgagtccacagattaacagtaccgtctccctgcccggaggcggatctggccctcctgaggatgtcaaacctccggtgttgggagtgcgcggacttcattgtccacctcctccaggcggtcccggtgcgggaaagcgtctctgtgccatctgtggggatcggtcatcaggtaagcactatggcgtgtatagctgtgaaggatgcaaaggtttcttcaaaaggactattcggaaagacctaacatacagctgcagggacaacaaggactgcacggtcgataaacgtcagcgcaacagatgccagtactgccgctatcaaaaatgcctagccactggcatgaagagggaagccgtccaggaggagcgccagcgcggaaaggacaaggacggcgacggagaaggtgctggaggggcacccgaggagatgcccgtggaccgcattctggaagccgagctggctgttgaacagaagtcagatcagggggtggagggtcctggagggacaggtgctcccagtcccaacgacccagtcacaaatatctgtcaggcagcagataagcagttattcacattggtcgagtgggccaagagaatcccacatttttcaagtctgcccctggatgatcaggttatactgctgagggccggatggaatgagctccttattgcctctttctcacatcggtccatcgacgttagggatggaatcttgcttgctaccggccttcacgtacaccgcaatagtgcccactcagctggggttggggctatatttgaccgggttctgacagagctggtgagtaagatgagagacatgcgcatggataagacggaattgggctgcctacgggcaataatacttttcaatccagacgccaaagggctctcaaacccctctgaggttgaggtgctccgggaaaaagtctatgcatcactggagacctactgtaagcagaagtaccccgaacagcaaggcagatttgccaagttgttgctgagactccctgctctgcgatcaatcgggttgaagtgcctcgaacatttgtttttttttaaattgatcggggacactcccattgacactttcctgatggagatgctcgaagcgcctcaccagctggcctag

SEQ ID NO: 238554 - DNA, 1044 bp, synthetic construct
  misc_feature 1..1044: note = Description of Artificial Sequence: Synthetic coding sequence
  source 1..1044: mol_type = other DNA
atgagagaatgtggtgggggacctggagccggaaagaggctttgtgccatctgtggcgaccggagtagcgggaaacactatggcgtgtacagctgcgagggctgtaaaggtttttttaagaggacaatcagaaaggacttgacctacagctgccgcgataataaagactgcactgtcgacaagcggcagagaaatcggtgccagtactgccgctatcagaagtgtctggctacaggtatgaaaagggaagccgtgcaggaggagcgacaacgcggaaaagataaggatggcgacggagagggagccggaggcgcacccgaagagatgcctgttgaccggattctggaggctgagctggcagtggagcagaagtcggatcaaggagtagaaggacctgggggtactggcggatctggaagctcacccaacgatccagtcacaaacatctgtcaagccgcagataagcagctcttcaccctggtcgaatgggcaaagagaattccccactttagttccttacctctggacgaccaggtgatccttcttcgcgctggttggaacgagctgctcatcgcttccttttcccacaggagcatcgacgtccgggacggaatcctgctggcaacgggtctgcatgtacatcgcaattcggcacattcagctggagttggtgccatctttgaccgcagcctgtctcgggtcctgacagagctggtttctaagatgcgtgacatgcgaatggacaaaactgaattgggatgtctgcgggcaattattctgttcaacccagacgcaaagggtctctccaacccaagtgaggtagaggtgctacgcgaaaaagtgtatgccagcctagagacttattgtaaacagaagtatccagaacagcagggcagatttgctaagctgctgttgaggctgcccgcactgcgaagcatcggacttaagtgcctggaacacttatttttctttaaactcataggcgatacgcccatcgacacattcctcatggagatgctcgaggcccctcatcagctcgcctag

SEQ ID NO: 238555 - DNA, 1179 bp, synthetic construct
  misc_feature 1..1179: note = Description of Artificial Sequence: Synthetic coding sequence
  source 1..1179: mol_type = other DNA
atggggtcacccggtctgccaccgccagcccctccgggattttctggtcctgtcagttccccacaaatcaacagcacagtatccctgcccggagggggaagtggaccccctgaggatgttaaaccccctgtgctcggtgttagagggttacactgtccaccacctcccggaggcccaggcgcaggaaagagactgtgcgctatttgcggagatagatcttccgggaagcactacggcgtctacagctgcgagggctgtaaaggatttttcaaaaggaccatacgcaaagatcttacttatagttgcagagataacaaagactgcacggtagataagcggcagcgtaacaggtgccagtactgcaggtatcagaagtgcctggctacaggaatgaaacgggaggccgtccaagaagagagacagcggggaaaagacaaagacggtgacggcgagggcgctggcggtgcccctgaggagatgcccgtcgatcgcatcttagaggccgagctcgctgtagagcaaaaatcggatcaaggcgtggaggggcctggcggaaccggtgctcccagccctaacgaccccgtgacgaacatctgtcaggccgctgacaaacagctgtttactctagtagaatgggcaaaacggattccccatttttctagtctgccccttgacgatcaggtgattctgcttcgtgcgggttggaacgagctgctgattgccagtttcagtcataggagtattgatgttagggatggcatactgctggcgactgggctgcacgtccatcgcaactcagctcactcagccggtgtgggggctatctttgacagagtcctgaccgaactcgtaagcaaaatgcgcgatatgaggatggataaaaccgagctaggctgcttgagggcgatcattcttttcaaccctgacgctaagggactgtccaatccttccgaagttgaggtcctaagagaaaaggtttacgcctctctagagacctattgtaagcagaaatacccagagcaacaggggcgttttgcaaaacttctgttacggctgcctgctctgcggagtatcggtctgaaatgtcttgaacacctctttttctttaaacttattggcgatacgcctatcgacacttttttaatggagatgctggaggcccctcaccaactagcctag

SEQ ID NO: 238556 - DNA, 1179 bp, synthetic construct
  misc_feature 1..1179: note = Description of Artificial Sequence: Synthetic coding sequence
  source 1..1179: mol_type = other DNA
atgggatcccccggtttaccaccgcctgccccaccaggattctcaggccctgtaagctcaccccaaatcaacagtacagtttctcttcctggcggaggatcaggaccacccgaggatgtaaaacctcctgtcctgggtgtgcgaggcttacattgcccgcctccacctggtggcccaggcgctggaaagcgcctatgtgcaatctgcggtgaccgttccagtggtaagcattacggagtatacagctgcgaggggtgcaagggtttcttcaaacgcacaatcaggaaagacctgacatactcctgtagagacaacaaagattgtactgttgataaacgtcaacgcaacagatgccagtactgcagatatcagaagtgtctggctaccgggatgaaaagggaggccgtgcaggaggaaaggcaaagaggcaaagataaggatggagacggggaaggggcaggcggtgcaccggaagagatgccagtggatcggattctggaggcagaacttgcggtggagcagaagtccgaccaaggggttgagggaccgggaggcacaggggctccgtctcccaacgaccctgttacgaacatttgccaagctgccgataagcaacttttcactctggtggaatgggcaaagaggatcccccacttttcatccctacctctggacgatcaagttatcttgctgcgcgcaggatggaacgaattactgattgcctccttttcgcacagaagcatcgatgttcgggatggcatcctcctggctacaggcctgcatgtgcacaggaacagtgctcacagtgctggagtgggagctatctttgaccgcgttctgacagagcttgtttctaaaatgcgcgacatgcggatggataaaacggagttgggatgtctccgggcaataattttgtttaatcctgatgccaaaggattatccaatccttcggaggtagaagtcctgcgagaaaaggtgtatgcctcacttgaaacctactgtaaacaaaaataccccgagcagcagggacgctttgccaagctgcttcttcggttacccgcattgcgaagtatcggcttgaagtgcctagagcacctctttttttttaagcttatcggcgatacaccaatcgacacttttcttatggaaatgttagaggctcctcatcagctggcgtag

SEQ ID NO: 238557 - DNA, 861 bp, synthetic construct
  misc_feature 1..861: note = Description of Artificial Sequence: Synthetic coding sequence
  source 1..861: mol_type = other DNA
atgccacagggcagcgtgggcagatggggttgtgaaaagaagtgtatcgtgggaagccgtcccggaggcggtggggacggcccaggttggatcccacagagacgacgtcgcaggagatggcaggctgagaataataaacccagaagccgcagtcaaggcaggctggacggtactggatgggcaactgcgggaggaatcaattctaccgtaagccttccgggtggtgggtccggccctcccgaagacgttaaacctcccgtcttaggggtacgcggattgcactgtccgccacccccaggaggtcctggagcaggaaagagactttgtgctatctgtggagacaggagttcaggcaaacattacggagtgtatagctgcgagggctgtaagggtttcttcaaaaggaccattcggaaagacctgacctactcgtgtagagataacaaggattgtaccgtggacaaacggcaacggaaccgatgtcaatattgcagatatcagaaatgtcttgccacaggcatgaaacgggaggccgtacaagaggagcggcagcggggaaaggataaggacggggacggcgagggggctgggggtgccccagaggagatgcctgtagacaggattttagaggctgaattggcagttgaacaaaagagtgaccagggcgtggaaggtcccggagggactgggggatcaggtagctccgtaagtgtgggcgtaaatcctctgagctttgtgatgggagtgggcggtggcagcctgggcttgttttacattccgagcccttcttttcctttgatcacatttcttaccctactggggacagggggtgcagccaaacagggacttagtaatatctag

SEQ ID NO: 238558 - DNA, 1170 bp, synthetic construct
  misc_feature 1..1170: note = Description of Artificial Sequence: Synthetic coding sequence
  source 1..1170: mol_type = other DNA
atggggagccctggtctccctcctccagcacctcccggtttcagcgggccagtgtcttccccccaaatcaacagcactgtgagtctgcccggtggcggtagcgggcctccagaggatgtgaaaccaccggtcctgggggtcagagggctgcattgtcctcctccccctggcggtcctggagctggcaaaaggttatgtgctatctgcggagatcgtagctcaggtaagcactacggcgtttacagctgtgagggctgcaagggctttttcaagagaacaatcagaaaggatcttacctactcctgccgcgataataaagattgcactgtcgacaagcgccagcggaatcggtgccaatactgcaggtaccaaaaatgcttagctaccggcatgaagcgcgaggctgtacaagaagagaggcaacgaggaaaggacaaagatggcgacggtgaaggcgctggcggtgcgcctgaagagatgcccgttgatagaatcttggaggcagagttggccgtcgaacagaaaagtgaccaggggggaagccagcatattagtaagtctccaaatgaccccgtaacgaacatttgccaggctgctgacaaacaactgtttacactcgtcgagtgggccaagcgcattcctcacttttctagcctcccacttgacgaccaggtcattttactcagagcaggatggaacgagctattgattgcttccttctcacacaggtccattgacgtcagagatgggattctccttgccacgggcctccacgtccatcgcaactccgcccattcagcgggagtcggcgcaatcttcgatagagttctgacagaactggtgagcaagatgagggatatgcgcatggataaaacggagcttggttgcctgagggccatcattttgttcaatccggatgcaaaggggctgagtaatccttctgaagtggaagtccttcgagaaaaggtctacgcgtctttggaaacatactgtaaacagaaatacccagagcaacaggggagattcgccaaactgctcctgaggctgcccgctctgcggtccattggactcaagtgcctcgagcatctcttctttttcaagctgattggcgacaccccaattgacacatttttgatggagatgctggaggcccctcaccagctggcttag

SEQ ID NO: 238559 - DNA, 1044 bp, synthetic construct
  misc_feature 1..1044: note = Description of Artificial Sequence: Synthetic coding sequence
  source 1..1044: mol_type = other DNA
atgcgcgaatgcgggggtggtccgggagctgggaagcgtctttgcgccatctgtggggatcggtccagcggcaaacattatggtgtttactcttgtgagggatgtaaaggcttcttcaaacgcaccattcggaaagatctgacttattcttgtcgtgataataaggactgtacagtggataagcgccaaagaaatcgttgtcagtattgcagatatcaaaagtgcctcgcaactggaatgaaacgtgaagccgtgcaggaggaacggcagcgaggaaaagataaagatggcgatggcgagggagcgggtggagccccagaggaaatgcccgtggatcgcattctggaagctgagctggccgtggaacaaaaatctgatcagggggttgagggcccaggagggactggaggcagcggcagctctccgaatgacccagttactaatatttgccaggcagccgataagcagctgttcacactggtggagtgggccaaacgcataccccactttagctcactgcctctggacgaccaggttatcctcttgcgggcaggctggaatgaactgttaatcgctagtttcagccacagaagcattgacgttcgagacgggatcttattggcaacaggtctccacgtgcacaggaattcagcccatagcgccggtgtaggcgcaatcttcgacaggtcactctcccgagttctgaccgagctggtgagtaaaatgcgcgacatgcgaatggacaaaaccgaactaggttgtttgcgagccattattctctttaatccggatgccaagggcctgagtaacccttctgaggtggaggttctccgggaaaaggtgtatgcttctctggagacatattgcaaacagaaatatccagagcaacagggaaggttcgcaaaactcttgttacggctcccggcattacggagcataggcctcaagtgccttgaacacctgttctttttcaagttaattggcgataccccaatcgatactttcctgatggagatgctcgaggcaccacaccagctggcttag

SEQ ID NO: 238560 - DNA, 1170 bp, synthetic construct
  misc_feature 1..1170: note = Description of Artificial Sequence: Synthetic coding sequence
  source 1..1170: mol_type = other DNA
atgggaagccccggtttgccaccacccgctcctcctggcttttccggtcccgtgagcagcccgcagatcaattctacagtttctttgccgggaggtggaagcggaccaccagaggatgtcaaacctcccgtgctgggtgtcagaggactgcactgccctccacctccaggcggtcccggagctgggaaacggctgtgcgcaatctgtggggacaggtctagcggcaagcactatggcgtttatagctgcgagggttgcaaggggtttttcaagagaactattaggaaggacttgacttatagctgcagagataataaggattgcactgtagataaacgtcagcgaaatcgatgccagtactgcagatatcagaagtgtttggcaacagggatgaagagggaggctgtgcaggaggagaggcaacgcggtaaggacaaagacggagacggcgaaggggctggcggagcaccggaggagatgccagtggatcgaattctggaggcagagctggccgtggaacaaaagtccgatcaggggggttctcagcacatctcaaaatccccaaacgatcccgtgactaatatctgtcaggcagctgataaacaactgtttacattggtggagtgggcaaaaagaatcccacattttagctcattgcctctcgatgaccaggtcatactgttgcgggcaggctggaatgaactattgatcgcctccttcagtcaccggtccatcgatgtccgcgatggcatcctcttagccaccggactccacgtccaccggaactcggcacactcagcaggggtaggtgctatcttcgacagggtgttgacagaactcgtatccaagatgcgtgatatgagaatggacaagacagagctggggtgtctccgcgctatcattctgttcaaccccgacgccaagggcctgtccaacccttccgaagtagaggtccttcgcgagaaggtttacgcaagtctggagacttattgcaaacaaaagtatcctgagcagcagggaaggttcgcaaaattattgctgcggctacctgcactgcgatctatcgggctgaaatgcctggaacatctttttttcttcaaactgattggagacacccctattgacacctttttgatggagatgcttgaagcccctcaccagctggcgtag

SEQ ID NO: 238561 - DNA, 1044 bp, synthetic construct
  misc_feature 1..1044: note = Description of Artificial Sequence: Synthetic coding sequence
  source 1..1044: mol_type = other DNA
atgcgagagtgcggagggggaccaggggctggaaagcgtctctgtgcaatttgtggagacagatccagtggtaagcactacggagtttactcctgcgagggttgcaagggattctttaaacgtacaatccggaaggacctgacttactcctgccgggataacaaagattgtactgtcgataaacgtcaacgtaatcgctgtcagtactgcaggtaccagaagtgtctagccactggcatgaaacgggaggcagttcaagaagaacggcaaagggggaaggacaaagatggagatggggaaggggcaggcggagcccctgaagagatgcccgtggaccggattctggaagcggaattggccgtagagcagaaatctgatcagggcgtcgagggcccaggcggtaccggcggaagtggctcctctcctaacgacccagttaccaatatctgccaggcagccgataaacaactcttcaccctggttgaatgggctaaacggatcccccacttttctagtcttcccctagatgaccaagtcatccttctgcgcgctggttggaatgaacttctgatcgcttctttctcacaccggtcaatcgatgtccgtgatggcattttactcgccaccggtctacatgtccaccgcaacagcgctcactcagctggcgttggggcaatatttgatcgcagcttatctagagtattgactgaactggttagtaagatgcgcgatatgagaatggacaaaaccgaactggggtgtctgcgtgcaattatcttattcaaccctgacgccaagggcctgtctaatcccagcgaagtggaagtgttgcgtgaaaaggtatacgcctcgctggaaacgtactgtaaacagaagtacccggagcaacaaggaagatttgcaaagctcctactgcggctgcctgcactgagatctatcggtcttaaatgcctggagcacctcttcttttttaagctgattggagataccccaatagatacttttttaatggagatgctggaggctcctcatcagctggcatag

SEQ ID NO: 238562 - DNA, 861 bp, synthetic construct
  misc_feature 1..861: note = Description of Artificial Sequence: Synthetic coding sequence
  source 1..861: mol_type = other DNA
atgcctcagggctcggttgggcgatggggctgtgagaaaaagtgtatcgtgggatcacggcctgggggtggcggagatgggcctggatggatccctcagcgtcgtcgaaggcggaggtggcaagcagaaaataataagccacgctctcgcagtcagggccgtctcgatgggacagggtgggcaactgcaggtggcattaatagcacagtgagtctgccaggaggtgggagtggaccacctgaagacgttaaacccccagtactgggggtccgaggactccactgccctccccctccgggagggccaggcgcagggaaacgcttatgtgctatttgtggagaccggtctagtggcaaacactatggcgtgtacagttgcgaggggtgcaagggcttttttaagcgaacaattagaaaggaccttacgtacagctgcagggacaataaagattgcaccgtagataaaagacagcggaatcgttgtcaatactgtagataccaaaaatgcctggccacaggaatgaaaagagaggccgtccaggaagagcgccagagaggaaaagacaaggatggggacggtgaaggggctgggggagcgccagaagagatgccagttgaccgcatcctagaagccgagctggcagttgaacaaaaatccgatcagggagtcgaaggtccaggtggcaccggtggatctggttcatctgtctctgtgggagtcaaccctctgtcattcgttatgggagtgggcggaggctccctgggtctcttttatattcccagcccttctttccccctgatcacctttctcaccctgctaggcaccggcggtgccgcaaagcagggactgtctaatatctag

SEQ ID NO: 238563 - DNA, 1392 bp, synthetic construct
  misc_feature 1..1392: note = Description of Artificial Sequence: Synthetic coding sequence
  source 1..1392: mol_type = other DNA
atgtatggcaactattcccattttatgaagttcccagccggatacggcggttctcccggacacacagggtcaacctccatgtctccttctgccgcattgtctaccggaaagccaatggactcccatcctagctacaccgacacacctgtgtctgcacctaggaccctgagcgcggtcggcactcctctgaatgccctgggctccccttaccgggtaatcacgtccgctatgggtccaccaagcggtgccctggccgcaccgccaggtattaatcttgtcgctccaccaagctctcaactgaacgtagtgaacagtgtaagcagcagtgaggatattaagcctttgcctgggctccccggtatcggcaatatgaactacccaagtacgtcacccggtagcctggtgaagcacatatgcgctatctgtggcgatcgctcgtcagggaagcactatggggtgtatagctgtgagggatgcaaaggcttctttaaaagaaccatccgcaaggatctgatctacacatgcagggacaacaaggactgcctgattgataagagacagaggaacagatgtcagtactgccggtaccagaaatgcttagtgatgggaatgaagcgggaggccgtccaggaggagaggcagcgctcccgggaacgggctgagtcagaagcagaatgcgctactagcggtcacgaggacatgccggtcgaaagaatactggaggctgaattggctgtcgagccgaagaccgagtcctacggggatatgaatatggaaaattccactaacgatcctgtaactaatatctgccacgctgctgataagcagctatttacattagtggagtgggccaaacgtatcccgcacttcagcgacctgacactcgaagatcaggtgatcctgctcagagccggttggaacgaactactgattgccagctttagccaccgctcggttagcgtccaggatggtatcttactcgccaccggacttcacgtgcataggtcatccgctcactctgccggtgtcggctcaatttttgatagagtcctgaccgagctcgtgtccaagatgaaggacatgcagatggataagagtgaactggggtgtctgcgcgctattgtgttgttcaaccccgacgcaaaaggcttgagcaaccccagcgaagtcgaaaccctccgtgagaaagtgtatgcgaccctcgaggcttacaccaaacagaagtaccctgagcagccaggtagattcgctaaactgctgctccgcctccccgctttgcgctctatcggactgaagtgtttggagcatttgttcttctttaagttaattggggacacacccatagatactttcttgatggagatgttagaaacccccctgcagataacctag

SEQ ID NO: 238564 - DNA, 2619 bp, synthetic construct
  misc_feature 1..2619: note = Description of Artificial Sequence: Synthetic coding sequence
  source 1..2619: mol_type = other DNA
atggcaaccgcctgtaaacgttcaggcgagcctcaatcagatgatatcgaggcttccagaatgaaacgggctgcggcaaaacacctgatcgagaggtactatcaccagttgaccgaggggtgtgggaacgaggcatgcacaaacgaattctgcgcctcttgccctacattcctccgcatggataacaacgcggcagcgattaaagctctggagctatataagataaatgctaagctgtgtgatccccacccctctaaaaaaggtgcttcaagcgcatacctggaaaactcaaagggtgctcccaacaactcctgcagcgaaatcaagatgaacaaaaaaggcgcacgaatcgacttcaaggatgtcacctacctgactgaggagaaggtttacgaaattttggaactgtgtcgggaaagagaggattatagcccgttaattagggtgattggcagggtgtttagcagtgccgaggcactcgtgcaatctttcaggaaggtgaagcagcatactaaggaggaattgaaaagtctgcaagccaaggatgaggacaaggatgaggacgagaaggagaaggccgcatgtagcgccgcagccatggaggaagatagtgaagcttcatcctcacgcattggcgacagttcacagggtgacaacaacctacagaagctcgggccagacgatgttagtgttgacatagacgcaattcgtagggtttatactcggctgttgagtaacgaaaaaattgaaactgctttcctcaacgcacttgtgtatctgagccccaatgttgagtgtgacctcacttaccacaacgtctactcccgcgatccaaactatctgaatttatttatcattgttatggagaaccggaatctgcacagtcccgagtacctggagatggcactccccctcttttgcaaggcaatgagtaagctgcccctggctgcccagggtaaactgatccgcctgtggtcgaaatacaacgccgatcagattcggcgtatgatggagactttccagcagctgataacttataaggtaatttctaacgagtttaactctaggaacctcgtaaatgacgatgatgccatagtcgcggcatccaagtgcctgaaaatggtgtattatgcaaacgttgtaggaggggaggtcgacactaatcacaatgaggaggacgacgaggagcccattcctgagtcttccgagctcacccttcaggaattgcttggggaggaacggaggaacaagaagggtcccagggtggacccactcgaaacagagcttggggtcaaaactctggactgccgcaaaccacttatcccatttgaagagttcattaatgaaccccttaatgaagtcctcgagatggacaaggactacaccttcttcaaagtggagactgagaacaagttttccttcatgacttgtccattcatcttgaatgcagttacaaaaaaccttgggctgtactatgacaaccgcattaggatgtactctgagaggcggatcaccgttctctattccctagtgcagggccagcagctgaatccttatctgcgcctgaaggtgcgacgagaccatataatcgacgatgccctggttaggctggagatgatagccatggaaaaccctgccgacctgaaaaagcaactgtatgttgagtttgagggtgagcagggtgtggatgaaggtggcgtgtccaaggagttctttcagcttgtcgtagaggagatatttaacccagacattggcatgtttacatacgacgagtcaaccaagttgttttggtttaatccatcaagctttgaaactgagggccaattcacactcatcggaatcgtactggggctcgccatttataataactgcattctggacgtgcattttcctatggtggtctaccggaagctcatgggtaagaagggtactttccgggacctaggcgatagccatccagttctctatcagagcctgaaggatttgctggaatatgagggcaacgtggaagacgacatgatgatcacttttcagatatctcaaactgacctttttggaaaccccatgatgtacgacctcaaagagaatggtgataagattccaatcacaaatgagaaccgcaaagagtttgttaatttgtattcagattatatcctaaacaaatccgtggaaaaacagtttaaagcattccgcagaggatttcatatggtcacaaatgagagcccgttgaagtatttattccgccctgaggagatagaactgttgatctgtggatcacgcaatctggactttcaagcactggaagaaacaaccgagtatgatggaggatatacccgcgattctgtgctcatcagagaattttgggagatcgtgcactctttcactgacgagcagaagcggctttttctccagttcacaaccggcaccgaccgtgccccagtcggcggattaggtaaactcaaaatgatcatcgctaagaacggcccagatacggaacggctccccacctcacacacctgcttcaatgtactcctcctgcccgagtattcgagtaaggagaagttgaaggaacgactcctgaaagcgataacttacgccaaaggattcggaatgctttag

SEQ ID NO: 238565 - DNA, 75 bp, synthetic construct
  misc_feature 1..75: note = Description of Artificial Sequence: Synthetic coding sequence
  source 1..75: mol_type = other DNA
atgactcgcgatcagaacggaacctgggaaatggagtcgaatgagaattttgagggatacatgaaagccctgtag

SEQ ID NO: 238566 - DNA, 312 bp, synthetic construct
  misc_feature 1..312: note = Description of Artificial Sequence: Synthetic coding sequence
  source 1..312: mol_type = other DNA
atgacgcgggaccaaaacggtacttgggaaatggagtcaaacgaaaacttcgaggggtatatgaaggctttggacatagattttgccaccaggaagattgctgtgagactgacccaaacaaaggtgattgatcaagatggtgacaactttaaaacaaaaacgacatcgacattcaggaattatgacgtagactttacagtgggagtggaatttgacgaatatacaaagtccctagataaccgccatgttaaggctctcgtcacttgggaaggagatgtactcgtctgcgtccagaagggagaaaaggagtag

SEQ ID NO: 238567 - DNA, 1494 bp, synthetic construct
  misc_feature 1..1494: note = Description of Artificial Sequence: Synthetic coding sequence
  source 1..1494: mol_type = other DNA
atgggcctccccgcattactggcatcggccctgtgtacatttgttctgcccttactactgttccttgccgctatcaagttgtgggacctctattgtgtctccggacgggacaggagctgtgctctccctctgccgccaggtacgatggggtttccctttttcggagaaacactgcagatggtgctgcaaagacgaaaatttctgcaaatgaagagaagaaaatatggcttcatttataaaacccacctcttcggaaggcctaccgtccgtgttatgggtgccgataatgtgcgcaggatccttttgggagagcacaggctcgtatccgtacattggccagcatctgtcagaactattctggggtctggatgcttgtccaacctccatgattctagccataagcagagaaaaaaggtgatcatgcgtgctttctccagggaagccctggagtgctacgtacctgttatcacagaagaggtcgggtcgagcctggaacagtggctgtcctgcggggagaggggtctgctggtgtatccggaggtgaagcgcctcatgttccgaatagccatgcgaattctgctagggtgcgagccccagctggccggtgacggtgactccgaacagcagcttgtcgaggcatttgaggaaatgacccgtaatctgttttccctccctatcgacgtgcccttttccggcttgtatcggggaatgaaagctcgcaatctaatccacgccaggatcgagcagaatatcagggcaaagatctgcgggcttcgcgcatccgaagctggacaggggtgtaaagacgccctacaactgctcatagagcatagctgggaacgtggggaacgcttggacatgcaggctctgaaacagtcttccaccgagcttctgtttggaggtcatgagactactgcttctgcagcgacatctctcataacctatctcgggctctatccccacgtgctgcagaaggtgagagaggagctgaagagcaagggcttactgtgcaagagcaatcaagacaataagctcgacatggaaattctggagcaactaaagtacatcgggtgcgtgatcaaggagacgctgcggttgaatcctcccgtgcctggcggtttccgtgttgcactgaaaacttttgagctcaacgggtatcagattcctaaaggatggaacgttatctattcaatctgcgatacacatgacgtagctgagatctttactaataaggaggaattcaaccctgaccggtttatgttgccacacccagaggacgcctcacgattttcattcatccccttcggcggtgggctgcgttcctgcgtgggcaaggaatttgctaagatccttttgaaaattttcacggtggagttggccaggcattgtgactggcagcttctgaacggcccaccaacaatgaagacttccccaactgtttacccggttgataacctaccagctagatttactcattttcatggggagatctag

SEQ ID NO: 238568 - DNA, 600 bp, synthetic construct
  misc_feature 1..600: note = Description of Artificial Sequence: Synthetic coding sequence
  source 1..600: mol_type = other DNA
atgaattactccaagatccccgctcaggtggacctgcgcagacagacagagcgggattgtagggtctcgtccttccgggtgaaggagaatttcgacaaagccagattctcagggacttggtacgccatggccaagaaggaccccgagggtctctttcttcaggacaatatcgtagctgagttcagcgtggatgagacaggacagatgagcgctaccgcgaaaggtcgtgtaagacttcttaacaattgggatgtgtgtgccgacatggtcggcactttcaccgacacggaagacccagctaagtttaagatgaagtattggggcgtcgcgagttttctacagaagggcaatgacgatcactggatcgtagacactgactatgatacttatgccgttcaatattcgtgtagacttctaaacctggacgggacctgcgccgatagctactcattcgtgttctctagagatcccaacggactgcctcctgaggcacagaagattgtcagacaacgtcaagaggagctttgtctcgctcggcagtatcgtctgattgttcataacggttattgtgatggcagaagcgagcgaaatctgttgtag

SEQ ID NO: 238569 - DNA, 606 bp, synthetic construct
  misc_feature 1..606: note = Description of Artificial Sequence: Synthetic coding sequence
  source 1..606: mol_type = other DNA
atgaaatgggtctgggccctattactgctagccgcactgggtagcggtcgagcagagagagattgtcgcgtgagttccttccgagttaaggagaattttgataaggctaggttcagcggcacgtggtacgcaatggcgaagaaagaccccgaaggcttattcctgcaggataacatcgtagctgagttctccgtagacgagaccggccagatgtctgccactgctaagggaagggtgcgcctgctgaacaattgggatgtgtgtgccgatatggttggtacgtttaccgacactgaggacccagcaaagttcaaaatgaagtactggggggtcgcctcatttttacaaaaaggaaatgacgatcactggatcgttgacaccgactacgacacatatgccgtccaatattcctgtagattgctgaacctggacggtacttgtgcggattcctactctttcgtattcagtagagacccaaacggcttgccaccggaggcccaaaagatcgtacggcaacggcaggaggagctgtgcctggccaggcagtaccgtctgatcgtgcacaacggatattgcgacggtcgctctgaacggaacctgctgtag

SEQ ID NO: 238570 - DNA, 606 bp, synthetic construct
  misc_feature 1..606: note = Description of Artificial Sequence: Synthetic coding sequence
  source 1..606: mol_type = other DNA
atgaaatgggtatgggcactgctgcttctggccgctcttgggtcgggcagagcagagagggattgtcgggttagctcatttcgggtgaaagaaaatttcgataaagcacggttcagcggcacatggtacgcaatggccaaaaaggacccagaagggctgttcctccaagacaatatagtggccgagttcagtgtggacgagacagggcagatgagtgcgaccgcaaagggcagagtgcgcctgctgaacaattgggatgtgtgcgccgatatggtaggtaccttcacagatacagaagatcccgcaaaatttaaaatgaaatactggggcgttgctagcttcctccagaaaggcaatgacgaccattggattgtcgacacagattacgacacatacgccgtccagtatagttgtcgcctgctgaacctggacggcacctgtgccgatagttactcgttcgtgttttcgcgggaccctaacggtttgccccctgaagcccagaaaatagttcggcagaggcaagaagagctctgtctagctcggcagtatcggctcatcgtccacaatggctattgtgacggtaggtctgagcggaatctgctttag

SEQ ID NO: 238571 - DNA, 600 bp, synthetic construct
  misc_feature 1..600: note = Description of Artificial Sequence: Synthetic coding sequence
  source 1..600: mol_type = other DNA
atgaactacagtaagatcccagctcaggtggacctgcgtcgccaggctgagagagattgcagggtttcttcttttcgggtcaaagaaaactttgataaagcaagattttctggtacttggtatgctatggccaagaaggaccccgagggcctgttcctgcaagataatatcgtggcggagttcagtgttgacgagacaggacagatgtccgccacagccaaaggtagggtccgactcctgaacaactgggacgtgtgcgccgatatggttggtaccttcactgacaccgaggacccagccaagtttaaaatgaagtactggggcgttgcttctttcctccagaaaggaaacgatgatcattggatcgtggataccgattacgatacatatgcggttcaatatagttgccgccttctgaacctcgacggcacttgtgcagacagctattcattcgtgttctctagagacccaaacggtctcccccctgaagcccagaagatcgtccgacagagacaggaagaactgtgcctggcccgtcagtaccgattgatcgttcacaatggttactgtgacgggcgttccgagcgcaaccttctatag

SEQ ID NO: 238572 - DNA, 408 bp, synthetic construct
  misc_feature 1..408: note = Description of Artificial Sequence: Synthetic coding sequence
  source 1..408: mol_type = other DNA
atgcctcccaatctgaccggctattataggtttgtgtcgcagaagaacatggaagactatcttcaggccctcaatatctcgctggccgtcagaaaaatagcgctgctcttaaagcccgataaagagattgaacatcagggcaaccatatgacggtgagaacgctgagcaccttccgcaactatacagtccagttcgatgtgggagtggaattcgaagaagacctgaggagcgtggacggcagaaagtgtcagacgatcgtgacctgggaggaagagcatttggtgtgtgtgcagaagggagaagtacccaaccgtggctggaggcattggctggaaggcgagatgctgtatctggagctgacggctcgagacgctgtgtgcgaacaggtgtttaggaaagtgaggtag

SEQ ID NO: 238573 - DNA, 1026 bp, synthetic construct
  misc_feature 1..1026: note = Description of Artificial Sequence: Synthetic coding sequence
  source 1..1026: mol_type = other DNA
atgaacatagtcgtagaattctttgtggttaccttcaaggtgttgtgggcatttgtgctcgcagctgcgaggtggctcgtgcgccctaaagagaagtctgtggcaggacaagtatgtttgatcaccggggcagggagcggcctcggaagactctttgccctagagttcgccagaaggagagcattactcgtactgtgggacataaacacccagtccaatgaggagactgcaggaatggtgaggcacatttatcgggatctagaggcagccgatgcggctgctctgcaggccggaaacggagaggaagagatcttgccacattgcaatttgcaggtgttcacctatacctgcgacgtaggcaagagggagaatgtttacctgacggctgagagagtgagaaaagaggtcggagaggtgagtgtgttagtgaacaatgcaggcgttgtcagcggccatcacctcctggaatgtcccgacgaattgatcgaaaggacgatgatggtgaactgtcatgctcatttttggactactaaggcctttcttccaacaatgctggaaattaaccatgggcatatcgtcacagtggcgagttcactgggcctgttcagtacagcgggagtggaagactactgtgcctccaaattcggagtggtggggtttcatgagagtctgtctcacgaactaaaagccgctgaaaaagatggcattaaaactacccttgtgtgcccttatctggtggacaccggcatgtttcgaggttgccgtatccggaaggaaatcgagccctttttgcctcccttgaagccggactactgcgttaaacaggccatgaaggctatcctcactgaccagcctatgatatgcacaccaagacttatgtacatagtgacctttatgaagtcgatcttgcctttcgaagctgtggtgtgtatgtacaggttcctcggagctgacaagtgcatgtatccattcatcgctcagaggaaacaagcaactaataataatgaggccaagaatgggatctag

SEQ ID NO: 238574 - DNA, 957 bp, synthetic construct
  misc_feature 1..957: note = Description of Artificial Sequence: Synthetic coding sequence
  source 1..957: mol_type = other DNA
atggtggagcttatgttccccctcctcttgttgctactgcccttcctgttatacatggccgcacctcagatacggaaaatgctctccagcggtgtgtgcaccagtaccgtgcagttgcccggtaaggtggtcgtggtgacaggggctaacactgggatcgggaaagaaacggcaaaggagctggcacaaaggggagctagggtgtacctggcctgtcgcgatgtcgaaaaaggcgagctggtagctaaagaaatccagactaccactgggaaccagcaagtgttggtgagaaagctcgaccttagtgatactaaaagtattcgagcattcgcgaagggctttttagcagaagagaagcatcttcacgtgttgataaataatgccggagtaatgatgtgcccgtactccaaaacagccgacgggtttgaaatgcatatcggtgtcaaccatttgggacactttctcttaactcacctcctgctggagaaactgaaagagtcagccccaagcagaatagttaacgtgtcgagccttgctcatcatctcgggaggatccactttcacaatctccagggcgaaaagttttataatgcaggacttgcctactgccactccaagctcgccaatattctgtttactcaggaactagcgcgaagattgaagggaagtggggtgactacttactccgtgcatcccggaacagtgcaaagcgagctagtgaggcacagctctttcatgcggtggatgtggtggttattttcattcttcattaagacacctcaacagggcgctcaaacttccctgcattgcgctctgaccgagggcctcgagatcctgagcgggaaccactttagtgactgccacgtagcctgggtctcggcccaggccaggaatgaaacaattgcgagacgactgtgggatgtgagttgtgaccttcttggactccctatcgattag

SEQ ID NO: 238575 - DNA, 918 bp, synthetic construct
  misc_feature 1..918: note = Description of Artificial Sequence: Synthetic coding sequence
  source 1..918: mol_type = other DNA
atggtggaactcatgttccccctcctacttctgctcttgccgttcctcttgtacatggcggcaccacaaatcaggaaaatgctgagcagcggcgtttgtactagcacggtccagttgcctggcaaagtagttgtggtcacgggggctaacactggggctagagtgtatcttgcctgtagggatgtagagaagggtgaacttgtggctaaggagattcagaccacgactggtaatcagcaagtgctggtcaggaaattagatctgtctgacaccaagtcaattagagcattcgcgaagggctttctggcagaggaaaaacatctgcacgtacttattaacaacgccggagtgatgatgtgtccctacagtaaaaccgccgatggattcgagatgcacatcggtgtcaaccacctgggccacttcctgctcactcacctgctgttggagaagctcaaggaaagcgcaccatcgagaatcgtgaacgtgtcttcactggctcatcaccttggacgcatccattttcacaacttgcagggcgagaagttttacaatgccggacttgcttattgccactccaaactcgctaacatcctatttacccaagagctggccaggcgccttaaagggagtggtgtcaccacatactcagtccaccctggtactgtccagagcgaattagtgcggcattcttcttttatgagatggatgtggtggctcttctccttctttatcaagaccccacagcaaggtgcgcaaacctcactgcattgcgccctgaccgagggcctcgaaatcttatctggtaatcacttcagcgattgtcacgtcgcgtgggtctctgcgcaggctcgtaacgagactattgcgagacgactgtgggatgtttcatgcgacctgctcggactgccgatcgattag

SEQ ID NO: 238576 - DNA, 951 bp, synthetic construct
  misc_feature 1..951: note = Description of Artificial Sequence: Synthetic coding sequence
  source 1..951: mol_type = other DNA
atgctggttacacttgggctgctgaccagctttttctcatttctttatatggttgctccaagcattagaaagtttttcgccggaggtgtctgtcgcaccaatgttcagctgccgggtaaagtggtggtgatcacgggtgctaacaccgggatcggaaaggagactgcgcgtgagctggcttcccgcggagcccgagtatatatagcttgtcgagacgttttaaagggagagtcagccgcttccgagattcgcgttgacactaaaaacagccaagtgctggtcagaaaactcgacctgtctgacacaaaaagcatcagggcctttgcagagggcttcctggcagaggaaaaacagctccacattctcattaataacgctggcgtgatgatgtgtccctattcaaaaacagccgacggttttgagacccacctcggggtgaaccacttgggacatttcctcttgacgtacttgctccttgaaagactgaaggtgtccgcccctgcgcgtgtcgtgaacgtgtcctcagtagcacaccacatcggcaagatcccatttcatgacctccagtccgaaaagaggtattcacggggtttcgcctattgccactccaaattagcaaacgtgctgttcactcgcgagcttgctaaacgcctccaaggcaccggcgtcaccacatatgccgtgcaccccggagtggtgcgctcggagctggtgcgccattcttctctgctgtgtttgctctggcgcctgttcagccccttcgtcaagactgccagggagggagctcagacatcactacattgtgcgttagctgaagggctcgaaccgctcagtggtaagtacttttccgactgtaagcgcacctgggtttctccacgggctcggaacaacaaaactgccgaaagactttggaacgtctcctgcgaactgctggggattaggtgggagtag

SEQ ID NO: 238577 - DNA, 951 bp, synthetic construct
  misc_feature 1..951: note = Description of Artificial Sequence: Synthetic coding sequence
  source 1..951: mol_type = other DNA
atgttggtaaccctgggcctgctgacctctttttttagttttctgtacatggtagccccatcgatacgtaagttctttgctgggggtgtttgccggaccaatgttcaattgccagggaaggttgtagtgatcacgggcgctaatactggcattgggaaagaaacggccagagaattagcatccagaggagcaagggtctatatagcttgcagagacgttctgaagggcgaaagcgcggcatctgagatcagggtggacactaaaaactcccaggtgctcgtacggaaactcgatctttctgatacaaaaagtataagagcattcgcagaaggattcctcgcagaggagaaacagttgcacattctgatcaacaacgccggagtgatgatgtgtccttattcgaagacggccgatggttttgagacacatctcggagttaaccatcttggtcatttccttctgacgtatttacttctcgaacgcttaaaagtgagcgcccctgccagagtcgtcaacgtctctagcgtagcccatcacatcgggaaaatcccatttcacgatttgcagtccgaaaagcggtattctcgtggttttgcatactgtcacagtaagctggcaaacgtgctcttcacacgggagctggctaagcgcctgcagggaaccggtgtcactacgtacgcagtccaccctggagtggtcaggagtgaactggtgaggcacagctctctgttgtgcctgttgtggcgtctattctctcccttcgtgaagaccgcccgagaaggcgcacagacttcgttgcattgcgcactggccgaagggcttgagcccctgtctggtaagtattttagcgactgcaaacggacctgggttagcccaagagccaggaataacaagactgccgaacgactctggaatgtgtcctgtgaactactaggcataagatgggaatag

SEQ ID NO: 238578 - DNA, 951 bp, synthetic construct
  misc_feature 1..951: note = Description of Artificial Sequence: Synthetic coding sequence
  source 1..951: mol_type = other DNA
atgctggttactctgggactgctgacttcctttttcagcttcctatatatggtggcccctagtatacgaaagtttttcgccggtggcgtatgccgaactaacgtgcagctgccgggtaaggtcgtggtaataaccggggctaacaccgggataggtaaggaaacggcgagagaattagcatctcgcggagccagagtgtatatcgcctgccgcgacgtactgaaaggcgagtctgcagcatcggagatcagggttgacaccaaaaacagtcaagtgctcgtcaggaagttagatctgagcgacactaaaagtatccgggcatttgctgaggggttcctggcggaagaaaaacagcttcacattttgatcaataacgccggagtcatgatgtgcccgtatagcaagactgccgacggctttgaaacacatctcggggtgaatcacttgggacacttcttgcttacttacctccttctcgagaggctcaaggtctcggctccagccagggtcgttaatgttagcagtgtagcgcaccatatcgggaaaattccgtttcatgacctccagtctgagaaacgctactcgcggggttttgcgtactgtcactctaagctcgcgaatgtcctattcaccagagagttagccaagagacttcagggcacgggcgttacaacgtacgctgtgcatccaggcgtagtcaggagtgagctggttaggcactcatctctgctctgtctgctgtggcggctgttttccccctttgtcaagactgctagggaaggcgcacagacttccctgcactgcgctctggctgaaggattggaacccctgtctggcaagtacttttcggactgcaagcggacctgggtgagccccagagccagaaacaacaagaccgcagagcgattgtggaacgtttcatgtgaactgcttggcataagatgggaatag

SEQ ID NO: 238579 - DNA, 957 bp, synthetic construct
  misc_feature 1..957: note = Description of Artificial Sequence: Synthetic coding sequence
  source 1..957: mol_type = other DNA
atgtggctgccattgctgttaggcgcactattatgggctgtcctctggcttctgcgtgaccgacaatcgcttcctgcttcaaacgcttttgttttcataactggttgtgattcagggtttggcaggttgctggcacttcaattggatcaaagaggctttcgtgttcttgccagttgtctcacgccaagtggcgctgaagacctgcagagggtcgctagctctcgattgcacactacactcctggatattaccgatccccagtctgtccagcaggctgccaaatgggttgagatgcacgtgaaagaggccggactttttgggttggtgaataacgcaggagtagcagggatcatcgggccaacaccgtggctgaccagggatgactttcaacgcgtccttaacgtgaacacgatggggcctattggcgtgacccttgctctactgcccctcttgcagcaggcccgaggacgggttatcaacattacatccgttttaggcaggttggcggcaaacggcggaggatactgcgtttctaaatttggcctggaggctttttctgacagtcttaggcgcgatgtggctcatttcggcattcgagtgtcgatcgtggagccaggattcttccgaaccccagtgaccaacctggagtccctagagaaaacccttcaggcctgttgggcccgactgcccccagccacccaggcccattacggcggagcctttctgaccaagtatctgaaaatgcagcagcgtataatgaatttgatttgtgacccagatctgactaaagtgagccgctgcctcgagcatgcgctgaccgccagacatccccgaacaaggtatagcccaggttgggacgctaagttgctgtggcttccagcatcctacctgcccgcttctctggtcgatgcagttctcacctgggtgttgcccaagccggcacaagcagtctactag

SEQ ID NO: 238580 - DNA, 957 bp, synthetic construct
  misc_feature 1..957: note = Description of Artificial Sequence: Synthetic coding sequence
  source 1..957: mol_type = other DNA
atgtggcttcccctcctcttaggggctctgctttgggccgttctgtggctgcttcgagaccggcagtccctgcccgctagtaatgcatttgtgtttatcacaggctgtgacagcggattcggcagactgcttgctctacagcttgaccaaagaggctttagggtgcttgcttcctgtttgactccttctggcgctgaagacctccagagggtggcatccagccgtctgcatacaacactattggacattaccgacccccagagcgtccagcaggctgccaaatgggttgaaatgcatgtgaaagaggctggactgttcggcctggtcaataacgcaggtgttgctggaatcatcgggcctacaccttggctgacccgtgacgactttcagcgcgtccttaatgtgaacaccatgggacccattggcgtgacattagctctgctgcccctgctgcagcaggccagggggagggttatcaatattactagtgtactcggtcgcctggctgccaacgggggaggatactgtgtttccaagtttggtttagaagcattttctgatagtctccggagggatgtagctcacttcggaattcgcgtttcaattgtcgagcccggtttttttcgcacaccagtcaccaatttagaatctctcgagaagacattgcaagcttgctgggcccgattgccacctgcaactcaagctcactatggaggcgctttcctgacgaaatacctgaaaatgcaacagcggattatgaacttgatttgcgaccctgacctgactaaggtgtctaggtgcctggagcatgcacttaccgctcgtcatcccaggacccggtatagcccaggttgggacgcgaagctgctatggctccctgcatcttatctgccagcctctctcgttgacgcagtattgacttgggtccttccaaagccagctcaagctgtttactag

SEQ ID NO: 238581 - DNA, 936 bp, synthetic construct
  misc_feature 1..936: note = Description of Artificial Sequence: Synthetic coding sequence
  source 1..936: mol_type = other DNA
atggctgctgcgcctcggacggtgcttatatcaggatgttcttctggtatcggtctggaattagccgtgcaactggcccatgaccccaagaagagataccaggtggtggcgactatgagagacctagggaaaaaagagacccttgaggctgcagcaggcgaagccctggggcagacacttactgtggcacaactcgacgtgtgttcggacgaaagcgttgctcagtgcctcagttgcattcagggagaagttgacgtcctcgtgaacaacgccggtatggggttggtgggcccactagaaggcctgtctctagcagcaatgcagaatgtcttcgacacgaacttttttggggctgtacggcttgtcaaagccgttttgccaggaatgaagcggagaagacagggtcacattgtggtcattagctccgtgatggggctccagggtgtgatcttcaacgacgtgtatgctgcatcaaagtttgctttggagggtttttttgaaagcctcgcgattcagttactccaatttaacatctttataagcttggttgagcccggtccagtggtcaccgagtttgaaggcaagttgctggctcaggttagtatggcagagtttcccggaaccgaccctgagactctacactacttcagggatttatacctgcctgcctcaagaaaactgttctgttctgtgggccagaacccccaagacgtggtccaggcaatcgtgaatgtgatctcctcaacgcgccctcccttaagacggcagaccaatatccggtactctcccttaacaactctgaaaactgtggattcttctggctccctttatgtgcgcaccactcaccggctgctcttcaggtgccctagactcctgaatctgggacttcagtgtctttcttgtgggtgtctgccgacacgggtgcgacccagatag

SEQ ID NO: 238582 - DNA, 675 bp, synthetic construct
  misc_feature 1..675: note = Description of Artificial Sequence: Synthetic coding sequence
  source 1..675: mol_type = other DNA
atgtccagaaaaatcgagggtttcttgctactcctgctcttcggctacgaagcgacactgggtcttagctccacagaggacgagggagaggacccctggtaccaaaaagcgtgtaagtgcgactgtcaaggcggtccaaacgccctgtggtctgcaggggcaacttcactggactgcattcccgaatgtccctaccataagcccctgggctttgaaagcggggaggtgacacccgaccagattacctgctccaaccctgaacagtatgtggggtggtacagttcctggaccgccaataaggcccgactcaacagtcaaggatttggttgtgcttggttgtcaaaattccaggactcctctcaatggctccagatagatctgaaggagatcaaggtcattagcggaatcctgactcaagggagatgcgacatagatgaatggatgaccaagtattcagtgcagtaccgaaccgacgaacggctaaactggatctattataaagaccagacggggaataacagagttttctatgggaattctgatagaacttccactgtacaaaacctcctgcgacccccaattatcagcaggttcatcaggttaattccactggggtggcatgtgcgcatcgccattcgcatggagcttctagagtgcgtgtcgaaatgcgcttag

SEQ ID NO: 238583 - DNA, 4077 bp, synthetic construct
  misc_feature 1..4077: note = Description of Artificial Sequence: Synthetic coding sequence
  source 1..4077: mol_type = other DNA
atgattgagccaagcgaggactcattcgagaccatgatggaacacaagaacccatcttccaagcagatggagtccagtgagggtagctcgaacactacagaggcaacttccggaagcggcgtacgtggcgaggctggacccgcaagtggaccagcccaggagaagaaggagcccccttctggtccccttcaagaaatggaagagttacctaccgacctgctacaggacatggaagagccaagctctggcccaaggaaggagatcgaggatcccccaaacgacctcctgcaggacctggaagagagctgcaacggctctcaccaggctcggggagatcccctgagcggagcatccgacaggatgaaggaagcatccgttaacccttcaggcgctagagaggaacaggaggcccataccgatctgaaagagagtggacgagaagaaacacctcaagaacagaatcagacggaacatagcacagctgaactcatggctatggtcagatccattatctcactctactttagaatgcaggacctgaaagaacagcagcgcgtcgctgaagaaattttgattaaaggcataaatgctgggcaacttcccgcaccaaaacacttctccggggaccgcagagaatttcacgaatttatcgtgttatgtcagctgacccttcagagttatccaagaatgttttataacgatcgccttcgcgttggttacgtcattaatcatctgagtgggttggccctggagtgggcaaaggcacttctacaggaaaactctccgctgattggcgatttccctgcttttctcgaagctatgagcgaagtgttcgaataccgccaagccctccgagtagctgaagaggctatgtttacaattcggcaagggggacgatctgctacagagtatattgatgagtttcagtcccttgttcccatcttgggctggcccgatgaagttcttcaggctcatttgtgccagggcctgaatgaggaaatacggcactacctattcagagtgcctcagcccgacagtctggatagcttaatcgtgctgatactgcagatagaggaaaaacttgccgaacggagagctatgttaaggttgccacctgaagcccgacccagaaatctgacatggattgacagtcctgcccctgaacggtggatggtctcaagctggctccctagtgaggtgcatcctgacatcaaccgggctcacctcttcctgctcctgatggtgagggttaatccataccacagtgttgcggtccaagctctggtcgattccggagcagacggtaactttatggacgagaaatttgcccaggagcattacgtagagctctacgagaaaccatatcctcagccggtgcagagtgtagatggctcccttatcggtaacgagccagtgtggttgtacactgaaccattggtgtgtatacaccagaatcaccaagagtctattgaatttgatatcgttccttcacctaacttttctgttgtcctgggaatccgatggttacgggtgcatgcgccagaggtggattggattaaaggtcgttgcacgtttcattcgccttactgcctgaagaactgtttcaggccccctccaccttgcatcgcattagagagacacggtatgagccttctgcctggactgccccatccatatagcgacctcgccgatgtgttcaaccccaaggaggcagacgatgagactagcgaccagcctagctctgatggaagcgatgatctgtccgaatccgaacctagcgaactgcagcaggccggtgacagtgatcattcagagactttctatgaatgtccgagcacggccccatgggaaccagtgggcgctagaatgcaggaacgcgcaagactgcaggaggagtactgggatttgcaagacatgctgactaaccggcaggactatatacaaatgatccccgagctcttcgatcaactccatggtgccgagtggtttactaagctggaactcaggggcacgatcgtagaggagagtgtcaacggacacaggacagaagatgtgtggaaggccgcttttggcctggagctggaggaaatgaagtcttatcagcccttcgcattatccccggatcctatcatccctcagaatgtgatccacttcattctgaaagacatgctggggtttttcgtgctttcctatggccaggaggtcttgatatattccatgagccaggaggaacacctacatcacgtaaggcaggtcctagttaggttccggcatcataacgtgtactgtagtttggacaaatcacagtttcaccggcagaccgtggaatttctcggtttcgtggtcacacccaagggagtcaagctgaataagaacgtgatgacaatcattacgggctatcctacaccaggcagtaagctgtccctccgcaactttatcgaattcgtctttccctatcgccacttcgttgaacgatttagtattatcgctgagcccctggttagacaactcctctcgagttaccagttctattggggcgtggaggaacaggaagcatttgaatgccttaaaagggctttccgcaaagcccctctgctgcatcatcctaaacctcagaacccattttacttggaaaccggtgtcacaggtacagcactgcatgcttcattaatccagattgacgaccaaacgggcaagagggcttgctgtgccttctatagccgtaacatcagccctatcgaagtagagtatagccaggccgagatgaaaatcctccctattcgagccgcatttatggtttggtgccgatatctcgaaaatactgaggagcctatcatgatcctactgaacaccgaggatttagccagccttaataacgacaggcttaccgtcctgctcccagggcactgggtgtttttcttctcgcattttaattttgacgtgatggagctccccgaacaggatggagggagagccctccctcctgtcaggaaccttcggtggagacgtgctttccagcgcaatacagctgcccgtcagactttgctcctagcttccagaggcttcccaagggatccatccactgagagtggggaagaggagaacgaagagcaggacgaattaaacgaacagattctgcgccaagagctccttgctatgattcctattgatcagatcctcaattctttcctcgcccacttttccatggcccaaatacgggcagtgatcttgcatttcttcagggggttgctgtattggaagaacaccctggcgttggcagcaattttggtgctactgagggttagacagtgtctcagcctgcggcctgcacctgcaatgcgggttgctcggccacagccgcagcggtccctgcgacttattctggatagttcactgattgcgggatccagcatcactaccgcgataacacagctgctgactcagatgccggcattagttggcgcaaacacaatccccgctcaagagttagcagagttgttcctcggacccggtagatggcaaagaaatgccttacattcgcaagcccatcgtggccttcaattcacacccggtttttggttgaccctttgtgagttctttggcgtgagggtgacacctcaagaagggcacctgcccgctctgcgacagaaccggtatctcgaactgcacgtggtgggtgatgaggatgtggtgctacgcgaagctctgcaggatgatcttcagcgctatcggcagtgcggcctacatgatgggctgcaggatacaagtcaggataagcaagacaacgatgtgcaggaagctccaccttcccacacggccgcaacgcatcccccaagacccagacatctgatggaccctcaggtcttagagttcctcggatcccgattgttacacatccacagcgcggacggacagttgcatctactctcccgggagcaggctgcacgcgcactttcacagtttctcacattgatttaccgcagagctttgccaattcctgcatgggaaagtcaacctcgcgaacaagcgaggttggaggagctccccgacgaggacgaggacgcaaacctcgactag

SEQ ID NO: 238584 - DNA, 9392 bp, synthetic construct
  misc_feature 1..9392: note = Description of Artificial Sequence: Synthetic coding sequence
  source 1..9392: mol_type = other DNA
atgtttagtgttaggatcgtcacggcagattattatatggccagtcctctgcagggattggatacttgccagtcccctctgacacaggccccagtgaagaaagtgcctgtggtcagagtgttcggagctacacccgcaggacagaaaacctgcttgcatttacacggcatctttccatatctttacgtcccctatgacgggtacggccaacagcctgagtcttatctgtcccagatggctttctccatcgaccgagctctcaacgttgcgttgggcaaccctagttccacagcccagcacgtattcaaagtgtcactggtaagtggaatgccattttatggctatcatgaaaaggaaagacacttcatgaagatctacctctataaccccacgatggtgaagcgtatctgcgagctgctgcaatccggcgctatcatgaataagttctatcagcctcacgaggcgcatattccctatcttcttcagctctttatagactacaacctgtacggcatgaaccttataaatctcgctgcagtaaaattccggaaagccagacgcaagtcaaatacccttcacgccactgggagctgcaagaatcacctctccgggaacagcctggctgacacactctttaggtgggagcaggatgagatcccaagctcccttattcttgaaggcgtggagccacagtcgacttgcgagttggaggtggatgccgttgctgcagatattttgaatagactggatattgaggctcagattgggggaaatcctgggttacaagcaatttgggaagatgagaagcaacgacgcaggaaccggaacgagactagtcaaatgtcccagccagagagtcaggatcatcggttcgtgcccgctacggagagcgagaaaaaattccaaaagagactgcaggagatcctcaagcaaaacgatttcagcgttacactttcaggtagtgtcgactatagcgacggctctcaagaattttctgctgagcttaccctgcatagcgaggtgctgtcacccgagatgctgcagtgtacacccgcaaacatggtcgaggtacacaaggataaagagtcatctaaggggcatacccgccacaaagtagaagaggccctaattaatgaggaagccattttaaatctcatggagaattcccaaacctttcagccgctcacacagagactctctgagtctccagtcttcatggattcttctccagatgaagccctggttcacctgttagccggacttgagagcgatggctaccggggagaaaggaatcgtatgcctagtccctgcagaagcttcggcaataataaatacccacagaattctgacgacgaagaaaatgaaccacagatagagaaggaagaaatggagctctcactggtgatgagccaacgatgggattctaatattgaagaacattgtgccaagaagcgcagtctgtgccgaaacacgcaccgctcttctacagaagacgacgatagctctagcggcgaagagatggagtggtctgataattcactcctgctggcatctctatccatcccccagctggacggaaccgcagatgagaactctgacaatcccctgaacaatgagaacagccgcacgcatagctctgttatcgccacatccaaactatctgtgaagccaagtattttccacaaagacgcggcaaccctggagccctcatcttccgccaagataaccttccagtgcaagcatacttcagcgctgagttctcacgtgctgaacaaggaggatctcattgaggatctcagccagacgaacaaaaacaccgaaaaaggattggataactcagtgacttcgttcacaaacgaatccacatacagtatgaaatatcctggttcactgagctccacagtgcatagcgagaactctcataaagagaacagcaagaaggaaatcttacctgtaagttcatgcgagtcttcaatttttgattatgaagaggatatcccaagcgtgaccagacaggtgccgagcagaaagtataccaatattcgaaaaatcgagaaggactccccatttattcatatgcacagacatcccaatgaaaacactctgggtaaaaacagcttcaatttcagcgacctcaatcatagcaaaaataaagtgtcctcagagggcaatgaaaaaggaaatagcaccgccttatcctccctgttcccttcatccttcaccgaaaactgtgaactgctctcgtgtagcggagagaatcggacaatggtacacagcctcaattctactgctgatgaatcgggtttgaacaaactgaaaatcaggtatgaggaatttcaggaacacaagactgagaagccgtcactgagtcagcaggcggcacattacatgttcttcccctctgtggtcctttccaattgcctaactagaccccagaagctgtcacccgtgacctataagctccaacccggaaataaaccctcaagactcaagctcaacaaacggaaactggctgggcatcaagagacatctactaaaagttcggagacgggatcgactaaggataactttattcagaacaacccatgtaatagtaaccctgagaaggataacgcgctggcttccgaccttaccaagacaaccagaggggcattcgagaataaaactcctaccgacgggttcatcgactgtcactttggggacggcaccctggagacggagcaaagtttcggactgtacgggaataaatacacgcttcgtgctaaaagaaaggtcaattacgaaaccgaggattctgagagtagctttgtaacacacaatagtaaaatttctctgccgcacccaatggaaatcggcgagagcctcgatggaacactgaaatcaagaaagcggaggaagatgtccaagaagctgcccccagtcattatcaaatacatcataattaatcgtttccgtgggcgaaaaaacatgttggtgaagcttggcaaaattgactcaaaggagaaacaggttattctcacggaagaaaaaatggagttgtataaaaagttggcccctctgaaagatttttggcctaaagtgccagatagcccggctacaaaatatcctatctaccctctgactcctaaaaaaagtcacaggcggaagagcaagcataagtccgccaaaaagaagacagggaagcaacagagaacaaataatgaaaacattaagcgcacgctgagctttcgaaagaaaaggagccatgccatcctgagtcccccaagcccttcctacaatgctgaaactgaagactgcgatctgaattactctgacgtcatgagcaagctgggattcctgtccgagcgatccacatctcctattaattcaagcccacctcggtgttggagccccacagatccaagggctgaggaaataatggccgcagccgagaaagaggctatgctgttcaaaggaccaaacgtctacaagaaaactgtcaatagccgtattggcaaaaccagtcgcgctcgggcacagatcaagaagtcaaaagcaaagctcgcgaacccaagcatcgtaactaagaagcgcaacaagaggaaccagaccaataaactcgtggatgacggaaaaaaaaaaccaagggcgaagcaaaaaactaacgaaaaggggacttccaggaaacacaccactcttaaggatgagaaaatcaaatcacagtccggggctgaggtcaaattcgtgctgaagcatcagaatgtttcagaattcgctagttccagtggtggatcgcaactgctattcaaacagaaggatatgccattgatgggcagcgccgtagaccatcccctgagcgcttctctacccacaggtatcaacgctcagcagaaactgagtggatgtttctccagcttcctggaatccaagaagtcagtggacctgcaaacctttccctcttcccgggatgatctgcacccctctgtcgtatgcaactctattggccctggggtttctaagattaatgtgcagaggccccacaatcagtctgcgatgtttacattgaaagaatccacccttatccagaaaaatatcttcgacctgtccaaccatctgtcccaggtggcccagaatactcagatctctagtgggatgtcctccaaaatcgaagacaacgccaacaacatccagaggaactacctgtccagcataggcaagttgagcgaataccggaattccctcgagtctaagctcgaccaagcttacactccaaatttcctccattgcaaagattcccagcagcagattgtgtgcatcgccgaacaaagtaagcacagcgaaacgtgttcacccggtaacaccgcatcagaggagtcacaaatgcccaataattgttttgtgacatcccttaggagtccgattaaacaaattgcatgggagcaaaagcagagaggttttatactggatatgtctaactttaaacctgagcgggtcaaaccgagatctctctcggaggcgatttcccagaccaaggcccttagccagtgtaagaatagaaacgtctcaacgccatcagctttcggggaggggcagtcagggcttgccgttctgaaggaactgctgcagaagcgacagcaaaaggcgcagaacgccaatactactcaggaccccctctccaacaagcatcagcccaacaaaaatatttctggcagcttagagcacaataaagccaataagagaacaagatcagtgaccagcccacgtaagcctcggaccccaagatctacaaaacagaaggaaaagatccctaaactgctgaaggtcgacagcctgaacctgcagaatagttcgcagctggacaatagcgttagcgatgacagccctatatttttttccgacccaggatttgagtcttgctattcgttggaggattcactatctcctgagcataattacaacttcgatatcaacaccataggacagacgggtttctgctcattctactccggtagccagttcgttcccgcagatcagaacctgccacagaagtttttgtccgatgcagtgcaggacctattccccggtcaggctattgaaaagaatgagtttctctctcatgacaaccagaaatgtgatgaggacaaacaccacactacagacagtgcctcttggatccgctcaggaactttgtcccccgagatctttgaaaaatcaacaatagacagtaatgagaatcgaagacataaccagtggaaaaacagctttcatcccttgaccacccgttcgaactccatcatggattccttctgtgtgcaacaagccgaggactgcctgtccgaaaaatcccgactaaaccgcagtagcgtatcgaaggaggtgttcctgagccttccacagcccaacaattctgattggatacagggccacacacggaaggaaatgggtcagagtctggattccgccaacacatcctttacagctatcctctcatcacctgatggtgaactcgtggacgttgcctgcgaagacctcgaactctacgtaagccggaataacgacatgctgacaccaacccctgattcttctcctcgatcaaccagctcccctagccagagcaaaaacggctcatttacaccacgaaccgctaatatcttgaaacccctgatgtcccctccctctcgcgaggagatcatggccactctacttgatcatgacctgagtgaaaccatttatcaggagccattttgcagcaatccgagcgacgtacctgaaaagcccagggagatcggaggcaggctccttatggttgaaacccgactcgccaatgatctggccgaatttgaaggggacttttctctggaaggtctgaggttgtggaaaactgctttctctgctatgacccagaaccctcgacctggctcccccttgaggtcaggccagggagtggtgaacaagggttcttcaaactcccccaaaatggtggaggataagaaaatcgtcatcatgccgtgcaagtgtgcaccaagtcggcagctcgtgcaggtgtggctgcaggcaaaggaggagtacgaacgctccaaaaagctgcctaaaaccaagccaacaggagtggtgaagtctgccgagaatttttctagttcggtaaatcccgacgacaagcctgtggtccccccaaagatggacgtttcaccttgtatactccccacaacggctcacaccaaagaggacgtcgacaatagccagatagccttgcaggcacccaccaccggttgctctcaaacagcaagtgaatcccagatgctccccccagtcgccagtgcttctgaccccgagaaggatgaggatgacgacgacaattattatatttcttacagctcccccgacagcccagtaattcccccttggcaacaaccaatcagtcccgatagtaaggcccttaatggggatgatcgaccctcttctcccgtggaggagcttcctagtttagcattcgagaatttcttgaagcctataaaggacggaattcaaaaaagtccttgttccgaaccccaggagccccttgttataagccctattaacacacgggctaggaccggcaagtgcgagagcctctgctttcacagcactcctataatacaacgtaagctgctagagagactgcccgaagccccaggtctgtcgcctctatcgacagagccgaagactcagaagctgtccaacaagaaaggatcaaatacagacactctacgcagggtactgctgactcaagctaagaatcagtttgccgctgtaaacacgccccaaaaggaaaccagccagatcgacggtcccagcctcaacaacacttatggcttcaaggtaagtatccaaaacctgcaggaagccaaagctctgcacgagattcagaacctcaccctaatcagtgtggagctccacgccagaactcgtagggacctggagccagaccctgaattcgaccccatatgtgcacttttttactgcatctcatctgatacacccctgccagacacggaaaagaccgaactgaccggtgtgattgtcatcgacaaagataaaaccgtctttagtcaagacattcgataccagacaccccttctgattagaagtgggattaccgggcttgaagttacttacgcggctgatgagaaagccttgtttcatgaaatcgcaaatatcattaagaggtatgacccggacattctgttggggtacgaaatccagatgcattcctggggttatctacttcagcgggctgcggcattgtcaatcgatttatgccgcatgatttctagagtgccagatgacaagattgagaaccggttcgctgctgagagggatgaatatggctcatataccatgagcgagattaatattgtgggtcgtatcacgctcaacctgtggcggattatgcgtaatgaggtcgccctgacgaattacacattcgagaacgtttcgtttcacgtgctgcatcagaggttcccactattcacttttcgtgtgttgagcgattggtttgataacaaaaccgatttatatagatggaagatggtggaccattacgtgtcaagggtgcgcggaaatctccagatgctcgaacagctggatttgatcgggaagacgtctgagatggcccgtctcttcggaatccagtttctacatgtcctaaccaggggatcccaataccgtgtggaatctatgatgctgaggatcgcgaagccaatgaattatatcccagttaccccctccgtgcagcagaggagtcagatgagggcccctcagtgtgtgcctctgatcatggagcccgagtcgaggttttattccaattcagtcctagtcttggacttccaatcactgtatccgtccatcgtgatcgcgtacaactactgcttttcaacgtgtctaggacacgtcgaaaatttgggaaagtacgacgaatttaaattcggctgtactagcttacgtgtcccccctgacctgctgtaccaagtgcggcatgacattacggtatcacctaatggcgtggcatttgtaaagcccagcgtacggaagggggttcttccccgaatgttggaagaaattttgaagacccgattcatggttaaacagagtatgaaggcctataagcaggatcgggctctctcaaggatgctggacgctcggcagctgggactcaagctcatagcaaacgtcacatttggatacacaagtgctaatttctcaggacggatgccttgcatcgaggtgggagacagcatcgtgcacaaagcacgcgagaccctggaaagagccataaaactcgtgaatgataccaaaaaatggggagccagggtcgtgtacggcgacaccgatagcatgttcgttctcctaaagggggctaccaaggagcaatcttttaagatcggccaggaaatcgccgaagcggtgactgccactaatcccaagccagtaaagctgaagttcgagaaggtgtacctgccctgtgtcctccagacaaaaaagcgctatgtggggtatatgtatgaaactctagaccagaaggaccctgttttcgatgcgaagggtatcgaaacggtccgccgagatagttgccctgccgtcagcaagatcctcgagaggagtctcaaattacttttcgagacccgcgatattagcttaatcaagcagtacgtccagcggcagtgtatgaagcttctcgaggggaaagccagcatccaagacttcatcttcgcgaaggaatatagggggtctttctcgtataagccaggagcatgcgtccccgctctggagctcacccggaaaatgctaacctacgatagacgctccgagccacaggttggcgagagggtgccctatgttatcatatacggcacccctggcgtccctctcatccagttagtgaggaggcccgtggaggtgctacaggatcccacccttagacttaacgcgacgtattatatcaccaaacagatactccccccactggcacggattttctccttgattggtattgatgtgttctcctggtatcatgaactgccaaggatccacaaggcgacgtccagtagcaggagtgaaccggaggggaggaaggggaccattagtcagtactttactacgttgcattgccccgtttgtgacgacctaacccagcacggcatatgttcaaaatgtcgcagccagcctcagcatgtggcggtcatccttaatcaggagatccgagaattggagcgacagcaggaacaactggtcaagatttgcaaaaactgtaccggatgttttgacaggcacataccctgtgtgtcacttaattgtccggtgctgttcaagctgtctcgagtcaaccgtgagctatctaaggcgccatacctgcgccagctccttgaccagttcta

SEQ ID NO: 238585 - DNA, 9392 bp, synthetic construct
  misc_feature 1..9392: note = Description of Artificial Sequence: Synthetic coding sequence
  source 1..9392: mol_type = other DNA
atgttcagtgtccgaattgtgaccgccgactactatatggccagtcctcttcagggcctagacacatgccagtctcccctgactcaggctcccgtgaagaaggttcctgtggtgcgcgtgttcggcgctactcccgcaggccaaaagacatgcctgcacctgcatggcatcttcccgtacctgtatgtgccatatgacggatatggccagcaacccgaaagctacctgagccaaatggccttcagtatcgacagggccctgaatgtggccctgggaaatccttccagtaccgctcagcacgtttttaaagtcagccttgtctcaggaatgccgttctatggttatcatgagaaggagcggcattttatgaagatttatttgtacaaccccacaatggtgaagaggatttgcgaactactccagagtggagccattatgaacaagttttatcaaccgcacgaagcacacataccctacttgctgcaactgttcattgactacaatctgtacggaatgaacctcatcaacctagccgcagtgaagttccgcaaggccaggaggaaaagtaacaccttacacgcaacagggagctgtaaaaaccacttatcaggcaattccctggccgataccctgttcagatgggagcaggacgaaatcccctcaagcctgatccttgagggggtggagccccagagcacttgtgagcttgaggtggacgccgtggccgcagacatactcaataggcttgatatagaggcccagatcggtggaaaccctggtctccaggccatctgggaagacgagaaacagcgccgacgcaatagaaatgaaactagccagatgagccagcccgagtctcaggatcatcggttcgttcctgcaactgaaagtgagaaaaagtttcagaagcgcctccaagaaattctgaagcaaaacgactttagcgtgacccttagcggctctgtggattacagtgacggaagtcaggagttctccgctgagctcaccctccacagcgaggttctttcccctgaaatgctacaatgtactccagctaacatggtggaggtgcataaagacaaagagtcctctaaaggacacactcgccacaaagtggaagaggctctgatcaacgaggaagccatccttaacctgatggagaattcccagaccttccaacccctgacacagcgcctgtcagagtctcccgttttcatggatagttcgccagatgaagccctcgtgcatctgctcgccggtttagagtctgacggctaccgcggagaaaggaatcgcatgcctagcccttgcagaagttttgggaacaacaagtatccacaaaattctgacgacgaggaaaatgagccccagatagaaaaagaagaaatggaactatcactggtgatgtcccagcgatgggactcaaacattgaagagcactgtgccaagaagcgcagcctttgccgtaacacccatagatcctctactgaagatgacgactcttcctccggcgaggagatggagtggagtgataacagccttctgttagcatcgctatctatcccccagctcgatggaactgcggatgagaattctgacaatcccttgaataacgagaattcccgcacccattcgtccgttatagccaccagtaaactgagcgttaagccgagcatcttccacaaagatgcagccacactggaaccctccagctctgcgaaaatcacgttccagtgtaaacatacttctgcgctgagttcacacgtcttaaacaaggaagatttgatagaggatttgtcacagaccaataagaacacggaaaagggtctagacaatagcgtcacctcattcaccaacgagtcgacctatagcatgaagtatccgggtagcctctcaagcacggtccactcagagaacagccacaaggagaattcaaaaaaagagatactcccagtaagctcatgcgaaagcagtattttcgattatgaggaggatattccctcagttacacgacaggttcctagtcgaaagtacaccaacattaggaagatcgagaaggattcccccttcattcacatgcatagacatcctaatgagaatacgctgggaaagaatagctttaacttttctgacttaaaccattctaaaaacaaggtgtcaagtgaggggaatgaaaaagggaactctaccgcactgtcatctttatttccttcttcattcactgaaaactgcgagctgctctcgtgctccggcgaaaaccgtacaatggtgcatagtttaaacagtaccgccgatgagtcggggctgaataagcttaaaatcagatacgaagagtttcaggagcataaaactgaaaagccttcactgtctcagcaggccgcacactatatgttttttcctagtgtcgtcctcagcaattgcctgacaaggccccaaaaactgtcccccgtcacttataaactgcagcccggaaataagccaagccgcctgaaacttaataagaggaaactggcgggacaccaggagacttctactaagagctctgagacgggttcaacaaaggacaatttcattcagaacaacccatgtaattcaaatcccgagaaagacaacgctttagccagcgacctgacgaaaactacacgcggtgccttcgaaaacaagacgccaacggatggattcatcgactgccatttcggggatggcaccctagagaccgagcagagcttcggcctgtacggcaacaagtataccttaagggccaaaaggaaggtcaattacgaaaccgaagattctgagagcagctttgtcacccacaactctaagatttctctgccacatcccatggagataggggaatccctggatggtacattgaagtcacggaaaaggcgaaaaatgtcgaaaaagctaccgcctgtgattataaaatatatcataataaatcgcttccggggacgaaaaaacatgctggtgaagcttggcaaaatcgactcaaaagagaagcaggttattctgaccgaagaaaagatggagctgtacaaaaaactcgctcccttaaaagatttttggcccaaagtccctgactcccctgcaaccaagtatcccatctaccccctgactcccaagaaaagccataggcggaaaagcaaacacaagtcagccaagaaaaagactggtaagcagcagcggactaataatgagaatataaagagaaccctgagctttagaaaaaagcgttcgcatgcgatcctgtcgccacctagcccctcctacaatgcagaaacggaggattgtgatctgaactactccgacgttatgtcaaaactgggctttctgtccgagagaagtacctcccccattaacagcagcccaccacgctgctggtccccaactgatcccagagcagaggaaattatggccgctgcagaaaaggaggccatgctcttcaaggggccaaatgtctataaaaaaactgtgaattcccggattggcaaaacctctcgggcacgggctcaaattaaaaaatcaaaggctaagctggccaatccaagcatcgtcacaaaaaagaggaataagaggaaccagaccaataagttggtcgacgacgggaaaaagaagcctcgagcaaaacagaagactaacgaaaagggaacgtcaagaaaacataccacgttaaaggatgaaaagatcaaatcacagtctggcgcagaggtgaagtttgtactcaaacatcagaacgtcagcgagtttgcctctagctcaggcggtagtcagctactcttcaaacagaaggatatgcctttgatgggcagcgccgtggatcatccattgtcagcatctttgccaacaggtatcaacgctcagcagaagctctcagggtgtttctcctcctttctggaatccaaaaagtctgtcgatctccagactttcccctcctctagggatgacctccatccaagtgtggtctgcaatagtattggcccaggggtgtccaagatcaacgttcaacgaccgcataaccagagtgccatgttcacactaaaggaaagcacccttatccagaaaaatatcttcgaccttagtaatcacctgtcgcaggttgcacagaacactcagattagctccgggatgtcctcaaaaatcgaggacaacgccaataacattcagagaaactacctgtcctccattggaaagctttcggagtacaggaactctctggagtccaagctagatcaggcttacactcctaactttctgcattgcaaagattcacagcagcagatcgtatgtattgccgaacagtctaaacatagcgaaacttgtagtcctgggaacaccgcatccgaggagtctcaaatgccgaataattgtttcgtgaccagcctccgcagcccgatcaagcagatcgcttgggaacagaagcagagaggatttattttggatatgtctaacttcaaacctgagcgggttaagcccagaagtctgtctgaagccatctctcagaccaaggccctgagccagtgcaaaaaccgcaatgtgagtacgcccagcgcttttggagagggccaatccggactggcggtcctcaaagaactgctgcaaaagcggcagcagaaggctcaaaatgccaataccacacaagatcccctcagcaacaaacatcagcccaacaagaatatcagtgggagcctcgaacataataaggccaataagcgaactcgaagcgtaacgagtccgagaaaaccacggacaccccgaagcaccaagcagaaagagaagattcccaaattgttgaaggtggatagtctgaacttgcaaaacagcagccagctggacaactctgtgagcgacgatagtcccatcttcttttcagaccctggatttgaatcctgctacagcctcgaggactccctctcgccagaacacaactacaatttcgatattaatacgattgggcagaccggtttttgctctttctattctgggagccagttcgtgcccgctgaccagaacctaccccagaaatttcttagcgacgctgtgcaagatctgtttcctggccaggccatagaaaagaacgaatttttatcacacgataaccagaaatgcgacgaggataagcatcacaccacagatagtgcgagctggattcgctccgggacactctctcccgagatttttgagaaatcgacaattgactccaatgagaaccgaaggcacaaccagtggaagaactcctttcatcctctgactacccgcagcaattctatcatggacagtttctgtgtgcagcaggcggaggactgcctgagcgaaaagagccgacttaatcgcagttcagtgtccaaggaggtcttcctttctctaccccagccaaacaactctgattggattcaagggcacacaaggaaagaaatgggacagagtcttgattccgcaaacacctcctttactgcaattctgagttctcccgacggagaactcgttgacgttgcatgcgaagaccttgaattgtacgtgtctcgcaataacgacatgctgacacctacaccggattcaagcccgagaagtacgtccagcccctcccagtccaagaacggttcctttacaccgaggacggcaaatattttgaagcctctaatgagtccacccagccgcgaggagattatggcaacccttctggaccacgacctttccgagaccatctaccaggaaccgttctgtagcaatccctcagatgtgccggaaaagcccagggaaataggtgggaggttacttatggtcgaaacccggcttgccaatgacctggcagaatttgagggcgacttcagccttgaaggactgcgtctgtggaaaactgcctttagtgccatgactcagaatcctcgccctgggtctcccctccgctctggccagggcgtggtcaacaagggcagcagcaattctcctaaaatggttgaagacaaaaagatcgtgattatgccctgcaagtgtgcaccatcccgacaattggtccaagtgtggcttcaggccaaggaagaatatgagagaagcaagaagctaccgaaaaccaagccaaccggcgtcgtgaaatccgcagagaacttctcatcctcagtgaacccagacgacaagccagtggtaccgccaaaaatggacgtctctccatgcatccttccaactacagctcacacaaaggaagatgttgacaactcgcagatcgccttgcaagccccaaccactggctgttcccagacagccagcgaatctcagatgctgccccctgtggcaagcgcttccgaccccgagaaggacgaggatgatgacgataactactacatttcctacagttctcccgacagtccagtaattccaccatggcagcagcctatttcgcccgattccaaggccctcaatggggacgatcgacccagcagccctgtcgaggaactgccaagcctcgcgttcgaaaacttcctgaagccaataaaggatggaattcaaaaaagcccttgttccgagccacaggagccattagtgatttccccaatcaatacccgcgcaagaacgggcaagtgcgagtcactgtgtttccattctacgcctattattcagaggaaattgctggaaagattgcccgaagctccgggtctgagcccgctctccacagagcctaaaacccaaaagctgagcaataagaaaggcagtaatacagacacattgagacgagtgctcctgacccaggccaaaaatcagtttgccgctgtgaacacacctcagaaggaaacctcacagatcgatgggccttcacttaacaatacctacggcttcaaagtcagtatacagaacctacaggaagcaaaagctttgcatgagatccaaaacctgactctcattagcgtcgagctccacgcgaggacccgtcgggacctagaaccggatcctgagttcgacccgatttgtgccctgttctattgcatttcgtccgacaccccgctccccgataccgaaaaaactgagttgaccggtgttattgttatcgataaggacaaaactgttttctcgcaagatattcgataccagaccccattactcattaggagcggcatcaccggcctagaagtgacctacgcggcagacgagaaggctctgttccatgagatcgcgaatattataaagaggtatgaccctgacatccttctcggctatgagattcagatgcacagctggggatacctactccagagagcggctgccttgagcatcgatctgtgtagaatgatatcccgtgtgcctgacgacaagattgaaaatcggttcgcagcagaaagggacgaatatggctcctacacaatgagcgagatcaatattgtaggacggattaccctaaacctgtggcgcatcatgcgcaacgaggtggccctgactaattacactttcgaaaacgtgtccttccatgttctccaccagagatttccacttttcacattccgggtgctttctgattggttcgataacaaaactgatctatataggtggaagatggtcgatcactatgtgagcagggtcagggggaatctgcagatgttggaacaactggatcttatagggaagaccagtgagatggcgaggctttttggcatccaatttcttcatgtactgaccagggggagccagtatcgggttgaatcaatgatgcttcgcatcgcaaagcccatgaactatattccagtcactccatcagtccagcaacggagtcagatgagggcccctcaatgtgtccctctgatcatggagccagagtcaaggttctattcaaattccgtcctggtcctcgattttcagagcctgtatccgagcatcgtgatagcttataactattgttttagcacgtgcttggggcacgtcgaaaatctgggcaaatatgacgagtttaaattcggctgcactagccttcgcgtaccccctgacctgctgtatcaggtcaggcatgatataaccgtctccccaaacggggtcgcttttgtcaagccctccgtccggaagggggtactgcctcgtatgcttgaagaaatcctaaagacccgtttcatggtcaagcaatccatgaaggcatataaacaagacagagccctcagtcgaatgttggacgccagacagctcggcctcaagctcatagctaatgtgacattcggctatacttccgcaaatttctcaggtaggatgccatgcattgaagtgggggacagcatcgtgcacaaagcgagggaaaccttggaacgggcaattaagctagtgaacgacactaagaaatggggtgcgcgagtggtctacggtgacaccgatagcatgttcgtcctccttaagggggctactaaagaacagagcttcaaaattgggcaggaaatagcggaagccgtgactgccacaaatcccaaacccgtgaagttgaagttcgaaaaagtttacctgccatgcgtgttgcaaaccaagaagagatacgtgggctatatgtatgagacattagatcagaaagaccctgtcttcgacgcaaaagggattgagaccgtcaggcgcgacagttgcccggctgtcagcaaaattttggaaagatcactcaaacttttatttgagaccagagacatcagtttaataaagcaatatgtgcagcgccagtgcatgaagctgttagagggcaaagcctccatccaagacttcatcttcgccaaggaatacagaggttcttttagctataagcccggtgcttgcgtaccagcactggagttaacgaggaagatgctgacctacgatcgaagaagcgaacctcaagtcggagaaagagtgccatacgttatcatctatgggaccccaggcgtgccattaattcaattagtgcgccgtcccgtggaagtgctccaggaccctaccctgagactcaacgccacctattatatcactaagcaaatccttcccccacttgcaaggattttttctcttattggcatcgatgtcttttcttggtatcacgagttgccccgtatccataaggccacttcatcatctagaagcgaacccgaagggagaaaggggaccatcagccagtacttcactactctccattgcccagtttgtgatgacctcacgcaacacggcatctgcagcaagtgccgctctcagccccagcacgtggccgtcatcctgaaccaggagattcgggaattggaacgccaacaggagcagctggtcaaaatctgcaagaattgtactggatgttttgatcgtcacattccctgtgtaagcctcaattgcccagtgctgtttaagctgagtcgggtgaatcgcgagctctcgaaggccccatatctgcggcaacttctggaccagttcta

SEQ ID NO: 238586 - DNA, 9393 bp, synthetic construct
  misc_feature 1..9393: note = Description of Artificial Sequence: Synthetic coding sequence
  source 1..9393: mol_type = other DNA
atgtttagcgtgcgaattgtaactgccgactattacatggctagcccactgcagggcctcgatacctgtcagtcccctctgacccaggctcccgtgaagaaagtgcccgtcgtccgggtgttcggcgcaacccctgctggccaaaaaacatgtctacacctgcacggaatcttcccatacttgtatgtcccttacgacggttacgggcagcagcccgagtcctatctgtcacaaatggcattctctatcgatagagccttaaatgtggccctcggtaacccctccagtaccgcacagcatgtattcaaagtttcgctggtctcaggtatgcccttttacggataccacgaaaaagaaagacacttcatgaagatttacttgtacaacccgacaatggtgaaacgaatctgcgaactcctccagagtggtgccataatgaacaaattctatcagccccatgaggcccatattccttacttactgcagttattcatcgactataacctgtacggtatgaaccttatcaatctggccgctgtaaaattccggaaggctaggaggaaatcaaacacactgcatgccaccgggagctgcaaaaaccacctgtctggaaactctcttgcagatactctctttcggtgggaacaggacgagatcccgagctccctgatccttgagggggtggagccacagagcacctgcgagctagaagtagacgcggtggctgccgacatccttaacagactggacattgaggcccaaattggcggaaacccaggcctccaggccatatgggaggacgagaaacaaaggcgccgtaaccgcaacgagacctcccaaatgtcccagcctgagtcccaggaccaccgcttcgtgcctgccacagaaagcgagaagaagtttcagaagagactgcaggaaattttgaagcagaatgatttttccgtcaccctgtcgggaagcgtggactactcagatggttcccaggagttcagcgctgagctcacactccactccgaagtcctctcgccagaaatgttacagtgcaccccagccaatatggtggaagttcacaaggacaaggaaagctctaaggggcacacacggcacaaggttgaagaggccctgatcaacgaggaagctatcctgaacctgatggagaattcacaaaccttccagcctctaactcagcgactgagtgaaagtcctgtgtttatggactctagcccagatgaggccctggtacacctcttggccggactcgagtctgatgggtaccgtggagaacgaaatcggatgccttctccatgtaggagcttcgggaataacaaataccctcaaaactccgacgacgaagaaaacgaaccacagattgaaaaagaagaaatggagctgtcactggtgatgtctcaacggtgggattccaatatcgaagagcattgcgctaaaaaacggagtctgtgcagaaacacccatagaagctctaccgaagacgatgattcctcctcaggtgaggaaatggaatggtcagataactcgctgctcctcgcgagtctttctattccacagctggacggcaccgccgacgaaaatagcgataatcctctgaataacgaaaacagcaggactcattccagcgtcatcgctacctcaaaactatccgtgaaaccctctatttttcacaaagatgctgccactctggaaccttcctcttcagccaagatcacctttcagtgcaaacacaccagtgcactaagctcccacgtcctgaataaagaagatctcatcgaggacctgtcccagacaaacaagaatacggagaaggggctggataactcggtgacctcgttcactaacgagtccacctatagcatgaagtatccgggtagcctgtcttccaccgtgcatagcgaaaactctcacaaggagaactcaaagaaagagatacttcccgttagctcttgtgagtcatcaatctttgattacgaggaggatataccgagcgtgactaggcaagtacccagtaggaaatacaccaacatcaggaagattgaaaaggattctcctttcatacacatgcaccggcaccctaacgagaacactctcgggaaaaattcttttaacttctcagacctgaaccactcaaaaaataaggtcagtagcgagggtaacgaaaaaggtaattccactgccctgtcttcactgttcccttcctccttcacggagaactgtgagctgctgagttgctctggggaaaacagaaccatggtgcatagcttaaacagtactgctgacgagagcgggctgaacaagctcaagatcagatacgaagaattccaggagcacaagaccgaaaaaccttccctgagccagcaggcagcccactacatgttttttccgtctgtggtgctgagcaattgcctgaccagaccacagaagctcagtccggtaacatacaagctacagcctggcaacaaaccctctcgactcaagctcaacaaaagaaaactggcaggacaccaggaaaccagcacgaagtcatccgagactggatctaccaaggacaactttattcaaaacaacccctgtaatagcaatcccgagaaagataatgccttagccagcgatttgacaaaaactactcgcggtgccttcgaaaacaagacccccaccgacgggttcatcgattgccacttcggagacgggacattagaaacagagcagagttttggattatacgggaataagtacactctgcgagccaagaggaaggtgaactatgaaacagaagattcagagtcctctttcgtaactcataactccaaaatctccttgccccatcccatggagattggcgagtcattagatggcaccctgaaatctagaaagcgccgaaagatgagcaaaaagcttcctcctgtcatcataaaatatattattatcaacaggttcaggggacggaagaatatgcttgtcaaactgggcaagatcgactccaaggaaaagcaggtgatcctgaccgaggagaagatggagctgtacaaaaagctagcaccactcaaagatttttggcccaaagtgcccgattcaccggctaccaagtaccccatatatcccctgacacccaagaaatcccacagacgtaaaagtaagcataaatccgctaaaaagaagaccggcaagcagcaaagaaccaataacgagaacattaaaagaaccctgtcttttagaaaaaaacgctctcacgctattctatcacctccttccccttcctacaacgccgagacagaggattgtgatctgaattattctgatgtcatgagcaagctggggttcctgagcgaaagatcgaccagtcctatcaattcttcgccgcctcggtgttggtcccccacggatccacgagccgaggaaataatggctgccgctgagaaagaggccatgttattcaagggccctaacgtgtataagaagacagtgaatagtcggataggcaagaccagccgtgcacgggcacagatcaaaaagtcaaaggcaaagttggcgaacccttctattgtgactaagaagcgtaataaacgcaaccaaaccaacaaacttgtggacgacggcaaaaaaaagccgagggctaaacagaaaaccaatgaaaaaggtacttcaagaaaacacactacactaaaggatgagaagattaagtcacaaagcggagccgaggttaaatttgtcttaaaacaccagaacgtctcagagttcgccagcagtagtgggggaagccagctgctgttcaaacagaaggatatgcctctcatgggttctgccgtagatcaccccctctctgctagcctgccaaccggaataaacgcacagcagaaattatctggctgcttcagttctttcttagaatctaagaaaagcgtcgacttgcagacttttcctagctctagggacgaccttcacccctcagtggtgtgtaattctatcgggcctggtgtgtccaaaataaacgttcagaggccccataaccagagcgccatgttcaccctcaaagagtcgacgctcattcaaaagaatatatttgatctgtccaatcacctgagccaggttgcgcagaatacccaaatcagctcgggtatgtcttctaagattgaggacaatgcaaataacatccagcgaaactatctctctagtatcggaaaactgtcggagtaccgaaattccctagaaagcaagctagaccaggcctatacaccaaactttctacattgtaaagatagtcaacagcagattgtgtgtatcgcagaacagtctaaacattccgagacctgttctcccggaaacacggccagcgaggagagtcagatgcccaacaattgttttgtgacctcactgcgcagtcctattaaacagatcgcatgggagcagaaacagagagggttcatcctcgatatgtctaactttaagccagagagagtcaagccccgttcgctttcagaggccatctcccagacaaaggccctgtcgcaatgcaaaaacagaaatgttagcacgccatctgcattcggcgaaggtcagagcggcttggctgtgctgaaagagctgctccagaaaaggcagcagaaagcgcagaacgccaacacaacacaggaccccctgtcgaataaacaccagcccaataaaaatatatctggatctctggaacacaataaggccaacaaacgcacccggagtgtgactagcccaagaaagcccaggacacctcgatcgactaagcaaaaagagaaaatccctaaactgctgaaagtcgactccctgaacctccaaaactctagtcagctggacaactctgtgtccgatgattctccgatcttcttttcggaccctggatttgaaagttgttattcccttgaagacagtctctcccccgaacacaactataactttgatatcaatactattggccaaaccggtttttgtagtttctatagcgggtctcagttcgttcccgcagatcagaacctgccccagaagtttttgtccgatgccgtccaagatctgttccccggacaggccatagaaaaaaacgagttcctgtctcacgataaccagaagtgtgacgaggacaagcaccatacaaccgacagcgcctcgtggatccgcagcggtacgctgtcgcccgagatttttgaaaagagcacgatcgatagtaatgagaatcgccgacataatcagtggaagaattcatttcaccccctgactactcgatcgaactctataatggactctttttgcgtgcagcaggctgaagattgcctctctgagaaaagccgcttgaatagatcttccgttagcaaggaagtcttcctgagtttgccccaacctaacaacagtgactggatccaggggcatacccgcaaggagatggggcagtccctggacagtgctaacacctcctttaccgcgatccttagttcacccgatggtgaactggtggatgtcgcttgcgaagatctggagttgtacgtgtctagaaataatgatatgttaactcccaccccagactcgtcgcctcgctccacatctagtccctcacagtccaaaaacggtagcttcacccctcgtaccgcgaacatccttaagcccctgatgagccctccttctagagaagagatcatggccaccctcctcgatcacgacctcagtgaaaccatttaccaggagcccttctgtagcaacccttccgacgtccccgaaaaaccgagggaaatcggaggtcgcctgctcatggtggagacaagactcgccaacgatttggccgaatttgagggtgacttttccctggagggtctgaggctgtggaaaaccgcattcagcgctatgactcagaatcctaggccagggagcccgctccgttctgggcaaggagtggttaataagggatcctcaaattcacctaagatggtggaagataaaaagattgtaattatgccctgcaaatgcgctccttctcgacaattagtgcaagtatggcttcaggcaaaagaagagtatgagcgaagcaaaaaactgcctaagactaaacctacgggcgtggtgaagtccgcggaaaattttagcagcagcgtgaacccggacgataagcctgtggtgcctccaaagatggatgtgtccccctgcattcttcctacaactgcacataccaaagaagacgttgataattcgcagattgcattacaggctcccacaacagggtgttcacagaccgcttctgagagtcaaatgctccctcccgtggcttctgctagtgacccagagaaagatgaagacgatgacgacaactactacatttcctactccagcccagatagccccgtgatccccccttggcagcaacccatatcacctgatagcaaagcacttaatggtgatgataggccatcatcacccgttgaggaactgccttccctggctttcgaaaattttcttaaacctatcaaagacggcatccagaaaagcccctgtagtgagccgcaagagccgctcgtaatttcccctatcaatacaagagctcgtactgggaagtgcgaaagcctgtgctttcattccacacctataatccagagaaagctgctggaacggcttcctgaggctcccggactgtcccccctcagcactgagcccaagacccagaagctctcgaacaagaaaggctctaatacagataccctgaggcgagtgcttctcacgcaagccaagaatcagttcgcggcagtgaacactccccagaaggaaacaagtcagatagatggtcccagccttaacaatacttatggtttcaaggtgtccatacagaatctccaagaagctaaagctttacacgagatccagaacctcacactgatttccgttgaacttcatgccagaacgcggcgagaccttgagccggacccagagttcgatcctatttgcgctctgttctactgtatttccagcgatacccccctgcccgacacggaaaagaccgagctcacaggcgtgatcgtcattgacaaggacaaaacggtcttctcacaggatatccgttaccagacaccactgttaattcggtcaggaataaccggcctcgaggtcacttatgccgctgacgaaaaggcattgtttcatgagatcgcaaacattataaagcggtacgatccggatatcctgttaggctacgaaattcagatgcactcctgggggtatctgctgcaacgtgctgctgcattatctattgacttgtgcaggatgattagcagggtgcccgatgacaaaattgagaaccggttcgcagccgaaagggatgagtacgggagctatacaatgagtgagatcaacattgtgggcagaatcaccctgaatctctggagaataatgcgtaatgaggtcgcactaactaattacacctttgaaaacgtttcgttccatgtgttgcatcagaggtttcctctgtttaccttccgcgtactttcagattggttcgataacaagactgacctgtaccgctggaaaatggttgaccactacgtctcccgggtgagagggaacctgcagatgctggagcagctcgacctcatcggtaagacatccgaaatggccagattgtttggaatccagttccttcatgtactcacgcgcggatcccagtacagggtggagtcgatgatgttgagaatcgcaaaaccaatgaactacattccagtcactccttctgtacaacagaggtcacagatgagggccccacagtgtgtccccctgattatggaaccagagtcccggttctatagcaattcagtgctagttttggactttcagagtctttatccctcaatcgtaattgcctataattattgtttcagcacatgccttgggcatgtcgagaacctcggcaagtacgacgagttcaaattcggttgcaccagcctgagagtgcctccagacttactgtatcaagtgcgccacgatattaccgtcagcccaaatggcgtggcttttgtcaaaccgtccgtccgcaagggcgtgctgcctagaatgttggaggaaatattgaaaacacggtttatggtcaaacagagtatgaaggcctacaaacaggacagagctttaagtagaatgcttgacgcacggcaactgggtctgaagctgatcgcaaacgtcacctttggctacactagtgcaaacttcagcggcagaatgccgtgtatcgaagtgggtgactccatcgtccataaggcccgtgagactcttgagcgcgcaatcaaacttgtgaatgacacaaaaaaatggggggctcgggttgtctacggcgacacagatagcatgtttgttctgctgaaaggtgcaacgaaggagcagtcattcaagattggacaagagatcgccgaagccgttaccgcaactaatcccaaaccagtcaagcttaagttcgaaaaggtctatctgccttgcgttctgcagacaaaaaaaagatatgtgggatatatgtatgaaaccttagatcaaaaggacccagtgtttgacgccaaaggcatcgagacagtgagacgcgatagttgcccagccgtgagtaagattctcgagcggtcactgaagctgctcttcgaaaccagggatataagtctgattaagcagtacgtccaacgccaatgtatgaagctcctggaagggaaagccagtatccaggatttcatctttgctaaagagtacagagggtccttttcatataaacccggagcctgcgtccctgcattggagctgaccagaaagatgctcacatacgaccgcagatcagagcctcaggtgggagaaagggtcccatacgtgataatctacggaacgcccggtgtgccgcttatacagttggttcggaggcccgtggaggtgctgcaggatccaaccttgagacttaacgcgacatattatattacaaaacagatcttgcctccattggcacgtatctttagtcttatcggcattgacgtcttttcctggtatcatgagttacctcgcatccataaagctacgagcagctcgaggagtgagcccgaggggagaaaagggaccatctcccagtacttcaccaccctgcattgtcccgtttgcgacgatctcacccagcatggcatctgcagcaagtgccgatcccagcctcagcacgttgcagtgatcctgaatcaggaaatcagagagctggagcggcaacaagagcagctggtcaagatctgtaaaaattgcactggatgtttcgaccgtcacattccctgcgtttccctcaattgtcctgttctttttaaactctctcgagtaaaccgcgagctttctaaggccccatacctgagacagctgctggatcagttctac

SEQ ID NO: 238587 - DNA, 9158 bp, synthetic construct
  misc_feature 1..9158: note = Description of Artificial Sequence: Synthetic coding sequence
  source 1..9158: mol_type = other DNA
atggcatttagtatcgatagggcgcttaatgtggcgctggggaatcccagcagtaccgcacagcatgtcttcaaagtctctctcgtcagcggaatgccgttctatgggtaccacgagaaggagaggcacttcatgaagatttatctgtacaaccctacaatggtcaagcggatttgtgaactgcttcagtctggcgcaataatgaacaagttttaccaaccccatgaggcacacatcccttatctccttcagctattcatcgattataatctttatggaatgaatttgattaacctcgccgcagtgaaattcagaaaggccagaagaaaatcaaataccctccacgccaccgggagctgtaaaaaccatctgagcggcaactctctggccgacaccctcttccgatgggagcaggacgagattcccagctcattgatcctggagggagtggagccacagtcaacctgcgagttggaggtggacgcggtcgccgctgacattctgaacaggctggacatcgaagctcagatcggaggcaacccgggacttcaggccatctgggaggatgaaaagcaaagacggcgaaatcggaacgagaccagccagatgtctcagccagaaagtcaggaccaccgcttcgttcccgcaaccgaatcagaaaaaaagttccaaaaaagactgcaggaaatcctgaaacagaacgacttttctgtgaccctcagcggttctgtggattactcggacggctcacaggagttctccgctgaactgactctgcacagcgaggtgctgtcaccagaaatgctgcaatgcacacccgctaatatggtggaggtgcacaaagataaagaatcctcaaaaggacatacacggcataaagttgaagaagcgttgattaacgaagaggccatactgaaccttatggaaaattcccagacatttcagccactgacacagaggttgtctgagtcccctgtgttcatggactcctcacccgacgaggcactcgtccacctgctcgctggcttggagtcggatgggtaccgcggagagaggaacagaatgccgtcaccgtgtaggagcttcggaaataacaaataccctcagaactcagatgatgaggaaaatgagcctcagattgaaaaagaagagatggagctctcacttgtcatgagtcaacggtgggacagcaatattgaggaacattgtgcaaaaaagcgttccttatgcagaaacacccatcggtcctcaacggaggatgacgatagctcgagtggtgaggagatggaatggagcgacaactccctgcttcttgccagtctgtctatcccacagctggacgggacagccgatgagaactcagataacccattgaataatgaaaactcccgaacgcatagttccgtaatcgccacatctaaactctctgtcaaaccttccatcttccataaggatgcagccacacttgagccgagttcatcggcgaagattaccttccagtgtaagcatacctccgcactttcatcccatgtactcaacaaggaggacttgatcgaggatctcagtcagacgaataagaatactgagaagggactcgataactcagtgacatcctttactaacgagtcaacctactccatgaaatatccgggtagtctgtctagcacggtgcactctgagaattcacacaaggagaattctaaaaaagagatcctgccagtttcttcttgcgagtccagcattttcgattacgaggaggacattccttctgtcacccgacaggttcccagcagaaaatatacaaacatccgtaagattgagaaggatagcccctttattcacatgcacagacaccccaatgagaacactcttggtaagaactccttcaacttcagtgatctcaaccactctaaaaataaagtcagctctgaaggaaatgagaaaggtaactccacggccttgagctcgctgtttccatcctcgtttactgaaaattgtgagcttctatcttgctcgggcgaaaacagaacaatggtgcacagccttaacagtaccgcagatgagtctggattgaacaaactcaaaattcgctacgaagaattccaggagcacaaaactgagaaaccatcactgtcacagcaggctgcccactatatgttttttccttccgtggtgctctcaaattgtctcacccgtcctcagaagctgtcccctgtcacatataagctccagccaggtaacaagccatcccgactgaagctgaataagcgcaagctggccggtcaccaagagaccagtacaaagagcagcgaaactggaagtacaaaggacaattttatccagaataatccttgcaatagcaacccagaaaaggacaatgcactggcttccgatctgacaaaaacaactcggggtgcattcgagaataaaacccccactgatggattcatcgattgtcactttggcgacggcactctcgaaaccgaacagagcttcggcctgtacggtaacaagtacactcttcgggctaagcgcaaggtgaattacgaaacagaagattccgaaagtagcttcgtaacgcataacagcaaaatttctctgccccaccccatggagataggggaaagtctggacggaactctgaaatcccgtaagcgcaggaaaatgtcgaagaagttaccaccagtgattatcaaatacatcataatcaacaggttccggggtcgcaagaatatgctcgttaaactgggcaaaatcgactccaaggagaaacaggtgatcctcaccgaggagaagatggagctgtacaagaaactggcccctttaaaggacttttggcccaaagtccccgactctccagccaccaaatacccgatatacccactgaccccaaagaaatcccacaggagaaagagtaaacacaagtccgctaagaagaaaaccgggaaacagcagcgtacgaacaatgagaatatcaaacgaacattaagctttcggaagaagcgctcacatgctatactgagcccccctagccccagttacaacgccgagacagaggattgtgacctgaattattccgacgtaatgagcaagctgggcttcctgtcagaacggagcacctctcctatcaactcttcaccccctaggtgctggagtcccaccgacccacgtgcggaagagatcatggccgcagcagaaaaagaagctatgctcttcaaagggcctaacgtctacaagaagactgtcaacagtcggattggaaaaacgtcccgggcacgagctcagataaagaaaagcaaagctaaactggccaatccttcaatcgtgacaaaaaagcggaataaacgcaatcagaccaacaaactcgtcgacgatggcaaaaaaaagccccgagcgaagcagaaaaccaatgaaaagggaacctccaggaagcacacaaccctaaaagatgagaaaattaagtctcaaagcggggcagaggtaaagttcgtgcttaagcatcagaacgttagcgagttcgcctcttcttcaggcggaagtcagctactattcaaacagaaggatatgcccctgatgggatctgctgtggaccatccactgagtgcctcattaccaactggaatcaatgcacagcagaagctttctggctgcttttcaagtttcctagaaagtaaaaaaagcgtggacctgcagacctttcccagttcccgcgacgatttgcatccatcggtggtgtgcaatagcattggtccaggtgtcagcaaaatcaacgttcagcggcctcacaaccagagcgccatgttcacactgaaggagtctacactgatccagaaaaacatctttgacttgagcaatcacctcagccaggtcgcacagaacacccaaataagcagtggcatgtcatccaagatcgaggacaacgcaaacaatatacagagaaactatcttagtagtattgggaagctgagcgagtatcgcaatagccttgagtccaaacttgaccaggcttatacacctaatttcctgcattgcaaagattctcaacagcagattgtgtgcatcgcggagcaatctaagcactcagagacgtgctctcccggaaacacagcgtccgaggaatctcagatgccgaataactgctttgtaacatcactcaggtctccaataaaacagatagcctgggagcagaaacagcgcggattcatactcgatatgtctaatttcaagcccgagcgagtcaaacctaggagcttatctgaggcgatttcccaaaccaaggcattatcccagtgtaagaacagaaatgtgtcgaccccaagtgcattcggtgagggccagagcgggctggctgtcctgaaagaactgttgcaaaaaaggcagcagaaggcccagaacgccaacactacacaggatcctctgtctaacaagcaccagcccaataagaacatttcaggtagtctggagcataacaaagccaataagagaacacgaagcgtgaccagcccacggaagccacgtaccccaagaagtacaaagcagaaggaaaagatccccaagctgttgaaagttgacagtctgaatctgcagaatagttcacagcttgataattccgtgtcagatgatagcccaatcttcttttctgatcccggattcgagagctgttactcgcttgaggattcattgagccccgagcacaactacaacttcgacattaataccatcggccaaaccggtttctgctccttctacagcggcagtcagttcgttcccgcagatcagaatctgccgcagaagttcctcagcgacgccgtgcaggatctgtttcccggtcaagcaatcgagaagaacgaatttctgagtcacgacaatcagaaatgtgacgaggataaacaccacacaaccgattccgcatcatggattaggtcaggcaccctttctccagaaattttcgagaaaagcaccatagactctaatgagaatcgtcgacacaatcagtggaaaaatagcttccatcccctcacaacacggtctaacagcatcatggattccttttgtgtccaacaagccgaggattgtctgtccgaaaagtcccggcttaacagaagcagcgtctccaaagaggtatttttgtctctcccacagcccaacaactccgactggattcaggggcacaccaggaaagaaatgggccagagtttggacagtgctaatacttctttcacagcaattctcagcagcccggacggagaactcgtggatgtcgcttgtgaagacctagagctctacgtgtctcgcaacaacgatatgctgacacctactcccgatagctcacctaggtcaacttccagtccctcacagtctaagaatggttccttcactccgagaacagccaatatcctcaaacctctgatgtccccaccctccagggaggaaatcatggctacactgctggatcacgacctgtccgaaacaatctaccaagagccattctgcagtaatcccagcgatgtgcccgagaagccacgagagatagggggtagacttctcatggtggagacgagactcgccaatgatctcgccgagtttgagggagacttctctctggaaggattgagattgtggaaaaccgcattttcggctatgactcagaatcccagacctggatcgcctttgcgttcaggtcagggggtagtgaacaaaggatcatcgaattcccctaaaatggtggaggacaagaaaatcgttataatgccatgtaagtgtgctccaagccggcagctggtccaagtgtggcttcaggctaaggaggagtatgaaagatctaaaaaactgccaaagaccaaacctacaggcgtcgtgaagagtgctgaaaatttcagctcaagcgtgaatccggacgataaacccgttgttccgcctaagatggatgtatcgccatgcatcctgcctaccaccgcccacacaaaggaggatgtcgataattctcagattgcgctacaagctcctacgacaggctgttctcagactgccagcgagtcccagatgctacctcccgtggcgtcggccagcgaccccgaaaaggacgaggacgatgatgacaactactatatttcatattcttcccccgactcccccgtgatcccaccctggcagcagccgatctcccctgatagcaaggctctgaacggcgatgaccgaccttctagcccagtggaggaactgcctagcttggccttcgaaaacttcctcaagcctatcaaggacgggatccagaagtccccctgctcggaaccccaagaaccgctggtgatcagcccaattaacacccgggcaaggacggggaagtgtgaaagcctttgcttccacagcacgccaattattcagcgtaaactactagagcgcctgccagaggctcctggactcagcccgctcagtacagaaccgaagacacagaaattatcaaataagaagggtagtaatacggacacactcaggagggtcctgcttacccaggccaagaaccagtttgccgcagtgaacacgccccagaaggaaacatcacagattgatggaccaagcctcaataatacctatgggtttaaagtgtccattcagaacctacaggaagccaaggccctgcatgaaattcaaaacctgactctgatctccgttgagctccatgccagaacccgacgggatctggaaccagatcctgaattcgatcctatttgtgccctgttttactgtatttcatccgataccccactgcccgacaccgaaaaaaccgagctgacaggtgttatcgttatcgacaaggataagacggtgttttctcaggacattagataccagacacctctgctaatcagaagcggtattaccggtttagaggttacatatgcggcagatgaaaaggccctcttccacgagatcgccaatataattaaaagatatgaccctgatattctgttgggctatgagattcagatgcattcttggggctatttgctgcagagggctgccgctttaagcattgacctttgccgaatgatctcccgcgtacccgacgacaaaattgaaaatcgcttcgctgcagaacgagatgagtacggctcctatacaatgtcagaaattaacatagtgggcagaataactctgaatctctggaggattatgcgaaatgaggtagcactgaccaactatacattcgagaacgtgtcttttcacgttctgcatcaacgctttccactgttcacatttagggtactttcagattggttcgataacaaaaccgatctgtataggtggaaaatggtagaccactatgttagcagggtgcgaggtaacctgcaaatgctggagcagttagatctgatcggaaagactagcgagatggccaggctgttcggcatacaatttctgcatgtgctcacccggggaagccagtacagagtcgagagcatgatgctcagaatcgccaagcctatgaactacatccctgttaccccatccgttcagcagcggagccagatgcgcgctcctcaatgcgtgccactgatcatggaacctgagtctcgcttttattccaactcagtgcttgttctggattttcagtctctgtatccgtctattgtgatcgcctacaattattgtttctccacgtgccttggccatgtggagaacctggggaaatatgacgaattcaaattcgggtgtacaagccttcgggttccgcctgatctgttgtaccaggttagacacgacattactgtctcaccaaacggcgtggcctttgtcaagcccagtgttagaaagggagttctccccagaatgcttgaggagatcctgaaaacaagattcatggtgaagcagagtatgaaggcctataaacaggaccgcgcactttccagaatgctagacgctaggcagctgggcctgaagcttattgccaacgtaaccttcgggtacacttctgcaaatttttcaggccgtatgccatgtatcgaagtgggcgatagcattgtccataaggccagagaaacactagagagggctatcaagttagtcaacgacacaaaaaagtggggagcgagggtagtatatggagataccgattcaatgttcgtgctgctcaagggggcaactaaagaacagagttttaaaataggccaggagattgcagaggccgtgaccgccaccaacccaaagcccgtgaaactcaagtttgaaaaggtctacttgccctgcgtcctccagacaaaaaagcgctacgtcggctatatgtacgaaacactggatcagaaggaccccgtgtttgatgccaaagggatcgagacagtccggcgtgattcctgtcccgctgtttctaaaattctggagaggagcctcaagttgttattcgagacaagggatattagtcttatcaagcagtacgtacagaggcagtgcatgaaactactggagggcaaagccagtatacaggactttattttcgccaaggaatacagaggttccttctcctacaagccaggtgcttgcgttcccgcactggagctgactcgcaaaatgctaacctatgataggagaagcgagccacaggtgggtgagagggtcccgtacgtgattatctacggaactcctggggtgccgctcattcagctggttcgacggcctgtggaggttctccaggatccgacacttaggttaaatgccacatattatatcaccaaacaaatcctgcctcccctcgccaggatcttctcgttgattggaattgacgtcttttcttggtatcacgagctccctcgaatccacaaagctaccagcagctcacgctcagagcccgaaggtcgcaaaggcacaatcagccagtattttacaaccctgcactgtcctgtttgtgatgatctgactcaacacgggatctgtagtaaatgtcgctcccagcctcagcacgtggcagtcatactgaaccaagagatcagggagttggagagacagcaggagcaactcgttaagatttgtaaaaattgcaccggatgttttgatcgccatattccttgcgtcagtctgaattgcccagtcctgtttaaactgtcccgtgtaaatagggagttatccaaggcaccgtatcttcgccagctgctcgatcagttcta

SEQ ID NO: 238588 - DNA, 2289 bp, synthetic construct
  misc_feature 1..2289: note = Description of Artificial Sequence: Synthetic coding sequence
  source 1..2289: mol_type = other DNA
atggtggaaactcgactggccaacgacctcgctgaattcgaaggggactttagcctcgagggcttaaggctttggaagacagcgttcagcgcaatgactcagaatccaagaccaggcagtccgctcaggtcaggccagggtgtggtgaataagggaagttctaacagtcctaagatggtggaggacaagaagatcgttatcatgccctgcaaatgcgcgccatcccgacagctggtgcaggtgtggctccaggcgaaagaggagtacgaaaggagtaagaaacttccaaagactaagccaactggcgtggtgaaaagcgccgagaattttagctccagtgtgaatccagacgacaagcccgtggtgccacctaagatggatgtgtccccctgtatcctgccaacaacagcccatacaaaggaagacgttgacaatagccagatagccctccaggcccctacaaccgggtgtagtcagacggcctcagaatcccagatgttgccgcctgtggctagcgcaagcgaccccgagaaggacgaggatgacgatgataattactacatttcctattcttctcccgactctccagttattcccccatggcagcagccaatctcgccggactctaaggccctaaacggcgatgaccgtcctagctctccggtcgaagaactgccgagtttagccttcgagaacttcctaaaaccaattaaggatggtatccagaagagtccatgcagcgagccacaggagcctctagtcatctctcccatcaacaccagagctagaacaggcaagtgtgagtccctgtgcttccatagcacccctattattcagcgaaagttactggaacgtttaccagaggccccaggattaagccccctgtcaacagagccaaagacccagaagctgagtaataagaaggggagcaacacggacacgcttagacgagttcttcttacccaagctaaaaaccagtttgctgccgtgaacaccccccagaaagaaacaagccagatagacgggccaagcctgaataatacatatgggttcaaggtgagcatacagaatctccaagaggcaaaagcactccacgagattcaaaacctcaccctcatctcggtagaactccacgctagaactaggcgggatctagagcctgacccagagttcgatcccatctgcgccctattctattgcattagcagcgatacgccactgcctgacacagaaaagaccgaactaactggcgtgatcgtgatcgacaaagacaagactgtattttcccaagacatcaggtaccagacccccctcttaatcagaagcggtattaccggactcgaggttacttatgctgcagacgagaaggccctgttccatgaaattgcaaacatcatcaagcgttatgatccggacattcttttgggttatgaaatccagatgcactcctggggctacctcctccagcgcgctgcagcactgagtatcgacttatgccgaatgatttctagggtcccagacgataaaatcgagaaccgcttcgctgcagagagagatgaatacggaagttacaccatgtccgaaatcaatatcgtaggcaggatcaccctaaatttatggaggattatgagaaacgaggtggccctcactaattatacatttgagaacgtgtcgtttcacgttttacaccagagatttccactcttcactttcagggtgctctcggattggtttgataataagacagacctgtaccgttggaagatggtggaccactacgtgagtagagtgagggggaatcttcagatgcttgaacagctcgacctgattggcaaaacttccgagatggccagactgtttggtattcagtttctgcatgtgttaactcgaggctcacagtacagagttgaatctatgatgctgcgaatcgcgaaacccatgaactatattcccgttactccttctgtgcagcagaggtcacaaatgcgagctccacagtgcgtgcctctgatcatggagccagaatctcggttctacagtaacagcgtgcttgtcctagatttccagtccctgtacccatctattgtcattgcctataactactgcttcagcacctgtctggggcatgttgaaaacctggggaaatatgatgagtttaagtttggttgcacgtctctcagagtgccacctgatctgctgtatcaggtgcggcacgatattacggttagccctaacggcgttgccttcgtaaaaatcgccaataaatgccgacccgagggtatggcatag

SEQ ID NO: 238589 - DNA, 3666 bp, synthetic construct
  misc_feature 1..3666: note = Description of Artificial Sequence: Synthetic coding sequence
  source 1..3666: mol_type = other DNA
atgctgagatcaacaggattcttccgtgccatcgactgtccgtattggtcaggggcacccggaggaccatgtcgaagaccgtattgccatttcagacatcgtggcgcacggggatcaggtgcacccggagatggaggcgaagcacctcccgctgccggactgggctatgatccctacaatccagaattgcccaagccccctgcacagagagagaatgggactctgggcctgggagaggagcctcgtccagacgtgctagagctggagctcgtgaaccaggcaatcgaggccgtccggagcgaagtagaactggagcagaggaggtatcgggagctgctagaaacaacccgagaacatcggtctgccgaagctccagcactagcccctagagggccaaatgcttctcctaccgtgggccctgatgaggacgccttcccactagcatttgattactcccccggaagccacgggttgctttcgccagatgccggatatcagccgacgcctctggctgcccctgcagagccaggttccaagtattcactggcaagcctggaccgtggccaaggcaggggaggaggcggagggggtgctctcgagtacgtgcctaaagccgtgtcccagcccaggcggcactcgcgccctgtacccagcggcaagtatgtggtggacaacagcagacccccaactgacttagagtacgatcccctctctaactattctgcacggcacctctcccgagcctcctctcgtgacgaacgcgctgccaaaagacccagaggtagcaggggctccgagccctacacacccgcaccaaagaaactctgtgaccctttcggtagctgtgatgcaagatttagcgatagcgaggacgaggccgcaactgtcccgggaaatgagcccacgacggcaagcacccctaaggctcgagccgaccctgagattaaagcaaccggccagcccccatctaaggaaggcctcgaggccgaggggggtggcctccgcgaaaccaaggaaacagcagtacagtgcgatgtcggtgacttgcagcccccacccgctaagccagcaagtcctgcccaagtgcaaagcagccaggacggaggctgcccaaaggaagggaagccaaaaaagaaaaagaccggggctccgccagccccatcctgtaaagacggagcccagggcaaagacaagacaaaagataagggccgagggaggccagtggagaagccccgtgctgacaagaaagggccacaggcgtcctcaccaagacgcaaggcggagcggcctgaaggaacgaaaaagaaacctagcagcgccacacctgtggctacctctggtaaaggcaggcccgatagacctgccagaaggccttcaccaacttccggtgactcgaggccagccgctggacggggaccacctcggccactacagctccccgacaggaaaagcactaaggccccaagtggtaaattggtagaacgtaaggctaggtccctcgatgaaggcgcaagccaagatgcacccaaactgaaaaagagagctctgtctcatgcggatttgttcggcgacgaatcggaggacgaagctgccggacctggcgttccctccgtctggccctcagctctacctagtctgtctagcgattcagactcagattctgactccagcctcggctttccagaagctcagggacctcctaaaagattgaaggcctctcctccacccagtcctgctccttcttcttcctctagtagcagttcctctacatcctccgctggggctgatgttgattactccgccttggagaaggaagtggattttgactccgatcccatggaagagtgtctaagaatcttcaatgaaagtacttcagtgaagacagaagacaggggaagactggccaggcagccacctaaagaggaaaagtctgaggagaaggggctgtccggattaaccacgctgtttcctggacagaaaagacggatctcacacttgagcaaacagggccaggaggtcgagccccctcgacgtggccctgccgttcccccagctcggccaccaactgcacaagaagtgtgttatctgcgagctcagcaggctcagcgggcttccgccagtttactgcaggctccagccagactggcagagaagagtccaagcgtccacatcagcgctcctggcgagaagaggaggattgcccacatccctaatcccagactcgccgcagccccaacaggagcaaagagaacactggccgcttccggttctcaatctagtaacgggcctgaacctgggggtcaacagctgaagaccagaacgctttcaggcatggcctctaagaccacaactaccatcatacctaaaaggattgcgcattctccgtccctgcagtccctgaagaagcctattattcccaaagaatttggagggaaggtccccaccgtaatcaggcagaggtatctgaacttatttatcgaggagtgtttaaagttttgtacaagtaatcaggaggccattgagaaagcactgaatgaggaaaaagtagcgtacgatagaagcccttcaaaaaacatttatttaaatgtggccgtgaacacactgaaaaagctacgcggtctggccccatctgccgtccctggactaagcaagacttctgggcgtcgtgtagtgtcgcatgaagtggttctgggcggacgacttgctgcaaaaacaagctttagtctgtccagacccagcagtccacgagtggaggacctgaaaggtgctgctctgtacagtcggctgagagaatatctgttgacgcaagatcagctgaaagagaacggctacccttttcctcacccagaaaggcctgggggagccatcatcttcacagcagaggaaaaaagacctaaggacagctcctgccggacgtgttgtcgctgtggcaccgagtatcttgtgtcttcctctggcagatgtattagggacgaggaatgttactaccactgggggaggctgcgcagaaacagggtcgcagggggatgggagacgcagtacatgtgctgtagtgctgctgccggaagcgtcggttgtcaggttgcgaagcaacatgtccaggacgggcgtaaagaaaggctggaaggcttcgtcaaaaccttcgagaaggagttgtctggggacacccacccgggtatttacgccctggactgcgagatgagctatacaacttacggtctcgagctgacccgcgtgacagtggtggacaccgacgtccacgtggtgtacgacacttttgttaaacctgacaacgagatcgtggattacaacacccgattcagcggagtgactgaagctgacctcgccgacacaagcgtgaccctgagggatgttcaggctgtactgctcagtatgttttcagccgataccatcctgattggtcacagcctggaaagcgatttgctggccctcaaggtcatacactcaaccgtagttgacactagcgtgctgtttcctcaccggttaggtcttccttacaagcggtcactgagaaacctcatggccgattatctgcgccagattattcaggacaacgtcgacggacatagcagcagtgaagacgccggagcatgcatgcaccttgtgatatggaaggtccgcgaagatgctaagaccaagaggtag

SEQ ID NO: 238590 - DNA, 1014 bp, synthetic construct
  misc_feature 1..1014: note = Description of Artificial Sequence: Synthetic coding sequence
  source 1..1014: mol_type = other DNA
atgctgccctcgtccacaagactggggtatgatccctacaacccggaattaccgaagccgccagctcagcgagagaatggcaccctgggcctgggggaagaacccaggcctgatgtactggaattggaattagtgaatcaggctatcgaggcagtgcggtctgaagttgaattggagcagcgccgatacagagagctgttagaaacaaccagggaacaccgtagtgcggaggcccctgctctggccccacggggacctaacgcttcaccaaccgtcggtccagatgaggatgctttcccactggcgttcgattattcgcccggatcccatggacttttaagccctgatgccggttatcagccgactcccctcgctgctccggctgagcctgggagcaaatatagcctcgctagcctggataggggacaaggccgaggaggaggaggagggggtgcgttagagtatgttcccaaagccgtctcccagcctagaaggcacagcaggcccgtcccctcaggaaagtatgtcgtagataacagtcgcccacccacggatctggagtatgaccccctatcaaattatagtgccaggcacctcagtagggcctcaagtagagacgagagagcagccaagcgcccaagaggtagtcgcggtagtgaaccgtatacacctgcccctaagaagctgtgtgacccttttggttcatgcgatgctaggttcagcgatagcgaagatgaggcagctaccgtacctggtaatgaacccaccaccgcctctacccctaaggccagagcagaccccgaaatcaaagccactggccaacccccaagtaaggagggactggaggctgagggcggaggtctccgggaaacaaaagaaaccgccgtgcagtgtgatgttggcgaccttcaacccccacctgcaaaacctgcctctccagcccaggtccagagctcacaggacggcggatgcccaaaggagggtaagccaaaaaagaagaagacaggagcttag

SEQ ID NO: 238591 - DNA, 1482 bp, synthetic construct
  misc_feature 1..1482: note = Description of Artificial Sequence: Synthetic coding sequence
  source 1..1482: mol_type = other DNA
atgggtagccattcaccatgtgcacatacaccatgcgcacctcctgccccaacaggagctaagcgaaccctggccgcatccggctcccagtcctctaacggcccagagcctgggggacagcaactgaaaacaaggaccctgagtgggatggcctcaaaaaccacgactaccatcattccaaagaggattgcacattctccaagcctgcagagcctaaagaaacccattatcccaaaggagtttggcggaaaagtccctacggtcatccgccagagatacttgaaccttttcatcgaggaatgtctcaagttttgtacgtcaaaccaagaggctattgagaaggccttgaacgaggagaaggtcgcctacgaccggtccccaagcaaaaatatctacctgaatgtagctgtgaatacactgaaaaagctgcgaggactggcaccctccgcagtccctggcctgtccaaaacctcagggaggcgtgtggtgtcccatgaagtggtgcttggaggacgcttggctgctaagacctcatttagtctgagccgcccaagctcccctagggtagaagaccttaagggagcagccttatactctcggctgcgtgagtacttgttgactcaagaccagctcaaggaaaacgggtatccattcccccacccagaaaggccaggaggagcaatcatatttacggcagaggaaaagcgccctaaggacagtagttgccgcacttgctgtcgatgtggcaccgagtatcttgtttcctcttctggcagatgcattcgggacgaagagtgttactaccactggggtcggttacggcgtaacagagtggcgggtgggtgggagacacagtacatgtgctgcagtgccgctgccggttcagttggctgtcaggttgcgaagcagcacgtgcaagatggtcgcaaggagcgcctggaaggctttgtgaagacctttgagaaagaattgtccggcgatacacatccaggaatatatgctctagactgtgagatgagctacaccacttacggcttggagttgacccgggtgacagtagtcgacacggacgtacatgtcgtttacgacacattcgttaagcccgataacgaaatagtagactacaacaccagattctccggcgtgacagaggcagatctggctgacacaagcgttactctgagggacgtccaagccgtgttgctctcaatgttctctgcagacaccattttaattggccatagtctcgagagtgatttgctggctttgaaagtcatccactccactgtggtggacacttcagtgctcttcccacatcgcctcggactgccatacaagaggagtctgcgcaacctgatggctgactacctgcggcaaatcatccaggacaacgtggacgggcattcgtcttctgaagatgctggcgcttgtatgcatctcgtgatttggaaagtgcgggaagatgcaaaaaccaagcggtag

SEQ ID NO: 238592 - DNA, 714 bp, synthetic construct
  misc_feature 1..714: note = Description of Artificial Sequence: Synthetic coding sequence
  source 1..714: mol_type = other DNA
atgcttgggggaagtttgggtagcagactgcttcggggtgtcggtggctcccacggcaggttcggagcacggggagtgagagaaggcggtgctgcaatggctgccggagagtcaatggcccaacgcatggtgtgggtggatctggagatgacaggtctggacatcgaaaaggatcagattattgagatggcttgtctgatcaccgattcagatctgaacatcctggctgaaggcccaaatctgatcatcaagcaaccggacgaactgctggatagcatgagcgattggtgcaaagagcatcatggcaaatccggcctgacaaaggcagtcaaggaatccacaatcaccctccagcaagctgaatacgagtttttgtcctttgtgcgtcagcagactccgcctggtttatgcccactcgccggtaatagcgttcacgaggataagaaattcctcgataagtatatgccacagttcatgaagcatttgcattatcggattattgacgtatccactgtgaaagagctgtgccgccgatggtatccggaggagtacgagtttgccccaaagaaagctgcaagccatagagctctcgatgatatttccgagagcataaaggaactgcagttctatagaaataatattttcaaaaaaaaaatcgatgagaagaagaggaagattatcgagaacggggaaaatgagaaaacggtgtcatag

SEQ ID NO: 238593 - DNA, 753 bp, synthetic construct
  misc_feature 1..753: note = Description of Artificial Sequence: Synthetic coding sequence
  source 1..753: mol_type = other DNA
atgggaaaggctaaggtgcctgctagcaagagggcacctagctcgcccgtcgctaaaccgggaccagtcaaaacactgacacggaagaagaataagaagaagaagaggttctggaagtccaaggccagggaagtgagcaaaaagcccgcttcaggccctggcgctgttgtgagaccgccaaaggcccctgaggactttagccagaactggaaagccctccaggaagttccgcgatggaccgggggacggcagtacctcgcaccccgtccagtggagcaatctactatccgcaaagaacctcggaagggtcagatggtgatcctctttcaaaacgagggaacttcctcaataagatctggcaagctgcgacgtcagccacagcctcatccacctcgcgaggaactggaagtggtgcagaaggaagttgcagagatgttgaaaggacgaattctggttggtcatgccttacataatgacctcaaggtactgttcctggaccaccctaagaagaagattagagatacacagaaatacaagcccttcaaatctcaggtgaagagcggtcgcccttcactcaggctgctttccgaaaagatcttgggtctgcaggtgcagcaggccgagcactgctccatacaggatgcccaggctgccatgcggctctatgtgatggtgaagaaagaatgggaatctatggcaagggaccggagacctctccttaccgcgccagaccattgctctgatgatgcgtag

SEQ ID NO: 238594 - DNA, 1269 bp, synthetic construct
  misc_feature 1..1269: note = Description of Artificial Sequence: Synthetic coding sequence
  source 1..1269: mol_type = other DNA
atgggtaaggccaaggtgcccgcttccaagcgcgctccttctagtcccgtggccaaaccaggcccagtgaaaacactgacccggaaaaaaaacaagaagaaaaaacggttttggaaaagtaaggcccgagaggtgagtaaaaagccagctagcggtcccggagccgtggtccggcctcctaaagcgcctgaggatttcagtcaaaactggaaggctctccaagaatggctcctgaaacagaagagccaagcccctgaaaaaccactggtcatttctcagatggggtctaagaaaaagccgaaaattatacagcagaacaagaaagagacttccccacaggtgaagggcgaggagatgcctgccggaaaagaccaagaggcttcacgaggatcagtgccctctgggagcaagatggatagacgcgctcctgtaccccgaactaaggcctccggaactgaacataataaaaaagggaccaaggaacggacaaacggagacatcgtcccagagcgaggagacatcgaacacaagaagcgcaaggcaaaagaggccgctcccgctccgccaacagaggaagacatctggttcgatgacgtggaccctgccgacattgaagccgcaatcgggccagaagcggctaaaatcgctaggaagcagttagggcagtctgaaggctctgtgtccctctctctggtgaaagaacaagctttcggcggactcacaagggcacttgctctcgactgcgagatggtgggagttggcccaaagggcgaagagtctatggccgctcgagtttccattgtgaaccagtatggtaagtgcgtttacgataagtacgttaaaccaaccgagcccgtaaccgactaccgcactgctgtgtccgggatacgccctgagaacctgaagcagggtgaagaattggaggttgttcagaaggaggtggcggagatgctgaagggaagaatcctcgttgggcacgcactgcacaacgacttaaaggtgttgtttttagaccacccaaaaaagaaaattagagatacacagaaatataaacctttcaaaagccaggtcaaaagtgggaggccctccttgaggctcctcagcgaaaaaattctcggcctccaggttcagcaggcagaacattgcagcattcaggacgctcaggctgctatgagactctacgttatggtgaaaaaggagtgggagtcaatggctagggaccgccgacctctgcttactgcccctgaccactgttccgatgatgcatag

SEQ ID NO: 238595 - DNA, 570 bp, synthetic construct
  misc_feature 1..570: note = Description of Artificial Sequence: Synthetic coding sequence
  source 1..570: mol_type = other DNA
atgggctcaaagaagaagcccaagatcattcagcagaataagaaggaaaccagtccccaggtgaagggcgaggagatgccagccggaaaggaccaggaagctagtcggggatccgtgccaagtggctcgaaaatggatagacgcgcacctgtccccaggaccaaggctagtggcactgaacacaacaagaagggaacaaaggagcgcacgaacggagacatcgtgcccgagcgcggagacatcgagcataagaagcgaaaagctaaagaagccgctcccgctccccctacagaggaagatatctggtttgacgatgttgacccagccgatattgaggccgctataggcccagaggctgctaaaattgctcgcaagcagctgggacaaagtgaggggtcagtctcgctgagcctggtcaaggagcaagcctttgggggtctgactagagccctggcgctggactgtgaaatggtgggtgtgggcccaaagggggaagagagcatggccgcacgggtcagcatcgtgaatcaatacggtaagtgtgtctacgataagtacgtgaaaccttag

SEQ ID NO: 238596 - DNA, 1125 bp, synthetic construct
  misc_feature 1..1125: note = Description of Artificial Sequence: Synthetic coding sequence
  source 1..1125: mol_type = other DNA
cctgtggccaaacccggacctgtgaaaactttaacccgaaaaaagaacaaaaaaaaaaagcggttctggaaatctaaagctagggaagttagcaaaaagccggctagtggacccggagctgtggttagacccccaaaggccccagaagacttcagccagaactggaaagccctgcaagagtggttgctgaaacagaaatctcaggccccagagaagccactggtcatttcacaaatggggagtaaaaaaaagccaaagatcattcagcagaacaagaaggagacctccccacaagtgaagggggaggagatgccggcaggtaaggaccaggaagcctctagggggagtgtcccgtctggttccaagatggaccgaagggcaccggtgccacggacaaaagcgtccggaactgagcataacaaaaaaggaacgaaggagagaactaacggagacattgtgcccgagaggggcgacatagagcacaagaagcgtaaggccaaagaggccgcacccgcacccccaaccgaggaagacatctggttcgacgatgtcgatccagccgacatcgaggctgcaattggtcctgaagctgccaaaatcgccagaaagcagctaggacagagcgaaggatctgtgtccctgagcctggtcaaggagcaggcattcgggggattaactcgtgctttagctctggactgtgagatggttggagttggtccgaagggggaagagtctatggcagccagagtttccattgtgaaccaatatggcaagtgcgtgtacgataaatacgtgaaaccaacagaacccgtgacagactataggactgctgtctcaggcatcaggccagaaaatttaaaacaaggcgaggagctcgaggtggttcagaaggaggtagctgaaatgctaaaggggcgaatcctggttgggcacgctctccacaatgacctgaagtctggccgtccatctttacgcctcctttccgagaaaatattggggcttcaggtacagcaggattccgggtgtcccggaagcaacgaggcagttcgacacggagaagaaggcgtgggagaacacggaccgcgtcaagctcctcccgcagattgctcccggccattgcagtag

SEQ ID NO: 238597 - DNA, 702 bp, synthetic construct
  misc_feature 1..702: note = Description of Artificial Sequence: Synthetic coding sequence
  source 1..702: mol_type = other DNA
atggggaaggccaaggtcccagcctccaagcgggctccttccagcccggtcgccaagccaggaccagtgaaaaccttgaccagaaagaaaaacaagaagaaaaagaggttttggaagagcaaagctcgcgaggtgagcaagaagccagcatccggccctggggctgtggtgcgccctcccaaggcaccagaagactttagtcagaattggaaggccctgcaggaggtccccaggtggaccggcggacgtcagtatctggccccacgtccggtggagcagtcgactatacgaaaggaacccaggaaggggcagatggttatactcttccagaacgaaggaacctccagtattaggtctgggaaactgcgaaggcagccacagccacatccccctagggaagagctggaggtcgtgcagaaggaggtggcggagatgctgaaggggagaatcttagtgggccacgccctgcacaatgaccttaaggtgttgttcctggaccatccaaagaaaaagattagagacactcagaaatacaaaccgttcaaaagccaggtcaaatcagggagaccttcgcttaggttactctctgaaaagatcctgggattgcaagtccagcaggccgaacactgctccatacaggatgctcaggccgcaatgaggctgtacgtgatggttaaaaaggaatgggagtccatggcctag

SEQ ID NO: 238598 - DNA, 996 bp, synthetic construct
  misc_feature 1..996: note = Description of Artificial Sequence: Synthetic coding sequence
  source 1..996: mol_type = other DNA
atgagtcgtgcccgaggcgcattgtgccgggcatgcctcgccctggctgccgctctggctgctctattactcttgccacttccccttcctagggctccggctccggcaaggacaccagcccctgcgcctagagctccaccatctagaccggctgctccatcactgaggcccgacgacgtgttcattgctgtaaaaactacacggaagaaccacggccctaggctccgacttctcctgcggacctggatcagccgggctagacaacagacgtttatttttaccgatggtgatgatcccgagctggagcttcagggcggagaccgggtgatcaacacaaactgtagcgctgtgcggacccggcaagctctctgttgtaaaatgtcagtcgaatacgataagttcattgaaagcgggagaaagtggttttgtcatgtagatgatgataactatgtgaacgcgaggtctctgctccacctgctgagctcttttagtcccagccaggatgtttatcttggccgaccctcacttgaccaccccatcgaagccacagaaagagtccagggaggacggactgtgacgactgtcaagttttggtttgctactggaggggctggtttttgtctgagccgtggcctggcactgaaaatgtcgccctgggcgtctcttggctctttcatgagcactgccgaacaggtgcggcttcccgatgactgtacggttggatatattgttgagggcctgcttggtgcacggctcttacacagtccgctgtttcactcccatctagaaaatctccagaggctgcctcctgacaccctcctccagcaggtgacgctttcacacgggggacctgagaacccacacaatgttgtaaacgtcgccggaggttttagtctgcatcaggaccccacgagattcaaatcgatacattgccttctctatccggataccgactggtgccctcgacagaaacagggagcgcctacatctcgctag

SEQ ID NO: 238599 - DNA, 873 bp, synthetic construct
  misc_feature 1..873: note = Description of Artificial Sequence: Synthetic coding sequence
  source 1..873: mol_type = other DNA
atgtcaagagcccctcctagccgccctgccgcaccgagcctccggcctgatgatgtgtttatcgccgtgaagactacgagaaagaaccacgggccacggctgcgccttctcttacgcacttggatcagtagagcaaggcagcaaacctttatattcacagatggggacgacccggagctggagttgcagggcggagaccgcgttataaacacaaactgttccgcagttagaacgcgccaggcactgtgctgcaagatgtcagtggaatacgataagtttatcgaatcaggcaggaagtggttctgccacgtggatgacgataattacgtcaacgccagatccctccttcatcttctttcatccttcagtccgtcccaagatgtttatctgggcaggccgtccctggatcatcctattgaggctaccgaacgggttcaggggggtaggacagttacaactgttaaattctggtttgccacaggcggagcgggtttctgtctgtcaagagggttggcactgaaaatgtcaccttgggcctcactcggtagcttcatgtccacggccgagcaggtgaggcttcccgatgattgtaccgttggctacattgtcgaggggctgcttggcgcaagactgctgcattcccccttattccatagccatcttgagaacctgcagcggctgcctcccgacaccctgttgcagcaggtcacactaagtcatggtggccctgaaaaccctcataacgtggtgaacgtggccggtggcttctcccttcaccaggatccaacccggtttaagtccattcattgtctgctttatcctgacacagattggtgcccacgtcagaagcagggagcccctacaagccggtag

SEQ ID NO: 238600 - DNA, 1626 bp, synthetic construct
  misc_feature 1..1626: note = Description of Artificial Sequence: Synthetic coding sequence
  source 1..1626: mol_type = other DNA
atggggtcccaggaggtgttgggccatgccgctagattggcctccagtgggctgcttctgcaggtgctgttcaggctcatcactttcgtgctcaatgcattcatcttgcgattccttagcaaggaaattgtgggcgtggtaaatgtaaggcttactcttctgtacagcaccactctgttcctcgccagagaagcctttcgcagggcttgtctgagtggtggcacacaaagggattggagccagaccttaaacctgctttggctcactgtgccgcttggggttttttggtccctctttctcggttggatttggctgcagctgcttgaggtgccagatccaaatgtggtgcctcattacgccaccggggtggtgctattcggcctttctgctgtggtggagctcctgggagagccattctgggtgcttgcccaggcccatatgttcgtgaaactgaaagtcatcgctgagtcattgtccgttatactgaaatcggtgttgaccgcattcttggtcctgtggctgccccattggggtctctatattttttctctggctcagctattctataccaccgtgcttgtcctgtgttacgttatctacttcaccaagctgctgggatcacctgagtccacaaagctccagactctgcctgtgagccgaatcacagacctgcttcctaatatcacaaggaacggagcttttatcaattggaaggaggccaaattgacctggtctttcttcaagcagtctttcctaaaacagattttgacagagggtgagcgctacgtgatgactttcttgaatgtcctcaacttcggggatcagggggtttacgacatcgttaataatctgggatcactggttgcccgacttatctttcaacctattgaagagtctttctatatcttctttgccaaagtgctggagcgcggaaaagatgctactcttcagaagcaagaagatgtggctgtggcagcagccgttctcgagtccctgctcaagttggccctcctcgccggactcacaattaccgtgtttgggttcgcctactcccaacttgccctggacatttatggcggtacaatgcttagcagtggttctgggccagtgcttctcagaagttattgcctctacgtacttctcctcgctatcaacggcgtgacagaatgtttcactttcgccgctatgtcaaaagaggaggtagataggtataatttcgtgatgctggccctgtcctcatcatttcttgtgctctcataccttttgacacggtggtgcggatctgttgggtttatcctggccaattgcttcaacatgggaattaggatcacccagagcctgtgtttcattcaccgctactacagaaggtcaccacacagaccactcgccggactgcatctgtctcccgtgcttctgggcactttcgccctgtcgggaggcgtcactgccgttagcgaagtcttcctttgctgcgagcaggggtggccagctcggctggcccacattgcggtgggggcattttgtttgggtgccactctcggcactgccttcttgaccgaaaccaagcttattcatttcttgaggactcagctgggcgtgccacgcagaacagataaaatgacatag

SEQ ID NO: 238601 - DNA, 1509 bp, synthetic construct
  misc_feature 1..1509: note = Description of Artificial Sequence: Synthetic coding sequence
  source 1..1509: mol_type = other DNA
atgggatcccaggaggttctcggccatgcagcacgacttgcatcaagcggtctgctgctgcaggttctatttcggctcatcactttcgtgttgaatgcgttcattcttcgcttcctcagcaaggagattgtgggcgttgtcaacgtgagggttccccttggcgtgttttggtccctttttctcggatggatctggctccagctccttgaggttcccgaccccaacgttgtgcctcactacgcaactggcgtcgttcttttcggactctcagctgtggtggagttattgggcgagccgttttgggtcctggcacaagcacatatgttcgtgaagctcaaggtcattgctgagtcactgagtgtgatccttaagagcgtgttgaccgctttcctcgtgctgtggttgcctcactggggtctgtatatatttagtctggcccagcttttttacactacagtgctcgttttatgctacgtgatctacttcacaaaattactcgggagtccagagtccaccaagctccagaccctgcctgtctccaggattacggatctcctgcctaatatcacgagaaatggagccttcataaattggaaggaggcaaagctcacctggagcttcttcaagcagagctttctgaagcagatccttaccgaaggggaaaggtacgtcatgacctttcttaatgtgttgaatttcggtgatcagggcgtgtacgacattgtcaataatctcggtagcctggtggcgcgactgattttccagccaattgaagagagtttttatattttttttgccaaggttctggaaagggggaaagacgctacgctgcagaaacaggaggatgtcgccgtggccgcagccgtcctggaaagtctcctgaaactcgcactgttggcaggcctgaccatcacggttttcggctttgcttattcccaactggcactcgacatttacgggggaactatgctcagcagtggctccggtccagtcctgctccgttcctactgcctgtatgtattgctcctggctattaatggagtgaccgaatgcttcaccttcgctgcaatgagcaaggaggaggtcgatcgctacaacttcgtgatgctggctctgtcttcgagcttcttggttttaagctatctcctgacccgttggtgcggaagtgttggctttatactggctaactgtttcaatatgggaatacgcatcacacaatctctgtgttttattcataggtactaccgcaggagcccacaccgtccgctggctggtctgcatctctccccagtgctgctgggtacatttgctctttccggtggagtgacagcagtgtctgaagtgtttctgtgctgcgagcagggatggcccgcacgcctggcccacattgccgtcggggctttttgtctgggtgccaccctcggtaccgcttttttgaccgagactaaactcatccattttctgcgtacccagctgggtgtacccaggcgtactgacaaaatgacttag

SEQ ID NO: 238602 - DNA, 4308 bp, synthetic construct
  misc_feature 1..4308: note = Description of Artificial Sequence: Synthetic coding sequence
  source 1..4308: mol_type = other DNA
atggctcaaaccccagatggcatctcctgcgagctgcgcggagagataacacgctttctctggccaaaagaagtagagctgttgttaaagacctggctgcctggggaaggggctgtccagaaccatgttttggccttgttgagatggcgggcttacttgctgcacactacctgcctgcccctgagggtcgactgtacttttagctatttggaggtccaggcaatggctctgcaggagactccaccccaggtgacctttgaactcgaatcactgcgcgaactggtgctggagttccccggagtggccgctctggaacagctggcccagcatgtcgccgcagcgattaagaaggtgtttcccaggagtaccctcggtaaactctttcgtagacccactccagcaagcatgctagcaagactggagcgatcatcccctagcgagagcactgatccctgttccccttgcggcggattcctggaaacctatgaggcactctgcgattataatgggtttccctttcgcgaggagattcagtgggatgttgacacaatttatcaccggcaagggtgtaggcacttctccttgggcgatttttcccatctgggctctcgtgatctggccttatctgtggccgctctgagctacaacctgtggttcagatgcctgtcttgtgttgatatgaagctgtcactggaagtgagtgaacagatcctgcacatgatgagccagagttcccatctagaggagctagtgttggaaacctgcagtctgcgcggtgactttgtcagaaggctggcccaggcattggcgggtcactcctcttccggcctgcgcgaactgtccctggccggaaatctgctcgatgataggggaatgacagcgttgtcgagacacctcgagcgatgcccaggtgcactcaggagactatcattggcccaaaccggacttaccccgagagggatgagggctcttggacgcgcactagcgaccaacgcagcatttgattccacattgactcacctggacctgtccggcaacccaggtgccctcggagcatcagaagatagcggagggctgtactctttcctctcccggcctaacgtgcttagcttcctcaacctggccggaacggacacggccctcgacactgtgcgcggatgctctgtcggtggctggatgacagggagagctgattggcgagcaggacggggaggcttgggtccacctgctggggtggctaatagcctgccccctcaattgttcgctgccgtctctaggggatgttgcacatcactgacacacctggacgcgagcagaaatgttttcagtcgaacaaagagccgggctgccccagctgcactccaattgtttctcagtagagctcgtacactgcggcatttaggactcgctgggtgcaagcttccccctgacgctttgcgggctttgctggatgggctggcactgaacacacatctgagagacttgcacctcgatcttagcgcctgcgagctcagatcggccggagcacaagtgattcaggacttagtttgtgacgccggagcagtgtcctctctggatctcgcagacaatggatttgggtctgatatggtcacactggttctggcaatagggagaagcaggtccttgagacatgtcgctctgggcaggaatttcaacgtgcggtgtaaagaaacacttgatgatgtgctccaccggatcgtgcagcttatgcaagatgacgactgcccactccagtcgctgtccgtggccgagagccggctcaagctgggcgcttcagtgctgctaagagcactggcaacaaaccccaacttgactgcattggatattagtggtaatgccatgggggacgctggggctaaactgttggcgaaagctctcagggttaatagcaggctcaggagcgttgtgtgggatcgtaaccacactagcgcattaggactactcgatgttgcccaggctcttgagcagaatcactccctcaaagcgatgcctctacccctgaacgatgtagcacaggcacagcggtcgagacccgagttgactgctagagccgtgcaccaaatccaggcttgcctgcttcggaacaacagggctgatcccgcaagctccgatcataccactaggctccagcctttggggctggtgtctgatccgagcgagcaggaggttaatgaactttgccaatccgtccaggaacacgtggagctgctcggttgtggcgcaggccctcaaggcgaggccgctgtcaggcaggccgaggacgctattcagaacgccaactttagcctttcaatccttcccatcctctacgaggctggatcaagtccatctcaccactggcagctcgggcaaaaacttgaaggtctactgcgccaggtgggggaggtgtgtcgacaggacatccaggacttcacccaggctactctagacaccgccaggagcctgtgcccccagatgctgcaaggatcgtcctggcgggagcagctggagggcgtgctagccggttcacgcggtcttccagaactgttgccagagcagctgttgcaggatgcgtttacgaggctaagggatatgagacttagtattacagggacactggcagagtctatcgtggcgcaggctttagcgggactctcggcagccagagaccaactggtggagtcacttgcccaacaagcgactgtgactatgcccccagccctgcctgcacccgatggcggtgaacctagtcttctggaacctggagagctggaaggactctttttccccgaagagaaggaggaagaaaaagaaaaagacgacagcccacctcaaaaatggcccgagttatcccacggcctccacctggtcccattcatccacagtgctgcggaagaggccgaaccggagcctgaactggctgcacccggtgaggacgcggaaccccaggccggtccatcagcacgaggaagcccatccccagctgctccagggcctcccgcagggccactgccccgaatggacctgccactggctggccaacctctcaggcatcccactcgggcaagacccaggccaagaagacagcatcatcaccggccaccaccaggtggccctcaggtgccccctgcattaccacaggaaggaaacggcttgtcagccagagtcgatgagggagtggaggaattcttctctaaaagactgatccagcaagataggctgtgggctcctgaggaggaccctgctactgaagggggagctaccccagttccgaggacattgagaaagaaactaggcaccttgtttgctttcaagaagccccgaagcacccgaggtcccaggactgacttagaaactagccccggtgccgctccaagaacccgaaaaaccacatttggcgacttactccgtcccccaacaaggcccagcagaggggaagaactgggcggagccgaaggcgatacaagctcacccgatcctgcaggtcgctctcggccacgttacactcgtgatagcaaggcctacagcatgatcctcctgcccgctgaagaagaggccacgttgggcgctcggcctgataaaaggcggccactggagcgcggagaaaccgagctcgctccttcattcgagcagcgcgtgcaggtgatgctgcagcgcatcggtgtctcacgcggaagcggaggcgctgaaggaaagagaaagcagagcaaggatggagaaatcaaaaaagcgggaagtgacggcgatattatggactcatcgacagaagcgccacccataagtatcaaaagccgcacgcattctgtcagcgccgatccatcttgtcggccaggccctggctctcagggtccagagtccgcgacttggaaaacgttgggtcagcagctgaatgccgaacttaggagccgcggttggggacagcaggatgggcctggtcctcctagcccgggtcagagcccatcgccatgtaggacaagcccttcccccgactctctggggctgcccgaggatccttgcctcgggccaaggaacgaggacggtcagctcagacctagacctctatccgctgggcgtagggctgtcagtgtccacgaggaccagctgcaggcgccagccgagcgccctctgagactgcagagaagccctgtgttgaagaggaggcccaaactggaggcgccaccttccccttccttaggaagcggcctgggaactgagcctctgccgcctcagcccactgaaccttcaagccctgaacgatctccgccttcaccagccactgaccagcggggagggggtcctaatccttag

SEQ ID NO: 238603 - DNA, 1335 bp, synthetic construct
  misc_feature 1..1335: note = Description of Artificial Sequence: Synthetic coding sequence
  source 1..1335: mol_type = other DNA
atgcccccagctttgccagcgcctgacgggggtgaaccctccctgctggagcccggtgagctggagggtctcttttttcccgaggagaaggaagaggagaaagaaaaggacgactctcccccacagaagtggcccgaacttagccatggcttacatctcgtgccatttattcattcagccgcagaggaagccgaaccggagcctgagttagctgctccgggtgaggatgccgaaccacaggctgggcctagcgctagagggtctcctagcccagccgcaccagggcctcccgctggacctctgccgaggatggacctgcccctggcaggtcagcctctgagacatcccacccgagccaggccacggccacggaggcaacaccatcatcgtccgccacccggaggccctcaagtcccaccagccctgccccaagaaggaaatggtctctctgcgagagtggacgagggggtggaggaattttttagcaaacgactcatccaacaagatcgactctgggcaccggaggaggatcctgcaacggaagggggagcgacaccagttcccagaacccttagaaaaaagctcggcaccttgttcgcatttaagaaacctcggagcacgagaggaccacgtaccgacttagagactagtccgggtgccgctccacggacccgcaagaccacattcggcgacctgctgcggcctcctacgaggcccagtaggggtgaagagctgggaggggctgagggcgatacatccagccctgaccccgctgggagaagccgcccaaggtatacacgggattctaaagcctattcaatgatcctgttgccagctgaggaagaggcaacgttaggggctaggccagacaagcggagacccctcgagcgcggtgaaaccgagctggcccctagctttgagcagcgcgtccaagtgatgctacaacggattggcgtgtcacgcggatccggcggagcagaaggcaaaaggaagcagagcaaagacggcgaaattaaaaaggccggtagcgacggagatatcatggactcaagcacagaggcgcctcctatcagtatcaagagtcgcacacactccgtctccgccgatccatcttgcaggccagggcctgggtcacagggaccagagtctgctacatggaaaacactgggacagcagctgaacgctgagcttcgaagccggggttgggggcagcaggatggacctgggcctccctcccccggacagtccccctccccatgtagaaccccgccacagacggcatgggccagccagaggacacttgcgtgggcccctgagatgaagaatggcccatag

SEQ ID NO: 238604 - DNA, 4119 bp, synthetic construct
  misc_feature 1..4119: note = Description of Artificial Sequence: Synthetic coding sequence
  source 1..4119: mol_type = other DNA
atggcccagacacctgatggtatatcttgtgagctgagaggcgagattacacggtttctctggcccaaggaagtggaattgctgttgaaaacttggctgccaggggagggcgctgtgcagaatcacgtgctggccctccttcgttggagggcatatttgctgcacactacctgtctgccactacgggtggactgtactttttcctaccttgaagtgcaggctatggcgctgcaggaaacccccccacaggtcacgttcgaactggagtcattgcgtgaactcgttctcgaatttcctggtgtggcagccttggagcaattggcccagcacgttgctgctgccatcaaaaaggtgttccccaggtccactctgggaaagttgttccggaggccaacccctgcgtccatgctggccagactggagagaagtagccccagcgagtccacagatccctgttcaccatgcggagggttcctcgagacatatgaggccctgtgtgactacaatggctttccctttagggaagagatacagtgggacgtggataccatctaccatcggcagggctgccggcactttagccttggcgacttcagtcaccttggaagccgcgacctggccctaagtgtcgcggcactgagctacaacctgtggtttagatgcttgtcatgcgtggatatgaaactctctcttgaggttagcgaacagattctgcacatgatgtctcagtcttctcatttggaagagttagttctggagacctgcagcctgcgcggagacttcgtgaggcggctggctcaggccctggctggacattcatcatctggcctacgggagctgagtctggcgggtaacctgctcgacgaccgaggcatgacagctctctcccgacatctagaacgatgtccaggcgcactgaggaggttgagtctcgctcagacaggactgactcccagaggaatgcgagccctcgggagagccctggctactaacgctgcctttgattctactttaacacaccttgatctgtcaggcaatcctggtgctcttggcgcatcggaagattctggaggcctgtacagcttcctgagccgtcctaacgtgttgagtttcctgaacctcgccggtaccgacaccgccctcgacacactctttgctgccgtgtcacggggttgttgtacctcactaacacacttggacgcatcacgaaacgttttctcccgaacgaagagccgcgcagcgccagctgcccttcagctgtttctgagtcgcgctcggactcttagacaccttgggttggcgggttgcaaattaccccctgacgccctgcgcgctctgctcgacggtctggctttaaacacacatttaagggacttgcacctagatctaagtgcatgcgagctgcggagtgcaggtgctcaggtgattcaagatttggtgtgcgacgcaggtgccgtcagtagtttggacttagctgacaatggcttcggttcggacatggtgactttagttctggctatcggtcggtccagaagtcttagacacgtcgctttagggaggaactttaacgtccgctgcaaagagaccctggacgacgtccttcaccggatcgtccagttgatgcaggacgacgattgtccactccagtccctgtcagttgcagaatctcggttgaaactcggcgcaagcgtgctgctgcgggcactagccacaaacccaaaccttacagcactggacatctcaggaaacgcaatgggggatgctggagccaagctgctggctaaagctctccgcgtgaatagccgtctgcggtctgtggtatgggatcggaaccacacctctgctctggggctgctggatgttgctcaggctctggagcagaaccattctctaaaagccatgcctttgccgcttaatgatgtggcacaggctcaaagatctcgcccagagcttacagctagggcagtccaccagatacaggcgtgtctcctacggaacaaccgcgctgaccccgctagttctgaccacacaactagacttcagcccctgggactagtatctgacccatcagagcaggaggtaaatgaattgtgccagtcagtacaggagcacgtggaactccttggttgcggcgctgggcctcagggtgaagccgcagtgcgacaggctgaagacgccatccagaacgcaaatttcagcctgtctattttgcctatactctatgaagctggatcttccccctctcaccactggcagctcggccagaaactggagggcttgctgaggcaggtcggcgaggtctgcaggcaggatatacaggatttcactcaggccacgctggacactgcacggtctctatgcccacaaatgctccagggttccagttggagggagcagcttgagggagtgttagcaggtagcagggggctgccggaactgctgccggaacaactcctccaggacgccttcacccgtctgagagatatgaggttgtccataaccggaacacttgccgaatcaattgtcgcccaggctcttgcaggacttagtgcagccagagatcagctggttgagtctctggctcagcaggccaccgttaccatgccacctgccctgcctgctccagacggaggagagcctagcttattggagcctggagagctggaaggcctctttttccctgaggaaaaggaagaggagaaagagaaagacgactcacctcctcagaaatggcccgaactctcgcatggtctgcacctggtgccattcattcatagcgcagccgaggaggccgagccagagcccgagctggccgctccaggcgaagacgcggaaccacaggcagggccaagtgcaagggggtcaccatccccagctgccccaggaccacccgctggtccactgcccagaatggatcttcccctagctgggcagcccctccgccaccctactcgcgctcgcccacggccacgcagacagcaccaccatagaccacctcccggaggacctcaggtaccaccagccctaccacaggaaggtaatggcctctcggcccgtgttgacgagggagtggaagagttctttagcaagcgccttatacagcaggaccgcctttgggcgcctgaggaagacccagcaacggaggggggtgcaacccccgtgcctagaactctgcggaagaagttaggaaccttgtttgcattcaaaaaaccaagaagcactaggggcccacgtacggatctcgagacttctccgggagcggcacctcggactagaaaaaccactttcggtgacctgctacggcctccaacgagaccgtcccgcggtgaggagctggggggtgccgagggggacacatcatctcccgatccagccggtcggtcgagacctagatacaccagagacagtaaggcttacagtatgatactgcttcctgcagaggaagaggctaccttgggggctaggcccgacaagagacgcccacttgaacgaggcgagacagagttggcccctagtttcgagcagcgcgtccaggtaatgctgcagcggataggagtgtcaaggggcagtggcggagctgagggtaaacgcaaacaaagcaaagacggagaaatcaagaaagcgggatcggatggcgatattatggatagttcgaccgaagccccacctatttctatcaagtcaagaacgcatagcgtgtctgctgacccctcctgtcgaccagggcctgggtctcagggacctgagagcgctacatggaagacgctaggccagcagctgaatgctgaactgaggtcaagagggtgggggcaacaggatggccctggtcctccaagtccaggccagtcaccaagcccttgtcgcacgtcccctagtcctgactccctgggactccccgaggacccatgtctaggacctaggaacgaggaacgacctctgcgactgcagcggtctcctgtgttaaagcgcaggccaaagctggaggctcccccaagcccatcattgggatcaggtcttgggacagagcctttgccacctcaaccaacagagccaagtagccctgagcggtctcctccatcccccgctactgatcaaagaggagggggacctaatccgtag

SEQ ID NO: 238605 - DNA, 1305 bp, synthetic construct
  misc_feature 1..1305: note = Description of Artificial Sequence: Synthetic coding sequence
  source 1..1305: mol_type = other DNA
atggggatgggccgtggggcaggccgttccgcacttggattttggcccacgttggctttcttactgtgctctttccccgcagccactagcccctgcaagattctgaagtgtaactccgagttctggtctgcaactagcggctcacatgcacccgctagcgacgacacaccagaattctgtgccgctttaaggtcttatgctctatgtaccaggcgcacggcgaggacatgtcgcggagatcttgcttatcacagcgcagtccacggcatcgaagaccttatgtcccagcacaattgctcaaaagacggaccgactagccagcctcgcttgcgcacattgccgccagccggtgacagccaggaacgaagtgattcccctgagatatgccactacgagaaatccttccacaagcacagcgccacccctaactacactcactgcggcctattcggtgatccgcacttgcgtacgttcaccgatcggttccagacctgcaaagtgcagggagcttggcctcttatcgacaataactatctcaacgtccaagtcactaatacacctgtattacccggttctgccgcaacagcaactagtaagctgaccatcatttttaagaacttccaggagtgtgtggaccaaaaggtatatcaggcagagatggatgagctgcctgcagcttttgtggacggcagcaagaatggaggagacaagcacggggctaacagtcttaaaataactgaaaaagtttctggccagcacgtggagatacaggctaaatatatcgggaccactattgtggtgcgtcaagtgggcaggtacctgacatttgctgtacgtatgccggaggaggttgtcaacgctgtcgaggactgggattcccagggactgtatctctgcctgagaggttgccccctgaatcagcaaatcgacttccaagcatttcatactaacgccgaagggacgggtgcgaggaggctagccgctgccagtcctgccccaacagctcccgaaacattcccatacgaaactgctgtggccaagtgcaaggaaaagttgccagtggaggatttgtactatcaagcatgtgtctttgacctgctaaccaccggagacgttaattttacgctggccgcatattacgccctggaggacgtaaagatgttgcactctaacaaagacaagcttcacctctatgaccgtactcgagacctgcctggacgcgcagcagcgggacttcccttggcccctcgcccactactcggcgctctcgtgcctttgctggccttgcttcctgtgttttgttag

SEQ ID NO: 238606 - DNA, 1353 bp, synthetic construct
  misc_feature 1..1353: note = Description of Artificial Sequence: Synthetic coding sequence
  source 1..1353: mol_type = other DNA
atgcagccacctcgggagagactcgtcgtcactggcagagctggatggatgggaatgggacgtggtgcgggtcggagcgctctaggtttctggccaactcttgcattcctactctgttcctttcccgcagcaacttcgccctgtaaaattctcaagtgcaattctgagttttggtctgccacttccggctcacacgcacccgcatctgatgatacgcctgagttttgtgccgctctgcgcagctacgcactttgtacacgaagaactgcccgaacctgtcggggagatttagcctaccactcagcagtccacggcatagaggatctcatgagtcagcacaactgtagcaaagacgggccaacaagccagccacgcctgagaaccctgcctccagccggtgactcacaggagagatctgactctccagaaatctgccactacgagaagtcgttccacaaacactctgctactcctaactatacccattgcgggctgtttggggatccccatttaagaaccttcactgaccggtttcagacttgtaaagtccagggagcttggccccttatcgacaacaattatcttaatgtgcaggtgacgaacacccccgtcctgccaggctccgcagcaaccgcgaccagtaagctgacgatcatttttaagaatttccaagagtgcgtggatcaaaaggtctaccaggcagaaatggacgaactgcctgccgcatttgtggatggaagcaagaacggaggcgacaagcacggcgctaattcgctcaaaataactgagaaggtatcaggccagcatgtcgagatacaggccaagtacataggaaccaccatcgtggtgcggcaagtgggacgctatttaactttcgctgtccggatgccggaggaagttgttaacgctgttgaggactgggattcccaaggtctgtatctatgccttcgcggatgtcctctgaaccagcaaatcgatttccaggcatttcataccaacgcggaaggtactggcgctcgcaggttagctgcagcctcccccgctccaactgcaccagagaccttcccttacgaaactgccgtggcaaagtgcaaagaaaagctgccggtggaggacctgtactaccaagcttgtgtgttcgaccttctgacaacaggggatgtaaatttcaccctggctgcgtactacgccctagaggatgttaagatgttgcacagcaataaagataaattgcatttatacgatcggacacgcgatctgccgggacgcgcagctgccggattgccactcgccccacggccacttctgggtgccctggtaccactgctcgctctgttaccagttttttgctag

SEQ ID NO: 238607 - DNA, 1305 bp, synthetic construct
  misc_feature 1..1305: note = Description of Artificial Sequence: Synthetic coding sequence
  source 1..1305: mol_type = other DNA
atgggcatgggcagaggagccggacggagtgccctcggcttctggcctaccctcgcctttctgctgtgtagttttcctgccgcaacttcgccgtgcaagattctcaagtgcaattcagaattttggagcgcaacaagcggttcacatgcacccgcatctgacgatacgcccgaattttgcgcagccttacggtcgtacgctctgtgtaccagacgtacggctcggacttgcagaggcgatcttgcttatcactcagccgtccacggcattgaggaccttatgagtcagcacaactgttcaaaggacggccctactagccaacctcggctgagaaccctgccacctgctggggattctcaggaaagaagtgactcccccgagatctgccattatgaaaaatctttccacaaacacagcgctacaccgaactatacccattgcggccttttcggagacccccatctacgcacttttactgatcgtttccaaacctgtaaagtccagggggcttggccgcttatcgataataattacctcaacgtccaagtgacaaacacccctgtgctgcccggaagcgccgcaaccgctacatctaaactgaccattatatttaagaacttccaggaatgcgttgaccaaaaggtgtatcaagccgagatggatgagttgcctgccgctttcgtcgatggctctaagaacggcggtgacaaacacggcgctaatagcctaaaaattacagaaaaggtttcaggtcagcacgtggaaatccaggcaaaatacattggaacaaccatcgtagttcgacaggtcggcagatacctcaccttcgcagtaagaatgcccgaagaggttgtcaacgcagttgaggattgggatagccaggggctgtacctctgcttgcggggatgtccacttaaccagcaaatcgattttcaagctttccatacaaatgcggagggcaccggcgcacgaagactggccgcagcgagcccagcccctacggcacctgagaccttcccctacgagacagccgtggccaagtgcaaggagaagcttcccgtggaggacctctattatcaagcctgtgtattcgatctactgaccaccggcgacgtgaatttcaccttagctgcatactacgcactcgaggatgtcaagatgttacactcaaataaagacaagctgcatttgtacgatcgtactcgcgatctgcctggacgcgcagccgcaggcctccccttagccccacggcctctgctgggtgcgctggtgcccctgctggccctccttccggtgttctgctag

SEQ ID NO: 238608 - DNA, 1026 bp, synthetic construct
  misc_feature 1..1026: note = Description of Artificial Sequence: Synthetic coding sequence
  source 1..1026: mol_type = other DNA
atgtcacagcacaactgctccaaggatgggcctacaagccagcctagactgcgcaccctgccacccgctggagattcccaggagcgcagtgactcacctgagatctgtcactatgaaaagtctttccataaacattcagcaacaccaaattatacacactgcggccttttcggagaccctcacctgcggacattcaccgatagatttcaaacttgtaaagttcagggggcttggcccctgattgataacaactacctcaatgtgcaggttacaaatacccctgtgcttccagggtcggccgcaaccgccactagtaaactcacaatcattttcaaaaacttccaggagtgcgtcgatcagaaggtgtaccaggcagagatggatgaactgcccgctgcgttcgtggatggtagcaagaacggcggtgataaacacggtgcgaatagtctaaagataacagagaaagttagcgggcagcacgtcgaaatccaagccaaatacattggcacaacgatcgtggtgagacaggtgggacggtatctgaccttcgcagtccggatgccagaagaggtggtgaacgcagtcgaagactgggattctcagggcttatatctttgcctcagaggctgccctctcaaccagcaaattgacttccaggccttccacactaatgcagagggcacaggtgctcgacgactcgcagccgctagcccagccccaaccgctccagagacctttccttacgaaacagctgtggcaaagtgcaaagagaagctgccggtggaggatttgtattaccaagcgtgtgtattcgacctgttgactaccggtgatgttaacttcaccctcgccgcatactatgcactcgaggacgtcaagatgcttcacagtaacaaagacaagttgcatttgtatgaccggaccagggatttgccagggagagctgccgctggcctgcctctagctccaagacctctgttgggcgcactcgtgcccttgctggccctgctgccggtcttttgttag

SEQ ID NO: 238609 - DNA, 1305 bp, synthetic construct
  misc_feature 1..1305: note = Description of Artificial Sequence: Synthetic coding sequence
  source 1..1305: mol_type = other DNA
atgggaatgggcagaggcgcagggcgaagtgcactgggcttttggcctaccttagcgttcctgttgtgttcattccccgctgctacaagtccatgcaagatcctgaagtgcaacagtgagttctggagtgccaccagcggatctcacgcgcctgccagcgatgatacgccagagttttgtgccgcactaaggagttacgcactttgtacaaggcggaccgcgagaacttgccgaggagatctcgcttatcattcagcggtacacggcatcgaggatctaatgagtcaacacaactgctctaaggatggcccaacctcccagcctcgtctgaggacattaccacccgctggcgattcccaggagcgatcggactctcccgagatttgccactatgagaagagttttcacaagcattcagcaacccccaactacacccattgtggtttattcggtgaccctcacttacgcaccttcaccgacaggttccaaacatgcaaagtgcagggcgcttggccactgattgataacaactatctgaacgtgcaagtgaccaatactccagttcttcctggcagtgctgccaccgctacctctaaactgaccatcattttcaaaaactttcaggaatgtgtggaccaaaaggtttaccaggctgagatggacgagctgcccgcagccttcgtggatggctctaaaaacggcggagacaaacacggagccaatagcctgaagataaccgagaaagtttctggacaacacgttgaaatccaagctaaatacatcggaaccacaatcgtagtacgccaggtggggagatatctgacttttgcggtgagaatgccggaagaagtggtaaacgccgtcgaggattgggactcccagggactgtacttgtgcctccgcggttgccctctcaaccagcaaattgactttcaggcattccacacaaacgcagaaggcacaggagctagacggctggcggctgccagccccgctcccacagcaccagaaacatttccctatgaaacagcagtcgctaaatgcaaggagaagttgcccgttgaagacctatactaccaggcctgcgtatttgatctgctgacgactggagacgtaaacttcaccctggccgcatattacgctctagaggacgtgaagatgctgcatagcaataaggataagttacatctgtacgatcgtactagagacctgccgggtagagcagcagccggattgccactcgccccacggcctcttctcggcgcactggtgcccctgctggccctgctgcctgtgttctgctag

SEQ ID NO: 238610 - DNA, 1377 bp, synthetic construct
  misc_feature 1..1377: note = Description of Artificial Sequence: Synthetic coding sequence
  source 1..1377: mol_type = other DNA
atgggcggtctgggcccacggagggccggaacaagtcgcgagaggcttgtcgttaccggaagagctgggtggatgggaatgggacgtggtgctgggcgatcagccctaggcttttggcccacactcgcctttctcctctgttcctttccggcagctacaagcccatgtaaaatcctgaaatgcaacagcgagttttggtcagctacctccggatcacacgcccctgccagcgatgacacccccgagttctgtgcagccttgaggtcttacgcactgtgtacgagaagaacagccaggacctgtcgaggcgatttggcttatcattcagctgtgcatggaatagaagacctcatgagtcagcataattgcagtaaggatgggccaacatctcagcctcgcttgcggacacttccaccagccggagactcccaggagcggagcgattcccccgagatctgccactatgaaaagagctttcataagcacagtgcgactcctaattatacgcattgtgggctgttcggggaccctcatcttcgcaccttcaccgatcgctttcagacctgcaaggtccagggagcatggcccttgatcgacaataactatctgaacgttcaagtgacaaatacacctgtgctaccaggaagtgccgctaccgcaacttctaagctcaccatcatttttaaaaatttccaggaatgtgtggaccagaaagtctatcaggccgagatggatgagctgccagcagcctttgtagatgggtccaagaacggaggtgataaacatggagcaaattctttgaaaatcaccgagaaagtgagcggccagcacgttgaaatccaggccaaatacatcgggacaactatcgtggtgcgccaggtggggagatatctaacgttcgccgtcagaatgcctgaggaggtggtaaacgctgtagaggattgggactcgcagggattatacttgtgtctgaggggctgccccttgaatcagcagattgactttcaagccttccatactaacgctgaaggcaccggagctcgccgtctggcagcggcttcccctgcacccaccgctcctgagacattcccctatgaaacagcagtagccaaatgtaaggagaagcttcctgttgaggacttatattaccaagcgtgtgtttttgatctcctgacaaccggggatgtgaatttcacccttgccgcttactacgctcttgaggatgtgaagatgttgcatagcaataaggacaaactgcatctctatgatcgcactagagacctgccaggtcgtgcagctgccggtctgcctctcgctcctagacctctcttaggcgcacttgtgcccctccttgcactgctgcccgtcttctgctag

SEQ ID NO: 238611 - DNA, 1437 bp, synthetic construct
  misc_feature 1..1437: note = Description of Artificial Sequence: Synthetic coding sequence
  source 1..1437: mol_type = other DNA
atgatccgcaaaaagcggaaacgctccgccccaccaggaccttgtagatctcatgggcctcggccagccacagctccagccccacctccttctcccgagccaactcgacctgcgtggactggcatgggactaagggctgccccttcaagtgccgctgcggctgccgcagaagtggagcagaggagaagccctgggttatgtccaccaccactcgaactgctgctactattacttttctctctgggactgctgcatgcaggggactgccagcaaccggcacagtgtcgcatccaaaagtgtacgactgatttcgtgtccctaacttcacacctgaattccgccgtcgatgggtttgattcggagttctgtaaagcattgcgcgcttatgctgggtgcacccaacggacatctaaggcttgcaggggtaatctcgtgtaccactcagctgtgctgggcattagcgacttgatgtcgcagcggaattgctctaaggacggtcctacgtcaagtactaatcccgaagttacccacgacccatgtaattaccacagccatgccggagctcgagaacatagacgtggtgaccagaaccctccctcatatctcttttgcggcctgttcggagacccccatctacggaccttcaaagataatttccaaacctgcaaagtcgaaggagcatggccattaatagataacaattacctgagcgtccaggtgaccaacgtacccgtggttcccggttccagtgctactgccacgaataagatcaccattatcttcaaggcccaccacgaatgcacggatcagaaagtttatcaagcagtgactgatgaccttcctgccgctttcgtcgatgggactacgtcagggggagactctgacgcaaagtcgctacgcatcgtagagcgagagtctggtcattacgttgagatgcacgccagatacataggcaccaccgtgttcgtgcgccaggtggggcgatatcttacactagcaatcagaatgcccgaggatctggccatgtcatatgaagaatcacaggaccttcagctgtgtgtgaatggctgtcccttatctgagcgaattgacgatggccagggccaagtgagcgccatcttggggcattccttaccgagaacaagtctggtccaggcgtggccaggatatacattggagactgctaatactcagtgccacgaaaagatgcctgtgaaagacatctacttccagagctgcgtctttgacctcctgacgacgggtgacgcaaactttactgccgcagcacatagcgcccttgaggatgtggaagcactccacccacggaaggagcgttggcatatcttccccagttctggaaatggcacaccgcgaggtggctccgacctctccgtttcgctgggtctgacctgcctgatcctgatcgtgttcctctag

SEQ ID NO: 238612 - DNA, 1314 bp, synthetic construct
  misc_feature 1..1314: note = Description of Artificial Sequence: Synthetic coding sequence
  source 1..1314: mol_type = other DNA
atgggattacgagccgctccttctagcgctgccgctgcagccgctgaggtggagcagcgccgatcccctgggctgtgtccccctccattggagctgcttctgctcctgcttttcagtttgggattgttgcatgctggtgactgccagcaaccagctcagtgcagaatacagaagtgtactaccgacttcgtgtcgctcacaagccacctcaactctgctgtcgacggatttgattccgaattctgtaaggccctccgggcatatgccggttgcacccagaggacctcgaaagcttgtcgcggaaatctggtgtaccactcggccgtcctgggaatctcagatttgatgtcacagagaaattgtagtaaggatggacctacttccagcacaaacccagaggtgacacacgacccatgcaactatcatagtcatgccggtgccagggaacaccgacggggagaccagaaccctcctagctaccttttttgcggtctctttggtgacccccaccttaggacctttaaagacaacttccaaacgtgtaaggtagaaggagcctggccgctgattgacaacaactatttatcagttcaagtgacgaatgtgccagtggtcccaggctctagcgctactgctactaataagattacgatcatctttaaagctcaccacgagtgtacagatcaaaaggtgtaccaggccgtgacagacgacctgcctgcagcctttgtcgacggtaccacctctggcggtgactcagatgcgaagtctctgaggattgtggagagagagtcaggccactacgttgagatgcacgcgaggtacatcgggaccacagtgttcgtccgtcaggttgggagatacctgacactggcaattcgcatgcccgaggacctggctatgtcatacgaggaatctcaggatctacagctatgcgtaaacgggtgtccactctccgagcgtatagatgatggccaaggccaggtctcagcgatacttgggcactcactgccgagaactagtctcgtccaggcctggccaggatacaccttggagaccgcaaacactcagtgtcacgaaaaaatgccagtaaaagacatttacttccaaagctgcgtgtttgatttactcaccacaggcgatgccaacttcactgctgctgcccattccgcattggaagacgtggaagctttgcaccccagaaaagagaggtggcacatcttcccttcaagcggtaacggcaccccaagaggcggaagcgacctgagcgtttccctgggcctgacctgtttaatcctgatagtgttcctctag

SEQ ID NO: 238613 - DNA, 1176 bp, synthetic construct
  misc_feature 1..1176: note = Description of Artificial Sequence: Synthetic coding sequence
  source 1..1176: mol_type = other DNA
atgattgaagtggtagccgagctgtcaaggggcccagtttttttggccggagaagcactcgagtgcgttgtgacggtgactaatccgctcccaccaacagctacaagcgcatcatccgaggcattggcctgggcttccgctcaaatccattgccaatttcacgctagcgagtcccgggtggcactgccgccaccagacagtagtcagcccgacgttcagcctgactctcagactgtctttctaccccacagaggtgaaagggggcaatgcattttgtcaacaccacccaaaatcctgttctgcgacctgaggctagacccaggggaatctaagagttacagctattcagaggtgctccctatcgaaggcccaccgtcttttcggggacaatctgtgaagtacgtgtataagctgactattggatgtcagagagtgaactcaccaatcacactgttaagagtgcctctgcgcgtgctcgttctgacagggctgcaagatgtccgctttcctcaagacgaagctgttgccccatcgagtccgtttctggaggaggatgagggcggtaagaaggatagctggctagcagaactcgcgggtgaaaggctcatggctgccacatcttgtcggtcacttcacctgtataacatctcggatggcagagggaaggtgggaacttttgggattttcaagagtgtctacagacttggtgaggacgtggttggtacgctgaatctcggagaaggaaccgtcgcatgtctgcaatttagcgtatccctgcaaacggaagagagagttcagccggagtatcagaggcggcgtggagctggcggagtgccttccgtctcacatgtcacccatgccaggcaccaggaaagctgcctgcatactacccgtaccagtttttccctccctatcccactgtcgagcactccgggtttttgtacagccatcgtaagtcttaaatggagattacattttgagtttgtcacgtctcgggaacccggactggtgctactgcctcccgtggagcagccagaacctactacatggaccggaccagagcaagtcccagtggacacgttcagctgggatctacctatcaaagtgctgcctaccagccccacccttgctagctacgccgcacctgggccatccacatccacgattactatctag

SEQ ID NO: 238614 - DNA, 1296 bp, synthetic construct
  misc_feature 1..1296: note = Description of Artificial Sequence: Synthetic coding sequence
  source 1..1296: mol_type = other DNA
atgactcgggctctgagcgggctagcttgcagagcactccccgcaggaagggacagtgcagaaggccttggtgtgccaattccttccgtggattacgccaggtccgacagtggcgctgctatgattgaagtggtggctgaactgagtcgtggaccagtgtttcttgcaggtgaggcgctcgagtgtgtggtgaccgtgactaatcctctgccccctactgctacaagtgcgtcctctgaggcactggcgtgggcctcggctcagatccattgccagtttcatgctagtgagtcccgggtggcacttccgccaccagatagcagtcagccggatgtgcaaccggattcgcagacggtgttcttgccacataggggggaaagaggccagtgcattctgtcaaccccgcctaagatcctgttctgcgatctaaggctggacccaggagagagtaaatcgtacagctacagtgaagtactcccaatcgaggggccacctagtttccggggtcagtccgtgaagtacgtctataagctcaccatcggctgccaacgagtgaactctcctataacgctactgcgcgtgcccctgcgcgtgctggttctcactggtctccaggacgtcaggttcccacaagatgaggcagtcgcgccatcaagtccctttctcgaggaggacgagggaggaaagaaagatagttggctggccgagttagccggtgagagactcatggccgcaaccagttgtcgctctctgcatctgtataacatttccgacggacgcggaaaggtggggacctttggtatatttaaatcggtgtatcgactgggagaggacgtggttggaactctcaacctgggggaagggacagtcgcgtgcttgcagttctcagtttctttgcagacggaagagcgggtgcaacccgaataccagcgtcgccgtggagctgggggagttccctctgtctcacacgtgacacatgccaggcaccaggagtcgtgtctgcataccacccgcaccagtttttctcttccgatccctctctcctctacccccggattttgcaccgccatagtcagcttaaagtggcgactgcacttcgagtttgtaaccagcagggaacccggtctggttctgctgccgcctgtcgagcagccagagcccacaacttggacgggcccagagcaagtaccggttgatactttttcttgggatctgcccattaaggtcctccctaccagcccaaccctggccagctacgccgctccagggccttcaacatccaccataaccatatag

SEQ ID NO: 238615 - DNA, 1119 bp, synthetic construct
  misc_feature 1..1119: note = Description of Artificial Sequence: Synthetic coding sequence
  source 1..1119: mol_type = other DNA
atgtcctcaaagtaccctcgctcagttagacgctgtcttcccttatgcgccctgacactggaagcagctttgatccttttgttttacttttttacccattacgatgcgtcccttgaagatcagaaaggtctagtcgcctcctatcaagttggccaagacttgactgttatggccgcactgggactgggctttcttacctctaatttccgtcgacacagctggagcagcgtggccttcaatttattcatgctggccctgggagtgcaatgggccatcctgctcgatggattcctgagccagtttccgccaggcaaggtggttattaccttattcagcatcagactcgccacaatgagcgccatgtcggtgcttattagcgcaggcgcagtcctgggtaaggtaaacctcgcacagctcgttgtgatggtgctcgttgaggtgactgccctgggtacactgagaatggtgatctccaatatcttcaacacagactaccatatgaacttaaggcatttctacgtgtttgctgcatattttggcctcacagttgcttggtgcttgcccaaaccacttcccaagggaaccgaagacaacgaccagcgcgcaaccatcccttcactgtctgccatgctgggagcattatttctgtggatgttttggccttctgtgaatagcgctctcctgaggtcacccatacaaagaaagaacgctatgttcaatacttactacgccctcgctgttagcgttgtcaccgcaatcagtggctcctccctcgcgcaccctcagcgcaaaatttccatgacatatgtgcatagcgctgtactggcaggcggagtggccgtaggcacatcctgccatctgattccttcaccttggctcgcgatggtcctcgggctggtggcaggcctaataagcatcgggggagccaagtgcctccccgtctgttgcaatagggtgctggggattcaccatatttcagtcatgcatagcattttttccctgctgggattgttgggcgaaattacgtacattgtgttactagtcctgcacacagtctggaacggcaacggcatgttcgcgccaaaatctcagaacatggaaagtacgagttgtgggtag

SEQ ID NO: 238616 - DNA, 1254 bp, synthetic construct
  misc_feature 1..1254: note = Description of Artificial Sequence: Synthetic coding sequence
  source 1..1254: mol_type = other DNA
atgagcagcaaatatccgcgaagtgttaggcgctgtcttccactgtgtgcactcacactggaagctgcactcatacttcttttttatttcttcactcactatgacgctagtttggaggaccagaagggcttggtggcctcctatcaggttggacaggacttaacggtgatggctgcactcgggctcggctttctgactagcaacttcaggagacactcttggagtagtgttgcctttaatctctttatgctagccctgggtgtacagtgggccattctgctggacgggtttcttagccagtttcctcctgggaaagtggtaatcactctcttcagcattcgcctggctaccatgagcgcaatgtctgtcctaatttccgctggggctgtgctgggtaaagtaaacctggctcaattagtcgtcatggtgctggtggaagtcacggctctcggcactctacgcatggtgatttccaacatctttaacacggactaccatatgaacctgagacatttctacgtgtttgctgcttatttcggtctcaccgtggcgtggtgcttaccaaaacccttacccaaaggcaccgaagataatgaccagcgcgctacgattccttctctatccgctatgctgggagcgttatttctatggatgttttggcctagcgtcaattcagccctccttcgttcaccaatccagaggaaaaatgcgatgttcaatacatactacgccctggccgtatcagtggtgaccgcgatttctgggtccagtttggctcatccacagcggaagatatccatgacctacgtgcacagcgctgtgctggctgggggagtggctgtagggacgagctgccatttgattccctctccttggctcgctatggtgctgggtcttgtcgcaggcctaatctcaatcggaggagccaaatgcttgcctgtttgctgcaatcgagtgctcggcatacaccacatttccgtgatgcactccatctttagtctgcttgggttacttggagagatcacctacattgttctcctggtcttgcataccgtgtggaatgggaacggtatgatcggcttccaggtgcttctgtctatcggcgaactctctctcgctatcgtaattgctctgacctcgggtttgctgacggggctcctgctgaatctgaagatctggaaggcgccacatgtggccaaatattttgatgatcaggtgttttggaaattcccccatctggccgtggggttctag

SEQ ID NO: 238617 - DNA, 804 bp, synthetic construct
  misc_feature 1..804: note = Description of Artificial Sequence: Synthetic coding sequence
  source 1..804: mol_type = other DNA
atgtcttccaagtatcccagatccgtgaggcgttgtctgcctctgtgcgccctcacacttgaggctgccctgatcctgctgttttacttcttcacacactacgacgcttcacttgaggaccagaaaggactggttgcctcttaccaggtcggacaggacctgaccgtcatggcggctctgggcctcgggttcctcacgtctaacttcagacgacactcctggtcctcagttgccttcaatcttttcatgcttgccctaggcgtacagtgggcaatcctactggacggcttcctgtctcagtttcccccaggtaaggtcgtgattacgctcttttctattagactcgctaccatgagtgccatgtctgtgcttatcagtgcgggagcagtgctagggaaagttaatctggcacaactggtggtgatggtccttgtagaggttaccgccttgggaaccctccgtatggtgattagtaatatcttcaatacctacgtacattctgctgtgctcgctgggggtgtggccgtggggacctcttgccatctgatccccagcccatggcttgcaatggtgctgggactggtggccggactgatcagcataggaggagctaaatgcctgccagtgtgctgtaacagggtgctgggtattcatcacatatctgtgatgcattcaatcttctcgcttttgggcttgctcggcgagattacctatatagtactactcgttctccacactgtgtggaatgggaatgggatgttcgcacccaagagccagaacatggagagcactagttgtggctag

SEQ ID NO: 238618 - DNA, 801 bp, synthetic construct
  misc_feature 1..801: note = Description of Artificial Sequence: Synthetic coding sequence
  source 1..801: mol_type = other DNA
atgtcctccaaatacccccgaagtgtgcgtaggtgcctaccactgtgcgcgcttaccctggaggccgcattgatccttttgttctacttttttacgcactatgacgcttcactagaagatcagaagggactcgtggcttcataccaggtcggccaggatctgacggtcatggcagcactgggccttggcttcctgacatctaacttccgacgtcattcctggtcctctgtagcctttaacctttttatgcttgccctcggagtgcagtgggcaatcctcctggatgggtttctgagtcagttcccacccggtaaagttgtcattaccctgttcagtatcaggctcgcaacaatgagcgccatgtccgtgctgatctctgctggcgctgtgctaggcaaggttaacttggcacaactcgtcgtgatggtcctggttgaagtgacagcattggggacattgaggatggtaataagcaatattttcaatgtctgttgtaatagggtgctaggcatccaccatatctccgttatgcactctatattcagcctgctgggcttgttgggtgaaatcacctacattgtactgctcgtcctacatactgtatggaacggcaacggcatgatcggatttcaggtgctactgtcaataggagagctgtccctggccatcgtcattgcccttacctctggattattaacagggctgcttctgaacctgaagatctggaaagcgccacatgttgctaaatactttgacgaccaggttttctggaagtttccccatctcgccgttggcttttag

SEQ ID NO: 238619 - DNA, 1206 bp, synthetic construct
  misc_feature 1..1206: note = Description of Artificial Sequence: Synthetic coding sequence
  source 1..1206: mol_type = other DNA
atgtattttataaatcaaaggctgtttctgaggctctggagagtgcctgtgatgcgcgcttctcactgctatcaatcgcagggctggagacctgtggctgtgggccaagatcttacggtgatggcagcactcggcctgggctttctgacgtctaatttccgacgtcactcctggtcatccgtggctttcaacttgtttatgctggcattgggagtgcagtgggctattcttctggacggtttccttagccaattcccaccagggaaggtggtgattactctgttttcgatcagactcgcaacgatgagcgctatgtccgttctaatctccgccggagcagtcctaggaaaggtgaacttggcccagctcgtggtgatggtgctggttgaagtgacggccttgggaaccctgaggatggtgatttccaatatattcaacaccgactatcatatgaacctccgccacttttatgtgttcgcagcttacttcgggcttacagtggcctggtgtcttccaaagccccttcccaagggcaccgaagataatgatcagcgagcaactatcccttccctctctgcgatgttaggagctttgtttttgtggatgttctggccatctgtgaactccgcactgctccgttctccaattcagcggaagaacgccatgttcaatacttattacgcacttgcggtctcagtcgtcaccgcaatctctggcagctctctggcccatccacagcgcaagatcagcatgacctacgtgcactctgccgtattagctggaggcgtggcagtgggaactagctgccacctgatcccttcgccctggctggcaatggtgttaggactcgtagccggacttatttccatcgggggtgcaaagtgcctgcccgtttgttgtaaccgggttctcggcatccatcacatctccgtgatgcactcaatcttttccctgctgggactgctaggcgaaatcacttacatagtgctgctggtcctgcacacagtgtggaacggtaatgggatgattggattccaggtgctactgtcgattggcgagctatctctggctatagtgatagccctcacttccggtttgctgacagggctgctgctgaacctgaagatatggaaagcccctcatgtcgcaaaatacttcgacgatcaggtgttctggaagtttccacaccttgcggtcggtttttag

SEQ ID NO: 238620 - DNA, 1065 bp, synthetic construct
  misc_feature 1..1065: note = Description of Artificial Sequence: Synthetic coding sequence
  source 1..1065: mol_type = other DNA
atgagcagcaagtaccccagaagcgtgaggagatgtctgccactgtgtgccctgacactcgaagctgcactcatcctcttattctattttttcacccattacgatgccagtctggaggatcagaagggactggtggcgtcctaccaggttggacaggacctgacagtgatggcagcgctgggcctgggatttctcacatctaattttcgccgacactcttggagtagcgtggcattcaaccttttcatgcttgcgttgggcgtgcagtgggcaatcctgctggatggattcctgagccagtttccaccgggaaaggttgtgatcaccctttttagtattagacttgccacgatgagcgccatgagcgtgctgatatccgccggagctgtgctaggcaaggtgaacctggctcaactggtagtgatggtcctggttgaggtaacagctctcggcacgttgaggatggtgataagtaatatctttaacactgactaccacatgaatctcagacacttctacgtttttgcggcatatttcgggttaactgtcgcctggtgcttgcccaagcccttgccaaaaggcacagaggacaatgaccagcgagctactatcccttctctgagtgccatgctgggcgctctgttcctatggatgttctggccatctgtgaatagtgcactgctgcgtagccctattcaacgaaaaaatgccatgttcaatacctattacgctctcgcagtttctgtcgttacggccatctccggctcatccctggctcaccctcagcggaagatctcgatgacatacgtgcactctgctgtcttggccggaggcgtcgctgtagggacctcttgccatctgattccttctccatggctcgccatggtcctaggacttgtggccggactcatctcgatcggtggcgctaagtgcctgcccgactggcttcccggacccccacaacattggggaacccagttgggtcaccgcgacagctcccatgtctggtcccccgaccgctttgccccaaagtctcagaatatggagtcgacatcctgtggatag

SEQ ID NO: 238621 - DNA, 1206 bp, synthetic construct
  misc_feature 1..1206: note = Description of Artificial Sequence: Synthetic coding sequence
  source 1..1206: mol_type = other DNA
atgtatttcattaaccagcgattattcctgcggttatggcgagtgccagtgatgcgcgcaagccactgttatcaaagccaggggtggagacctgtagcggtgggtcaggacctaaccgtaatggctgctttaggtctcggcttcctgacatccaatttcagaagacattcctggagcagcgtagcctttaacctgtttatgctcgcgttaggggtgcagtgggcgatcttgctcgatggttttctgagccaattcccacctggcaaagttgtaataactctgttctctatcagactcgcaaccatgtccgctatgagcgtgctgatctcagctggagcagtgctgggcaaggtgaatctggcacagcttgtggtgatggtgttggtggaagttacagccctcggaaccctaaggatggtgattagcaacatctttaacacagattaccacatgaatctgcggcacttttatgttttcgctgcttacttcggacttacagtggcgtggtgtctgcctaaacctcttccaaagggcacagaggataatgaccagcgtgctaccatcccctcactctctgccatgcttggcgctctcttcttatggatgttctggccgtctgtgaattctgcacttctgcgatctcccatacagaggaaaaacgctatgttcaatacatattatgcactggctgtgtccgtggtgaccgccatttctggctccagtcttgcacacccacaacgtaaaatttccatgacctacgtgcactctgcagtgcttgccggaggcgtggcagtgggcactagctgtcacctcattccctctccgtggctcgcgatggttctgggactggtggctgggttaatctcgattggaggagccaaatgtttgcctgtatgctgtaatcgggtcctggggatacatcacatcagtgttatgcatagcatattttcacttttaggtttgttaggggagataacctacatcgtgctcctagtgcttcacacagtttggaatgggaatggtatgatcggctttcaggtccttctgtcaatcggggagctgagcctggccatagtcatcgccttaacttctggcctgctgaccggactgttactgaacctgaaaatctggaaggctccccacgtggccaagtactttgatgaccaagttttttggaaatttccacatctggccgtaggattctag

SEQ ID NO: 238622 - DNA, 1191 bp, synthetic construct
  misc_feature 1..1191: note = Description of Artificial Sequence: Synthetic coding sequence
  source 1..1191: mol_type = other DNA
atgtcaagtaagtacccacggtctgtgaggaggtgtttaccactgtgcgcactgaccctggaagcagccctgatcttgttgttctacttcttcacccactatgacgctagcttagaggaccaaaagggcctcgtagcctcttaccaagtcggacaggacctgactgtgatggcagccctgggccttggctttctgaccagcaacttccggaggcacagctggtctagcgtggcattcaatctgtttatgctcgccttaggggtgcagtgggccatactgttagatggattcctctcacagttccctcctggcaaagttgttataaccctgttttcaattaggttggccactatgtcggccatgtctgtgcttatctcggcaggcgcagtgcttggcaaagtaaacctcgcccagttagtcgtcatggtcctagtcgaagtgactgcactcggcactctgaggatggtaatctccaacatcttcaatacggattaccacatgaacttaagacatttctacgtgtttgccgcatacttcgggctcactgtggcatggtgcctccccaagcccctgccgaaggggaccgaagacaatgatcagcgggctaccatcccttcactctcggcaatgctgggcgctctatttctgtggatgttctggccttccgttaattcggcccttctgcgatcgcctatccagcgcaagaatgcaatgttcaatacttactatgctctcgctgtttccgtagttacggctattagtggtagttccctcgcccatccccagcgcaaaatctcgatgacctatgtccatagtgccgtcctcgcagggggagtggccgtgggcaccagttgccacctgattcctagcccctggctggcaatggtgctcggattggttgcaggccttatttctattggcggtgctaagtgccttccagtgtgctgcaaccgggtattggggattcatcatattagcgtaatgcattccatctttagcttgctcggcctactaggcgagatcacctacatcgtgctactcgtgctgcatacagtgtggaacggtaatggaatcttcttaatctggctcttagatttcaagcagaagcaccctcgaaagacacgccctgtccaaaagcaggacaatttcctgtccctcctgcccgctttcgttcgagaaaagaggtcttag

SEQ ID NO: 238623 - DNA, 927 bp, synthetic construct
  misc_feature 1..927: note = Description of Artificial Sequence: Synthetic coding sequence
  source 1..927: mol_type = other DNA
atgtcttccaagtaccccaggtccgtaagaagatgccttccactgtgtgcgcttactttggaggccgctctgatcctgttgttctactttttcactcattatgatgcatctctcgaagaccaaaagggcctggtggccagttatcaggtaggacaagatctgacagtaatggcagccctcggcttaggcttcctgacaagtaactttaggcgccattcttggagcagtgtagcctttaacctattcatgctagcgcttggagtccagtgggctatcctgttggatggcttcctaagccagttccccccagggaaggtggtcatcactctgttttctattaggctcgctacgatgtctgctatgagcgtcctgatctctgctggcgctgtacttgggaaggtcaatctggcccagctcgttgtgatggtgttggtggaggttactgccctcggcacccttaggatggtgatctccaacatcttcaacacggattatcacatgaacttgaggcacttttatgttttcgccgcatattttggtcttacagtcgcctggtgtcttcctaagccgctccctaaagggaccgaggataatgaccagcgggcaaccatcccatcgctaagtgcaatgctcggtgcactgtttttgtggatgttctggcctagcgtgaattcggcactcctgaggtctcctatccaacggaagaacgctatgttcaatacttattacgctttagccgtctcagtggtgactgccattagcggcagtagtctggcccatccccaacggaaaatctcaatggattggctccccggacccccacagcattggggtacccagttaggtcatagggacagctcccacgtctggagccccgaccggttcgcccctaagagtcagaacatggaatctacttcttgcggttag

SEQ ID NO: 238624 - DNA, 1197 bp, synthetic construct
  misc_feature 1..1197: note = Description of Artificial Sequence: Synthetic coding sequence
  source 1..1197: mol_type = other DNA
atgagctccaagtatcccaggagcgtgcggaggtgtctgccactttgtgcactcaccctggaggccgctctcattctgttgttctatttctttacacactatgatgcctctctggaggatcagaagggcctggtggctagctatcaggttggacaggatctgaccgtgatggcggcactgggcctggggtttctgacctcaaacttccgcagacattcatggtcatccgttgcctttaacctcttcatgcttgcgctgggggttcagtgggctatacttcttgatggctttttgagtcaatttcctccagggaaagtggtgatcacactgtttagtattcgcctggcaactatgagcgccatgtccgtcctgatctctgctggggctgtgctggggaaggtgaacctggcccagcttgtcgtcatggtcttagttgaagtaactgctttgggtactttacgaatggtgatttccaacatcttcaacacagactatcacatgaatttaaggcacttctatgtatttgctgcttattttggcctgactgtggcgtggtgcctgccaaagcccctaccaaaagggacagaggacaatgaccagagggccactataccatccctctccgccatgctaggcgcactgtttctgtggatgttctggccctccgtcaactctgccctattgcgcagccctatccagcgtaaaaacgcaatgttcaatacctactatgccctggcagtgtccgtggtgacggcaatctctggctcatctctggcccatcctcagagaaaaatttcaatgacttacgtgcactccgcggtattggcaggcggtgtggcagtgggcaccagttgccaccttattcccagcccctggctcgccatggttctcggacttgttgctggacttattagcattggcggagccaaatgcttgccagtttgctgcaatcgcgtcctgggcatcccccatctacgccatgcgctccatttacaattagctggatccgcttggcgcgaccacctgcattgtgccgcaggagcgtcatattgtctcgagaggcaatggcatgactggcttcctggcccacctcaacactgggggacacagctgggccacagagatagttcccatgtgtggtcccccgatcgatttgcccctaaatctcagaatatggaatctacttcctgtggttag

SEQ ID NO: 238625 - DNA, 939 bp, synthetic construct
  misc_feature 1..939: note = Description of Artificial Sequence: Synthetic coding sequence
  source 1..939: mol_type = other DNA
atgtcgtcaaaataccctagatctgttcgacgctgtctgcccctgtgcgccctaactctggaggcagcgcttattctccttttctatttcttcacccattatgacgcttccctggaagaccagaaaggactcgtggcgtcttatcaggttggtcaggacctgacagtcatggcggcactgggattggggtttctcactagcaatttccgtcgacactcatggtcttctgttgcttttaacctgtttatgttggcattgggggttcaatgggccatcttgttagatgggtttttaagccagttccctcccggtaaagtagtaattaccctcttctcgataaggctggccacgatgagcgccatgagcgttctcatttcggcaggtgcggttcttggcaaagtgaacttggcccagctggtggtgatggtgttggtcgaggtcaccgcgctgggaactctgcgcatggtgatttcgaatattttcaatacatacgtccatagtgcagtgttagccggaggggtagccgtcgggactagttgccatttaattccaagcccttggctggctatggtgcttggactcgtggccggtctcatcagtataggaggcgcaaaatgcttgccggtttgctgtaaccgtgtgctgggcatacatcacatctccgtcatgcacagtattttttccctgcttggtcttcttggcgagataacttacatagtactcttagtactgcataccgtatggaatggcaatggcatgatcggctttcaagtcctgctgagcattggggagctcagcctcgcgatcgtcatagccttaacctctggcctgctcactgggctactgctgaacctgaaaatctggaaggcaccgcatgtggcgaagtattttgacgatcaagttttttggaagttcccacacctggccgtcgggttttag

SEQ ID NO: 238626 - DNA, 1041 bp, synthetic construct
  misc_feature 1..1041: note = Description of Artificial Sequence: Synthetic coding sequence
  source 1..1041: mol_type = other DNA
atgtcctccaagtacccccgatcagttcgacgttgcctacctttgtgtgctcttacattggaggctgcgcttattctgctcttttacttcttcactcactacgatgcaagcctagaggaccagaaaggcttggtcgcttcctaccaggtgggacaagatctcacagtcatggcagcacttggactggggtttctgacaagcaacttcagacggcacagttggtcatccgtggcttttaacctgttcatgctcgcattaggagttcagtgggccatcctgcttgacggatttctgagccagtttcccccaggtaaagtcgtgatcacactgttttccatccgcctggccaccatgagcgctatgtcggtgctgatttctgctggggcagtcctggggaaggtcaacctggctcagctcgtcgtgatggtcttggttgaggtgaccgcattgggaacgctgaggatggttatctccaatatcttcaacccatccgtgaattccgcactgcttcgctcccctatccagcgcaagaatgctatgtttaatacatactacgccctcgcagttagtgtggtaacagccatctctggttccagcctggctcatccgcagcgcaagatctctatgacctacgtgcatagtgccgtgttggcaggcggagtcgccgtgggaacatcatgccatttgataccatccccatggcttgctatggttctggggctggtggtatgttgcaatagggtcctgggcatccatcatatctctgttatgcactctattttctctttgctgggactgctaggggaaatcacatatattgtcctgctggtgctgcacacagtatggaatggtaacggcatgataggatttcaggtcctcttaagcattggcgaattgtcattggctatcgtaatcgccctgacctcaggattattaaccgggttgctcttgaacctaaagatttggaaggccccacacgtggccaagtactttgacgaccaggtattctggaagttcccccacctcgctgtcgggttttag

SEQ ID NO: 238627 - DNA, 1254 bp, synthetic construct
  misc_feature 1..1254: note = Description of Artificial Sequence: Synthetic coding sequence
  source 1..1254: mol_type = other DNA
atgtcctctaagtatcccaggagcgtaagacgctgcctgccactgtgggcattaaccctggaagccgctctcatactgctgttctatttttttacacactacgacgcaagtctggaagaccagaagggcctggtcgcaagctaccaggtggggcaggacttaaccgtgatggctgccattgggcttggattcttgacgtcctccttccgaagacactcgtggtccagtgtggcctttaacttgttcatgcttgccttgggcgtgcagtgggcgattctgctggacggtttcctgtcccagttccccagcggcaaggtcgtgatcaccctgttctctatccggctcgctaccatgagtgcccttagtgtgctcatttcagttgacgccgttctaggaaaggtcaacctggcacagctcgttgtgatggtcctggtggaagtgaccgccttaggtaacctccggatggtgatttcaaacatcttcaacactgattaccacatgaatatgatgcatatctacgtttttgcagcgtatttcggcctaagcgtggcctggtgcctccccaaacctcttcccgagggtaccgaagacaaagatcaaacagccactattccgtccctctcggctatgcttggtgcattattcctgtggatgttttggccatcttttaacagcgccctcctaagatcacccatcgaaagaaaaaatgcggtgtttaatacatactacgccgtagcagtctctgtcgtgaccgcaatcagtgggtcatccctggctcaccctcagggtaagatcagcaaaacgtatgtccattcagcggtgcttgctggaggcgtcgcggtcggtacttcctgccacctgatcccaagtccctggctggcaatggtgctgggactggtggccggattgatctctgttggcggtgccaagtacctgcctgggtgttgtaacagggtgctcggcatcccccactctagcattatgggttataacttctccctcctgggcctacttggagagataatttatattgtgttacttgtattagatacagttggcgcaggaaacgggatgatagggtttcaggtactactctccatcggtgagctctctctggcaatagtgatcgcactcatgtccggactcctgacgggcctccttctgaatcttaagatttggaaagctccacatgaggctaagtattttgacgaccaagtattctggaagttccctcatctggcggtgggtttttag

SEQ ID NO: 238628 - DNA, 1482 bp, synthetic construct
  misc_feature 1..1482: note = Description of Artificial Sequence: Synthetic coding sequence
  source 1..1482: mol_type = other DNA
atgtcaagtaagtatccaagatcagttaggaggtgtcttcctctttgggcacttacactggaggccgcactgattttgcttttttatttcttcacgcactatgatgcatccttggaagaccagaaaggcctggtcgcaagctaccaggtaggccaggatctgaccgtaatggccgctataggcctggggtttctgacatccagtttcaggcgtcatagctggagctccgtagctttcaacctgttcatgctggccctcggagtgcagtgggctatattgctggacgggtttctgagtcagtttccatctgggaaagtcgtgatcaccttgttcagcattcgcctcgcaaccatgagcgcccttagtgtactgatcagtgttgacgcagtgcttgggaaagtgaatctagcccagctggtcgttatggtccttgtggaagttacagctctgggcaacctccgcatggtgatcagtaacattttcaatactgattaccacatgaacatgatgcacatctacgtctttgccgcatactttgggctctcagtcgcctggtgcctgcctaagcctctacccgaagggactgaggataaggaccagaccgcgacaattccctcactctctgctatgttgggggctctatttctgtggatgttctggcccagtttcaattctgccctcctgcggagtccaattgagaggaagaatgccgtattcaacacctattacgctgtcgccgtctctgtggtaacagcaatctctggaagttctctcgctcatcctcagggaaaaatctctaagacctatgttcacagcgctgtgttggcaggaggcgtggctgtgggcacaagctgccacctgataccatcaccttggctcgccatggtcctaggattggtagcaggcttaatctccgtggggggagcaaaatacctgcctgggtgctgcaatagggtgttgggaattcctcacagctcaattatggggtacaatttctctctgctgggcttactgggcgaaattatctacatcgtcctccttgtcttagacacagttggcgctggaaatgggatgagccttggttggaacttagcggtgaaaatggcggaagctggcgacgaagagctcatgcggttggatgtgagtcagcggaaccatggcggtgccgctgtgcctacaggttcgtggatgccgagcacagagaccacgatcgcgcctaattacagggaccacattagtgttgtaagctcattcggatgttggatactgagtaagagcatccaagaaaagcaggggctgtttaaaaacaaaaccacgtcaagtcattgttgcctccacctgtatgtacgtaatgcacacgactccaaagtgtcaaatgtgcgagcagggacgggagttcgcgagaacggggtcgaaagttttctctgtcactccctccgcaggatttcacccttcatcatgcattgccggatacaacagtag

SEQ ID NO: 238629 - DNA, 1191 bp, synthetic construct
  misc_feature 1..1191: note = Description of Artificial Sequence: Synthetic coding sequence
  source 1..1191: mol_type = other DNA
atgtctagcaaatatcctcggtctgtgagaagatgcctgcccctctgggcattgacgctggaggcggctctgattctgcttttctatttctttacccactatgacgcatctctggaagatcagaaagggctcgtggcaagctaccaggtcggacaggatctcactgtcatggcggctataggactaggatttttgacatcaagcttcaggcgtcactcatggagttcagtggctttcaacctgttcatgttagctttaggcgtgcaatgggctatactcctagacgggttcttgtcgcaattcccatccggaaaggtggtgatcactctgttctctattaggctggccaccatgagcgccctgtctgtgctgataagtgttgatgcagtgctgggcaaggtcaatcttgcccagcttgttgtaatggttctggtggaggtgaccgcccttggaaacctgcggatggtgatttctaacatttttaataccgactaccatatgaatatgatgcacatttatgtcttcgccgcttacttcggcctgagtgtcgcttggtgcctgcccaagcctttgcccgagggtacagaggataaggatcagacagcaactatcccatccctctccgccatgctgggtgcactgttcctgtggatgttctggcctagcttcaactctgctcttctgcggagtccaatcgaacgtaagaacgcggtcttcaatacatactacgcagtcgctgtttccgttgttaccgcaatctcgggctcgagcctcgcgcacccccaggggaagatcagcaaaacctatgtacattcagcagttctcgccggaggagtcgccgtgggcacctcttgtcatctgataccctccccttggctggccatggtccttggactcgtagccggactgatttcagtcggtggtgcaaaatatctccccggatgctgcaatcgggtcctgggcatcccacatagctccatcatgggatacaacttcagtcttttgggactcctcggagaaatcatctacattgtgctgctggtgctcgacacggttggggctgggaacggaatcttcctgatttggctcctggattttaagcagaagcacccccgaaaaacgcggcctgtacagaaacaggataatttcctctcgcttctccctgcgttcgtgcgggaaaaacgttcatag

SEQ ID NO: 238630 - DNA, 1137 bp, synthetic construct
  misc_feature 1..1137: note = Description of Artificial Sequence: Synthetic coding sequence
  source 1..1137: mol_type = other DNA
atgagtagcaagtaccctagatcggtcaggcgatgcctgccattatgggctctgacactcgaggccgctctaattctactgttttacttctttacacattatgacgcctccctggaggaccagaaaggcctggtggcgtcctatcaagttggacaggatctcaccgttatggccgctattggtctggggtttctgacatccagtttcagaaggcacagttggtcttccgtggccttcaaccttttcatgctggcccttggggtacagtgggcgatcttgcttgatggcttcttgagtcagtttcccagcggcaaagttgtcattactctgttctcgattaggctagccacgatgagcgcattatcagttctgatctctgttgatgctgtgctggggaaggttaatcttgcacagttagtggtaatggtgctggttgaagtgacggccctcgggaatctcagaatggtcatatccaacatctttaacaccgactaccacatgaacatgatgcatatctatgtgtttgcagcctactttggccttagcgtcgcatggtgtctgcccaagcccttacccgaaggaaccgaggataaggaccagaccgccacaattccttccctttccgcaatgctgggtgctctgttcttgtggatgttttggccatcattcaatagcgccttgcttaggtctcctatcgaacggaaaaacgccgtgtttaatacttattacgctgtggccgtgagcgtggtcaccgccatttctgggagcagtctggcacatccgcagggtaaaatctcgaagacctacgtccattcagcagtgctagccggaggggtggccgtgggcacatcctgtcaccttattccgtcaccttggttagcgatggtcctcggtctggtcgccggtctcatatctgtgggtggcgctaagtacttgccggactggttgccaggaccccctcagcattggggaacccagctgggccatcgggattccagccacgtgtggtcgcctgacagtttcttgatctggcttttggatttcaagcagaagcatcccagaaagacgcgcccagtgcagaagcaggacaacttcttgagcctcctgcccgcttttgtgcgcgaaaagagaagctag

SEQ ID NO: 238631 - DNA, 1464 bp, synthetic construct
  misc_feature 1..1464: note = Description of Artificial Sequence: Synthetic coding sequence
  source 1..1464: mol_type = other DNA
atgagttcaaagtaccccaggagcgttcgacgctgcttgcccctgtgggctctgactctggaggctgccctgattttactcttctacttcttcactcactacgacgcatctctagaggatcagaaaggtctagtcgcctcttatcaagtggggcaggaccttaccgtcatggctgctataggccttggatttctgacctcttccttccgaagacactcatggagttcagtggcatttaaccttttcatgctagctctgggagttcagtgggctatcttactggatggatttctgtctcagtttcccagcggaaaggtggtgattacactgttctcaatacggctggccactatgagcgcactatccgtcctgatctccgtcgacgcagtgttgggaaaagtgaacctggctcagctggtggtgatggtcctcgtcgaggttacggctctgggcaatctgcgcatggtgatcagcaacatttttaataccgactatcatatgaatatgatgcatatctacgtttttgcagcatactttggcctgtctgtcgcctggtgcctgcccaaacctctccctgagggcacagaggacaaggaccaaaccgcgactatcccgtcactcagtgcaatgctcggcgcactgttcctttggatgttctggccgagctttaactctgcactgctgaggagtcccattgagaggaaaaacgccgtgttcaatacatactacgctgtagccgttagcgtggtcacagcaatctctggttcttcgctagcacatccccaagggaagatcagtaaaacttacgtgcatagtgccgtccttgccggtggagtggcagtcggcacctcatgtcatctgataccttccccgtggctggctatggttctgggcttagtggcaggcctgattagcgtagggggagcaaaatacctgcccggttgttgcaatcgagtgttaggcatcccccactcgagtatcatggggtacaatttctctctcctcggtctgctgggagaaatcatttacatagtcctcctcgtgttggatactgtaggagccggtaacggcatgatcgggttccaagtgctgctgtcaatcggtgagttgtctcttgccatagtgatcgcactgatgtccgggctcctgaccggcttgctgctgaacctgaagatttggaaagcccctcacgaggcaaagtactttgacgaccaggtcttctggaagtttccccacttggcagtgggtttctccaagagcatacaggaaaaacagggattgttcaagaataagacgacaagcagccactgctgtctgcacctctacgtgaggaatgcacacgactctaaggtgagcaacgtacgcgctggtaccggagttagggaaaacggcgtcgagtcttttttgtgtcattctctaaggcgcatcagccctttcatcatgcactgccgaatacagcaatag

SEQ ID NO: 238632 - DNA, 1296 bp, synthetic construct
  misc_feature 1..1296: note = Description of Artificial Sequence: Synthetic coding sequence
  source 1..1296: mol_type = other DNA
atgagttcaaagtacccacgctcagtccggaggtgtctgcctctttgggctcttaccctggaggcggcactgatccttctgttttacttcttcactcattacgacgcgagtctggaggatcagaaaggtctcgtagcttcttatcaggtggggcaagacttgaccgtgatggctgcgattggacttggattcctgacatcctcattcaggcggcacagttggagctccgtggcttttaaccttttcatgctcgccctgggggtgcaatgggccatccttctggatggcttcctttctcagtttccatcaggaaaggtagtcatcacactgtttagcatcaggctggcaacgatgtctgcgttgagcgtgcttatatctgtggacgcagtgctgggaaaggtcaacctggcccagctcgtcgtcatggtgctggtggaggtgacggccctgggcaacctgcgaatggtgattagtaacatattcaatactgattaccacatgaacatgatgcatatctacgttttcgctgcctatttcggcttatctgtggcctggtgcctccccaagccgctgcccgagggcaccgaggataaggaccagacagcaacaattcctagcttgagtgccatgctaggtgccctctttttgtggatgttttggccctcttttaactccgctcttctgaggagtccaattgaacggaaaaatgctgtcttcaacacttactacgctgtcgccgtctccgtggtgaccgccatcagcgggtcaagcctggcccacccgcaggggaagatatccaagacttatgtacatagcgccgttctcgcaggcggagttgcagtgggcacttcctgtcatctgataccttccccttggctggctatggttttgggcctggtagctggtctgatctcggttgggggtgccaagtacctgccaggatgctgcaatcgcgtgttagggatcccgcactcctccatcatgggctacaattttagcctgctaggcctgttaggggaaattatctacatcgttctgctggtattggataccgttggggctggaaatggtatgtccctgggctggaacctggcggtcaaaatggcggaggcaggggatgaagagttgatgagattggatgtgagccaaagaaaccatggaggtgctgctgtgcccactggaagctggatgcccagcactgagaccaccattgctcccaactatagagaccacatcagcgttgggctagcctctcggtcttccagcgcactggggaacagcgcttggccctcatag

SEQ ID NO: 238633 - DNA, 966 bp, synthetic construct
  misc_feature 1..966: note = Description of Artificial Sequence: Synthetic coding sequence
  source 1..966: mol_type = other DNA
atgtcctccaagtatccgaggtcagtgcggaggtgtctgcccttatgggcactgacccttgaggccgcactcattctattgttctattttttcactcactatgatgcctccctggaggaccagaagggtctcgtggcgtcttaccaagttggacaggaccttactgttatggcagctatcggcctcggcttcctcacttcttctttcagacgccacagctggtcatcggtggcttttaacctcttcatgctcgctctgggagtccaatgggctattctcctcgatgggttcctgagccagttcccctcaggcaaggtggtgatcacattgttctccattcgcttggccaccatgtccgctctttcggtgctgatttctgtggacgctgtgttagggaaggtgaatctggcccagctcgtggtgatggtcctcgtggaagtcacggcgctcggaaatctgcggatggttatctctaacatctttaatacagattaccatatgaatatgatgcatatctacgtgttcgcggcatacttcggcctgtccgtggcctggtgcctacccaagcctctcccggagggcaccgaagacaaggatcaaaccgccacgataccctctctttcagccatgcttggcgctctctttctctggatgttctggccctcctttaattctgcactgcttcgatcccctatcgagaggaaaaacgccgttttcaacacatattacgctgtagccgtgtcagtggtcacggccatcagcggatcatccctggcccaccctcagggcaaaattagcaagacctatgtgcacagtgctgtccttgccggtggcgtcgcggtcggaacaagctgtcatcttatcccctctccctggctggctatggtgctgggattggtcgccggattaattagcgtcggcggagcgaaatatctccctttcccacatcttgccgtgggcttctag

SEQ ID NO: 238634 - DNA, 294 bp, synthetic construct
  misc_feature 1..294: note = Description of Artificial Sequence: Synthetic coding sequence
  source 1..294: mol_type = other DNA
atggccggaagcccatcacgagcggcaggcagacgcctacagctcccattgctgtgcttatttttacagggtgccaccgcggtactctttgctgtatttgtgcgctataaccataagacagacgccgcactgtggcatagaagcaatcattctaatgctgataatgaattttatttccgctacccaaacggagttagcctgctactacccagactggaatgcaacgggacaatctcggcccaccataatctttgcctccctggatcttcggacagccccgctagcgtcagttag

SEQ ID NO: 238635 - DNA, 462 bp, synthetic construct
  misc_feature 1..462: note = Description of Artificial Sequence: Synthetic coding sequence
  source 1..462: mol_type = other DNA
atggcaggatccccatctagggccgctggccgaagactgcagttgcccttgctatgtctctttctgcaaggtgctactgccgtgctgtttgccgtattcgtacgatataaccacaagaccgacgccgctctctggcacaggtcaaaccacagcaacgccgacaacgagttctactttcgatatccaaaggagagccattccgttgcccaagccggtgttcagcgacgcaatctgggtagcctgcagccttctcctccgagactgcccggacgggcttgccacggcttgagaggcctctggctgcctcacggcctcccagccgcactaagacttcagcagcgtggcttgcaccttcccccaggacgtctctgcccagctgtagtccacaccggacccggtctgtcacctctgctgccaaggtggcctcatccgtgctggcgcggagaacacgatcagtgttag

SEQ ID NO: 238636 - DNA, 1119 bp, synthetic construct
  misc_feature 1..1119: note = Description of Artificial Sequence: Synthetic coding sequence
  source 1..1119: mol_type = other DNA
atggtgtttgtggggttcggatttttgatggttttcctccagcgctacgggtttagcagcgttggcttcaccttcctgctcgcagcttttgctctgcaatggtccaccctggtccagggctttctccactcattccacggaggtcacatacacgtgggagtggagagcatgattaatgctgacttctgcgccggtgccgtactgatctcattcggggcagtgctgggaaaaacaggccctacccagctgctcctgatggcacttctggaagtagtgctttttggaatcaatgaatttgtgctgctgcatctgctgggggtcagggacgccggtgggagtatgacgattcatacgttcggcgcttatttcgggctggtcctttctagagtcctatacaggccccagctcgaaaaaagcaaacacaggcaaggttccgtgtatcactctgacctgttcgctatgattggaacgatcttcttgtggatcttctggccctcatttaacgcagctctgacagcactgggggctggccagcatcggacagctctcaatacgtactactccctggccgctagtaccttgggaacatttgccttaagcgccctggtcggtgaagatggacgactagacatggttcacatacaaaacgcagcccttgccggtggagtggtcgtggggacctccagtgagatgatgctgactccattcggagccttggctgctggcttcctggctgggaccgttagtactctaggttataagttcttcacacccattctggagagcaaattcaaagttcaggatacatgtggtgtacacaacctccatggcatgcccggtgttctgggagcgctcttgggggtgctagtggcaggtctggccactcacgaagcctacggcgacggcctcgaaagcgtattcccactcatagccgagggccagcgtagtgcgaccagccaggctatgcaccagctttttgggctatttgtgacgctgatgttcgcttccgtcgggggaggtctcgggggactcttactgaagctccctttcttggattccccacccagattaccagccctcagagggccttcatcactggcgggtgcctggcgggcttag

SEQ ID NO: 238637 - DNA, 1374 bp, synthetic construct
  misc_feature 1..1374: note = Description of Artificial Sequence: Synthetic coding sequence
  source 1..1374: mol_type = other DNA
atggcaggatccccgagccgtgctgccggtcgccgactccagctgcccctactctgtctgtttcttcagggcgctacggcagttctgttcgccgtctttgtccgatacaatcacaagaccgatgctgctctatggcacagatcaaaccattctaatgctgataatgagttttacttccggtatcccagtttccaggatgtgcacgccatggtatttgtgggctttggattcctgatggtgtttcttcagagatatggcttcagcagtgttggctttacatttctgctcgcggctttcgcccttcagtggtcaactctagtacaagggtttctgcacagcttccacggtggacatattcatgtaggtgtcgagtctatgatcaatgccgacttctgtgccggtgctgtgttgatctcttttggggcagtcctgggcaagacaggccctactcagttgctgctaatggcactgctggaggtggtgctcttcggcattaacgaattcgtgctgctccaccttctgggggtgcgggatgcaggcggtagcatgacaatccacacatttggtgcttattttggcctggtcctatctcgagtgctttaccggcctcagctggaaaaatccaaacataggcaggggtccgtttaccactctgacctcttcgctatgattggaactatttttttgtggattttttggccctcctttaatgctgcgcttaccgccctgggagctggccagcacagaaccgccctaaacacctactatagcttggccgcttccactctaggcactttcgcactgagtgccttggttggcgaagacgggaggctggatatggtccacatccagaacgcagcactggcaggtggtgtcgtagtaggcaccagttccgagatgatgttgactcccttcggcgctctggcggctggctttctggcagggacagtgagtaccttagggtataaattcttcactcccatcctggaaagcaagttcaaagttcaggacacctgcggggtacataacctacacgggatgccgggagtgctgggggcacttctgggcgtactcgtcgcaggcctggcaacccatgaagcttacggggatggactcgaaagcgtatttccgctaattgcagagggccagcggtccgccacaagtcaggccatgcaccagttgtttggcctttttgttacactgatgtttgcctcagtaggaggcggactgggcggtctgctgctgaagctccctttcctcgaccctccggactctcagcattacgaggatcaggttcattggcaggtgccgggtgaacacgaagataaggcgcagcgaccactgagggtggaggaggctgatacccaagcctag

SEQ ID NO: 238638 - DNA, 1326 bp, synthetic construct
  misc_feature 1..1326: note = Description of Artificial Sequence: Synthetic coding sequence
  source 1..1326: mol_type = other DNA
atggcgggaagtcctagtcgagccgctggcaggcgactgcagttgcccttgctctgtctgttcctccagggcgcaactgccgtgctcttcgccgtttttgttaggtacaatcacaagaccgacgctgctctgtggcaccgctccaatcattctaatgccgacaatgaattttactttaggtacccatcatttcaggatgtgcatgccatggttttcgtcgggtttgggttcctgatggttttcctacagagatatggattctcctccgtgggcttcacttttctgttggcggcattcgcgctgcaatggagtaccctggtgcagggtttcctgcattcgttccacggaggacatatccatgtgggagtggaaagcatgatcaatgccgatttttgcgccggtgctgtcctgatctcattcggagccgtgctgggcaaaacaggtcctacccagcttcttctcatggccctgctggaggtggtgctgtttggaatcaatgaattcgttctcctccatctgctgggggtgcgcgatgccggaggatccatgacaattcacaccttcggagcctattttggtctggtcctgtccagagtgttataccgaccacagctagagaaatccaaacatcgccaaggctctgtttaccactctgatctgttcgcgatgattggcacgatctttctgtggatattctggccatcattcaacgccgcactgaccgccctcggggctggtcagcaccgcaccgctttaaacacatactactcccttgcggctagcacactggggacatttgccctttctgctctggtgggagaagatggcaggttggatatggtgcatatacagaatgcagctctggccggaggcgtggtcgtgggaacctcttccgaaatgatgttaaccccgttcggcgctctggccgctggcttcctggcagggactgtgagcactctagggtataagttttttactccaatccttgaatctaagttcaaagtgcaggacacatgcggcgtgcacaaccttcatggaatgcccggtgtactcggcgcactgctcggagtgctggttgccggactcgccactcatgaggcatacggggacggcctggaatcggtgttcccattgatcgctgaggggcagcggtccgctacatcccaagcaatgcatcagctgttcggtctcttcgtgacgctgatgtttgccagtgtcggaggcggactaggagggttactcctaaagctaccctttctggattctcccccacggctgcctgctctgcgcggtccatcatccctcgcaggtgcttggcgggcttag

SEQ ID NO: 238639 - DNA, 1230 bp, synthetic construct
  misc_feature 1..1230: note = Description of Artificial Sequence: Synthetic coding sequence
  source 1..1230: mol_type = other DNA
atggtctttgtaggcttcggcttcttaatggtcttcctacagcggtatggcttttcatctgtaggcttcaccttcttgctcgctgcattcgctttacaatggagtactctggtccaggggtttctgcatagcttccacggcggtcatatccacgtgggtgtcgaaagcatgatcaacgctgatttttgcgctggggcagtattaatttcgtttggggctgtgttgggtaagacaggcccaacacaactcctgcttatggctctgctggaggtggttcttttcgggatcaacgagttcgttctgttgcacctgctgggcgtccgggtctgggggggaatggagagcggcgttggcggagggcaggggcagccactgtcccaggagcggggtggaggcggtggcgtactgccgcttacacctccaccacaagtgagagacgccggtggatccatgactattcacacatttggggcttacttcgggctggtgctgtcacgggtgttgtaccgccctcagttagaaaagtctaaacatcgtcagggctccgtataccactcagacctgttcgccatgatcggaactattttcctctggatattctggccgtccttcaacgccgctctcactgcgctcggcgcaggacagcaccgaaccgctctaaacacctattactctctagcggcaagtaccctgggaacttttgccctctcagcccttgtgggcgaggatgggaggttggacatggtccacattcagaacgccgcactcgccggaggtgtcgtcgtgggtacgagtagtgaaatgatgctgacaccatttggcgctctggcagccggattccttgcaggaaccgtgtccacccttgggtacaaattcttcactcctatactggagagcaaattcaaagttcaggatacatgcggggtccacaatcttcatggaatgccaggggtgctgggcgcactgctcggtgtgctagtagccggactggcaactcacgaggcatatggtgatggactggagtcggtattcccccttattgctgagggtcaaagatctgccacaagtcaggccatgcaccagctattcggactgtttgtcactcttatgtttgcaagcgttgggggaggtctcgggggattgctgctcaaactgccgttcctggatagcccaccccgtctgcctgctctgcgagggccttcatccttggcgggtgcatggcgggcatag

SEQ ID NO: 238640 - DNA, 1125 bp, synthetic construct
  misc_feature 1..1125: note = Description of Artificial Sequence: Synthetic coding sequence
  source 1..1125: mol_type = other DNA
atggtgttcgttggctttggatttcttatggtattcctccaaagatacggctttagcagtgtaggctttacttttctgctggcagcttttgctctgcagtggtctaccctggtgcaagggtttctgcacagcttccacggaggtcatattcacgtcggagtggagtctatgatcaacgccgatttttgcgccggagcagtgctcatatcctttggagctgtgctcggtaagacagggcctacccagctgctgctgatggctctcctcgaggtggtgctcttcggtattaacgagtttgtactcctacacctgcttggcgttcgcgtgtgggggggaatggaatctggggtcgggggtggccaaggacagcccttatcccaagaacggggaggcggaggaggagttctccctctgactccgccaccccaggttcgggacgccggtggaagcatgactattcacacattcggtgcgtatttcggcttagtgctgtcccgggtgctgtatagaccacagctagagaagagtaaacaccgccagggcagcgtgtatcattcagatttatttgccatgatcggcacaatctttctgtggatcttctggccatcttttaacgcagcactgaccgcactgggtgccggacaacaccggactgccctcaacacatactacagtctcgccgctagcacacttgggacattcgctttaagcgcactggtcggagaggacggtaggctcgatatgcctatcctggagtccaagttcaaggtgcaagatacctgcggcgttcataacctgcacggaatgcctggggtgcttggcgctctgttgggagtgctggtcgcaggcttggccacccacgaggcatatggagacgggctggagtcggtctttcctcttatcgctgaagggcagagaagcgctacatctcaggctatgcaccagttgttcggtctgttcgtcacgctgatgttcgcaagcgtgggcggtggcttgggcggaataattttggtgctttgcctactggatccatgcgcactatggcactgggttgccccaagctcaatggtggggggtcgggaggcatctcaaattctcccatatcaccatcagggatcgtgctag

SEQ ID NO: 238641 - DNA, 687 bp, synthetic construct
  misc_feature 1..687: note = Description of Artificial Sequence: Synthetic coding sequence
  source 1..687: mol_type = other DNA
atggccggtagcccgagccgggcagcaggcaggcggctccagctgcctctcctctgcctgttcctgcagggtgctactgccgttctgttcgctgtcttcgttagatataaccataaaacggacgccgctctgtggcaccggagcaatcattccaacgcagacaatgaattctattttcgttacccgaggactatattcctttggatcttttggccaagcttcaatgcagcactgaccgcgcttggagccggacagcaccgtacggcgctgaacacatactattctctggccgcatccactttaggcaccttcgctctatcagcactggtgggtgaggacggcaggcttgacatggttcatattcaaaacgctgctctcgcaggaggtgtcgtggtgggcacaagtagcgaaatgatgctcaccccattcggggctctagccgctggcttcctcgcaggcaccgtgagcacccttggtccgtcactgaaccagaatagcaaatcaaagacacatgtcgagagtaccacgagcatgggctgccgagggtcttgggggccatcttggggtagcttgtggctggacctccctcctatgaagctcaccgaaatgggggagttccccccaaatccttattgttctaggcacccatctgggatgacatccgtcatacttttccactgtgtctag

SEQ ID NO: 238642 - DNA, 1440 bp, synthetic construct
  misc_feature 1..1440: note = Description of Artificial Sequence: Synthetic coding sequence
  source 1..1440: mol_type = other DNA
atggcgtggaacacaaacctccgctggagactgccattgacttgcttgctgctgcaggttattatggtgatcctgtttggagtgttcgtgaggtacgactttgaggctgacgcgcactggtggtcagagcgcacccacaagaatctcagtgatatggagaatgagttctactatcgctatccaagctttcaggatgtccatgtcatggtctttgtgggatttggatttttaatgaccttccttcaaagatacggattctctgcggtggggtttaacttccttttggccgctttcgggatccaatgggccctgttgatgcagggctggtttcatttcctgcaagacagatatatcgtagtgggagtcgaaaacctcattaacgcagacttttgcgtcgcttctgtgtgcgtcgcttttggtgccgttttagggaaggtctctcctatccaattactcataatgaccttcttccaggtcacgttatttgccgtaaatgagttcattcttctgaacctgctaaaggttaaagatgcgggaggatccatgactatccataccttcggggcttattttgggctcactgtgacgagaatcctctaccggcgtaacctggaacagagcaaggaaaggcagaactctgtgtatcagtctgacctctttgcaatgatcgggaccctcttcctgtggatgtactggccctccttcaatagtgcaatctcataccacggtgactcccaacatagggccgcaatcaatacttactgctcactggcagcctgcgtgcttaccagcgtggccatatctagcgctctgcacaagaagggaaaacttgatatggttcatatccagaacgccaccctagcaggtggagtcgctgtgggaacagctgctgaaatgatgcttatgccttatggcgcacttatcattgggttcgtgtgcggtattatatcaactctggggtttgtatatctcaccccttttctggaatcccgcttgcacattcaagacacctgtgggatcaacaatttacacggaattcctggaatcattgggggtatcgtgggagcggtcacagcagcttccgcctcattggaggtctacggcaaggaaggcctagtccattctttcgacttccagggattcaacggcgattggacagcgaggacccaaggcaagtttcagatctatggcctcctggtgaccctggcaatggccctgatgggcggtatcatcgttggactgatcctgcgcctgcccttttggggccaaccctcagacgaaaactgctttgaagacgctgtgtactgggaaatgccagagggcaatagcacagtgtacatccccgaggatccgaccttcaagccatccggtccctcagtaccttccgtgccaatggtgagcccccttccaatggcctcaagtgttccgctcgttccctag

SEQ ID NO: 238643 - DNA, 1413 bp, synthetic construct
  misc_feature 1..1413: note = Description of Artificial Sequence: Synthetic coding sequence
  source 1..1413: mol_type = other DNA
atggcatggaatacatgccttcttctccaggtcatcatggttatcttgttcggggtcttcgtcagatatgactttgaggcagatgcccactggtggagcgagagaactcacaagaacctttccgacatggagaacgagttctactataggtatcctagcttccaggacgtgcacgtgatggtttttgttggcttcggctttctgatgacattccttcagcggtacggattttccgcagtaggcttcaatttcttgctggcagcttttggaattcaatgggcactgttaatgcagggatggttccacttcctgcaggaccggtacatagtcgtcggagtggagaacctgattaatgccgacttttgtgtggcctcagtgtgtgtcgcttttggagccgttctggggaaagtctccccaatacaactgcttattatgacctttttccaagtgactctctttgctgtgaacgagttcattctgctgaatctcctgaaagttaaggacgcgggaggaagcatgacaatccacacgttcggcgcatacttcggcctgactgttacaaggattctatatcgaagaaatttggaacagtcaaaggaacgccagaactctgtctaccagtccgacctgtttgcaatgattggcaccctatttctctggatgtactggccaagcttcaattctgcaatatcataccacggcgactctcaacacagagcagccattaatacctactgctcactggccgcatgtgtcctcacctcagtagctattagctccgccctgcataaaaaggggaaactggacatggttcacatccagaacgcaactctggccggaggtgtcgcagtagggactgccgctgagatgatgctaatgccctacggcgctctgatcattgggttcgtatgcggcatcatatctacactgggttttgtctacctgactccgtttcttgaatcccgactgcatatacaggacacctgcggcatcaacaaccttcacggcattccaggaatcatcggagggattgtcggagctgtcactgctgcttcggccagcctcgaagtgtacggaaaagagggcctggtgcactcttttgatttccaaggttttaatggcgactggaccgccaggacccaaggcaagttccagatttacggactactcgtgaccctcgcaatggcccttatggggggtataatagtgggtctgatacttcgcctgcccttttgggggcagcctagtgatgagaactgttttgaggatgcagtgtattgggagatgcctgaaggcaactctaccgtgtatatcccggaagatcctactttcaagccttctggacccagtgtgccatctgtgccgatggtgagcccattaccgatggcatcttcggtgcccttggtcccctag

SEQ ID NO: 238644 - DNA, 1338 bp, synthetic construct
  misc_feature 1..1338: note = Description of Artificial Sequence: Synthetic coding sequence
  source 1..1338: mol_type = other DNA
atggcttggaacaccaatctgcgctggagactgcctcttacatgcctcctgctccaagtgatcatggtaatactgtttggggtcttcgtccgctatgacttcgaagcagacgcacattggtggtcagagcgtacacataagaatctgagcgatatggagaatgaattctactaccgctacccaagttttcaggacgtccatgtcatggtctttgtcggatttggcttcctcatgaccttcctgcagcgatatggtttcagtgccgtgggttttaattttctcctagctgcgtttggcatccagtgggcgcttctgatgcagggctggtttcacttcctccaagataggtatatagttgtgggcgttgagaacctcatcaacgctgatttctgcgtggcgtccgtttgcgtggcattcggtgcagtgctggggaaggtctcaccgatccagttattgattatgacttttttccaagtgactttgtttgccgtcaatgagttcatccttttgaacctactgaaggtgaaggacgccggtgggtccatgaccatccacacctttggcgcttactttgggcttactgtgacccgcatcctctaccgtcgcaacttggaacagagcaaggaacggcagaattctgtttaccagtcagacctttttgctatgatcgggaccctgttcctttggatgtattggccgagttttaatagcgcgattagctaccatggagattctcaacacagggccgcaattaatacatactgttcactggcagcctgtgtattgacatctgttgctattagtagcgccctgcacaaaaaggggaaactcgatatggtgcatatacagaacgctacactcgccggtggcgtagcggtcggtactgccgcagaaatgatgctgatgccatacggggcactgattattggatttgtctgcggcattatctcaaccctgggcttcgtctacctgactccatttctcgagagtcgactacatatccaggacacttgtgggatcaacaacctgcatggcatcccaggaatcatcggcggtattgtaggggctgttacagccgcttccgcttccctcgaagtgtacgggaaggagggacttgtgcatagctttgacttccaagggtttaacggggattggactgcaaggactcagggcaagttccagatctacggactcctggtgacactcgctatggctctcatggggggtattatcgtggggctaattttacgtctgcctttttgggggcaaccctctgatgagaactgcttcgaggatgcggtttattgggaggacctcgagctggccccaaatcaatag

SEQ ID NO: 238645 - DNA, 714 bp, synthetic construct
  misc_feature 1..714: note = Description of Artificial Sequence: Synthetic coding sequence
  source 1..714: mol_type = other DNA
tgagactctcaacatcgtgcggcaataaatacctactgtagcttagcggcttgtgtgcttacatccgtagctatcagttccgccctccacaagaagggcaagctcgatatggtgcacatccagaatgcaaccctggcagggggagtggccgtcggaactgccgcagagatgatgcttatgccatacggtgccctgattatcggcttcgtttgcggcatcatctctaccctaggatttgtgtatctgactccgtttctagaaagccgtctccatatccaagacacatgcgggatcaacaacttacatgggatcccaggaataatcgggggaattgtcggggcagtcaccgctgcttctgccagtcttgaagtttacggcaaagaagggctggtacattcctttgattttcagggttttaatggagactggactgccagaactcagggcaaattccaaatctatggtctgctggtgacgttagcaatggccttgatgggtggcattatagtgggccttatcttgagattacccttttggggccagccgtcagatgagaattgcttcgaggacgcagtgtattgggagatgcccgaagggaatagtaccgtgtacatacccgaggaccccaccttcaaaccctctgggccatctgtcccctccgttcctatggttagtcccctgcctatggcgagttctgttcctctggtcccttag

SEQ ID NO: 238646 - DNA, 429 bp, synthetic construct
  misc_feature 1..429: note = Description of Artificial Sequence: Synthetic coding sequence
  source 1..429: mol_type = other DNA
atggcagccgcagtcgccgctgccggtgctggggagccacaaagcccagacgaattgctgcctaagggcgatgctgagaaaccagaggaggagttagaggaagatgacgatgaggagctggacgaaaccctgagcgagcgtctgtggggcttgaccgaaatgttcccggaacgtgtcaggagcgccgctggcgctacattcgatctgagcctctttgtggctcagaagatgtatcggttctcaagggccgcactgtggatcgggactacatcattcatgattcttgtactgcccgtggtcttcgagaccgagaaactgcaaatggagcagcaacaacagcttcagcagagacaaatcttgcttgggccaaacacgggactctccgggggtatgcctggcgcactgccttccttacctggtaaaatctag

SEQ ID NO: 238647 - DNA, 1083 bp, synthetic construct
  misc_feature 1..1083: note = Description of Artificial Sequence: Synthetic coding sequence
  source 1..1083: mol_type = other DNA
atgagccaggagagacctacattttaccgacaggagttgaataagaccatttgggaggtacctgagcgctaccagaacctgtcacccgtcgggtccggtgcttatggatccgtgtgcgcagcattcgacacaaagaccggcctgcgagttgccgtcaagaaactaagccggccattccaatcaatcatccatgctaaaagaacataccgggaactcaggttactaaagcacatgaaacacgagaatgtcattggcctgctcgatgtgtttacaccggcacgtagtctggaagagttcaatgatgtttacctggtgacacatctgatgggcgctgatcttaacaacatcgtgaaatgccagaaactgactgacgaccacgtccagttcctgatataccagatactgagaggcctgaaatatattcactctgcggacatcattcatagggacttgaaacctagtaatctggctgtgaacgaagattgtgagctgaagatcttagattttgggctggctcgccacacagatgatgaaatgaccgggtacgtcgccacacggtggtaccgagccccagagattatgctgaactggatgcattacaaccagactgtagatatctggagcgttggctgtatcatggcagagctgctcactggtcgcactctgtttcccggaacagaccatattaatcagctgcagcagataatgcggctaacaggcaccccccctgcttatttgatcaacagaatgccgtcccacgaagcgagaaattatatacaaagcctgactcagatgccgaagatgaacttcgctaatgtgtttattggcgcaaacccgctggctgtcgatctcctcgaaaaaatgctggtactcgactctgataaaaggattacagccgctcaagccctcgcccatgcatattttgctcagtatcacgaccctgatgatgaaccagtggcagatccatacgatcaatcttttgaatccagagatcttttgattgacgagtggaaatcattaacctacgacgaggtgatctcgttcgtaccgcctcccctggatcaagaggagatggaaagctag

SEQ ID NO: 238648 - DNA, 1230 bp, synthetic construct
  misc_feature 1..1230: note = Description of Artificial Sequence: Synthetic coding sequence
  source 1..1230: mol_type = other DNA
atgcgcttcaccttcccgcttatggcaatcgttttagaaatcgcgatgattgtcctctttggtttatttgtcgagtatgaaactgaccagactgtgctggaacaacttaacatcactaagccaaccgacatgggcattttcttcgagctctacccacttttccaggacgtgcacgtgatgatcttcgtcggatttgggttcctcatgacctttcttaagaaatacggcttctcgtcagttggaatcaacttgctggtagccgctcttggcctccagtgggggacaatcgtacaggggatcctacagagccagggccaaaagtttaacatagggattaaaaatatgattaacgctgacttttccgctgctactgtgctgatttctttcggcgcagtgttgggcaagaccagcccaacgcagatgttaatcatgactattttggagatcgttttcttcgcacacaacgagtaccttgtgtccgaaatctttaaagcgagcgacatcggcgcatctatgacaattcacgctttcggggcttatttcggactcgccgtggctggaattctctacaggagcgggctcaggaaaggacacgagaacgaggagtctgcgtattattccgatttgttcgccatgataggcactctgttcctgtggatgttctggccctccttcaatagcgctattgccgagcctggggataagcaatgtcgtgctatcgtgaacacctacttttctctggccgcttgtgtactaactgcgttcgcattttcctccctcgtcgaacaccgaggcaaattgaacatggtccacatccagaacgctactctggccggtggcgtggccgtgggaacctgtgccgacatggctattcaccctttcggatctatgatcattgggtccatcgcaggaatggtgagcgtgctaggatacaagtttctgaccccactcttcacaactaagttgaggatccacgacacctgtggcgtgcataacctgcacggcttgcctggagtagtgggtgggctcgcgggtatagttgcggtagcgatgggagcttctaatacctctatggccatgcaggcagccgctttgggatcatctattggtacagcagtagtgggagggctcatgactggtttgattctaaaactaccactctggggacagccttccgatcagaattgttatgacgactcagtgtactggaaggtgccgaaaactcgatag

SEQ ID NO: 238649 - DNA, 1233 bp, synthetic construct
  misc_feature 1..1233: note = Description of Artificial Sequence: Synthetic coding sequence
  source 1..1233: mol_type = other DNA
atgagattcacatttccattgatggccattgtcctggagattgctatgatcgtgctgtttggtttatttgtggagtatgagaccgatcagacggtgctggaacaacttaatatcactaagccgacagatatgggcatctttttcgaattgtatcctctatttcaggatgtccacgtaatgatcttcgtgggtttcggattcctgatgacttttttgaaaaagtacgggttcagctctgtcggaattaatctgctggtggccgctctgggactgcagtggggcactatagtacaaggcattctccaatcacaaggccaaaagtttaacatcggaattaaaaacatgataaatgcagatttttccgctgcaacagtcctgatatcctttggggctgtgctagggaaaacctctccgacacaaatgctgatcatgacaatcctggaaatcgtattttttgcccataacgagtatctggtctccgaaattttcaaggcttctgacattggagcaagcatgactattcatgcatttggagcctattttggcctagccgtggccggaattctatatcgctccgggctccgcaaagggcatgaaaacgaggaatccgcctactatagcgacctgttcgccatgatcggcaccctatttttgtggatgttctggccgtctttcaattcagctattgccgagccaggagacaagcagtgccgggcaattgtgaacacttacttctccctggcggcatgtgtccttacggctttcgccttcagttccctagtggagcatcgagggaaactcaacatggtgcatatacagaacgcgacattagctggtggagtggcagttggcacgtgtgctgacatggccattcatccatttggcagtatgattatcggttcaatcgctggtatggtcagcgtgcttgggtataagtttttaacccccctattcaccactaaactgagaatacatgacacctgcggggtgcacaatttgcacggcttgccaggcgtggtcggcggtctggccggaatagtcgccgtggcaatgggagcaagcaacacttccatggcgatgcaggcggcagccctgggctcctctattgggaccgccgtcgtcggcggtcttatgacggggctgattcttaagctgccactgtggggtcaacccagcgaccagaactgttacgatgatagcgtttattggaaggtgcctaagaccagagtctag

SEQ ID NO: 238650 - DNA, 1146 bp, synthetic construct
  misc_feature 1..1146: note = Description of Artificial Sequence: Synthetic coding sequence
  source 1..1146: mol_type = other DNA
atgcgtttcacttttcctctcatggccatagtattagaaattgcaatgattgttttgtttgggctattcgtggaatacgagaccgaccagacagtcctggagcaactgaacattaccaagccaacagacatggggatttttttcgaactgtatccattgtttcaggatgtgcacgttatgatctttgtggggtttggctttctaatgacctttctgaaaaagtacggcttctccagcgtgggaatcaatcttctcgtcgccgcacttggcttgcaatgggggaccatagttcagggcatcctgcagagccaggggcagaaatttaacataggaattaagaacatgatcaacgccgactttagcgccgctaccgtcctgatatctttcggagccgtgttggggaagacttcccccacccaaatgctgattatgactatcttagaaatcgtgttttttgcccacaatgaatatctggtgtctgagatattcaaagcctcagacattggcgctagtatgacaatccacgcctttggtgcctattttggtcttgctgtggccggtatcttgtaccgcagtggccttaggaaggggcacgaaaacgaagaatctgcctactattctgatttatttgctatgatagggacactgttcctatggatgttttggccctctttcaactcagccattgccgagccgggagacaagcagtgtagagccatcgtgaatacctatttttccctggcagcttgcgtacttaccgcgtttgctttttctagcctggtagagcatcgaggaaaactaaatatggtccacatccaaaacgctaccttagccggtggagtggccgtaggtacctgcgctgatatggccatccacccattcggcagtatgatcatcggttcaatcgctggaatggtctccgttctcggctataagttcctaacgccactcttcaccacaaagctccgaattcatgacacatgcggcgtccacaatctgcacggtctacctggcgttgtcgggggacttgcaggaattgtggctgtggctatgggtgcatctaacactagtatggcgatgcaggccgctgctttggggtctagcatcgggaccgcagtggtagggggactgatgacaggcacttag

SEQ ID NO: 238651 - DNA, 387 bp, synthetic construct
  misc_feature 1..387: note = Description of Artificial Sequence: Synthetic coding sequence
  source 1..387: mol_type = other DNA
atgaaaagcctgattctcctcgcgatcctcgccgcactggcggttgtgacactctgctacggcgaatggcaaaaggaggagaacttcgggtttgatatagtgagtgtgctgagcctcaactggcacagggctcaggagagtcatgaatcaatggagtcttacgagctcaacccctttataaacagaaggaatgccaacacattcatcagtcctcagcagcgatggagagccaaagttcaggagcgcatacgagagcgctccaagcccgttcacgagttaaaccgggaggcatgtgacgattacaggctgtgcgaacggtacgcaatggtgtatggctacaatgcagcctataatcgatatttccgaaaaaggagaggaaccaagtag

SEQ ID NO: 238652 - DNA, 339 bp, synthetic construct
  misc_feature 1..339: note = Description of Artificial Sequence: Synthetic coding sequence
  source 1..339: mol_type = other DNA
atgaccgagaaagcccctgagccgcatgtggaagaagacgacgacgacgaactggattccaagctgaattacaagcctccacctcagaaaagcctaaaagagctgcaggaaatggacaaggacgacgagtccctcatcaagtataaaaagactcttcttggtgatggacccgtagtcacagatccaaaggctccgaacgtggtggtcaccagactgaccctggtgtgcgagagcgcccctggccctataacaatggacctcacaggagacttggaggcacttaaaaaggagacgattgtcctcaaagagggatcggaataccgagtgaaaattcactag

SEQ ID NO: 238653 - DNA, 606 bp, synthetic construct
  misc_feature 1..606: note = Description of Artificial Sequence: Synthetic coding sequence
  source 1..606: mol_type = other DNA
atgaccgaaaaggctcccgagccccatgtcgaggaggatgacgatgatgaactggattcaaaactgaactataaaccgccaccgcagaaaagtttgaaagaactgcaagagatggacaaagatgatgagagtcttattaagtataaaaaaacgttgctcggcgatggtcctgtggtgacggaccctaaagcccctaatgtggtggttaccagactgaccttagtatgtgagagcgccccaggacctattaccatggacctgaccggagaccttgaggccctgaagaaggagactatagtgctgaaagaaggatccgaatatcgagtcaaaattcacttcaaggtaaacagagacatcgtatccggtctaaaatacgtccagcacacctatcgaacaggggtgaaggtggataaggctacgtttatggttggaagctacggccctagaccggaggagtatgaatttctgacccctgtggaggaagccccaaagggcatgctggcaaggggcacatatcacaataaatccttctttaccgatgatgacaagcaggatcacctgagttgggaatggaatcttagtattaagaaggaatggacagagtag

SEQ ID NO: 238654 - DNA, 606 bp, synthetic construct
  misc_feature 1..606: note = Description of Artificial Sequence: Synthetic coding sequence
  source 1..606: mol_type = other DNA
atgactgaaaaagcccctgaaccgcacgtggaagaggatgatgatgatgaactagacagcaagttaaactataaacctcccccacagaagtctttgaaagagctacaagaaatggacaaggacgatgaaagtctaattaaatacaagaagaccttactgggggatggcccagtggtcactgacccgaaagctcctaacgtggtcgtcacccggctcacgctggtctgcgaatccgcacccggacctatcacaatggatctcactggagacttagaggccctgaagaaggagacgattgtgctgaaagaaggatcggagtatcgcgttaagatacactttaaggttaatagagacatagtctcagggcttaagtacgtgcagcatacctataggactggagtcaaggtcgataaagctaccttcatggtgggttcctacgggccaagaccagaggagtatgagtttcttactcccgtggaggaggccccaaaaggaatgctggcccgtgggacttaccacaataaatcattttttactgatgacgacaagcaagaccacctcagctgggaatggaatctgtcaattaagaaagagtggacggaatag

SEQ ID NO: 238655 - DNA, 267 bp, synthetic construct
  misc_feature 1..267: note = Description of Artificial Sequence: Synthetic coding sequence
  source 1..267: mol_type = other DNA
atgactgaaaaggctccagagccacatgtggaagaagacgatgatgacgagctggactcgaagcttaattacaagcctccgcctcaaaaatcactcaaggaactccaggagatggataaggacgatgaatccctgattaaatacaagaagacattgctgggcgacggcccagtcgtgactgatcctaaagctccgaatgtggttgtgacaagacttacactcgtgtgtgaatcagccccaggcccaataacaatggacctgacctag

SEQ ID NO: 238656 - DNA, 480 bp, synthetic construct
  misc_feature 1..480: note = Description of Artificial Sequence: Synthetic coding sequence
  source 1..480: mol_type = other DNA
atgacggagaaagccccagagccccacgtcgaggaggacgatgacgacgagcttgactcaaagctcaattacaaaccacctccccaaaagtccttgaaggagctgcaggagatggataaggacgacgagtcactgatcaagtataaaaaaaccctcctgggtgatgggcctgtggttacggaccccaaggcacccaacgtggtagtcaccaggctgaccctggtgtgtgaatcagccccaggacccatcacaatggaccttacaggggacctggaggcccttaaaaaggaaaccatcgtcctgaaggagggttctgagtaccgtgttaagatccactttaaagtcaatcgcgacatcgtgtcgggcctcaagtacgtgcaacacacttaccgaaccggcgtcaaggtcgacaaggcaactttcatggtcgggagttatggtccacggcctgaagaatatgagttcctaactccagtgtag

SEQ ID NO: 238657 - DNA, 1320 bp, synthetic construct
  misc_feature 1..1320: note = Description of Artificial Sequence: Synthetic coding sequence
  source 1..1320: mol_type = other DNA
atggatcccctgagcgagctccaggatgacctgacactggacgatacttcggaggcactgaatcagttgaaactcgcatctattgatgagaagaattggccaagcgatgaaatgccagactttcccaaaagcgacgattccaagtcgagttcgccagaattagtcacacacttgaaatgggatgatccctattatgatatcgcaagacaccagattgtggaagttgctggcgatgataagtatggcagaaagatcattgtgttcagcgcctgccgaatgccccctagtcatcagctggaccacagcaagctcctaggatatttaaaacacacattggatcagtacgtggagtcagactacacgttgctgtacctgcatcacggactcacatctgataacaaacccagtctttcgtggctgcgcgatgcctacagggagttcgatcgcaaatataagaaaaacattaaggccctgtacatcgtgcatccaactatgtttatcaaaacactcttgatcttgttcaaaccactgatctccttcaaattcggacaaaagatattctatgtgaactacttgtccgaacttagcgaacacgttaaactggagcagcttggcattccgaggcaggtcctcaagtacgatgatttcctcaagagcactcagaaatccccagccactgccccaaagcccatgcctcctcgaccccctctacctaatcagcagttcggggtctctctccagcatttgcaggagaaaaacccagaacaggaacccatcccaatagtgctgcgggaaaccgttgcttaccttcaggcccacgctctgactaccgaagggatctttagacgtagcgccaatactcaggttgttagagaggtgcagcagaaatacaatatgggcctacctgttgatttcgaccaatacaacgaacttcatctacctgccgtcatcctaaaaacattcctgcgagagttgccagagccgctcctcacctttgacctttaccctcatgtagtggggttcctcaatattgatgaaagccaaagggtgccagccaccctccaggtgctgcaaactttgcctgaggaaaactatcaggtgttgcgtttcctgacagcctttcttgtccaaattagcgcacattcggatcaaaataagatgacaaatactaacctggctgtcgtctttggaccaaacctcctttgggctaaagatgctgctatcaccctgaaagcgataaacccgatcaataccttcacaaagttcctgctcgaccatcagggcgagctatttccctcccccgacccttccggtctatag

SEQ ID NO: 238658 - DNA, 1377 bp, synthetic construct
  misc_feature 1..1377: note = Description of Artificial Sequence: Synthetic coding sequence
  source 1..1377: mol_type = other DNA
atggaccctctcagtgagctgcaagatgacttaactctggacgacaccagtgaggcactgaaccagctgaaactggcttccatcgacgagaaaaactggccctccgacgagatgccagactttcccaagtcagacgacagcaagtcatccagccccgaactagtcacccatctgaagtgggatgacccctactatgacatagccaggcatcagatcgtcgaagtggctggggacgacaaatatggacgcaaaattattgtgtttagcgcatgccgcatgccgccttctcaccaattagatcattcaaaactcctcggatatttgaagcatacgctcgatcaatacgtggagtcagactacacgctcctgtatcttcaccatggcttaacatcagataacaaaccatcactcagctggctgcgggacgcgtatcgcgaatttgacagaaagtacaaaaagaacattaaggcactgtacatcgtccaccccacaatgttcattaagacactgctgatattgtttaagcccctgatttctttcaagtttgggcagaagatattttacgtgaattacttgagcgagctctcagagcatgttaagctagaacagctcggaatccctcggcaggtcctaaaatacgacgattttctgaagtctacccagaaaagtcctgctaccgctcctaagccaatgcctcccaggccccctttaccgaatcagcagtttggcgtatcactgcagcatcttcaggagaagaatcccgagcaagagcctataccaatagtgttgcgtgagacggtggcctacctgcaggcccatgccctgacaaccgaggggattttccgtagatcggcgaatactcaggtggtacgcgaggttcaacagaaatataacatgggccttccagttgattttgatcaatataatgaattgcatcttcctgctgtgatcctcaaaacattccttcgtgaattgccggagcccctcctaacatttgacctgtacccacacgttgttggtttcctcaatatagatgagtctcagagagtgcccgcaaccctccaggtgctgcaaaccctgccagaggagaattatcaagttttaagatttctgaccgctttcctggtccaaatcagcgcccatagtgaccagaataagatgactaatacaaatttggcagtggtgtttgggcctaacctgctatgggccaaagatgcggctatcaccctaaaggccattaatcctatggccacctttttctttttctttttgcgctggagtctcgccctctcccccggttggagcgctgtagccaggtcccgccatacaagcgctttctgggtgcaggctattctgctcccacaacctccggagtag

SEQ ID NO: 238659 - DNA, 579 bp, synthetic construct
  misc_feature 1..579: note = Description of Artificial Sequence: Synthetic coding sequence
  source 1..579: mol_type = other DNA
atggacccgctgagtgagctgcaggacgacctcacgctggacgacaccagtgaagccctgaatcagctgaagctggcctccatagacgaaaaaaactggccatccgacgaaatgcctgatttccctaagagcgatgattccaaatcaagcagtccggagttggtaacccaccttaagtgggacgacccttactacgatattgctaggcaccagatcgtggaggtagctggcgacgataaatacggcagaaagattattgtcttctctgcgtgtaggatgcccccttctcaccagcttgaccatagcaagttgcttggctaccttaaacacacgttggaccagtacgtggagagtgactacaccttgctgtacctccaccacgggttgaccagcgacaataagccatcactgagttggcttcgggatgcatatagggagtttgatagaaagtacaagaagaatatcaaagccctgtacatcgtgcacccaacgatgttcatcaagactctgctgatcttgtttaaacctctcatttcctttaaattcggccagaaaatcttttatgttaattatctgtag

SEQ ID NO: 238660 - DNA, 2361 bp, synthetic construct
  misc_feature 1..2361: note = Description of Artificial Sequence: Synthetic coding sequence
  source 1..2361: mol_type = other DNA
atgggactgcaacctctggaattttctgattgttacctcgatagcccatggttcagggaacgaattcgggctcatgaggcagaactggagcggactaataagttcatcaaagagttaattaaggacggcaagaatctgatcgctgccaccaaaagtctaagcgtggcccaaaggaagtttgcccatagccttcgcgattttaaattcgagtttattggagatgcagtgacagatgacgaaagatgtatcgacgcttctctgagagagttctccaactttttgaagaaccttgaggaacagcgcgagattatggcactgtctgtgaccgaaacgctgatcaagccacttgaaaagtttagaaaggaacagctcggggctgtcaaggaggagaagaagaaatttgacaaggagacggagaaaaactactctctgatcgataaacacttgaatctatctgcaaaaaagaaggattcccacctgcaggaagctgacatccaggtggaacagaatcggcagcacttctacgagctctctttggagtacgtatgcaagcttcaagagatccaggagcggaagaaattcgaattcgttgaaccaatgctcagttttttccagggcatgttcacattttatcatcagggacacgaactggcgaaagacttcaatcactacaagatggagttacagatcaatatccagaatacccgaaaccgctttgaaggcaccagaagcgaggtggaggagctgatgaataagatcagacagaatcccaaagatcataagcgggcttcacaattcactgccgaaggctacctttacgtgcaggagaagcggccagctccgtttggcagttcttgggtcaagcactactgtatgtacagaaaggcggcaaaaaagttcaatatgattccttttgagcataggtcagggggaaagctcggtgacggcgaggttttctttctaaaagaatgcaccaagcgccacaccgattccattgacaggagattctgctttgatattgaagcagctgataggcctggcgtgtctctgaccatgcaagcttttagcgaagaggaacgcaaacagtggctggaagcgcttgggggaaaagaagccttgtcccactcatttaacacagcaataatcccccgacctgaaggtaatgcgcagttagataaaatgggcttcactattatccggaaatgcatttctgccgtggagacaaggggcattaatgatcagggactgtacagagtggtgggagtgtctagcaaagtgcagcggctcctgagcatgctgatggacgtcaaaacatgcaatgaagtggatctggagaacagcgcggattgggaggtgaagactatcacctcggccttgaagcaatatctgaggagcctccccgagcctcttatgacctacgagcttcacggagatttcattgtgccagctaaatcaggaagtcccgaaagccgcgtcaatgcaattcacttcttagttcacaaattacctgagaaaaataaggaaatgctggacattctggtgaagcacctgaccaatgtcagcaatcattcaaagcagaacctaatgactgttgccaacttgggtgtcgtgttcggtccgacactgatgcgccctcaggaggagacagtcgctgcccttatggatttaaaattccaaaatattgtcgttgaaattctgattgagaatcacgaaaaaatctttagaacacccccagacaccaccttccccgagcccacatgtctatcagcttcgcctcctaacgcccctcctcggcaaagcaagcgccagggccagcggactaagaggcccgtggccgtctacaacctctgtctggagttggaggacggagataatccatacccaagcaaagaggatacacccacaagctcgttggactccctctcctctcctagcccggttacaaccgctgtgcccggaccccctggaccagacaagaaccacctgcttgcagatggcggaagtttcggagactgggcaagcactatcccaggccagactcgctcctctatggtgcagtggctgaaccctcagtcgcccaccaccacatctagcaactccgccgtgactcctttgtcacctggctcaagccctttccctttctccccaccggctacagtagccgataagccccctgaatctatcaggtctaggaaggccagagcggtgtacccttgtgaggcggagcactcgtctgagctctcctttgagattggggctatatttgaggacgttcagacgagtagggaacctgggtggctggaaggcacactaaacggcaaaagagggctcatcccgcagaattatgtgaaactcctttag

SEQ ID NO: 238661 - DNA, 1155 bp, synthetic construct
  misc_feature 1..1155: note = Description of Artificial Sequence: Synthetic coding sequence
  source 1..1155: mol_type = other DNA
atgcaggccttctcagaagaggagagaaaacagtggctagaggctctgggaggaaaagaagccctgagtcactcttttaatactgccatcatccccagacctgaggggaacgcccagctggacaaaatgggtttcacaattattcgtaaatgtatcagcgccgttgagacgaggggtattaacgatcaggggttgtatcgggtggtcggggtgagctcaaaagtgcaacgcctgctgagtatgctgatggatgtgaaaacatgtaacgaggttgacctggagaactcagcggattgggaagtcaagaccataacttctgcactgaagcagtacctccggtccctgcctgagcctctcatgacatatgaattgcatggggactttattgtcccagctaagagcggttcgccagagagccgcgtgaatgcaatacatttcctggtgcacaaactcccagagaagaacaaagagatgcttgatattctggtaaagcacctgacgaatgtttcgaaccattcaaagcagaatctgatgacggtggccaatttaggggttgtgtttggccctactttgatgagaccacaggaagagaccgtggccgcacttatggaccttaaattccagaatattgtcgtcgagatcctcattgagaatcacgagaagattttccgcactccacctgatacgacattccccgaacccacatgcttatccgcctccccacccaacgcgccacctagacaatctaaacgtcaggggcagcgcactaaacgccctgtggctgtgtacaacctttgccttgaactggaagacggtgataacccatacccaagtaaagaagacaccccaacatcatcccttgactccctctcctcaccttctcctgtcacaacagccgtgcccggaccccctggacctgataaaaaccacctgctcgctgacggcggatctttcggcgattgggcctccactataattcgatcaaggaaggcgcgagccgtgtacccatgtgaagctgaacactccagcgagttgagctttgaaattggagccatcttcgaggatgtccagacttcaagggagcctggctggttggaggggaccctgaacgggaagcgtggtttgatacctcaaaactacgtcaaactgctgtag

SEQ ID NO: 238662 - DNA, 3072 bp, synthetic construct
  misc_feature 1..3072: note = Description of Artificial Sequence: Synthetic coding sequence
  source 1..3072: mol_type = other DNA
atgtgggatcagcggctggttcgccttgcccttttgcagcatctgagggccttctatggaataaaggttaagggagtgcggggacagtgcgatagacggagacatgagacagcggctaccgagataggaggaaaaattttcggcgtgccattcaacgccttgccccattccgcggtacccgagtatggccatatcccctccttcctggtcgatgcctgcactagcctagaggatcatatccacactgaaggactgttcaggaaaagtggatccgtcatcaggctgaaagcgctcaaaaataaagtggaccacggagaagggtgtctgtctagcgccccaccctgtgatattgccggactgttaaagcaatttttcagagaactgcccgagcctatcctgccagcggacttgcacgaggcattgctgaaggcccaacaactggggacagaggaaaagaataaggccaccctgctcctctcgtgtctcttagccgatcataccgtacatgtgctgcggtacttttttaatttccttcgcaacgtatcactgagatccagcgagaacaagatggactcctccaacttagccgtgattttcgcccctaatttgttacagaccagcgaaggtcatgaaaaaatgtcttcaaataccgagaaaaagctgagactgcaagcggcagttgtgcaaacgttaatcgactacgcttccgatataggccgtgtaccagactttatacttgagaaaattcccgcaatgctcggaatagatgggctatgtgctacaccatctctggagggattcgaagaaggggaatatgaaacacctggggagtacaagaggaaacggaggcaaagcgtcggggactttgtcagcggcgcactgaataagttcaagccaaaccggacacccagcatcaccccacaagaagagcgcatagcccaactgagtgaatctcccgtgatcctcacgcctaacgccaagcggacactccctgtggactcatctcatggattttcttcaaaaaaaaggaagtccatcaagcataacttcaatttcgagctgctgccaagcaatctgttcaacagcagctcaactcctgtttccgtccacatcgatacttcttcagaggggtcctcccagtctagcctttctcctgtgctaattggcggtaatcacctgatcaccgccggagtcccaaggcggagtaaaagaatcgccggtaagaaagtgtgtcgcgtggagtctgggaaagcaggttgcttctctcctaagatctctcacaaggagaaggtccgccgaagcctcaggctgaaattcaacctgggaaagaacggtcgtgaagtcaacggttgttcaggagtcaaccggtatgagtccgtcggctggaggttggccaatcaacagagtctgaaaaatagaattgaatccgtaaagaccggactcctgttctccccggatgtggatgagaagctgcccaagaagggctcagagaagatctctaagtccgaagagaccctgctcactcctgagagactggttggaactaactaccggatgtcatggacaggcccaaacaattcttcctttcaggaagtcgacgctaacgaggctagcagcatggtcgagaatctggaggtcgagaactcactcgaacctgatatcatggtcgaaaagagtcccgctactagttgcgaattgactccgtcaaatctcaacaacaagcacaactctaacattacctcaagtcccttgtcaggcgatgagaacaacatgaccaaggagaccctggttaaagttcagaaggcgttttcagagtccggctccaacttacacgctctcatgaatcaaagacagagttctgtaacaaacgtgggaaaagtcaagttaacagagccttcatatctggaggattcacctgaggaaaaccttttcgaaacaaatgatttgactatcgtggagtctaaggagaaatatgagcaccatactggcaaaggcgagaaatgcttctcagagcgagattttagtccacttcagacacagacattcaacagggaaacgacaatcaagtgttacagcacacaaatgaaaatggagcacgaaaaggatatacatagcaacatgcctaaagactatttgagcaaacaggagttctcctctgatgaagaaatcaaaaaacagcagtctccgaaggataaactcaataataagttaaaggaaaacgagaacatgatggagggaaacctcccaaaatgcgccgctcactcaaaggatgaagccaggtcctccttctcacagcagtcaacctgcgtcgtgactaacctgagtaagccgcgaccaatgcgcatcgccaagcagcagtctttagagacgtgtgaaaaaactgtgtccgaatctagccagatgacagaacatcgcaaagtgagcgatcacatccaatggttcaacaagctgtctttgaatgaacccaataggattaaagttaagagtcctctcaaatttcagcggactccagtgaggcagtctgtgcggagaatcaatagcctcctggaatatagcagacagccaacagggcataaacttgctagcctcggcgacaccgcaagcccacttgtcaaaagtgtgtcatgtgatggggcactcagcagctgtatcgagtcagccagcaaggatagctctgtcagctgcatcaaaagtggaccgaaggagcaaaaatccatgtcttgcgaagagtccaatatcggggcaatctcaaagtcctcaatggaactgccatccaaatcctttttgaagatgcgcaagcacccagatagtgtgaatgcttcacttaggtcgacaaccgtgtacaagcagaagattcttagcgatggtcaggtgaaagttcctcttgacgatttgacaaatcatgatattgtgaaaccagttgtaaataacaacatgggcatatcctccggaataaataatagggtgctaaggcgcccatcagagcggggaagggcctggtacaaaggctcacccaaacatcccataggtaaaacccaactcctccccacgtccaaacccgtggatctgtag

SEQ ID NO: 238663 - DNA, 2505 bp, synthetic construct
  misc_feature 1..2505: note = Description of Artificial Sequence: Synthetic coding sequence
  source 1..2505: mol_type = other DNA
atggacagctccaatttggcagtgattttcgctcccaacctcctgcagacctcagaaggccacgaaaagatgtcatccaacactgaaaagaagctgcgccttcaagctgcagtcgtccagacactgatcgattacgcaagcgacataggcagggtgcctgatttcatactggaaaagatcccagcgatgttgggaatcgatgggctttgtgcaaccccatctctggagggatttgaggagggcgagtacgaaacgccgggtgagtataagcgaaagcgcagacaatcagtgggagattttgtgtccggagctctgaataaattcaagcccaatagaactccctccataacaccacaggaagagagaatcgctcagctgtctgaatcacctgttatcctcactcccaacgccaagaggacactcccagtcgactcctcccatggctttagtagcaaaaagaggaaaagcatcaagcataacttcaactttgaacttctccccagcaacctgttcaactcttctagcaccccagtgtcagtgcatattgacacatcctccgagggatcctcgcagtcctcacttagtcctgtacttattggagggaatcatttgataacggccggtgtccctcgccgttcgaagcgcatcgccggtaagaaggtttgtcgggtggagtcagggaaggcaggatgctttagtcccaaaatctcccacaaggagaaggtgaggcggagcctgcgtttgaaattcaacctgggaaagaacgggagggaggtcaacgggtgcagtggcgttaacaggtatgaaagtgttggatggagactggctaatcagcagtctttaaagaataggatagaatccgtgaaaacgggattactctttagcccagatgtcgacgagaaactaccaaagaagggctccgaaaaaatctccaagagtgaagagaccttactgacacccgaaagattggttggtacaaattaccgcatgtcatggaccggacctaataatagcagctttcaggaggttgacgccaatgaagctagcagcatggtggagaatctcgaggtggaaaattccctagaacccgacatcatggtggagaagtcccctgccacctcgtgtgaattgacgccatccaacctaaataataaacacaattctaacataacctcctccccactttctggagatgaaaacaatatgacaaaagaaacacttgtaaaggtgcagaaggctttttccgagagcggctcgaacctccatgcccttatgaaccaaagacagtcttccgtcacaaacgtcggaaaagttaagctgaccgagccgtcttacctggaggatagccctgaggaaaacctctttgaaaccaatgacctgaccattgtagagtccaaagagaaatacgaacatcataccggaaaaggagaaaagtgcttcagcgagcgcgacttttcccccttacagacgcaaaccttcaatcgcgagacaactatcaagtgttattctacccaaatgaagatggagcacgagaaggacatccactcaaatatgcccaaggattacttgtccaaacaagagttcagcagtgacgaggaaattaagaagcagcaatctccaaaggacaaactgaacaataagttgaaggagaacgaaaacatgatggaggggaacctacccaagtgtgccgcacactcaaaagatgaggctagatcatccttttcgcagcagagtacatgcgtggtcactaacttgtctaagcccagaccgatgcggattgcaaaacaacagtcactcgagacctgcgaaaagaccgtatcggagtcttcgcagatgaccgaacaccgcaaggtcagtgaccatattcagtggtttaataaactgtccctgaatgagcctaatcgcattaaagtcaaaagccccctgaaatttcagcgcacccccgtccgtcagtcggtaaggagaataaacagtctgcttgaatactcacgacagcccacaggacataagctcgcgtcactgggggataccgccagccctttggtgaaatcagtcagctgcgatggagcactgagcagttgcattgagagtgccagcaaagacagcagtgtgagttgtatcaagtccggtcctaaagagcagaagtccatgagctgcgaagagtctaacatcggcgcaatcagcaagtcctccatggaactcccctcaaaatcattcctcaagatgaggaaacaccccgattcagtgaacgcgtctctccggagcacaaccgtttacaagcagaaaattctgagtgacggccaagttaaagtacccctggatgacctaaccaatcacgatatcgtcaagcctgtggtgaataataatatgggtatatcttcagggattaataatagagtgctacggcgtccgtctgagcgcggtagggcctggtataagggctctcccaagcatcctatcggcaagactcagctgctgccaactagcaaacccgtcgacttgtag

SEQ ID NO: 238664 - DNA, 1506 bp, synthetic construct
  misc_feature 1..1506: note = Description of Artificial Sequence: Synthetic coding sequence
  source 1..1506: mol_type = other DNA
atgtgggatcaacgactggtgcggcttgccctgttgcaacacttacgggctttttacgggataaaggttaaaggcgtgcgcggtcaatgcgacaggcgacggcatgagaccgctgcaactgagatcggagggaaaatcttcggtgtgcctttcaatgccttacctcattctgccgttcctgagtacgggcatattccctccttccttgtggatgcctgcactagtcttgaagatcatatacacacggaaggtctgttccggaagagcggatcagtgataaggttgaaagcccttaaaaataaggtggaccatggtgaaggatgcctgagtagtgcacctccttgcgacatcgccggtctacttaagcaattcttcagggaactgcccgagccaattttgccggcagatctgcatgaagcactcctgaaggcccagcaactgggaacagaagaaaaaaacaaagcgacgctcctactgtcttgcctccttgccgaccataccgtacacgtgttacgctactttttcaattttctgagaaacgtgtcccttcgctcttcagaaaataagatggactcctcaaacctcgcagtcatcttcgcacctaacctgttgcaaacatctgaaggccatgaaaagatgagttccaacacagaaaaaaagttacggcttcaagcggcagtcgttcagaccctgatcgattatgccagcgacatcggccgagtgcccgactttattctggagaagatccccgcaatgcttggcattgatggcctttgtgctactccgagtctagaaggctttgaagaaggcgaatacgaaacacctggggaatacaagagaaagaggaggcagtccgtgggtgacttcgtttccggggctctcaacaagtttaaacccaacagaacaccctcaatcaccccccaagaggaacgcatagcccagctttcagagtcccccgtgatcctgactcccaacgctaaaaggactttaccggtcgactcaagccacggcttcagtagtaagaaacgcaagtctatcaaacacaactttaatttcgagcttttgccatcaaatctgtttaactccagtagcacccctgtatctgtacatatcgatacctccagcgagggttcctcgcagtcatctctatctcccgtgctcataggcggtaaccacctcattaccgcaggcgttccaagacgttcaaaaaggatcgcagggaagaaagtgtgtcgcgtggagtcagggaaggcgggttgttttagccccaagatatcccataaagagaaggtgaggcgctctctgcggctgaagttcaacctgggaaaaaatggccgagaggtgaacggatgttcaggcgtgaacagatacgaatccgtaggttggaggctggcgaaccagcagagcctcaagaaccggatagagtcagtcaagactggcctcctgttttcaccagacgtggatgagaagttgccgaaaaaaggaaccttcacctattattgttag

SEQ ID NO: 238665 - DNA, 2385 bp, synthetic construct
  misc_feature 1..2385: note = Description of Artificial Sequence: Synthetic coding sequence
  source 1..2385: mol_type = other DNA
atgaagatggcggatagatctggaaaaattattccagggcaagtgtatatcgaggttgagtacgattatgagtacgaggcgaaggacaggaaaatcgttatcaagcagggggagcggtacatcttggtgaaaaagacgaatgacgactggtggcaagtgaaaccagatgaaaattccaaagccttctacgttcccgcacagtatgtgaaagaagttaccaggaaggctctgatgcctccagtcaaacaggttgctggacttccaaacaactcaactaagatcatgcagagtctgcacctgcagaggtccaccgagaacgtcaacaaacttcccgaactgagttcctttgggaagccaagctcgagtgttcagggaaccggccttatcagggacgcaaaccagaacttcggaccgtcatataatcaggggcagaccgtcaatctttcacttgatctgacgcataacaacggcaaatttaataacgacagccatagtcctaaggtatctagccagaatcggactagatcttttggccatttcccgggaccagaatttctggatgtcgagaaaacgtcattcagccaggagcagagctgtgacagcgccggagagggctcagagcgcattcatcaggattctgagtccggagatgagctcagcagctcctcgacagaacaaattcgggctacgactccccctaatcagggtagaccggatagcccagtctatgccaacttgcaggagctgaaaatatcacagtctgccctgcccccactgcccggttcccctgccatccagataaacggggagtgggagacacataaggatagcagcggccgatgttattactacaaccggggaacacaagagagaacgtggaaacctccacgatggaccagggacgcgtcaatctccaagggcgatttccaaaacccaggggatcaggagtggctcaagcacgtcgatgaccaagggagacagtattattactccgcagatgggagccgatctgagtgggaactgccaaaatacaacgcatcatcacagcagcagagggaaattataaaaagccgcagcctggataggagacttcaggaacctatagtgctgacaaagtggcggcattccaccattgtgctagatacaaacgataaggagagtccaaccgcctccaagccttgttttcccgaaaacgaaagcagcccctctagccctaagcatcaggatacggatcaggaaaaatacggattgctcaacgtcaccaagatcgccgagaatggtaaaaaggtgcgtaagaattggctctcatcatgggcagtcttgcaggggtccagtctgttgtttactaaaactcaggggtccagcacctcctggttcggaagtaaccagtcgaagcctgagtttacagttgacctcaagggagctacgattgagatggctagtaaggacaagtccagcaagaagaatgttttcgagctgaaaaccagacagggaactgaactcctgatccagagcgacaacgacactgtaattaatgactggttcaaggtcctgagcagcactatcaataatcaggcagtggaaaccgatgaggggatcgaagaggagatccccgattctccaggcatcgaaaaacatgacaaagaaaaagaacagaaagatcctaagaagttacggagcttcaaggtgtcaagcatcgactcctcggaacagaagaaaacaaaaaagaacctgaaaaaattcctgacccgacgcccaactctccaggccgtgagagagaaaggttacataaaggaccaggtgttcggctccaacctggcaaatctgtgtcagagagagaacggaacagtacctaagttcgtgaaactgtgtatcgagcatgtggaagagcatggcttggatatagatggtatttaccgcgtaagcggcaacctagctgtcatccagaaactgagatttgctgtcaaccacgatgagaagctcgatctgaatgacagcaagtgggaggacatccacgtgatcacgggggcattaaagatgttctttcgcgagctccccgagcccttatttacatttaaccatttcaacgacttcgtgaatgccatcaaacaggaacctagacagcgggtcgccgctgttaaggacctgattcgacagctgcccaaacccaaccaggacaccatgcagatcctgttcaggcaccttcggagagtgatcgagaacggggagaaaaaccgcatgacttatcaatctatcgccatcgtgttcggtcctaccctgttgaaacctgagaaggaaactgggaatatcgccgttcacacagtgtaccaaaaccagattgtcgagctgattttactagagctgagtagcatttttggtaggtag

SEQ ID NO: 238666 - DNA, 2541 bp, synthetic construct
  misc_feature 1..2541: note = Description of Artificial Sequence: Synthetic coding sequence
  source 1..2541: mol_type = other DNA
atgaagatggccgatcggagtgggaagattatcccaggccaggtctatattgaggtggaatatgactatgagtatgaggcaaaagatagaaagatcgtgataaagcaaggtgagcggtatatccttgtcaagaagacaaatgacgactggtggcaagtgaaacctgacgaaaactccaaggctttctatgtccccgctcagtacgtgaaagaggtcacccgcaaggcactcatgccaccggttaaacaggttgccggtttgcccaataactctacaaaaatcatgcagtctctgcaccttcaacgaagcacggaaaacgttaataagcttcctgaactcagctccttcgggaagcctagctccagcgtacaaggaaccggactgatccgtgatgccaatcagaatttcggcccatcctataatcagggacagacggtgaacctctcgctcgacttaacacataacaatggcaaatttaacaatgacagccactctcctaaggtgtcaagccagaatcgtaccaggagttttggtcatttcccaggacccgaattcctcgacgtcgagaaaacctctttttcacaagaacagtcatgtgatagcgccggtgaaggtagcgagagaatccatcaagacagcgagagtggtgatgagttatcttcctcgtcaactgagcagatccgagcaacaacaccccctaaccagggcagacccgattctccggtctacgctaacctgcaggagcttaagatctcccagtcagctctcccacccctgcctggctctcctgctattcagataaatggggagtgggagacacacaaggattcctcaggccgatgctattattacaacagggggactcaggagcgcacttggaaaccccctagatggactcgcgacgccagtatcagcaaaggagactttcagaaccccggagaccaggaattgcttagctctgaggaaaactattattccacctcatactcccagtccgactctcagtgcggatcgccccctcgaggttggtccgaagaactggacgagcgagggcatacactctacacatctgactataccaatgagaagtggttgaagcacgtggatgatcagggccgacagtattactacagcgctgatggctctcggtctgagtgggagcttcctaagtataatgcatcctcccagcagcaaagggagattatcaaatcccgctcattggatcgtcgcctgcaggagcctatcgtgctcacaaagtggcggcactcaacaattgttctggacacaaatgacaaggaatcgcctaccgctagtaagccttgtttccctgagaacgagagttcaccttcaagtccaaagcatcaggatacggcgtcatcacccaaggatcaggaaaaatacggactgttgaacgtcacaaaaatagccgaaaacggcaagaaggtaagaaaaaactggctaagctcttgggccgtgttacagggttcgagccttctgttcacaaagacccagggctcatcaaccagctggttcggctctaatcagtctaagcctgaatttaccgtggatctcaagggggctaccatcgaaatggcttctaaagacaaaagctcaaaaaaaaatgtattcgaactgaagacccggcaaggaacagaacttcttatccaatcagacaatgacaccgtgatcaatgactggtttaaggtgctttcgagtacaattaataatcaggcagtggagacagatgaaggcatcgaggaggagatccctgactccccaggaattgagaagcacgataaggagaaggaacagaaagatcccaaaaagctccggtcatttaaggtgagctcgattgacagcagcgaacagaagaaaacgaaaaaaaacctgaaaaaattcctgactcgccgtcccactctccaagcagtccgtgaaaaggggtacattaaggaccaggtgtttggatctaacctggccaacctttgccagagggaaaacggcaccgtccccaagtttgttaagctttgcattgagcatgttgaggagcacggccttgacatcgacggaatttaccgagtctctggcaatctggctgtcatacagaaattgcggttcgcggtgaaccacgatgagaagctagatctaaatgatagcaagtgggaggatattcacgtaatcactggagccctaaaaatgttttttcgcgaactccctgaaccattgtttacctttaatcatttcaacgactttgttaatgccattaagcaggagcccaggcagcgggtcgccgctgtgaaggacctcatcaggcagcttcccaagcctaatcaggataccatgcagattctgttccgtcacttacgtagagtcatagagaacggcgaaaaaaaccgcatgacttatcaaagcattgcaatcgttttcggcccaaccctgctgaagcccgaaaaagagacaggaaatatcgcagtgcacactgtttaccagaaccagatcgtggagctgatcctcttggaactctcatccatctttggcaggtag

SEQ ID NO: 238667 - DNA, 2385 bp, synthetic construct
  misc_feature 1..2385: note = Description of Artificial Sequence: Synthetic coding sequence
  source 1..2385: mol_type = other DNA
atgaaaatggctgacagatccggcaagatcatccctgggcaggtgtacatcgaggtggaatacgattatgagtatgaggctaaggatagaaagatcgtcattaagcagggcgagcgttatattttagtcaagaagaccaatgatgattggtggcaggtaaagcccgatgaaaacagcaaggctttctacgtcccagctcagtatgttaaggaggtgaccagaaaggcgctgatgccaccagtgaaacaggttgccggacttccaaacaacagcacaaaaataatgcaatcccttcacctgcagcgctctaccgagaacgtgaacaagctgcccgaattaagtagcttcggtaaaccttccagctccgtccagggcaccggactgatccgggacgccaaccagaacttcggcccttcctacaaccaagggcagaccgtaaacctctcactggacctgacacataacaacggaaaatttaataacgatagccattctcctaaggtctcctcacagaatagaacgagatccttcggacactttccgggaccagagttcctcgacgtcgagaagacttcgttttctcaagaacagagctgcgactctgcaggcgaaggaagcgagcggattcaccaagactccgaatcgggtgacgagctctcatctagctctacagagcagattcgggcaacaacgccaccaaaccagggccgacccgacagccccgtttacgccaacttgcaggaactaaagattagccaatctgcgcttcccccactacctggcagccccgctattcagattaacggggagtgggagacgcataaagatagcagtgggaggtgctactactacaaccgaggcacacaagagaggacctggaaaccaccaaggtggacccgcgatgcgtctattagcaagggcgactttcagaatcctggagatcaggagtggctgaagcacgtggatgatcaaggtcgtcagtactactattcagctgatgggtcgcgcagcgagtgggagctcccaaagtacaatgcgtctagccagcagcaaagggagatcattaagtcaagaagtctagatcgacgcctccaggaacccattgtcttaacaaagtggcgccactccacgatcgtactcgatactaatgacaaagagagccctactgcatcaaaaccatgtttcccagagaacgagagcagcccatctagtccgaagcatcaggacacagaccaggagaagtatgggctactaaacgttacaaaaatcgctgagaacggtaagaaggtccgaaaaaactggttatcgagttgggcagtgttgcaaggctcttcattgctctttaccaaaacccaggggtcatccacgtcttggttcggatctaaccagtcgaagccagagttcacagtggatctgaaaggcgcaaccatcgaaatggcttcaaaggataagtcttctaaaaaaaatgtgtttgagctcaagacacgacaggggaccgagctcctaatccaatccgataacgatactgtcattaacgactggtttaaggtgctgtcctccacgatcaacaaccaagccgtggagacggacgaagggatcgaggaagagatcccagatagtcccggtattgaaaaacatgacaaagagaaggagcagaaagatccgaaaaaactacggtccttcaaagtatcttccattgacagtagcgaacagaaaaaaacaaagaagaacctaaagaagttcctgacaagacgtccgaccctccaagctgtcagggaaaaaggttacatcaaagatcaagtgttcggtagcaatctggcaaacctgtgccaacgggagaatggcacggtccccaaatttgttaagttgtgcatcgaacacgtggaagaacatggcttagatattgatggaatctacagggtgagcggaaacctggctgtgatccagaaactgagattcgctgtaaatcatgacgaaaaattggatctaaatgacagtaaatgggaagacatccacgtaatcactggtgcccttaagatgttttttagggagttgcccgagcccctctttacatttaaccacttcaatgacttcgtgaatgcaattaaacaggagccgaggcagagagtggccgctgtaaaggatctgatacgtcaattgcccaagccaaaccaagataccatgcagatcctgtttagacatctgcgccgagtcatcgagaacggcgagaaaaatcgcatgacttatcaaagtattgcaatagtttttggaccgaccctcctaaaacctgaaaaggaaacgggcaacatcgcagtccacacagtctatcagaatcagatcgttgaactcattctgctcgaattgtcatccatcttcggaagatag

SEQ ID NO: 238668 - DNA, 2451 bp, synthetic construct
  misc_feature 1..2451: note = Description of Artificial Sequence: Synthetic coding sequence
  source 1..2451: mol_type = other DNA
atgaagatggcagataggagtggaaagatcatccctggccaggtgtacatcgaagtggagtatgactacgagtatgaggcaaaagatcgtaaaatcgtgatcaaacagggagaacgctacatcctcgttaagaagaccaatgacgattggtggcaggtgaagccagacgagaactctaaagccttttacgtacccgcacagtacgtgaaggaggtaactagaaaggccctcatgcctccagtgaaacaggtcgctggccttcctaataacagcacgaagattatgcagtcacttcaccttcagcgctcaacggaaaatgtgaacaagctgcccgaattatccagttttggcaaaccaagcagctcagtacagggtaccggtctcatcagagacgcgaaccagaacttcggaccctcctataaccagggccagactgtaaacctgagcttagatttaacccacaataacggaaagtttaacaacgatagccactcccccaaagtgtccagccagaaccggactcgctccttcggccatttccccggtcccgaattcctggacgtggaaaaaacaagcttctcacaggagcagtcctgcgactccgccggtgagggctccgaaaggatccatcaggactccgagagtggagacgagttgtcctcctcatccaccgaacagatccgcgctactacaccccctaatcagggaagacctgattctccagtatacgctaacctccaagaactgaaaatcagccagtctgcgctccctcctctgcccggaagtccagctatccagattaacggagagtgggaaacgcataaagacagttcgggcagatgctattactacaacaggggcacgcaggaacgcacatggaagccacctcgctggacaagagatgccagcatttcaaagggggattttcagaacccgggagaccaggagctgctgtcctccgaggaaaattactatagtactagttatagtcagagcgactcccaatgcgggtctccccctcgaggctggtccgaagagctggatgaaagaggtcacaccctttataccagcgactacaccaatgaaaagtggcttaagcacgttgacgatcagggcagacagtattactactcagccgacgggtcgcgatcggaatgggagttgcccaagtataatgctagcagccagcagcagcgtgaaatcatcaagagccggtccttagatcgcagactgcaggagccaatcgtgctgactaagtggagacacagcactatcgtgcttgacaccaacgacaaagaccaagaaaagtatggcttactcaatgtcaccaaaattgcggaaaatggcaagaaggtgaggaagaactggcttagctcctgggcggtactccaggggagctcactcctgttcaccaagacccaggggtcttcaacctcttggttcggaagcaaccagtctaaaccagagtttacggtcgatctgaaaggtgcaaccattgaaatggcatcaaaggataaaagctcgaaaaagaacgtttttgaactgaaaactcgccagggcacagagttattgatccagtctgataatgataccgtgataaacgattggttcaaggtgctgagttcaactattaataaccaagcggtagaaacagacgagggaattgaggaagaaattcccgattcacctggtattgagaagcatgataaagaaaaagagcaaaaggatccaaagaagctgaggagctttaaggtgtcgtccattgactcaagcgaacagaagaaaaccaaaaagaatttgaaaaagttcctgaccagacgccctacattacaggcagttagagagaaaggttacattaaggaccaggtgtttggcagcaatctggccaacctttgtcagcgagaaaatggaaccgtcccaaagtttgtgaagctgtgtatcgagcacgtggaggagcacggcctcgatatagatgggatttatcgagtgtcaggaaatctggcggtgatccagaagttaagatttgccgtgaaccacgatgaaaagttggacctcaatgattccaagtgggaagacattcatgtgatcacaggggctctgaaaatgttcttcagggaactgcccgaacccctcttcaccttcaatcactttaacgacttcgtgaacgccatcaagcaagagccccgacaacgagtggctgcagtaaaagatttaatacgacagctccctaagccaaaccaagatacgatgcagattctgtttcgccatctgcgccgtgttattgagaacggtgagaaaaaccggatgacgtaccaatctattgcaatcgtgttcggacctacactgctgaagccagagaaagaaaccgggaatatcgccgtgcataccgtgtatcaaaatcaaatagtcgaactgatcctccttgagctgtcatcaatctttggcagatag

SEQ ID NO: 238669 - DNA, 2526 bp, synthetic construct
  misc_feature 1..2526: note = Description of Artificial Sequence: Synthetic coding sequence
  source 1..2526: mol_type = other DNA
atgaagatggccgatagaagcggaaagatcattccaggtcaagtgtacatcgaagtggagtatgactacgagtacgaggcaaaggatcgtaaaattgtaatcaaacaaggcgaaaggtacattttagtgaagaagaccaacgacgactggtggcaggtgaagccagacgaaaattctaaggctttttacgttccagcccagtacgttaaagaagttactaggaaggccctgatgcccccagttaagcaggtagccggtctgccaaataattcaaccaagataatgcaaagtttacacctgcagcgctccaccgaaaacgtgaacaagctcccagaattaagcagctttgggaagcctagctcttccgttcagggcacaggactaattcgcgatgccaaccaaaactttggaccctcttacaatcaaggccaaacggtgaatcttagcctggacctgactcataacaatgggaagtttaacaatgactcacattcacccaaggttagctcccagaaccgcacaaggagctttgggcactttcctgggccagaatttctggatgtggaaaaaaccagcttctcccaggaacagtcatgcgactcagcaggggagggatcagaacgcatccaccaggactccgagagtggggatgagctgtcctcaagctctactgagcagatcagggcaaccacaccgccaaatcaaggccgtccagacagccccgtatacgcaaacctccaggagctgaagatttcccagagcgcactcccaccactacccggtagtcctgccatacaaatcaacggcgaatgggagacccacaaggatagcagcggcaggtgctactactacaaccgaggcacacaggaacgaacttggaagccacctaggtggactcgcgatgcttccataagtaagggcgatttccagaacccgggagaccaagaactgctgtccagtgaggaaaactactacagtacttcctactcccagagtgacagtcagtgcggttcaccgccaaggggctggtctgaagagctggatgagcgagggcatacattatacacctcggactacacaaatgaaaaatggctaaaacacgttgacgaccagggcagacaatactattactccgccgacggctctaggtcagagtgggaacttccaaagtataatgcctcatcccaacagcagcgagagatcatcaagagccgaagcctggatcgcagactgcaagagcccatcgtcctgaccaaatggaggcactccactatcgtactagacactaatgataaagaatcacccacagcaagtaaaccttgttttcctgagaatgagtccagtccttccagccccaagcaccaggacactgaccaggaaaaatacggactgttaaatgtcactaagatcgctgagaacgggaaaaaagttagaaaaaattggttatcctcttgggcagtcctgcagggatccagcctcctcttcactaaaacacagggaagttcgaccagctggttcggaagtaaccaatctaagcccgaattcaccgtggacctaaagggggcaaccattgagatggctagcaaggacaagtcatccaaaaagaacgtgttcgaactgaaaacccgacagggcaccgaactactcatccagtccgataacgatacagtgattaacgattggtttaaagtcctgagctcaaccataaacaatcaggccgtggagacagacgaaggcattgaagaagagatcccagacagtcccggaatcgagaagcacgacaaggagaaggagcagaaggatcctaagaaactacggagttttaaggtttcttctattgatagctccgaacagaaaaaaacaaaaaagaacttgaagaaatttctgactcggaggcctacgctccaggctgttagggaaaagggttatattaaagatcaagtatttggatcaaacctggctaatctatgtcagagagagaacgggaccgtccctaagtttgtgaaactgtgcatcgaacatgttgaagagcacggtcttgatattgacggcatctacagggtgtcaggcaatctggccgtaattcagaagctgcgatttgccgtaaaccatgatgagaaacttgacttgaacgatagcaaatgggaagatattcacgttatcaccggagcccttaaaatgtttttccgtgagttgccagagcctctcttcaccttcaaccattttaatgacttcgtgaatgccattaaacaggaacccagacagcgcgtggccgctgtaaaagatctgattaggcagctgcctaaaccaaatcaggacaccatgcagatcctgtttcgacacctcagaagggtcatcgagaacggagaaaagaaccggatgacctaccagagcatcgcaatcgtgttcgggccaacactgctgaagccagagaaggaaaccgggaatatcgccgtgcatacagtgtatcagaaccagattgtcgaactgatcctcctcgagttgagttcgattttcggcagatag

SEQ ID NO: 238670 - DNA, 591 bp, synthetic construct
  misc_feature 1..591: note = Description of Artificial Sequence: Synthetic coding sequence
  source 1..591: mol_type = other DNA
taaagcacgagctacagccaaagcgactctcaatgtgggtctccacccagagggtggagtgaagaattggatgagcgagggcatactctgtatacgagtgactataccaacgagaaatggttgaagcatgtggacgaccagggtcgccagtattattactccgcggacggttccaggtcagagtgggagctccctaagtataatgcctccagtcagcagcagagggaaattatcaaatccagatcattggataggagacttcaggagcctattgtcctaactaaatggaggcatagcacgattgtgctggacacgaacgataaggaaagcccaacagcctccaaaccatgctttcctgagaatgagtcaagtccttccagccccaagcatcaagataccgatcaggaaaaatacggcttactgaatgtaactaagatcgccgaaaatggtaagaaggtacggaagaattggctctcttcatgggccgtgcttcagggtagttctttattgttcaccaaaacccagggctcctctacgtcatggtttggttctaaccaatccaagccggagtttactgttgacctaaagtag

SEQ ID NO: 238671 - DNA, 2646 bp, synthetic construct
  misc_feature 1..2646: note = Description of Artificial Sequence: Synthetic coding sequence
  source 1..2646: mol_type = other DNA
atgaagaagcaattcaatcggatgaagcagttggctaatcagacagttgggagagccgagaagacggaagtgctatcagaggacctgcttcaaatagaaagacgtctggatacggtcaggagtatttgtcaccattcgcacaagcgcctggtggcctgtttccaaggtcagcatggcactgatgccgaaaggaggcataaaaagctgccattgacagctctagcacaaaacatgcaggaagcttctacacaactggaggatagcctgttgggcaaaatgttagaaacctgcggggatgctgaaaaccagctggctctggagttatcccagcacgaagtgtttgtcgagaaagagatcgtagacccattgtacggtatcgctgaagttgaaattccaaacatccagaagcaaaggaagcagctggcccgtttggtcctggactgggactcagtgagggctcgttggaaccaggcacacaagtcaagcggtacgaattttcagggactgccatctaagattgatactctgaaggaggagatggatgaagccggtaacaaagtggaacagtgcaaggatcagctcgccgctgacatgtacaatttcatggccaaagagggcgaatatggcaagttctttgttacactcctcgaggcacaggctgattatcatcgcaaggccctagctgtgctcgagaagaccctgcccgaaatgagggcccaccaggataaatgggccgaaaagcctgcgttcggtaccccattggaggaacatttaaaacgctccggacgtgaaatcgccctaccaatcgaggcctgtgtgatgctcctccttgagaccggtatgaaggaagaggggttgttccgaattggcgctggggcttccaaattaaaaaaactgaaagctgcattggattgtagtacctctcacctcgatgagttctacagcgatccccatgctgtggcaggcgcactcaagtcatatcttagggagctgcccgagcccctgatgaccttcaacctttacgaggagtggactcaggtcgcgtccgtccaggatcaagacaagaaactccaggacctctggcgtacatgccagaaacttcctccgcaaaacttcgtgaattttcgttacctgattaaattcctggccaagcttgcacagacttcagatgtgaacaagatgacaccatctaacattgccatcgtcctcggcccaaatcttctctgggcgcgaaatgagggcacactcgctgagatggcggctgctacaagcgtgcatgtcgtcgcagttattgaacccatcatacagcacgccgattggttctttccagaagaggtggaatttaacgtttctgaggccttcgtgcctctgaccacccctagctcaaaccactctttccacactggaaatgattcagacagtggaaccctggaacggaagcggccagcctccatggcagtaatggaaggggacctggttaagaaagaatcgtttggggttaaactgatggacttccaggcacatcgaagggggggtacgttgaatagaaaacatatcagccctgcctttcagccacctctgcccccaactgacggcagtacggtggttcccgctggccctgaacccccaccacagagcagccgcgctgaatcttcatccggtggaggaaccgtgcctagcagtgccggaattctggagcagggaccaagtccaggagatggatctccacctaagcctaaggaccctgtttcagcggcagtacccgctcccggacgaaataactcacaaatcgccagtggacagaatcagccacaagctgccgcagggtcccaccaactttctatgggacaaccacacaacgccgctggaccctcccctcacaccctgcgcagggccgtcaagaagcccgcacctgcccctcccaagccgggaaaccctcccccaggccacccagggggacagagtagctctggaaccagtcagcaccctccaagcttaagccctaaacccccaactaggagcccatctcctcccacccagcataccggccaacctccaggacagccatcggcaccttcccaactatcagcacctcgacgctacagttcgtctctcagcccaattcaggcgccaaatcacccgccaccccagccgccaacacaggccacacccctgatgcacacaaaacctaattctcaaggccctccaaatcccatggcgctcccaagcgagcacgggctggagcagccaagtcataccccgccacagacaccgacacccccttcaaccccgccattgggcaaacaaaaccccagcttgcctgctccacagacccttgcgggaggtaaccccgaaaccgcccaacctcatgctggcacgctgcccagaccgaggcctgtcccgaagccgagaaatcgcccttccgtgcctcctccccctcagccacctggcgtccacagcgccggtgattcatcactgaccaatacggcccctaccgcgagcaagatcgtgacggatagcaatagcagggtgtcagagccccaccgatcgatttttcccgaaatgcatagtgactccgcctccaaggacgttcccggtagaatcctgttagacatcgacaacgatacagagagcacagcactttag

SEQ ID NO: 238672 - DNA, 2412 bp, synthetic construct
  misc_feature 1..2412: note = Description of Artificial Sequence: Synthetic coding sequence
  source 1..2412: mol_type = other DNA
atgaaaaagcagtttaacagaatgaaacagctggctaaccagaccgtcggacgggctgaaaaaactgaggtactgagcgaggacctccttcagatcgaacggagactggataccgttagaagtatctgccatcattcacacaagagactggttgcatgttttcagggtcagcacggaaccgatgccgagcggagacacaaaaagctgccactcaccgcactggcccagaacatgcaggaagctagcacccagctggaggactccctgctcggcaaaatgcttgaaacctgcggggacgctgaaaatcagcttgcactagagctatcacaacatgaagtgtttgtggagaaggagatcgtggatcccttatacggaatagctgaggtggagatccctaatattcagaaacagcgtaaacaactggctagactggtgttagattgggatagcgtgagagcacgttggaatcaggcccataaatcatctggcacaaactttcagggcctgccaagcaaaatagatacattgaaagaggagatggacgaagccggaaataaggtggagcagtgcaaagatcaacttgctgctgatatgtacaactttatggctaaggagggcgaatatgggaaattctttgttactctgctggaagctcaggctgattatcacaggaaggctctagctgtcctggaaaaaactcttcccgagatgagggcacatcaagataaatgggccgaaaagcctgcctttggcacccctctggaggagcaccttaaacgctccgggagggagatcgcactccccattgaagcctgtgtgatgctgctcctggaaacaggtatgaaggaagagggactgtttaggattggggcaggcgcatcaaaattaaagaagctgaaggccgctctcgactgctccacttcacacctggatgagttttattccgatccccatgctgttgccggagcactcaagagttatctgcgtgaactgcccgagccgctcatgacctttaacttgtatgaggagtggacgcaggtggcatccgtccaggaccaggacaagaaattgcaggacctgtggagaacgtgtcagaagcttcctccacagaactttgttaactttaggtatctaattaagttccttgcgaaactcgcacagaccagtgatgtcaataagatgacaccctcgaatattgccatagtactgggccctaatctcctctgggcgagaaatgagggcactctggctgagatggccgctgctacttccgtccatgtggttgccgtcatcgagccgataattcaacatgcagattggttcttccccgaggaggtggaatttaacgtatccgaggccttcgtgcccttgaccaccccctcttcaaatcacagtttccacaccggaaatgattcagactctggcacactggagcggaaaagacccgcatcaatggccgtgatggagggagacttggtcaagaaagaaagcccacccaaaccaaaagatccagtatctgccgcagtgccggctccgggtcgcaacaactctcagattgcctctggccaaaaccagccccaggctgccgctggaagccaccagttgtctatgggccagccacacaacgctgccggaccgtccccccatactctccgaagagccgtgaaaaaacccgctcctgcaccaccaaagcctggaaacccccctccaggtcatccgggaggccagtctagctccggaacctcacaacacccaccttcactttcacccaaaccccctaccagatccccatcaccacctacccagcataccgggcagccccctgggcagccatcggccccttctcagctcagcgcgcctaggcgatacagcagcagcctctctcctatccaggctcccaaccaccctccccctcaaccgcctactcaagcaactccgctcatgcacaccaaaccaaactcgcaaggtccccctaacccgatggccctgcctagtgaacacggcctggagcagccttcccataccccaccgcagacccctacccccccatccacaccaccactgggcaaacagaacccatccctccctgcacctcagacgctggctgggggaaatcccgaaaccgcccagccacacgccggtactctccctcgacccagacctgtacccaaacctcggaaccgtccctctgtcccgccacccccacagccacccggtgtacatagcgccggtgactcctcactcacaaacacagctcccacggcgtctaagattgtgactgattctaattctcgggtatcagagcctcaccgctccattttccctgaaatgcacagcgattctgcctccaaggatgtgcctggacgcatcctgttagacattgacaacgatactgagagcactgccctgtag

SEQ ID NO: 238673 - DNA, 681 bp, synthetic construct
  misc_feature 1..681: note = Description of Artificial Sequence: Synthetic coding sequence
  source 1..681: mol_type = other DNA
atgaaaaaacagttcaataggatgaaacagctcgccaaccaaaccgtggggagagccgagaagaccgaagttcttagcgaggacctcctccagatcgagcgcagactggacaccgttcgatccatctgccaccacagccacaagaggctggtggcatgcttccaggggcagcatggcaccgatgctgaacgcagacacaagaagttacccttaaccgccttagcccaaaacatgcaggaggcttcaacccagctggaggattctctcttgggcaaaatgctggaaacctgcggtgacgcagagaatcagttagccttagagctttcccagcacgaagtgttcgtggagaaagagatcgtcgaccctctttatggcatcgccgaggtggagattcccaatatacagaagcagcgcaagcagctcgcgcgtcttgtgctggattgggactcagtccgggctagatggaaccaggcccacaagtcgtctggcacaaacttccaaggcctccccagcaaaatcgacacactgaaggaggaaatggacgaggccggaaacaaagtcgagcaatgcaaagatcagctggcagcagacatgtacaatttcatggccaaggagggggagtacggcaagttctttgttacaatctccggcaggaagaaccaacccctgggactcccttag

SEQ ID NO: 238674 - DNA, 2523 bp, synthetic construct
  misc_feature 1..2523: note = Description of Artificial Sequence: Synthetic coding sequence
  source 1..2523: mol_type = other DNA
atgaaaaaacagttcaacagaatgaaacagctcgccaatcaaacagtgggacgtgccgagaaaactgaggtcctgtccgaggacctgctgcagattgaacggcgattggacaccgtccgcagcatttgtcaccactcacataagcggctggtcgcctgcttccaaggacagcacggaacagatgccgagaggcgccataagaagctcccactgacagccctcgcccagaacatgcaggaagcctcaacccaactggaagattctctcctcggcaagatgctagagacatgtggagatgctgagaatcagcttgcgctggagctcagccagcacgaggtcttcgtggaaaaggagatcgttgatcctttgtacggcattgctgaagtcgagattccaaatatccagaagcagagaaaacaacttgccaggctcgtattagactgggatagcgtgcgcgctcgatggaatcaggcccacaagagcagcggaactaacttccagggcctccccagcaagatagacaccctgaaagaggaaatggacgaggctgggaacaaggtcgagcagtgtaaggaccagctggcagctgatatgtataacttcatggctaaagagggcgagtatgggaagtttttcgtaactttgttggaagcgcaggcggattaccatcgtaaagcattagccgtgctcgagaaaactcttcctgagatgagagcccatcaggacaaatgggccgagaaacccgcatttgggactcccttggaggaacatctgaaaagatccggcagggagatcgcactgcctatcgaagcctgcgtgatgctgttactggagaccggcatgaaagaagaggggctctttaggatcggcgcaggtgcttctaaactgaaaaaacttaaagccgctctggattgctccacatcgcacctggatgagttttatagtgacccgcacgccgtggcaggtgccctaaagagctatcttcgcgagctccctgagcccctcatgaccttcaatctgtacgaagaatggacccaggtcgcctctgtacaggatcaagataaaaaacttcaggacctatggagaacatgccaaaagttaccaccccagaattttgttaatttcaggtatctgattaagtttctcgccaagcttgcacagacatccgatgttaacaaaatgaccccaagtaatattgctatcgtgttgggccctaacctcctgtgggcgcgtaatgagggtacactggccgagatggctgctgccacatccgtgcacgtcgtggccgtaattgaaccaataattcagcatgccgattggttcttccctgaagaagttgagttcaatgtgtccgaggcttttgttcccttgacaacccctagcagcaaccactcattccacacaggaaacgacagcgactcaggcacactcgagaggaagcggccagcatccatggcagtcatggaaggagaccttgtgaagaaagagtctttcggcgtgaagcttatggactttcaagctcacagacgtggcggtacgctcaataggaagcacatttccccagcattccagcctcccctgccaccaaccgacggaagcacagtggtgcctgctggcccagagccccctccgcagagcagcagagcggagagttctagcgggggtggcactgtgccctccagtgcgggaatcctagagcagggtccaagccctggcgacggcagccctcccaaacctaaggatcctgtgtcagcagccgtaccagcacctggcaggaataattcccagatagcatccggccagaaccagcctcaagccgctgccggatcccatcaattaagtatgggccagccccacaacgctgccggaccctcaccacacactttgcgcagagctgtcaaaaaacccgctcctgccccacctaagccgggaaatccccctcccggacatccaggaggtcagagtagctctggcactagtcaacacccaccaagtttatctcctaaacctcctacacgaagcccttctcctccaacacagcatacaggacagccccctgggcagccgtccgccccaagccagcttagtgccccaagacggtattcatcaagtctgtctcccatccaggcaccaaatcaccctccacctcagccccctacacaggccacccctttaatgcacaccaaacctaactctcagggaccacccaacccgatggccctaccttcagagcatgggctggagcaaccatcacacacccctcctcagacccccacaccgccatccacaccacccctgggtaagcaaaatccctcactgccagcaccacagactctggcagggggtaacccagaaaccgcccagcctcatgccggtaccctcccacggcctagaccagtaccaaagccaaggaaccggcctagcgtgccgcctcctccacagcctcctggggtccactccgcaggcgactcctccctgactaacactgcgccaactgcgagcaaaatcgtaacaggtgtgtag

SEQ ID NO: 238675 - DNA, 1992 bp, synthetic construct
  misc_feature 1..1992: note = Description of Artificial Sequence: Synthetic coding sequence
  source 1..1992: mol_type = other DNA
atgtcttggctgagctcttctcaaggtgtggtgctgaccgcgtaccatcccagcggtaaggatcagaccgtcggaaacagtcacgccaaggccggagaggaggctacaagcagcagaagatatggacagtatactatgaaccaggaaagcactaccatcaaggtgatggagaaaccgcctttcgaccggtccatctcccaggacagcctggacgaactgagcatggaagactactggatcgagttggaaaatatcaaaaaaagttcagaaaactcacaggaagaccaggaagttgtcgtagtcaaggagcctgacgaaggcgaactagaggaagaatggttaaaggaagcaggcctaagcaacctatttggggagagtgctggcgaccctcaagagtccatcgtgtttctgtctactctgactcggacccaggccgctgccgtgcagaaacgcgtggaaactgtgtctcagacactgcgtaagaagaacaagcagtatcagataccagatgtgcgagatatcttcgcccaacagcgcgagtcaaaggagacggcgccaggagggacggaaagccagtcgctgcgcaccaacgaaaataagtaccaaggtcgcgacgacgaagcgtccaaccttgtgggggaagagaaactgatccctccagaagaaacccctgcccctgagactgacatcaatttggaagtttcattcgccgagcaggcgttgaatcagaaagaaagctccaaagagaagatccagaagtctaaaggggacgacgcgacactgccatccttccgacttcccaaggataagacgggtaccactcgaattggcgatttagcgccacaagatatgaaaaaagtgtgccatctggcactcatcgaactgactgctctgtacgacgtgctcggcatcgaactcaaacaacagaaggccgtgaaaataaaaacaaaggactccgggctgttttgcgtgcctctaaccgctctcttagagcaggatcagaggaaagtgccaggcatgaggataccactgatattccaaaagctgatcagccgcatagaggagcgtggattggaaaccgagggcctgctgagaatccctggagccgctattagaattaagaacctttgccaagaactggaagctaagttctatgaagggactttcaattgggaatccgtgaagcagcacgatgccgcttctctcctcaaactgtttattagggagctaccccagcctctcttatctgtggaatacctgaaggctttccaggcagttcagaacttgcccactaaaaaacaacagttgcaggcccttaatcttctagtgattcttttgcccgatgccaatagggacacactgaaggccctgctcgaattcctgcaacgcgtgatagacaacaaggagaaaaacaagatgacagttatgaatgttgccatggttatggctccgaacctgttcatgtgtcacgcactaggactgaaatcctcggaacaaagggaatttgtgatggctgccggtacagcaaatacgatgcacctgctgattaagtaccagaagctgctctggacaattcccaagttcatagtcaatcaggttagaaaacagaacacagaaaaccacaagaaggataaacgggctatgaaaaagctcttaaaaaaaatggcctatgatcgagagaaatatgagaagcaggataagagtacgaacgacgcagatgttccacagggagtgatacgggtgcaagcccctcacctgagcaaggtctcaatggctatccagctgactgaggagctaaaggcctctgatgtgttagcccgttttttgagtcaagagtctggcgtggctcagactctgaagaagggcgaagtgtttctgtatgagattggcggaaatatcggagagaggtgcctggatgacgacacttacatgaaggacctgtaccagctgaatcctaacgccgaatgggttattaaatcaaaacccctgtag

SEQ ID NO: 238676 - DNA, 1857 bp, synthetic construct
  misc_feature 1..1857: note = Description of Artificial Sequence: Synthetic coding sequence
  source 1..1857: mol_type = other DNA
atgaatcaggaatccacaaccattaaggtcatggagaagccccctttcgaccgcagtatcagccaggacagcctcgacgagcttagtatggaggactactggattgaactggagaacatcaagaaaagttccgaaaattcacaggaggatcaggaggtggtggtggttaaagaaccggatgaaggcgagctggaagaggaatggcttaaagaggccggtctgtccaatctgttcggcgaaagcgccggtgatccgcaggaatccattgtgttcttgtcaacccttactcggactcaagctgccgcagtgcagaaacgggtggagactgttagtcagactttgcggaagaaaaataaacagtatcagatcccagatgtgcgagatatctttgctcaacagcgagagtctaaggaaacggctcctgggggtacggagtcccagtccctgcggactaatgaaaataaataccaagggcgagatgatgaagctagcaatcttgtcggcgaagagaagctcatccccccagaagaaactcctgccccagagactgacatcaatctggaggtctcatttgcagagcaggctctgaatcagaaagagagttccaaggaaaaaattcagaagtcaaagggagacgacgctactttaccttcctttcgcctgccgaaagacaagacaggtactactcggattggcgacctggctccacaggatatgaagaaggtgtgccacttggcactgatcgaattgaccgctctgtatgatgtcctcggcattgagttaaagcaacagaaagccgtgaagatcaagacgaaagacagtggactcttttgcgtccctctgacagccctcctggagcaggaccaacgaaaggtacccggtatgcggatccccctgatattccagaagctgatttcaaggatagaggagcgaggactggaaacggaagggttgcttcggattccaggtgcagcgatccggattaagaacctgtgccaggaacttgaggctaaattctatgaggggaccttcaattgggaaagcgtgaaacaacacgacgccgctagcctgttaaagttgtttatcagggagttacctcaacccctgctgtccgtggagtacctcaaagccttccaggcggtacaaaacttgccgaccaaaaaacagcagctgcaggccctgaatcttctcgtaatcctccttcctgatgccaaccgcgacacactcaaggcactattggagtttttgcagcgggtcatcgacaataaggaaaagaacaagatgacagtgatgaatgtggccatggtaatggcccctaatcttttcatgtgccatgccctgggcctgaagtcctctgagcaacgggagttcgtaatggccgcaggcactgccaatactatgcaccttttaataaaataccaaaagctgctctggacaattccgaagttcatcgtgaaccaagtgcgtaagcagaatacagagaaccataaaaaggacaagcgggctatgaaaaagctgctgaaaaagatggcttatgaccgggagaaatacgaaaagcaggacaaatctacaaacgatgccgacgttcctcagggcgtcatacgagttcaagcacctcatctgtcaaaagtgtcgatggctatacagctgactgaggagctcaaggcgagcgatgtgctggctcgattcctcagccaggagtccggagtggctcagactctgaagaagggagaagtttttctgtatgaaatcgggggaaatatcggagagagatgtctggatgacgacacatatatgaaagacctctaccagctgaacccgaatgcagaatgggtgattaaatctaaaccattgtag

SEQ ID NO: 238677 - DNA, 1485 bp, synthetic construct
  misc_feature 1..1485: note = Description of Artificial Sequence: Synthetic coding sequence
  source 1..1485: mol_type = other DNA
atggccactgaggcccaaagcgagggcgaagttcctgccagggaatctgggcgatctgacgccatatgctcatttgtgatctgtaatgatagctctctgcgtgggcagcccatcatctttaatcccgacttttttgtagaaaagctgcggcacgagaagccggagattttcactgagctcgtcgtgtcaaacatcaccaggctgatcgacctgcccggtacagagttggcccagctgatgggtgaggtagatctgaaacttccagggggagctggcccagcctcggggttttttcggtctttaatgagcctgaaaaggaaggagaagggcgtgattttcggttcgccactcaccgaggaaggaatcgcccagatttatcaactgatcgagtatctgcacaaaaatttgagagtcgaagggctgtttcgtgtacccggaaactcagtccgccagcagatcctgcgtgatgccctgaacaatgggactgacatcgatctggaatcaggcgagttccacagcaatgatgtcgccacactgctgaaaatgttccttggggagctgcctgagcccttactgacacataaacacttcaacgcgcatttaaagatcgccgacctcatgcagttcgacgacaaaggaaacaagaccaacatacctgataaagatcgacagatcgaggcccttcagttattatttctgatactcccaccacccaatcgtaacttgctgaagctgctactcgacttgttgtaccagaccgcgaaaaaacaggacaaaaacaaaatgagtgcatataatttagccttaatgttcgcgcctcatgttctctggcccaagaacgttaccgccaatgacctccaggaaaacataaccaagctgaatagcggtatggccttcatgattaaacactcacaaaagttatttaaggccccagcctacattagagagtgtgctcggttacactatctaggctcaagaactcaggcgtctaaggacgatcttgacttgattgcctcttgccacactaagtctttccagcttgctaaatctcaaaagcggaaccgtgttgacagttgtcctcaccaggaggagacacagcaccatacagaggaagcactgcgtgagctcttccagcatgttcacgatatgcccgagagcgctaagaagaagcaattgattcgccaattcaataaacaaagcttgactcagacccctgggagggagcccagcaccagccaggtgcagaaacgagccagaagtcggtccttttctggcctgatcaagagaaaggtattgggcaaccagatgatgagcgaaaaaaaaaagaagaatcctacacccgaaagcgtggccatcggggaactcaagggaacatctaaggagaacaggaacctgctgtttagtggcagtcctgcggtcacaatgacgccaacccgtctgaaatggtcagagggcaagaaggaagggaagaaggtattcctctag

SEQ ID NO: 238678 - DNA, 1458 bp, synthetic construct
  misc_feature 1..1458: note = Description of Artificial Sequence: Synthetic coding sequence
  source 1..1458: mol_type = other DNA
atgcctcaccagaagttaagcgctctgattgacgctatttgctcatttgtgatctgcaacgatagcagtttgcggggtcagcctataatatttaaccctgatttcttcgtggaaaagctcaggcatgaaaagcccgagattttcactgagctggtggtgtcaaatattactcgcctcatagacctgccaggaacagagctggcccagttaatgggcgaagttgatttgaaactgcctggaggggcaggacctgcttccggatttttccgctcattaatgagcctgaaaaggaaagagaaaggggtgatctttggctctccccttacagaggaaggcatcgcacaaatctatcagctgattgaatatttgcacaagaacctacgagtggagggactctttcgcgtgcccggaaattctgtgcggcagcaaatcctgagggacgctctaaacaacgggactgacattgacctcgagtccggtgaattccactccaacgacgtggcaactctattgaagatgttcctgggcgagcttcctgaacccctgcttacgcacaagcactttaacgcacacctcaagatcgcggacctcatgcagtttgacgataagggcaataagaccaacatcccagacaaggaccgccagattgaggccctgcagctgcttttcctgattcttcctccccctaatcgcaatctactgaagctgttgttggatttgctctatcagacagcgaagaagcaggacaaaaacaagatgagtgcttacaatcttgcactgatgtttgcccctcacgtcctgtggcctaaaaacgtgactgccaacgatttgcaggagaatattactaaactgaattctggcatggcgttcatgatcaagcactcacagaagcttttcaaggcgccagcctacatacgagaatgcgccaggctccattatctaggatccaggactcaggccagcaaagacgacctggacctgattgcttcttgtcacacaaagtccttccagttggccaaaagccagaagcggaaccgcgtggattcctgtccacaccaggaggagactcagcaccataccgaagaagcactgagagagttgttccagcatgtgcatgacatgccagaaagtgccaaaaagaagcagctgatccggcagtttaacaaacagagtttgactcagacgccagggcgtgagccatccactagtcaggtgcaaaagcgagctcgatctcggtccttctccgggcttatcaagcggaaggttttagggaatcagatgatgtcagagaaaaagaagaagaacccaaccccagaatccgttgccatcggggaacttaaaggcacctcgaaggaaaaccggaatctgctgtttagcggttcgcccgcagtcactatgaccccaacccgactgaaatggtcagagggtaaaaaggagggcaaaaaggtgttcctctag

SEQ ID NO: 238679 - DNA, 1398 bp, synthetic construct
  misc_feature 1..1398: note = Description of Artificial Sequence: Synthetic coding sequence
  source 1..1398: mol_type = other DNA
atggctactgaagcgcagtccgaaggagaggtgcctgcacgggaatctggtcgcagcgacgccatttgctcctttgttatctgcaatgattcttctcttagggggcaacccatcatcttcaaccccgattttttcgtagagaagcttcgtcatgagaagccggagatttttacagagctggttgtaagtaacattaccaggctgatcgacttgcctggtaccgaactggcccagctgatgggagaagtcgacctgaagctcccaggtggcgcagggcctgcctctgggtttttccgctctcttatgtccttgaaaagaaaggagaaaggcgtaatctttgggtcccctctcactgaagagggcatcgcacagatctaccagcttatcgaatatctgcacaaaaacctgagggtggagggcctgtttagggtacctggaaatagcgtgcggcagcaaatcttgagggacgccctgaataatggcactgatatagatctggagagtggcgaattccacagcaacgatgttgctaccttactgaagatgttcttaggcgagctcccggagcccctgttaactcataaacattttaacgcccacctgaagatagctgatctgatgcagttcgacgacaaaggaaacaagactaacatcccggataaggatcgccaaatcgaggcactgcagctactgtttctgatactacctcccccaaataggaatctgctgaaattgttgctggatttgctgtatcaaacggctaagaaacaggacaagaacaaaatgagcgcttacaacctggcccttatgttcgccccacatgtcctgtggccaaagaatgctccggcatacattagagagtgcgcccgactgcactacctgggatcgagaactcaagcgtctaaagatgatttggatttgatcgcctcctgccacacaaaaagctttcaactagccaagtcccagaaaagaaaccgggtggattcttgtccacatcaggaagaaacgcagcaccacacagaggaggccttgcgagaactgttccagcacgtgcatgatatgcctgaaagcgctaaaaaaaagcagttgatccggcagttcaacaaacagtctctcacccagacccccggaagagaaccatctaccagccaggtgcagaagcgggcaaggtctcgcagcttttcagggctcatcaaaaggaaggtacttggaaatcagatgatgtccgagaagaagaagaagaatcccacccccgagagtgtggcaatcggtgagctgaaggggacaagcaaagagaatcggaacctgctctttagcggaagcccggcagtcactatgacaccaactagactcaagtggtccgagggtaaaaaagagggaaaaaaggcctttgtatag

SEQ ID NO: 238680 - DNA, 1485 bp, synthetic construct
  misc_feature 1..1485: note = Description of Artificial Sequence: Synthetic coding sequence
  source 1..1485: mol_type = other DNA
atggccactgaggcacagagtgagggtgaggtccctgctcgtgagtccggacgaagtgatgccatttgctcctttgtgatttgcaatgatagctctctgaggggacaacctatcatctttaatcccgatttctttgttgagaagctaaggcatgagaagcccgagatctttacagaactcgtggtttcgaatatcactcggctgatcgatcttcccggaacggagctagcacagctcatgggagaggtagatttgaagttgcccggaggagctggcccagctagtggcttcttccgatcgctgatgtccctgaagcgcaaggagaagggcgtaatctttggatcccctcttaccgaggagggaatcgcgcaaatatatcagctaatcgaatacctgcacaagaatttgagagtagaaggtctttttcgcgtgcccggaaatagtgtaagacagcaaattctacgagatgcattgaataatggaaccgatatcgacctcgagagtggtgaattccatagtaatgacgtggccacactccttaagatgttcttaggagaactgcccgagcccctactgacccacaagcatttcaatgcgcatcttaaaattgcagacttgatgcagttcgacgacaaaggaaataagacaaacattcctgacaaggatcggcaaattgaggcactccagctccttttcctgattctgcctcccccaaacaggaatttgttaaagctcctgctcgacttgttgtaccagaccgcaaagaagcaggataaaaacaagatgtctgcctacaaccttgccctcatgttcgcaccccacgtgctttggcctaagaatgtgacagcaaacgatctacaggagaacatcacaaagcttaactccgggatggccttcatgataaaacattcccaaaagctgtttaaagcgccagcctacatccgggagtgcgctcgactacattacctcggctcgagaacccaggcgagtaaagatgacctggacctcatagcaagctgtcacacaaagtcgtttcaactagcgaagagccaaaagcgaaatagggttgactcctgtccccaccaggaggagacacagcaccataccgaagaggccctacgcgaactgttccagcacgtccacgatatgcctgaaagcgcgaagaaaaagcaactgataagacagttcaacaagcaaagccttacacaaacaccgggacgagagccatccacgtcgcaggtccagaagcgagcaaggtcccgctcattctcaggactgattaaacgcaaggtcttggggaaccaaatgatgagtgaaaagaaaaagaaaaatcccacaccagaatctgtcgcaattggtgagcttaagggaacctcaaaagagaaccggaacctgctgttctcagggagccccgcagttaccatgactcccacaagactgaagtggtctgagggtaagaaggaagggaaaaaaggtttcctctag

SEQ ID NO: 238681 - DNA, 1458 bp, synthetic construct
  misc_feature 1..1458: note = Description of Artificial Sequence: Synthetic coding sequence
  source 1..1458: mol_type = other DNA
atgcctcatcagaagctgagcgcactgattgatgctatatgctccttcgtgatatgtaacgattcatctctgagggggcagcccatcatctttaatcctgactttttcgtggagaaactgcgccatgagaaaccagaaattttcacggaactggtcgtttcaaatatcacccgcctcattgatctcccagggaccgaattggcccagcttatgggcgaggtcgacctgaagttacccggaggagcagggccagcctccgggttttttcgcagcctaatgtcactcaaacgcaaagaaaagggtgtcatcttcgggtcccccctgactgaggagggaattgctcaaatttatcaactcatcgaatatctccacaagaatctgagggtggagggtctgtttcgtgtcccgggaaacagtgtgaggcagcagattctacgtgatgccctgaataacggtaccgacatcgatctcgagtctggagagttccattctaacgacgtggcaaccttgctcaaaatgttcctaggggaactgcccgagcccttattaactcataagcatttcaatgcgcatttgaagatcgccgatctgatgcagttcgacgataaagggaacaagaccaacattcccgataaagaccggcagatagaggccttacaacttcttttcctaattctgccccctcccaacaggaacctgctcaagctgcttctggacctgctgtatcagaccgctaaaaagcaggataaaaacaagatgtctgcatataacctggccctcatgttcgctcctcatgttctgtggccgaagaatgtcaccgccaatgacttgcaggaaaatatcaccaaactcaattcgggtatggcattcatgattaaacactctcagaagctgtttaaagcccctgcttatatacgggaatgcgctagacttcactacctggggtccagaacccaggccagtaaagatgacttggacctgattgccagttgccatacgaagagtttccaattggctaaatcccaaaaaaggaacagggtggactcttgcccgcaccaggaagaaacacaacaccatactgaagaagccttgcgtgaactgttccagcatgttcatgatatgcccgaaagtgcgaagaagaagcaacttataagacagtttaacaagcaatcactgacacagacccccggtagagaaccttcaacctcgcaggtgcagaagagagccagatctaggagtttttccgggctgataaagcgaaaagtactcgggaaccagatgatgtcagagaaaaagaagaaaaatcccacccctgaatcggtggccatcggtgagctcaaggggacctcgaaagagaatcgcaatctgctgttctctgggagccccgcagtcactatgacccccacccgactgaagtggagcgagggaaagaaagaaggcaagaagggattcttgtag

SEQ ID NO: 238682 - DNA, 942 bp, synthetic construct
  misc_feature 1..942: note = Description of Artificial Sequence: Synthetic coding sequence
  source 1..942: mol_type = other DNA
atgttcctgggtgagctccccgagcctctgctgacccataagcactttaacgctcacctgaagatagcagacttgatgcagttcgacgataagggcaataagaccaacatccccgataaggaccgacagattgaagccctccagctgctgttcctgattttaccgcctcccaatcgaaatttgctcaagttattacttgacctgctttaccagaccgctaagaaacaggataaaaacaagatgagcgcttacaatcttgctttgatgttcgccccacacgtactatggccaaaaaatgtcacggcgaacgacctacaggagaatatcaccaagctcaacagcggcatggcctttatgataaagcactcccaaaaactcttcaaggcgcctgcgtacattagagaatgcgccaggcttcattacctggggtcccgtacacaagcgagcaaggacgacctggacctgatcgcatcatgccacacaaaatccttccagcttgcgaaaagtcaaaagcggaaccgcgtggattcttgcccccaccaggaggagactcaacaccacacagaagaggccctccgtgaactgtttcagcatgtccatgacatgcccgaaagtgcaaagaaaaaacagctgatccgacagttcaacaaacaatccctgacccaaaccccaggcagagagccctcgactagccaggtccagaaacgggcaagatctcgaagcttcagcggcctaatcaagagaaaggtcctagggaatcagatgatgtctgagaagaagaagaagaatccgacgcctgaaagtgtggcgataggggaattaaaagggaccagcaaagagaataggaacttgctgttcagcggatctcccgctgtcaccatgacaccaacccggctgaaatggtcggaaggcaagaaagaaggcaaaaaaggcttcttatag

SEQ ID NO: 238683 - DNA, 1554 bp, synthetic construct
  misc_feature 1..1554: note = Description of Artificial Sequence: Synthetic coding sequence
  source 1..1554: mol_type = other DNA
atggccacagaggcccagagcgaaggtgaggtgccagcccgagagtcaggacgctctgacgccatctgctcctttgtgatatgcaatgattcaagtcttaggggccagcctattatctttaatccagatttttttgtggagaagttgagacacgaaaaaccagaaatctttaccgagttggtcgtgagcaatatcacccgtctcatcgacctacctggcactgaactggcacagctgatgggggaagtcgacttaaagttaccagggggagcaggtcctgcctctggcttcttccggagcttgatgtcccttaagaggaaagagaaaggcgtaatattcggttcccccctgaccgaggaagggatcgcccagatctaccagctgatcgagtatttgcacaagaatctgcgtgtcgagggactcttccgtgtgcctggcaacagcgttaggcagcagatacttagggatgccctcaacaacggaactgacatcgacctagaaagcggtgaatttcactctaatgacgtggctactttgctgaagatgttcctgggggaactgcccgagccattgctgacgcacaagcacttcaatgcacaccttaaaatcgccgatctcatgcaatttgacgacaagggcaataaaacgaacattcccgacaaagacagacagatcgaagccctgcagttgctgttcctaatccttccaccgcctaacagaaatctgctgaaattgttactagacctgctgtatcagacagcaaagaagcaggacaaaaataaaatgagcgcctacaaccttgccttgatgttcgcaccccacgttctgtggcccaagaatgtcacggcgaacgatctccaggaaaacatcactaaactcaactcaggtatggcatttatgatcaaacacagtcagaagctgttcaaggcccctgcctacattcgagaatgcgctaggctccattacctcgggtctcggactcaggcctccaaagatgacttggatctaatcgcatcctgccacaccaagtcctttcagctggctaagagccagaagcgtaacagagtggactcttgtccccaccaggaagaaacccagcaccacactgaagaagctctgagggaattgttccagcacgttcatgatatgcccgaaagcgcaaagaagaagcaattaatacggcagttcaataaacagtctttaacacagacacccggacgcgaaccttctactagtcaggtacaaaaacgagcgaggtcccgctccttcagcgggttaattaaacgtaaggttttgggcaatcagatgatgtccgagaagaagaaaaagaacccaacacctgaatcggtggccattggagagcttaaaggtacaagtaaggaaaacagaaatttacttttctccggtagtcccgctgtgacaatgacacccacccggctcaagtggagtgagggaaaaaaagaaggcaagaaagggaattctatggcaacgacatccttggggtctatccgaatgacccttaggggaagtagttcttgcggttgttgttcatag

SEQ ID NO: 238684 - DNA, 3654 bp, synthetic construct
  misc_feature 1..3654: note = Description of Artificial Sequence: Synthetic coding sequence
  source 1..3654: mol_type = other DNA
atggcacagcctgtggaaattagtcccccagattcaagcttgtcaaaacagcagaccagcacaccggtgctgacccaacccggtagggcctaccggatggagatccaagtgccaccttcaccgacggatgttgctaaaagcaataccgccgtgtgcgtgtgcaacgaatccgtgcggaccgtgattgtgcctagcgaaaaggtcgtggatcttctttccaatcggaataatcatacagggccatcgcatagaactgaggaagttaggtacggcgtgagcgagcaaacctcattgaagactgtgtcccggacaacgagcccgccactgtcaattcctaccacacacttgattcaccagcctgcgggaagtagaagcttagagccatccgggattcttctcaagagcggtaactacagtggtcactccgatggaatctcctcttcacgaagtcaggccgttgaggctccgagcgtctccgtaaaccattactccccgaattcacaccagcacattgattggaaaaattacaagacttataaagagtacattgataatcgaagattgcatattggctgtcggacaattcaggaaagactggattcactcagagctgccagccagtctacaacggactataaccaggtcgtaccaaaccgtacgacacttcagggacgacggagaagcactagtcacgaccgagttcctcaatcggtgcaaattaggcagcggagcgtctcacaggagagactcgaagactcagtactaatgaaatattgccctcgctccgcaagccagggggcactgacctctccgtcagtatctttctcaaatcaccggacaagatcatgggactacattgagggccaagacgagaccctggaaaacgtgaattctggaacacccattccggactccaacggagaaaagaaacaaacatacaaatggtctgggttcacggagcaagacgatcgcagagggatctgcgaacgacccaggcagcaggagattcacaaaagcttcaggggaagcaattttacggtggccccaagcgtagtaaactccgacaacaggagaatgtcaggacgcggtgtgggatccgtaagtcagttcaagaagattccacctgacttaaagacactccagtccaacagaaattttcagacaacatgcggtatgtctctgccacgaggcatttcccaggaccgatcgcccctggtgaaagtccgaagtaacagtctgaaagctccctctactcatgtgacaaaaccttctttctcccagaagagtttcgtcagtattaaagaccagcgcccagtgaaccacctgcaccagaactcattgcttaatcagcagacgtgggtgcggacagattccgcaccagaccaacaagtggagactggtaagagtcctagcctgtccggcgcatccgccaagccagccccacaatcatctgaaaatgcaggcacgtcagacctggagctcccagtttcgcagcgaaaccaggacctctccctacaagaggccgagactgagcaatccgacacgctggataacaaggaagcagtgatacttagggagaagccacccagtggaagacaaacccctcagcctctccgccaccagagttatatcctcgcagtaaacgaccaggaaaccggttccgatacaacttgctggctccctaatgatgctcgacgggaggtacatatcaagcgcatggaagaacgaaaggccagcagcacgtctcctccgggagacagcttagcttcgatcccatttattgatgagccgacatctccctctatagaccatgatattgctcatataccagcgtcagccgtgatatctgcctccacctctcaagtgcccagcatcgcaacagtaccaccctgtttgacaacgtccgcccctctgatccgaaggcaactctctcatgaccacgagtctgtcggcccaccatccttggatgcccagccgaattcaaaaaccgagcgtagtaaatcatatgacgagggcctggacgactatagggaagatgcaaagctgtctttcaagcacgtgtcatccttgaaaggcatcaagattgctgacagccaaaaaagctctgaagattcgggcagtcggaaggacagtagctccgaagtcttcagcgacgcagcaaaagaagggtggctgcactttaggcccctggtcaccgataaaggaaagagggtcgggggtagcatacggccttggaagcagatgtatgtggtacttcgtgggcacagcctctacctatataaggataaacgagaacaaacaacaccaagtgaagaagaacaacctatctccgtgaatgcttgtttgatcgacatctcatatagcgagacaaagagaaagaatgtattcaggctgactacctccgattgtgagtgcttgttccaggctgaggatcgcgacgatatgcttgcttggatcaagaccatccaggagtcctccaatttaaatgaagaggatacaggagtgaccaatcgggatttgattagcaggaggattaaagagtataataatttaatgagtaaagcagagcaattacctaaaacgcctagacagtccctgagcatcagacagactctgctgggagcgaagtccgaacctaaaacccagtccccgcactctccaaaagaggagtccgaaagaaagctgctgtccaaagacgatacctctccacccaaggataaaggcacgtggagaaagggcatcccgagcatcatgcggaagacctttgagaaaaagcccacggcaacgggcactttcggcgtgcggcttgacgattgccctccagcccatacgaacaggtacattcccttaatagtggatatatgctgtaaactggtggaggagcgcggtttggaatatacaggtatctaccgagtacccggtaataatgctgccatcagcagtatgcaggaagagcttaataaagggatggctgatatcgatatccaggatgataagtggcgggacctgaatgtcatatcatctctactgaagtcttttttcagaaaactgcccgagcctctttttaccaacgataagtatgccgactttattgaagccaatagaaaggaggacccgcttgacagactaaagacccttaagcgacttattcatgatctaccagaacaccattatgagaccctgaagttcctatctgctcatctgaagaccgttgccgaaaattctgaaaagaacaagatggaacctcggaatctagccatagtgtttggtccgactctggtgcgcaccagtgaggataacatgacgcacatggtaacacatatgccagatcagtacaagattgtcgagacacttatccaacaccatgattggttctttacagaagaaggtgccgaggagccactgaccactgtccaagaggaatccactgtggactcccagcctgtcccgaacatagaccacctcttgactaatatcggaaggactggggtgtctcctggcgacgtaagcggcgaggtcggaggggtctaccatacagtgatgtctttggtagactccgtgatgtcgctgatggattcttggaattgcaggaagaaggaagactgctgccctcactgctcgtgcttggtttgccggaatcctcggttcttgtag

SEQ ID NO: 238685 - DNA, 3498 bp, synthetic construct
  misc_feature 1..3498: note = Description of Artificial Sequence: Synthetic coding sequence
  source 1..3498: mol_type = other DNA
atgatggccacacgcaggactgggttgagcgaaggtgatggcgacaagctcaaggcatgcgaagtcagcaagaataaagacggcaaagagcagtctgaaaccgtaagtctgtccgaggacgaaacgttttcctggcccggaccgaagaccgtgactctcaaaaggacttctcagggctttggcttcaccttaagacacttcattgtgtatccgcctgaatcagccatccaattttcatataaggacgaggagaatggcaataggggcggaaagcaaaggaaccgtctggagcctatggacacaatcttcgtcaagcaggtaaaagagggtggccctgcgttcgaagcaggcctctgcactggtgatcgcattatcaaagtgaatggggagagtgtcattggaaaaacgtattcccaggtgattgccctgatccaaaactccgacacaactcttgaactgagtgtgatgccaaaggacgaggatatcctgcaagtggcttatagccaggatgcatatcttaagggaaacgaggcttatagcggtaatgctaggaacattccagagcctcccccaatatgttacccatggctgcccagcgccccttccgctatggctcagcctgtggagattagccctcctgacagttcactcagtaaacagcagacctcaacgcctgtgctcactcagcctgggagagcttatagaatggaaatccaggtgcctcctagccctactgatgtggcaaagtcaaacacagcagtgtgtgtttgcaacgaatccgtcagaaccgtcatcgttcccagcgagaaagttgtggacctgcttagtaaccggaataatcataccggtccctcccatagaacagaggaggtgcgatatggagtttctgaacaaacctccctgaaaactgtcagtaggaccacttctcccccattgagcatccctacaacgcacttgattcatcagccggctggcagccgttccctggagccttccggcatcttgctaaagtccggcaattacagcggccattcggatggaatctcatcctcgagatcacaagccgtagaggctcctagtgtgtccgtcaaccactattcacctaattcccaccagcacattgattggaagaattacaaaacatacaaagagtatattgataaccggaggctgcacataggatgccgaacaatccaggaacgccttgactctctccgagcggcttcccagtccaccacggactataatcaggtggtcccaaacaggaccacactgcaggggcgtcgtagaagcacctcgcacgatcgggtcccccaaagcgtgcagatccgtcagcgcagcgtatcacaagagcgactggaggatagcgtccttatgaaatattgtcctaggtccgcctcccaaggcgcactgacctcaccatcggtaagtttcagcaaccaccgcactcgaagctgggattatattgaaggccaggatgagacactggaaaacgtgaattcaggaacccctatccctgacagtaacggtgagaagaagcaaacgtataaatggtcaggcttcactgagcaggatgaccggcgaggcatctgtgaaagacctcggcagcaagagatccataaatctttcagagggagtaattttaccgtggcgccaagcgttgtgaactcggacaaccggcgaatgtccgggaggggcgtcggaagcgtctcccagttcaagaaaatcccccctgatctcaagacattgcagtcgaaccgtaacttccagaccacgtgcggcatgtctctgcccagaggcatcagtcaggatcgttcacctctagttaaagtgcgtagtaactcactgaaagcccctagtacgcacgtgacgaagcctagcttctctcagaaaagttttgtctctatcaaagaccagaggcctgtgaatcatttacatcagaatagccttctgaatcagcagacctgggtccggacagattcagcacctgaccagcaggtggaaaccggcaagagcccctctctttcaggggctagtgccaagccagcaccccagtcctctgagaatgccggaacaagcgacctcgagctacctgtatcccagcggaaccaggatctgagcttgcaggaagctgagacagagcagtctgacactctggacaacaaagaagctgtgattctaagggaaaaacctccctcgggtagacaaacgccccagcccctaagacatcaaagttacatccttgcagtgaacgaccaggagactggaagcgacacaacctgctggctccctaatgacgcaaggcgggaggttcacatcaagcgcatggaagagcgtaaagcgtctagcacgagtccgcctggtgacagcctggccagtatacctttcatagatgagcctacttccccatcaatagaccatgacatcgcccacatacccgctagtgcagttatctctgcatctacatctcaggtgccctcaattgccactgtgccgccttgcctgactacatcagctcctctgattaggcggcagctctcccacgatcacgaatcagtgggtccccctagcctggatgctcagcccaattccaagactgagagatccaaaagctatgacgaaggtctggatgattatagagaggacgctaagctgagctttaagcatgtgtcgtcacttaaagggatcaagatcgccgatagccagaagtccagcgaggactctggtagccgtaaagattcctcttccgaagtcttctctgacgccgctaaggaaggctggctccactttcgtccccttgtgacagacaaggggaagcgtgtgggaggatcaatccggccttggaagcagatgtacgtcgtcctacggggtcactctctgtatttgtataaagataagcgggaacagacaacacccagtgaggaggagcagccaatctcggttaacgcctgtctgatagacatcagttattctgaaactaagagaaaaaatgtgttcaggctcaccacaagtgattgtgagtgtcttttccaggccgaagacagggatgacatgctagcctggattaaaactattcaggagagttccaatctcaacgaggaagatacaggcgtcaccaacagagacctcatttctcggcgaataaaagaatataataacctgatgtctaaggccgaacagctgcctaagacacccaggcagagcctcagcattcgtcagaccctgttaggagctaagagcgagccaaagacacagtccccacacagccctaaggaggagagcgagcgaaaactcttatctaaagacgacacatcgccccctaaagataagggcacatggcgtaaggggatcccatccataatgcggaagacattcgagaagaagcccactgccacagggacttttggagtgcgcctggacgactgcccaccagcacacacaaacagagtgggagatacatccccacccgacttcctcaaatcacttatccagttttag

SEQ ID NO: 238686 - DNA, 5876 bp, synthetic construct
  misc_feature 1..5876: note = Description of Artificial Sequence: Synthetic coding sequence
  source 1..5876: mol_type = other DNA
atgatggccacacgacgcaccggcctttccgagggggacggagacaaactgaaagcctgtgaggtgtccaaaaacaaggatggcaaggaacagtctgagactgtgtctctcagcgaagatgagacattctcttggccaggccctaagacagtcacactcaagagaaccagtcaaggcttcgggtttactctgcgtcatttcatcgtttacccgcctgagagcgctatccagttttcttataaggatgaggaaaacgggaataggggcggtaaacaacggaatcgcctcgagcctatggacactattttcgttaagcaggtaaaggagggcggtcctgcttttgaagccggtctctgtaccggtgatcggatcatcaaagttaatggtgaaagcgtgatcggaaaaacgtactcccaggtgattgcgcttatacaaaactccgacacgacactcgagctgagcgtgatgccaaaggacgaggatattcttcaggtacttcagttcaccaaagatgtaacagctttggcctacagtcaggatgcgtatctgaaaggcaacgaagcctattctgggaacgcacgaaacatacctgagccgccaccgatttgctacccatggctgccctctgccccatccgcgatggcccaacccgtggagatctcacccccagattcatcactgagcaaacagcagacctctacccctgtcctgacacaacctggcagagcatacaggatggaaatacaggtcccaccctctccaaccgatgtagcaaaaagtaacaccgccgtctgtgtgtgcaacgaatcggtgcgcacagttatcgtgccttcagagaaggtggtggacctgctgtccaaccgcaataaccacaccggcccatcacatcgcaccgaggaggttcgatacggtgtgtccgagcagacttcattgaagaccgtatcaagaacgacatcaccccctctgagcatacctacaacccacctcatccatcaaccagcaggttcaaggagtctggagccaagcggaattcttcttaaatcaggcaattactctgggcattcagacgggattagttcatcccgatctcaggcagttgaggcccctagcgttagcgttaaccactactccccgaattcccaccagcatatcgactggaaaaattacaagacctataaagagtacattgacaatcgcagacttcacatagggtgtaggaccatccaggaacgccttgacagtttacgcgctgctagtcaaagtaccaccgactacaatcaagtcgtgcctaacagaaccaccctgcagggtcggaggcggagtacatcacacgatcgggttccacagtccgttcagatccgccaaaggagcgtatcacaggaacgactggaggatagcgttctgatgaagtactgccctaggtccgctagtcaaggcgctttaacgagcccttcagtgtcgttcagcaaccatcggactcgcagctgggattacattgagggacaagacgaaactcttgagaacgtgaattccggcaccccaatccctgattctaacggggaaaaaaagcagacttacaagtggtctggcttcacagagcaggatgataggaggggcatatgtgaacggcctaggcagcaagaaattcataagtctttccgtgggagtaattttaccgtggcaccctcagtcgtcaactctgacaacaggagaatgtccgggaggggtgttggaagtgtgtctcagtttaagaagatccccccagacctgaaaacactgcagagtaatagaaattttcaaactacctgcggcatgtcacttccaagaggcatcagccaggatcgtagtccgctggtaaaggtcagatctaattcgttaaaggcaccaagcactcacgtgactaagcccagtttttcccagaaatcttttgtttcaattaaggatcagagacccgtgaatcacctccaccaaaatagtctcctgaatcagcagacttgggttaggaccgacagcgcccctgaccagcaggttgaaacagggaagtccccttcgctcagtggggcaagcgctaaacctgctccgcagtcctcagagaatgccggtaccagtgacctggagcttccagtgagccagcgaaaccaggacttaagcctccaagaggccgaaacagagcaatccgacacacttgataataaggaagctgtgatcctgcgcgagaagcccccaagcggaaggcagactccacaaccccttcggcaccagtcttatatactcgccgtgaacgatcaagagacaggatctgacacgacttgttggcttccaaatgacgctcggagggaggtgcacattaagcggatggaagaacgaaaagctagctcaacctcaccgcctggcgacagtctggcatcaatcccatttattgatgaacccacatctcctagcatagatcatgatatcgcccatatccctgcctctgccgtgatttcagcaagcactagccaggtaccatctatcgcaactgtccccccttgtctgacaacatctgctccgctgattcggaggcagctatcacacgatcacgagagcgtgggtcctccctcccttgacgcacagcctaattcaaagaccgaaaggagcaaaagctacgatgagggactggatgactatcgtgaggatgccaaactgtctttcaaacacgtttcatctctgaaaggcatcaagatcgccgacagccaaaaaagttccgaggacagcggatcgcgaaaagactccagctcagaggtcttctccgacgccgctaaggaagggtggctgcatttccggccactggtgactgacaagggcaaacgggtaggcggaagtatcagaccctggaagcagatgtacgttgtactgagagggcactcgctgtatctgtataaagacaaaagagaacagaccactcccagcgaagaagagcagccaattagcgttaatgcctgtctaattgatatatcatactccgaaacgaaaagaaaaaacgtgttcaggttgacaacctcagattgcgaatgcctgttccaggctgaggatagggatgatatgctggcttggatcaaaacaatccaggaaagctcgaacctgaatgaagaagatacaggcgtgacaaacagagacttgatctcacgcagaattaaggaatataacaatttgatgagcaaggctgagcaactccctaagacaccaaggcaatctctgtctatcaggcagacgcttttaggcgcaaaatccgagccaaaaacacagtccccccactcaccaaaggaggagtcggagcgcaaactgttgtccaaggacgacacttcacctcccaaggacaaggggacctggaggaaaggaatcccctcaattatgaggaagacttttgagaagaaacctaccgccacagggacattcggcgttcggctggacgattgtcctccagcccatacaaatcggtatatccctctcattgtcgatatatgctgcaaactcgtggaagagcggggactcgagtatacaggcatatatcgggtgccaggaaacaatgctgctatctcatccatgcaagaagagcttaataagggcatggcggatattgatatccaggacgataagtggagggatctgaatgtgatctccagtctgctgaagtcctttttcaggaaactgcccgagcccctgtttaccaacgacaagtatgcagactttatcgaggccaatcgtaaggaggatccattggacagactcaaaacactaaagagacttatccacgacctccctgaacatcactatgagaccctgaaattccttagtgcccacctgaaaaccgtcgccgaaaattccgaaaagaacaaaatggagccaaggaatctagccatagtgtttggcccaactttggtgaggacaagtgaggacaatatgacacacatggtgactcacatgcccgatcagtacaagatcgtcgagacacttatccaacaccatgattggtttttcactgaggagggcgctgaagaaccacttacaacagtgcaggaagaaagcacagtcgacagtcaacccgttccaaatattgaccacctcctgaccaacattggccgtaccggggtcagtccaggcgacgttagcgacagtgcaactagtgactctacaaagtccaagggttcctggggctctgggaaagaccagtacagtcgcgaattgctggtgtcctctatatttgccgcagcctccaggaaacggaaaaagcctaaggagaaagctcaaccatccagttcggaagatgagctggacaatgtgttcttcaaaaaagagaacgtagaacaatgtcacaatgacaccaaggaggagtctaagaaggagagcgaaaccctggggagaaaacagaagattattattgcaaaggaaaacagcacacgtaaggatccatccacgaccaaggacgagaagatctccctgggaaaggagtcaacccctagtgaagaaccttccccaccccacaactctaaacacaacaaatcccccaccctcagttgccgctttgcaattctgaaagagagtcctcgttctctgctagcacagaagtctagccacctggaagagaccggaagtgactccggaacactgctctccacctccagtcaggccagcctcgcccgatttagtatgaagaaatcgaccagtcccgagactaaacactctgagtttttagccaatgtgagcaccattacttctgattatagtacaacaagctcagccacctacctaacttctctcgacagttcccgactcagtcctgaggtgcaaagtgtggctgagtctaaaggggatgaagccgacgatgagaggtctgaactcataagcgagggcaggccggtggagacggatagtgaaagtgaatttcctgtgttccctaccgcgcttacaagcgaacgattgttccgcggaaaattgcaagaagtgactaaaagctccagaagaaattctgaaggttctgaactgtcatgtacagaaggctctctcaccagtagcctagattctcgcaggcagctgttctcctcacacaagctgattgagtgtgacactctttcacgcaagaagtccgcgaggtttaaaagcgactctggtagtcttggagacgcgaagaatgagaaggaggccccttcactcaccaaagtgttcgacgtgatgaagaagggtaagtcgaccggtagcctacttacacctacaagaggggagtctgagaagcaggagccgacctggaaaaccaaaattgctgatcggctgaagttgagaccccgtgcacccgcagatgacatgttcggcgtaggtaaccacaaggtgaacgccgagaccgccaagaggaagagtattcgtaggagacacaccttaggaggacacagagacgcgacggagatctcagtgctgaatttctggaaggtgcacgagcagtcaggcgagagagaaagcgagttaagtgcagtgaacagactcaagcctaagtgtagcgctcaggacctcagcattagtgactggctggccagggagcggttaaggacgagcacaagcgacctgtctcggggtgagatcggggatccacagaccgaaaatccctctacccgggaaatagccacaaccgacacaccactaagcctacattgtaatacaggttccagctcctctactctggcctccacaaatcgtcccttgttgtccatcccgcctcagtcacctgatcagatcaacggcgagtcctttcaaaatgtgtcgaagaacgcctcatctgccgcaaacgctcagccgcataaactttccgaaacgccgggaagtaaagcagagtttcacccatgtctgta

SEQ ID NO: 238687 - DNA, 594 bp, synthetic construct
  misc_feature 1..594: note = Description of Artificial Sequence: Synthetic coding sequence
  source 1..594: mol_type = other DNA
tgaaacaacgcggcaatctcctcaatgcaggaggaattgaataagggcatggccgacattgatatccaagacgacaagtggagagatcttaatgtgatcagtagcttgctaaaaagtttctttcggaaattgcccgagcccttatttaccaacgataaatacgcagacttcatcgaagccaaccgcaaggaagatcctctagatcggcttaagactctgaaaaggttgatccacgacctgccagagcatcactatgaaacacttaagtttctcagcgctcatctgaagactgtggcagagaattccgagaagaataaaatggaacccagaaacttggctatcgtctttggccctacactggtacggacaagtgaggataatatgacacatatggttacacacatgcccgatcagtacaagatcgtagagaccctgatacaacaccacgattggtttttcaccgaagagggagctgaggagccgcttattcagctgctggtcacccagcagaatctgagggtgctgggagatctcgaacggatctcaatcgccggaaactgcctgtgcccacccagtctccagctgctagtctag

SEQ ID NO: 238688 - DNA, 342 bp, synthetic construct
  misc_feature 1..342: note = Description of Artificial Sequence: Synthetic coding sequence
  source 1..342: mol_type = other DNA
tatattcccctgatcgtggacatttgttgcaagttagtggaggagagaggcttagaatacaccgggatttatcgcgtgcccggtaacaacgcagctattagttctatgcaagaagagctgaacaagggcatggcggacattgacatccaggatgataagtggagggacctgaatgtgatctcctcactgctgaagtcttttttcaggaagctcccagaaccactgtttactaacgataagtacgcagattttattgaagctaaccgaaaggaagatcctctcgatcgactgaagactctaaaacgtctgtttctatcagctcacctgaagacagtggcctag

SEQ ID NO: 238689 - DNA, 2724 bp, synthetic construct
  misc_feature 1..2724: note = Description of Artificial Sequence: Synthetic coding sequence
  source 1..2724: mol_type = other DNA
atgcccaaggacgaagacatacttcaggtggcttacagccaagacgcataccttaaaggtaacgaggcatactctggcaacgctcgcaatatacctgagccccctcccatttgctacccatggctgccctcagctccttccgctatggcgcagccagtcgaaatatcccctcccgattcttctctctctaaacaacagacctccacacctgtacttacacagcctggacgcgcataccgaatggagatccaggttcctccgtctccgacagacgtagccaagtctaatacagcagtgtgtgtgtgcaatgagtctgtaagaacagtgatcgtgccctctgaaaaggtggtggacctgctctccaatagaaataatcacacgggccctagtcatagaaccgaggaagtgaggtatggtgtgtcggagcagaccagcttgaaaactgtgagtcgcaccacatctcccccactctcgatccctaccactcatcttatccaccagccagcaggcagtcggagcctggagccatccggaatcctcctgaagagcggaaactacagtggtcacagcgatgggatctctagctcacgctcacaggcagtggaggccccttcagtgtccgtgaatcactatagtccaaattctcaccagcacatagattggaaaaattataagacttataaggaatatatcgacaatcggaggctgcatatcggttgccggactatccaggagcgtctggatagtcttagggcagcgagccaaagcacaacagattacaaccaagtggttcccaaccgcactacgctgcaagggaggcggaggtctacctctcatgatcgcgtcccacaatccgttcagattaggcagcgctcagtatcccaagagcgcctggaagactcggtgctaatgaagtactgcccccgttcggcatctcagggggctctaaccagtccctcggtgtcattctctaaccatcggactcgctcttgggactatatcgaggggcaggatgaaactctagagaatgtgaacagcggaacgccgataccggatagtaacggcgagaaaaaacagacctataaatggtccggatttaccgagcaggatgatcgacggggaatctgcgaaaggcctcggcaacaagagatacacaaatcttttcgagggagtaattttacagtagctccaagcgtcgtgaacagcgacaaccggagaatgtctgggaggggggtgggtagcgtcagccagtttaagaaaatccctccagaccttaagaccctgcaaagcaatagaaattttcaaacaacctgcggaatgtcacttccacgtggcatttcacaggatagaagtcccttggtgaaagtgcgatccaatagcctgaaagctccttcaactcatgtgaccaaaccgagcttctcccagaaatccttcgtcagcattaaggatcaacgccctgtcaaccatttgcatcagaattcccttctgaatcagcagacctgggtgagaactgactccgcccctgaccagcaggtcgaaactggcaaaagcccttccttgtctggcgctagtgccaagcccgctccccagtcatccgagaacgctgggaccagcgacctagaattgcccgtaagccaaagaaaccaggacctgtctctccaagaggctgaaactgagcagtcagataccttagataataaagaagcagtgatactccgcgagaaacctccaagtggcagacagacaccgcagccactccggcaccagtcctatatcctggccgtcaacgatcaggaaacggggtctgacacaacttgctggctgccaaatgacgccagacgggaagtacatattaagcgcatggaggagcgaaaagcatctagtacttctccgcctggcgatagtctcgcttccattcccttcattgatgagcccacctcaccctcgatcgatcacgacattgcccatatccccgcatctgcagtcatcagcgcatccacctcccaggtgccttcaattgccactgtgcccccatgcctgacaacttctgcccctctcattcgaaggcagctttcacatgatcacgaatcggtgggaccaccatcgctagacgcacagcccaacagcaaaactgaacgtagtaaaagttacgatgaggggttagacgattaccgtgaggatgctaagctgagcttcaagcacgtgtctagtttgaagggaattaagattgccgattctcagaaaagctctgaagactccggaagccggaaggattcctctagtgaggtgtttagtgacgcagcgaaagaaggctggcttcattttaggcctttggtgaccgataaaggtaaacgagtcggcggtagtatcaggccatggaagcagatgtatgtggtcctcaggggccacagcctctatctgtataaagacaaacgtgaacaaacaactccttctgaggaagagcagccaatctctgtgaacgcatgccttattgatattagctatagcgagactaagagaaaaaatgtgttccggctcactactagtgactgcgaatgtctctttcaagctgaggaccgcgacgatatgctggcgtggatcaaaacaatacaggaaagttccaatctgaatgaggaagacaccggagtcacaaatcgtgatttgatctcgaggcgcatcaaggagtataacaacctcatgagcaaggccgagcagcttccttag

SEQ ID NO: 238690 - DNA, 3396 bp, synthetic construct
  misc_feature 1..3396: note = Description of Artificial Sequence: Synthetic coding sequence
  source 1..3396: mol_type = other DNA
atgatggccaccagaagaaccggtctttccgagggagacggtgataaactgaaggcctgtgaggtgtcaaagaacaaagatggaaaggaacagagtgaaactgtttcactctccgaggatgagacattttcttggcccggtccgaagactgtaaccctgaaacgaacttcgcagggctttggttttacgttgcgtcacttcattgtgtaccctcctgagagtgcaatccagttttcctacaaggatgaagaaaacgggaatcggggaggcaagcagagaaatcgcctcgaacccatggacacgatcttcgtgaagcaggtgaaggaaggcggtccagcgtttgaagcgggattgtgcactggagataggattatcaaagtaaacggcgagtctgtaatcggtaaaacatattctcaggtgatcgccctcatccagaatagtgatacaaccttggagctgagcgtcatgcctaaggatgaagacatcctacaggtcctgcagttcactaaagatgtaacagccctcgcctacagccaggatgcatacctcaaaggaaacgaggcatacagtgggaacgctcgtaacattcccgagccccctccaatctgctacccatggctcccttctgcaccttcagccatggcccagccggtggagatctccccacccgattcctctctgtccaaacagcaaacatctactccagtgctgacgcagccgggacgcgcataccgaatggagattcaggtgcctccctcgcccacagacgtagccaagagcaacaccgccgtttgcgtgtgtaatgagtctgtgcgcacagtgattgtcccttccgaaaaagtcgtcgatctactcagcaatagaaacaaccatactgggccttcccataggaccgaggaggttagatatggtgttagtgagcagacatctctgaaaacggtgtctagaacaacatctcctcctctgagcattccaacaacgcacttgatccatcagcccgcaggctctagaagtcttgaaccttctggaatcctactaaaaagcggtaattactctggtcatagcgatggaatctcatcaagccgctctcaagccgttgaggcgccttccgtgtcggtgaatcactatagcccaaacagccaccagcacatagattggaaaaactacaagacttacaaggaatatatagataatcggcgtttgcacatcggctgcagaacaatccaggaacggcttgactccctgagagccgctagtcagagcaccactgactataatcaggtcgtgcccaatcggaccactctgcagggtcggaggagaagcacctcccatgaccgggttccgcagtccgtccaaatccgacagaggagcgttagtcaggagcgactggaagacagcgtcttgatgaaatactgcccacgctctgccagccagggcgcacttaccagcccttcagttagtttctcaaatcatagaacccgatcatgggactacatcgaaggtcaagatgaaaccctcgagaacgtcaacagtgggacccccattcctgattccaatggcgaaaagaagcaaacctataaatggagtggatttaccgaacaagacgatcgcaggggaatttgcgaacgaccacgacagcaggaaatccataaatctttccgcggatctaacttcacagtggccccttccgtcgtcaactctgacaacagacgcatgagtggacgaggagttggatctgtgtcccagtttaaaaagataccacctgatctgaagaccctccagtctaacagaaatttccaaaccacatgcgggatgtctcttcccaggggcatcagccaggacaggagcccactggtgaaggtgcgcagtaatagcctcaaggctccaagtacacacgtcaccaagcctagcttctcccaaaagtctttcgttagtattaaagaccagcggccagttaaccacctccaccagaacagcttgctgaaccaacaaacctgggtcaggacggactccgcgccagaccagcaggtggaaacaggaaagtctccaagtctctccggggctagcgcaaaacccgctccccaatcatccgagaacgcgggtaccagtgaccttgaactgccagtgtcacagaggaaccaggacctctccctgcaggaagccgaaacagaacagtccgacactctggacaacaaagaagccgtgatccttagagagaagcctccctctggcagacagactccacagcctctgagacaccagtcatacattctagctgttaatgaccaagagaccggctctgacaccacatgctggctgccgaacgatgcgcgtcgtgaggtgcatattaagcgcatggaagaacggaaggccagctccacgtcccccccaggagacagtctcgcatctatcccatttatcgatgaacccacatctccttccatcgatcacgacattgctcacattcccgcatcagctgtaatcagcgccagtacatcgcaggtcccgagcattgctacagtgcccccttgtctgacgaccagtgctccactaatacgaaggcagctgtctcatgaccacgagtctgtggggcctccctcattggatgcccagcccaactcaaagaccgagcgaagcaaatcctatgacgaaggtctggacgattatagggaagacgcgaagctgtcattcaaacatgtgtcctcattaaagggcatcaagatcgctgattcccagaaatcatctgaggatagcggctccagaaaagattccagttctgaagtgttttccgatgccgctaaggaaggttggctccacttccggccactcgtcacagataagggaaaaagggtggggggtagcatcagaccgtggaagcagatgtacgtggtcctgcggggtcactctctctacttgtataaggacaagagggaacaaaccacgccttccgaggaagagcagcctatctccgtaaatgcatgcctgatagacatctcctattcagaaacgaagcgcaagaacgtgttccgcctaaccaccagcgattgcgagtgcctgtttcaggcagaagaccgcgacgatatgctggcctggatcaagaccatacaagaatccagcaatcttaatgaggaggataccggagttactaatcgagatcttattagtcgcaggattaaagaatataacaacctcatgtcgaaagcagagcagctcccgaaaacacccagacagagcctctctattcggcaaacgctgctgggcgctaaatcagagcctaaaacccagagccctcattccccaaaggaggaatcagagcggaaacttctgagtaaagacgatactagtccaccgaaggataaagggacctggcggaaaggaataccatcgatcatgtag

SEQ ID NO: 238691 - DNA, 4224 bp, synthetic construct
  misc_feature 1..4224: note = Description of Artificial Sequence: Synthetic coding sequence
  source 1..4224: mol_type = other DNA
atggctacgaggagaactggcctttctgagggcgacggtgacaagctgaaagcttgtgaggtatcaaaaaataaggatggcaaggaacaatctgagaccgtcagcctgagcgaggatgagactttcagctggccgggtcccaagactgtaaccctgaagaggacctctcaaggcttcggatttacgttgcggcatttcatagtttatccaccagagtccgctatacagttcagctataaagacgaagagaatggaaaccgcggtggtaagcagagaaatcgactggaacctatggacaccatttttgtcaaacaggtgaaggagggtgggccagcctttgaggccggactttgtaccggagaccggattattaaggtgaatggagagagtgttataggcaagacctattcccaagtcattgccctgattcagaacagcgacacaaccttagagctgtccgtcatgcccaaggacgaggacatcctgcaggtagcttacagtcaagacgcttatctaaagggcaatgaagcttactccggcaacgccaggaacatccctgagcccccacctatctgctacccctggcttccgtctgcgccttctgccatggcccagccggtggaaatcagtccaccagattcctcactcagtaaacaacaaacctccacccccgtgctgacccaaccagggagagcttaccggatggagatccaggttccaccatctcccaccgatgtggccaagtccaacaccgccgtgtgcgtgtgcaatgagtccgtgcgtactgtgattgttccgtccgagaaggtggttgatctcctctctaatcgcaataaccacaccggtccttcgcaccgcaccgaagaagttaggtatggtgtttccgagcaaacctcccttaaaactgtctctcggacaacctcaccacccctgagcatcccaaccactcacttaatacatcagccggcaggatctcgctcacttgagccttccggcattctcctgaaatctgggaattactccgggcacagcgatggcatcagtagctcgcggtcacaggcagtggaagctcctagcgtcagtgtcaatcactactctccaaattctcaccagcatatcgattggaagaactacaagacctacaaagaatacatcgataaccgtcgcctgcatatcggatgcagaactatccaagagcggctggattcattacgcgctgctagccagtcaacaaccgactataaccaggtggttcccaacaggaccacacttcaaggccgtaggaggtccacctctcacgatcgcgtgccccagtccgtgcagattaggcagaggtcagtttcccaggaacgactggaagactccgtactgatgaagtattgcccccgatccgcatcccagggcgcactaacttctccaagcgtttcatttagtaaccatcgaacaaggagttgggattatatcgagggccaggatgaaacactggagaacgtaaacagcgggaccccgattcccgactccaacggagaaaagaagcagacctacaagtggagtgggtttacagaacaagatgaccggaggggcatttgtgagcgaccccgtcagcaggagatccacaaatcctttagaggttccaattttaccgttgctccaagcgttgtgaatagtgataacagaaggatgtcggggaggggagttggttctgtgtcccactggcggaaaggcatcccatctataatgagaaagacattcgagaagaaacctacggccaccggcacgttcggggttagacttgacgactgtcccccagctcacactaataggtacatcccacttatagtcgacatttgctgcaagcttgtggaggagcgtggtcttgaatataccggaatttacagggtccctgggaacaacgccgcaatctcttctatgcaggaagagttaaacaagggcatggcagatattgatatccaggacgacaaatggagagacctgaacgtcatctcatcgttgttgaaatccttcttccgcaaacttccagaacccctgttcacgaacgacaagtatgccgatttcatcgaagcgaaccggaaggaggacccgttggataggctcaagacactgaagcggctgatacacgatctcccggagcatcattatgagacactgaaattcctgagtgcacatttgaaaacagtcgctgagaactctgagaaaaacaaaatggagcccagaaacttggcaattgtgtttgggcctaccctagtacggacaagtgaagataacatgacccatatggtcactcacatgcctgaccaatacaagatcgtcgaaacactcatccagcaccacgactggttctttacggaggagggtgctgaggaaccactcaccacagtgcaggaagaatcaacagtggattcacagccggtgcccaacattgaccatctgctcaccaacatcggacggacaggagtctcacccggagacgtatctgacagtgccaccagcgactcaacaaaatcaaagggctcatggggttctggtaaagatcagtatagtagagagctgcttgtatcatctatcttcgccgctgccagcaggaagagaaagaaacccaaggaaaaagctcagccttcttctagcgaggatgagctggataatgtgtttttcaagaaggagaatgttgagcagtgccataacgacaccaaggaggaatccaaaaaagagtccgagacccttggcaggaaacagaagatcatcattgctaaggagaacagtactcgcaaagatcccagcaccaccaaagacgagaagatctccctcgggaaggaaagtacacctagtgaagagccatctcctcctcacaattcaaaacacaataagagtcccaccctcagctgtcggttcgcaattttaaaagagtcgcctcgtagtctgttagctcagaaatcttcccatttggaggagactggtagtgactctggcactctgttatcaacctcttctcaggcaagcttggccagattttctatgaaaaagagtacaagccccgagacaaagcactctgagttcctggcaaacgtttcgaccataacgtctgactactctacgaccagttccgccacctatctgactagccttgatagcagccgactgtcaccagaagttcagtctgtggctgagtctaagggggacgaggccgacgacgaacggtcagagctcattagtgaaggacgacctgtggagaccgattcagagtccgagttccctgtgtttcccaccgcgctcacctctgaacggctctttaggggcaaattacaggaggtcactaaaagctccagacgcaattcagagggcagcgaactgtcctgcactgagggatcgctgacttcgtctctggattcacggcgtcagttattctcctcccacaaactcattgaatgtgacacattatcccggaagaaatcagccaggtttaaaagtgattccggctctcttggcgatgccaaaaacgagaaggaggctccttcattaaccaaagttttcgacgtgatgaagaaaggcaagagtaccgggagtcttttaactccaactcggggagaatctgaaaagcaggaacccacttggaagacgaagattgcggacaggcttaagcttcggcctagggctccagctgacgatatgttcggtgtgggtaatcataaggtgaatgcagaaacggctaaacgcaagagcatcaggcgcaggcacacgttaggaggccaccgagatgccacagaaatttcagtcctcaacttctggaaagtccacgagcagagtggcgagagggaaagcgagctgtccgctgtcaatcggcttaaacctaaatgcagtgcacaggatctgagcataagcgattggcttgctagggagcggctgaggacatccacctctgacctgtcccggggagaaatcggcgatccccagacggaaaaccccagtacaagagagatcgctaccactgatacaccactaagcctgcattgtaacaccggttcatcttcttctactctagcatcgacaaaccgccctctgctgtcaatccctccgcagtcgcccgaccagattaatggggaatctttccaaaacgtgtcaaagaatgcaagctctgctgctaatgcgcagcctcataagttgtccgagacacccggatcgaaggccgagtttcatccttgcctgtag

SEQ ID NO: 238692 - DNA, 279 bp, synthetic construct
  misc_feature 1..279: note = Description of Artificial Sequence: Synthetic coding sequence
  source 1..279: mol_type = other DNA
atggacacaatcttcgtcaaacaggttaaagaagggggtcccgcttttgaagccggactgtgcactggggaccgtattatcaaggtgaatggggaaagtgtaattggtaagacgtattctcaggtgatcgccctgattcaaaactccgatacaacgcttgagctgtcagtaatgcctaaggatgaagacatccttcaggtcaatctggaattcagcactttttacaagaataccatcgccaagtttctgcagttaagtgacatggaaatgctgtgctag

SEQ ID NO: 238693 - DNA, 4476 bp, synthetic construct
  misc_feature 1..4476: note = Description of Artificial Sequence: Synthetic coding sequence
  source 1..4476: mol_type = other DNA
atgaatggagtggctttctgtctggtgggaataccccctcgccctgaacctaggcccccacagctcccccttgggcctcgcgacggttgtagccctcgtagaccatttccatggcaggggcctcggactctcctactgtacaagagccctcaggacgggttcggatttaccctgaggcactttattgtgtacccccctgaatccgccgttcactgttctctcaaagaagaagagaatgggggaagagggggtggcccaagccctcggtacaggctcgagccaatggacactatcttcgtcaagaatgtcaaggaggatggcccagcccacagggccggactgagaaccggggatagactggtgaaggtaaacggcgaaagcgtaatcggaaagacatatagccaggtaattgcgctaatccaaaattcagacgatactctggaactctcgattatgccaaaagatgaggacatcctgcagctggcttacagccaggacgcatatcttaaggggaacgagccctattctggggaggcccgatcaataccagaacccccacccatctgttaccccaggaagacatatgctccgccagccagagctagtaccagggcaacaatggtgcccgagccgacaagcgcgctgccatctgacccacgctctcctgctgcgtggagcgaccccggacttagagtgcctcccgctgctcgcgctcatctcgacaattctagcttagggatgagccagcctaggccgagcccgggtgccttccctcatttgtccagcgaaccccgtaccccacgggcttttccggagcccggttccagagtacccccatcacgtctggaatgccagcaggcactctcacattggttaagtaaccaagtccccagacgtgccggagaaaggagatgccctgcaatggctcctagagcccgaagtgcaagtcaggaccggctagaagaggtggccgctccaagaccatggccctgctccacgagccaggacgccttgtcgcagcttgggcaggagggatggcatcgagcccgttccgacgattacttgtcccgtgctaccaggagtgcggaggccctgggacctggcgctctggtcagtcccaggtttgagcggtgtggctgggctagccaacggagttctgcacgcacgcccgcttgcccgacccgcgacctgcccggaccccaggcacctccccctagcggcctccaggggctggacgatctcggatacatagggtatagatcttacagcccaagttttcagagacgaaccgggcttttacacgcactgagcttccgagactcgccatttggcggactccctacttttaatcttgcgcaaagtcctgcatcatttccacctgaggccagcgagccacccagggtggtgagacccgaacctagtaccagggcgttagaaccccctgccgaggatcggggagacgaagtcgtgctgcggcagaaaccaccgaccgggcgtaaggtgcagctcacaccagctcgacagatgaacctcggattcggagatgagagcccagaaccagaagccagtggccgaggcgagaggcttggaaggaaggtggctccgcttgcaacaacagaggattccctggcctccatcccatttatcgatgagccaacttccccatccatagatctgcaagccaagcatgtcccagccagcgccgtggtctcatcagccatgaactccgcacctgtgttgggcacaagcccaagctctccaacgttcaccttcacactcggtcgacattacagtcaagactgctcatcaattaaggcgggtcggaggtcttcctacctcctggctatcacgaccgaacgttctaagtcctgcgatgacggtcttaatacctttcgggatgaagggagggtcctgcgacgcctcccaaacaggatccccagcctacgcatgcttagatcgttcttcaccgatggctctcttgacagctggggcacctcagaggacgccgacgctcccagcaagaggcactccaccagcgatctctcagacgcaacctttagcgacattcggagagagggttggctgtactacaagcagattctcacaaagaagggcaaaaaagccggatcagggctgcggcagtggaagagggtgtacgccgcactccgggctcggtccctgagtctgtctaaagaaaggcgcgagcctggacctgccgctgcgggtgctgctgctgctggagctggggaggacgaagcggctcccgtttgcatcggttcttgcctcgtggacattagttatagcgagacaaagcggagacacgtcttcaggctaaccaccgcagacttttgcgagtacctgttccaagcagaggacagagatgatatgctagggtggatacgggcaatcagagagaattcccgggctgaaggagaagatcctggatgcgcaaatcaggctttgatcagcaagaaacttaatgactaccggaaggtgtctcacagctcaggaccaaaggctgattcctcgcctaagggctcacgcggactgggcggactcaaaagcgagttcttgaagcagtcggctgcgagagggctgcggacccaagaccttccagctggatcgaaagacgatagtgccgcagccccaaagactccatggggcatcaacattataaaaaagaataagaaggcggctccacgggctttcggcgtgcgactcgaagagtgtcaaccggctactgagaaccagagagtgcccctcatcgtggccgcttgttgtcgcatcgtggaagctagaggcctcgagtccacaggaatataccgcgtgcccggtaacaatgccgtggtgtccagtctacaggagcagcttaaccgaggcccaggcgatataaatctgcaggacgagcgctggcaagacctgaacgtcatttcttcccttctgaagagctttttccgcaaattgcctgaaccgttgtttactgacgacaagtacaacgatttcatagaagcgaacagaattgaagatgcccgagaaagaatgcgaacactccggaagttgatcagggatctgcccggtcactactatgagacgttgaagttcctcgtgggtcacttaaaaaccattgcagaccacagcgaaaagaataagatggaacccagaaatctcgcgttggtatttgggcctacactcgtcaggaccagtgaagacaacatgaccgatatggtgactcacatgccagacagatataagattgtggagactctcatccagcactccgattggttctttagtgatgaggaggataagggagagcggacccccgtcggtgacaaggagcctcaggcggtccccaatatagagtacttgctgcccaatatcggccgaaccgttcctcccggagacccagggagcgactccacgacctgctcctcagccaagtcgaagggctcatgggctccaaaaaaggagccatacgctagggaaatgctggccatatcgttcattagcgccgtcaacaggaagcgcaagaagagaagggaagcccgagggcttggttctagcactgatgacgatagtgaacaggaggcccacaaacctggtgccggtgctaccgcccctggaacacaggaaaggccacagggtcctctaccaggagccgtcgcacctgaggcccctgggagactgtcacctcctgcagccccagaagaaagacccgcagccgacacacgttccattgtatcgggatactccacactgagtaccatggatcggtctgtgtgttccggagcttcaggacggcgagctggagcaggcgatgaagctgatgacgaaaggtccgagctttcccacgtggagacagacacggaaggagccgctggagccggacccggaggtcgccttaccagaaggccgtccttcagttcacatcacctgatgccttgtgacacactcgctaggagacgccttgcccgaggtaggcctgatggcgagggcgcagggagaggtgggcctcgggctcctgagccacctggcagcgctagcagtagcagtcaggagagcctccggccaccagctgcggctctggcctccaggccgtcaagaatggaggccctgcgccttcgcttgcgaggaacagctgacgatatgttagcggtgcgtctccgcaggcctttgtcaccggagactagacgcaggcggtcgagttggcgcaggcataccgtggtcgttcaatctccactgaccgatcttaacttcaatgagtggaaagagctcggcggtggaggtcctcctgaaccagctggggctagagctcactcagacaacaaggacagcggactgtccagcctggaatcaaccaaggctcgggctccatctagcgccgctagccagccccctgcacctggtgatacaggaagccttcagagccagcctccaagaagaagcgccgcttctcgcctgcatcagtgtctctag

SEQ ID NO: 238694 - DNA, 3435 bp, synthetic construct
  misc_feature 1..3435: note = Description of Artificial Sequence: Synthetic coding sequence
  source 1..3435: mol_type = other DNA
atgaacggcgttgccttctgcctcgtgggaatacccccacgtccagagccccgacctccccagctgcctttggggcctcgcgacggctgcagccctcgaaggccttttccatggcaggggccaagaacccttctactttacaagagtccccaggatgggttcggattcacacttcgccatttcatcgtgtacccacccgagagtgccgtccattgtagccttaaagaggaggagaacggaggcaggggcggtgggccatccccacggtatagactggagccaatggacacgatatttgtgaaaaacgttaaagaggacgggcctgcccaccgagctggtctgagaactggggatcggctggtcaaggtgaacggggagtcagtgattggcaagacctattcacaggtgattgcactcattcagaacagtgatgacactctggaattatccataatgcctaaagacgaggacatcctgcagctggcttacagtcaggacgcctaccttaaggggaacgagccctattccggtgaggcccgttccattccagagcccccacccatctgttatccaaggaaaacatatgctcctcccgctcgggcatccacaagagctactatggtgcctgaacctacttcagctctgccaagcgacccgaggtcacccgctgcctggtccgaccctgggctaagggttccaccagccgcacgggctcatttggataactctagcttgggtatgtctcagccgcgaccatcaccaggggcttttccccacctaagctctgaaccccgaacacccagagctttccctgagccaggaagtcgcgtgcctcctagtcgcctcgaatgccagcaggcactgtcacactggctgtccaaccaggtgcccaggagagctggtgagcgaagatgtcctgcaatggcacctcgggctagatccgcctcgcaggatagactcgaagaagtggcggctcctagaccttggccatgcagcacaagccaggacgccctgtcacagttgggacaggaaggctggcacagagcccgtagtgatgactacctctccagagcaactcgtagcgccgaagcgctcggacccggagctctggtgagtccgaggttcgagagatgtggatgggcctcccagaggtcgtctgcccgaacgcccgcatgccctaccagagatctgccaggtccacaggccccaccaccctccggcctgcaggggctggatgatcttggttatattggctataggtcctacagccctagcttccaacggaggactggcctgctgcatgccctttcctttcgggattcaccttttggaggtctgccgacgttcaacttggcccagagccctgcctccttccctcctgaggcctcagagcccccaagagtggttcgcccagaacctagcacacgcgctctagagccgcctgcggaggataggggtgacgaagtcgtactgcggcagaagcctcccacagggagaaaggtacagttgacaccagcgcgacagatgaatctgggattcggggatgagagtcctgagcccgaagcatccgggaggggtgagcgcctgggcagaaaagtcgctcccctggccaccacagaagattcgcttgcatccatcccttttatcgacgaaccaacaagcccaagcattgacctgcaggccaagcatgtccctgcgtcagccgtggtttcctcagctatgaactctgctcctgtgctcggcactagtccttcttcccctacatttacctttacactgggccgacactactcacaagattgttccagtattaaggcgggacgtcggtcttcctatctgctggctattacgaccgagaggtctaagtcctgtgacgatgggctgaatacctttagagatgaaggcagagttttacgtcgtctgcctaatcggataccgagccttcgaatgctccgcagcttttttacagatgggtccctggacagttggggaactagcgaggacgctgatgcaccaagcaaaagacacagcacatcggatctctcagacgctacattttcggacattaggcgcgagggctggttgtactacaaacaaatcttgacaaagaagggaaagaaggcagggtctggcttacggcaatggaagcgggtctatgcagcgttgcgagctcggtcactctcactcagcaaagagagacgcgagcccggaccagccgcagccggagccgctgcagccggagctggagaggacgaagctgcaccagtgtgcatcggctcttgcctcgtcgacataagctattcagaaaccaaacgacggcatgtgtttaggttgacaaccgcagacttttgcgagtatctttttcaggccgaagatcgtgatgatatgctgggatggatacgggctatcagagagaattctagggccgagggggaggatcccggttgcgctaatcaggccctgatatccaaaaagctcaatgactatcggaaggtatctcactcctctggaccaaaggcagattctagcccaaaaggctctcgcggtttagggggtcttaaatctgaattcttaaagcagtctgcagcaagaggtcttaggacacaggacttgccagcaggctccaaggacgattctgcagcggcacctaagacgccctgggggatcaacatcattaagaagaacaaaaaagctgcgcctcgggcatttggcgtcaggctggaagaatgccagccagccaccgaaaatcagcgggttcccctcatagttgctgcctgttgccgtatagtggaagcacggggactggagtcaaccggcatctacagagtacctggcaataacgctgtggtctcctcactccaggaacaactgaatcgcggtccaggagacatcaacctgcaggacgagagatggcaagacctgaatgtgatctctagcttactgaaatcattctttcggaagcttccggagcctctgtttacagacgacaagtataacgacttcatcgaagccaaccgtatcgaggatgcaagggagaggatgcgcacccttaggaaattgattcgcgacctgccaggacactactatgagaccctaaaattcttggtgggacacctgaagacaatagcagatcatagcgagaagaataaaatggagcctcgtaacttggccctggtgtttggtcctacactggtcagaaccagcgaagacaatatgaccgacatggtcacccatatgcccgataggtataagattgtggagacactgatacaacacagcgattggttcttctctgatgaggaggataagggcgagcgcacaccagtcggggataaagaaccgcaagctgtgcccaatatcgagtatctgttaccaaacataggcaggacagtgccacccggtgatccagggagtgctgacctgcttgaaatatag

SEQ ID NO: 238695 - DNA, 4194 bp, synthetic construct
  misc_feature 1..4194: note = Description of Artificial Sequence: Synthetic coding sequence
  source 1..4194: mol_type = other DNA
atggatacaatcttcgtaaagaacgtaaaagaagacggtccggcacatcgagcaggcctcaggaccggcgaccgcttagtgaaggtgaacggagaatccgtgattggcaaaacatatagccaggtaatcgcactgattcagaatagcgatgacacccttgaactgagcatcatgcctaaggatgaggacattctacagctggcctattctcaggacgcatacctaaagggcaatgagccatactccggggaggctcggagcatacctgagccccctcctatctgttaccccaggaagacatatgcccctcctgcaagagcaagcacccgggctaccatggtgcccgagcccaccagcgctctgccatctgacccaagatcccccgcagcgtggtccgacccgggacttagggtccctccagcagccagggcccaccttgacaatagctctctaggcatgagtcagccacggccttcaccaggggcttttcctcacctgtcctctgaacccagaaccccgcgtgctttccccgagcccggatctcgtgtgcccccttcccgcctggagtgtcaacaggccttgtcccactggctgtctaaccaagtgccaagaagagctggagagaggcggtgcccagccatggcccctagggccagatccgcttcccaggaccgcctcgaggaggtggccgcaccccgtccttggccgtgttccacatcacaggatgcactgtcgcagctcggacaggagggatggcaccgggcacggtcagatgactacctgagtcgggcaacccggagcgccgaagctttaggccctggggcactagtgtctcctagatttgagaggtgcggttgggcttcccagcgctctagcgctaggacaccagcctgtccaaccagggatctgccagggcctcaggctcctccacccagtggcctgcagggtctggacgacctgggctacattggctacagatcctattctccgtccttccagcgcaggacaggactcctgcatgcccttagcttccgcgactccccttttggtggacttccgacgtttaatctcgctcaaagtcctgcatcgtttcccccagaggctagcgagccccctcgagtggtgcgccctgaaccttccactcgggctctggaacccccagcagaagaccgcggagatgaggtcgtgctgaggcagaagcccccaacagggaggaaggtccagctcacgcctgcaaggcagatgaacctggggttcggggacgagtcacccgagccagaagcctcgggaaggggggaacgactcggcaggaaagtggccccactggcgaccactgaggatagcctggctagcatacctttcatcgatgagccgacctccccttcaattgacctccaggcaaagcatgtgcctgcgtcagccgttgtgtccagcgccatgaactctgccccagtactcggcaccagccctagtagccctacgttcactttcactcttggcagacactactcacaggactgcagctctatcaaagctgggagaaggtctagctacctactcgccataactaccgagagatccaaatcatgtgatgatggtctcaataccttcagggacgagggacgagttctgagacgcctgcctaaccgaattccctcattgaggatgctgagatcctttttcaccgatggaagcctggactcgtggggaacttctgaggacgccgacgctccaagcaagagacactctacatccgacctctccgatgcaaccttcagtgacatacgacgagaaggatggctgtactataagcagatcctgaccaagaagggcaagaaagcaggcagtggtctcagacagtggaaaagggtctatgccgcactccgtgccagatctctctctctttctaaggaaaggcgcgagccagggccagccgcagctggagcagccgcagcaggggcaggggaagacgaagcagctccggtttgcattggcagctgcctcgtggacataagttatagcgagaccaaacggaggcatgtgtttcgcctcacaacggctgacttttgcgagtatctgtttcaagcggaagaccgcgacgatatgcttggttggatccgggcaataagagagaactctcgggctgagggtgaggatccaggatgcgccaaccaagctttaattagtaagaaacttaacgattatagaaaggtgtcccacagctcagggcctaaggcagactcaagcccaaagggatccagaggactgggcggtctgaagagcgaatttctcaagcagagcgccgctaggggtctcagaacccaggacttgcccgcaggtagtaaggacgattcagctgccgcaccgaaaactccatgggggatcaacattataaagaaaaacaagaaggccgctccacgcgcttttggagtccgcttggaagagtgccagcccgcaacggagaaccagcgggttcctctgatcgtggcagcctgttgtagaatcgttgaggccagaggacttgagtcaacaggtatctacagggttccaggcaacaacgcggttgtctcctcgctgcaggaacagctgaatcggggacccggagatatcaaccttcaagacgagaggtggcaggatctcaacgtcatctcctctctcctgaagagcttctttcgaaaactgccagaacctctgtttacggacgacaagtacaacgacttcatcgaggcaaacaggatcgaggatgcccgagaacgaatgcgaacgctgcgcaaactgattcgcgatcttcctggccattactacgagacgcttaagttcttggtagggcacttgaaaaccattgccgaccacagcgaaaagaacaagatggaacccagaaacctggctttggtgttcgggcctacattggtcaggacaagtgaagataacatgacagacatggtgacacatatgcctgataggtataagatcgtggagaccctgatccagcattctgattggttcttttctgatgaggaggacaaaggcgagcggacccccgtgggggacaaggaaccgcaggctgtgccaaatatagagtacctgttacccaacattggacgaactgtcccccctggggacccgggttcagacagcaccacatgctcttctgcaaaatctaaaggttcctgggcaccaaaaaaggaaccatatgccagggagatgctggctatctcctttatttcggccgtaaaccgaaagaggaagaagaggagggaggccagggggttggggagttccactgacgacgactcggaacaggaagcccataagcccggtgcaggagcaacagcaccaggcacccaggaaaggccacagggaccgctcccaggggctgtggctccggaggccccagggaggctgagccctcccgcagccccagaagagcgtcctgcagccgacacccggagcatcgtctcaggctatagcacactgtcaactatggataggagcgtctgctctggcgctagcggtcgacgggcaggcgcaggagacgaagcagacgatgagaggagcgagctgtcacacgttgaaaccgatacagaaggcgctgcgggagctggccctggtgggcgtctgacccgacgccctagcttcagcagtcaccacctcatgccttgcgacactttggccagacggcgtctggcgagggggaggccagacggagagggagccggaagggggggtcctcgcgcacccgagcctcctgggtccgcctcctcatctagccaagaatctttgcggccaccagcagcagccctagcttcacgacctagccggatggaggctctgaggttacgcttaagagggactgctgacgatatgctcgccgtgcgtctgcggaggcccctttcccccgagactcgacgacgccgaagctcttggcggcgacacacagttgttgttcaaagccccctaaccgatctaaacttcaacgaatggaaagagctgggaggaggcggacctcctgaacccgcaggagcccgagcacattccgataacaaggactctggcctcagctccctcgaatccactaaggcgcgagctccaagttcagccgcttcccagccacctgcgccaggagacaccggatccctgcagagccagccccctcgcaggtctgccgcttcacgcctccatcagtgcctctag

SEQ ID NO: 238696 - DNA, 1968 bp, synthetic construct
  misc_feature 1..1968: note = Description of Artificial Sequence: Synthetic coding sequence
  source 1..1968: mol_type = other DNA
atgccagaagatcgtaatagtgggggatgtccagccggagcactcgccagcacaccatttattcctaaaactacatatagacgcatcaagcgctgtttctcatttaggaaaggcatttttggccagaagctggaagataccgtgcggtacgaaaaacgctacggaaaccggctagcccctatgctcgtcgaacagtgcgttgacttcattcgccagaggggtctgaaagaagaagggctgtttcgcctccccggacaggccaatctcgtgaaggagctgcaggacgcgttcgactgcggggagaagccttctttcgacagtaataccgatgtccatacagtcgcatcgttgctcaaattgtaccttcgggaactacccgagcctgttataccttatgcaaagtatgaggacttcctgagttgcgccaagctgctgagtaaggaagaagaagctggcgttaaagaactcgcaaagcaggtcaagtctttgcctgtcgtcaattataacttgctgaaatacatctgccgcttccttgacgaggtacagtcctacagtggtgtcaataagatgagcgtgcagaatcttgcaacagtgttcgggcctaatatccttagacccaaagtggaagatcctctgaccatcatggaaggcactgtggtcgtccaacagctgatgtcggtgatgatctcaaaacatgactgcctctttccaaaggacgctgagctacagagtaaaccccaggatggcgtcagtaataataacgagattcaaaagaaggcaactatgggacagttgcaaaacaaggagaacaataacacaaaggactcccctagccggcagtgttcttgggacaagtctgagagcccccagcgttcttctatgaataacgggagcccaacagccttatccgggtccaagaccaattctcccaagaactccgtgcataaattggatgtgagtagaagccccccattgatggtgaagaagaatccggcattcaacaaggggtccggcattgtcacaaacgggagcttttcgtcatccaatgccgagggacttgagaagacgcaaaccaccccaaacggctcacttcaagccagacggagctcctctttgaaagtctccgggaccaagatgggcacccactccgtgcagaacggtactgtgaggatgggcatattgaattccgacaccttgggtaacccaactaacgtccgtaacatgtcgtggttgccaaatggttatgtcactctgagggacaacaagcagaaggagcaggcaggcgagctaggccagcacaacaggctgagtacatacgataacgtgcaccagcagttttctatgatgaatctcgacgataaacaaagtattgattctgccacatggtctacctcttcctgtgaaatatcccttcccgaaaatagtaatagttgccgaagcagcacaacaacctgccctgaacaggacttttttgggggtaatttcgaggatcctgtgctagacggaccaccccaggatgatttaagccacccccgtgactatgagagtaaatccgatcaccgatccgtgggaggccgatcttcccgggcaacatcctcttctgataatagtgaaacctttgttggaaattcaagctccaaccatagcgccctacacagccttgtctcctccctcaaacaggaaatgaccaagcagaagatcgaatacgagtcaaggattaaatcattagagcagaggaatctgacactagagacagagatgatgtctcttcatgatgagcttgaccaggagcggaagaaattcactatgatcgaaattaagatgaggaatgccgaacgcgcaaaggaggacgccgagaaacgcaatgatatgctacagaaggaaatggaacaatttttttccacatttggggagctgacagtggagcctcggagaacagaaaggggcaacacgatctggattcagtag

SEQ ID NO: 238697 - DNA, 1962 bp, synthetic construct
  misc_feature 1..1962: note = Description of Artificial Sequence: Synthetic coding sequence
  source 1..1962: mol_type = other DNA
atgacggccaaccatgagtcctacttgctgatggccagtacgcagaatgacatggaggactgggtgaaaagtatcagaagagtcatctggggcccttttggcggagggatcttcggacagaagctggaggatacagtaaggtacgagaaacgttatggaaacagactcgcacccatgctggtcgaacaatgcgtcgatttcatacgccaacggggactcaaagaggagggactgttccgtctgcccggacaggccaatctagtcaaagaacttcaggacgccttcgactgtggggaaaagccatctttcgacagcaatactgacgttcatacagtcgccagcctgcttaagttatacttgcgggagcttcctgaacctgttatcccatacgcaaagtacgaggattttctctcctgtgccaaactactcagcaaggaagaggaagcaggtgtgaaagaactggccaagcaggtaaagtccctgccggtggtgaactataacttactgaaatatatttgtcgattcttggacgaggtgcagagctatagcggggtcaacaagatgtccgtgcagaatcttgctactgtgttcggtcccaacatcctgcgacctaaggtggaggatcccctaaccattatggagggaaccgtcgtggtgcagcagctgatgtcggtgatgatctcaaaacacgattgtctctttcctaaagatgccgagctgcagagcaaacctcaggacggtgtgtcgaataacaacgagatacaaaaaaaagccacaatggggcagttacaaaataaggagaacaacaatactaaggactcaccctcccggcagtgtagctgggacaagagcgaatccccccagcgaagttctatgaataatggtagtcccactgccctgagcgggtctaagacaaactcgcccaagaattctgtacacaaacttgacgtgagccggagtccccctctgatggtgaagaagaacccggcttttaacaaggggtctggtatcgtgactaatggttctttttcctcttcaaatgcagaagggctggagaagacccagactacccctaacggctccctacaggctagaagaagttccagtctcaaggtaagtgggaccaaaatgggaacacattccgtgcaaaatggcactgtgcgcatgggtattctcaattccgacactttaggcaatcctacaaatgtaagaaatatgagttggctcccaaacggttatgtgactctgcgggataacaaacaaaaagagcaggcgggtgagctcggccagcataacagattgagtacatacgataatgttcaccagcagttttctatgatgaatctggacgacaagcagagcatcgactcagctacatggagtactagtagctgcgaaatttcacttcccgagaactctaactcttgtcgctccagtaccaccacttgccccgaacaggatttcttcggcggaaatttcgaagatcccgtcctcgatggacccccacaagatgacctgtcccaccctagagattacgaaagcaaaagcgatcacagaagtgtcgggggacgttcttcacgcgcaactagtagttcagataattcggagacatttgtgggcaactcaagtagcaaccattctgcactgcactccctggttagcagtttgaagcaggagatgaccaagcaaaaaatagagtacgagagcagaataaagtccctcgaacagcgcaacctgacgttggaaaccgagatgatgtctctgcatgacgaactggatcaggagcgcaagaaatttacaatgatcgagatcaaaatgcgcaatgccgagcgagcaaaggaggacgccgaaaagcgcaacgacatgcttcaaaaggagatggaacagtttttcagcacatttggtgagcttactgtcgaacccaggaggactgagaggggaaacaccatctggattcagtag

SEQ ID NO: 238698 - DNA, 2247 bp, synthetic construct
  misc_feature 1..2247: note = Description of Artificial Sequence: Synthetic coding sequence
  source 1..2247: mol_type = other DNA
atggaagaaaataatgatagcactgaaaacccccaacagggacagggccgacagaacgccatcaagtgcggatggttacgtaaacagggcggttttgtcaagacatggcacactcggtggttcgtcctgaaaggggatcagttgtattattttaaggacgaggatgaaactaaaccactcggcactatattcttgccagggaataaggtgtctgagcatccttgtaatgaggaaaaccctggtaaattcctcttcgaggtggtgcccggaggagaccgggatcgtatgacggccaaccatgagtcatacttactgatggccagcactcagaacgatatggaggactgggttaagtctatacgccgtgtcatatggggaccctttggtggtgggattttcgggcagaagctggaagacacagtcagatacgaaaagagatacggaaatcgcctcgcaccaatgctggtcgaacagtgtgttgatttcatacgtcagcggggtctgaaggaagaagggctcttcaggctacccggacaggccaatctcgtcaaggagctgcaggatgcttttgactgcggggagaaaccctctttcgacagtaacacggacgtgcatacagtggcgagcctcctgaaactttaccttagggaattaccagagcctgtgatcccatacgccaaatacgaagactttctgagctgcgcaaaactgctttccaaagaggaggaagcaggggtgaaggagctcgcgaagcaagtgaaatcactccccgtagttaactacaacctgctgaagtacatctgtcggttcctggatgaggtccagtcctacagtggcgttaacaagatgagcgtgcagaacctagcaactgtgttcggacctaatattctccggccaaaagttgaggatccattgacgattatggaaggcaccgtggtggtgcagcagttaatgagcgtgatgattagtaagcacgactgcttgttcccaaaagatgccgagctacaaagcaaaccccaagacggcgtttccaataacaatgagattcaaaaaaaggctaccatgggccagctccagaacaaggaaaacaataataccaaggacagccctagccgccagtgcagctgggacaagtctgaatcgccccagaggagcagcatgaacaacggaagtccaaccgccctgtcaggttctaagactaatagtcctaaaaacagcgtccataaactggacgtgagtcgatcccccccactcatggttaagaagaacccagcgttcaacaaggggtccggcatcgttaccaatggctcgttttcatcttccaatgcggagggcttggaaaagacgcaaactacccctaacggaagcttacaggccaggcgcagcagtagccttaaggtcagtggtaccaagatgggtacccacagcgtgcaaaacggtactgtccggatgggcatcctcaatagcgacacactcggcaatccgacgaatgtccgcaatatgtcttggctgcctaatggctacgtaacgcttagggataataaacagaaagaacaggctggcgagctgggacaacacaatcgcctgagcacctacgacaacgtccaccagcagttcagcatgatgaacctggacgacaagcaaagtattgacagcgcaacgtggagcaccagctcttgcgaaatcagcttacccgaaaactcgaatagttgtcgaagcagcacgacaacgtgccccgagcaagatttcttcggcggaaacttcgaggatcccgtgcttgatggccctccacaggacgacctttctcatccacgcgattatgaatccaaatctgatcacaggagtgtaggcggtcggtcttcccgcgctacctctagctccgataactctgagacctttgtgggcaactctagttcaaatcatagcgccctccactccttggtgagtagtctgaagcaagaaatgacaaagcaaaaaatagaatatgagagtcggattaagtccctggagcagcggaatctgacgcttgaaacagaaatgatgagtctgcacgacgagctcgaccaagaacggaagaaatttacgatgatcgaaatcaagatgcgtaatgcggagcgagctaaagaagacgctgagaagagaaatgacatgctgcagaaagagatggaacagtttttttctacttttggggaattgaccgtggagcccagaaggactgaacgaggcaatacgatttggatccagtag

SEQ ID NO: 238699 - DNA, 741 bp, synthetic construct
  misc_feature 1..741: note = Description of Artificial Sequence: Synthetic coding sequence
  source 1..741: mol_type = other DNA
atggaggaaaacaatgacagcactgaaaaccctcagcagggccagggtaggcagaacgcaattaaatgtggttggcttcggaaacagggcggtttcgtgaaaacatggcacactagatggttcgtgcttaagggggaccagttatattatttcaaggacgaagatgagactaaacccctaggaacaatattcctcccgggaaacaaagtcagtgaacatccttgcaatgaggagaatccgggtaagtttttattcgaggttgtgcccggtggagaccgggaccggatgacggccaaccacgagagctacctactgatggctagcactcagaacgatatggaggattgggtgaaatcaattcgccgtgttatctggggtcctttcgggggtgggatatttggacaaaagctggaggatactgtaagatatgagaaaaggtacgggaacagactggctcccatgcttgtggaacaatgtgtcgacttcatcaggcaaagagggttgaaggaggaggggctcttccgcctgcctgggcaggcaaacctggtgaaggaactgcaggatgcattcgattgtggggagaagccctccttcgactcaaacacggacgttcacaccgtggcgtctctactgaagctatatctcagggagttacccgagcctgtgattccttacgctaaatatgaagactttctgagctgtgctaagctgctatccaaagaggaggaggcagtttcatag

SEQ ID NO: 238700 - DNA, 249 bp, synthetic construct
  misc_feature 1..249: note = Description of Artificial Sequence: Synthetic coding sequence
  source 1..249: mol_type = other DNA
atgactgcaaaccacgaatcctacttacttatggcctccacacagaacgacatggaagactgggttaagagcatccgcagagtgatatggggcccatttggagggggaatttttgggcagaaactggaagacaccgtgcggtacgagaaacgctatggcaaccggctggcacctatgctggtagaacagtgcgtggactttattaggcagagaggactgaaggaggaggggctgtttcgcctaccctag

SEQ ID NO: 238701 - DNA, 1938 bp, synthetic construct
  misc_feature 1..1938: note = Description of Artificial Sequence: Synthetic coding sequence
  source 1..1938: mol_type = other DNA
atgtcccttaaactcccaagaaactgggattttaatttgaaggtcgaagctgccaagattgccaggagtcgatcggtgatgaccggggagcagatggcagcatttcacccctcatccaccccaaatcctttggaacggccaattaagatggggtggcttaagaaacaaagaagtattgtcaagaactggcagcagagatactttgtgctccgcgcacagcagctttactactacaaggacgaggaagacacaaagcctcaggggtgcatgtacctgccaggctgcactatcaaggagattgccaccaatcccgaagaagcaggcaaattcgttttcgagatcataccagcatcttgggatcagaacaggatgggtcaggattcttacgttctcatggcaagctcccaggcagagatggaggaatgggttaaattcttgaggagggtggctggcacaccatgtggagtgttcggtcagcggcttgacgagacggttgcctacgagcagaaatttggcccacaccttgtacccattctggtcgaaaagtgcgcagagtttattctggagcatggacggaatgaggagggcatctttaggctgccaggacaggataatctcgtaaagcaattacgcgatgcattcgatgcgggtgagaggccttcttttgatagggacaccgatgtgcataccgtggcgagcctcctgaaactttacctgcgagatctccccgagcccgtggtgccgtggagccaatacgagggatttctcctctgtggccagctcacaaacgccgatgaagctaaagcgcaacaggaattaatgaagcagctgtcaattttgccacgcgataactactctctgttaagctacatttgcaggttcctgcacgagatacagttgaattgcgcggttaataagatgtccgtggataatctggctaccgtaatcggcgtgaacctcattaggagtaaggtggaagaccccgctgtcatcatgagaggaaccccacagatacagcgcgtgatgactatgatgatcagggatcacgaggtgctgtttcccaagtccaaggatatcccactatcccctcccgcacagaaaaacgatccgaagaaggcccctgtggctagatcctctgtgggctgggacgcgacggaagacctgagaattagtcggacagattcttttagcagcatgacttcagattctgacactacatccccaacaggccagcagcctagcgacgctttccctgaggactcttcaaaggtgccaagggaaaaacctggtgattggaagatgcagtcccgaaagcgcacacaaaccctgcccaatcggaaatgctttttgacatccgccttccaaggagcaaacagcagcaagatggagatatttaaaaacgagttctggagtccgagtagcgaagcaaaggcgggagaaggtcacaggcggaccatgagccaagatctccgtcagctgagtgattcccagcggaccagcacctacgataatgtcccgagtctgcccggttcccccggtgaggaggcatctgcgcttagctcccaagcgtgcgatagcaagggagacaccctcgctagccccaacagcgagacaggacctggcaaaaagaatagcggggaggaggagatcgattccctgcagcgcatggtgcaggagctccgcaaggaaattgaaactcagaaacaaatgtatgaggaacagataaaaaatctcgagaaagaaaactacgatgtatgggcaaaggtggtgcgcctgaacgaggagctggaaaaggagaagaagaaaagcgccgcacttgaaatcagcctacggaacatggaaagaagccgcgaagacgtggagaagagaaataaagcccttgaggaagaggtgaaagagtttgtgaagtctatgaaggagcccaaaacggaggcttag

SEQ ID NO: 238702 - DNA, 1917 bp, synthetic construct
  misc_feature 1..1917: note = Description of Artificial Sequence: Synthetic coding sequence
  source 1..1917: mol_type = other DNA
atgagcctgggacaatcagcttgtcttttcctttccatagcgaggagccgaagtgtgatgactggagaacaaatggcggctttccatccatctagtacaccaaaccctctagaacgcccaatcaagatgggctggctcaagaaacagcgctccatcgtgaagaattggcagcagagatatttcgtcctgcgggcacagcaactttattactataaagatgaggaagacaccaagccgcagggatgcatgtacctacccggttgtaccattaaagaaatcgcgactaaccccgaggaagctggaaagtttgtcttcgaaattattccagcatcctgggaccagaatcggatggggcaggatagctacgtcctcatggcgagttcgcaggccgagatggaggagtgggttaaatttctgaggagagtggcaggaactccctgcggagtgtttgggcaacggctggatgagacagtggcctacgagcaaaagttcggccctcacctggtgccgattctcgtcgaaaagtgtgctgaatttattttggagcatggtcggaacgaggaaggcatatttcggcttccagggcaggacaacttggtcaaacagctgagggatgcttttgatgccggagagagaccttctttcgacagggataccgatgtccacactgtggcatccttgctgaaattgtacctgagggacttgcctgaacccgttgtgccctggtcccaatacgaggggttcctcctctgcgggcagctcacaaacgctgacgaggcaaaggctcagcaggagctgatgaagcagctgagtattttgccaagagacaactacagtcttctctcctacatctgtagatttctacacgaaatccagctaaactgcgccgtgaataaaatgtccgtagacaatcttgccacagtgatcggggtgaacctgatccggtccaaagtcgaagatcctgccgttattatgagaggtacgccacagatccagagggtgatgactatgatgattagggaccacgaagtcctgtttcctaaaagtaaagacataccattgagtccccctgcacagaaaaatgatcctaagaaagccccagtcgcccgaagctccgtcgggtgggacgctacggaggatctgcgcattagccggacagattccttctccagcatgacctcggacagcgatactacatctcccacgggacagcagccttctgatgcttttccggaggacagttccaaggttccaagagagaagcccggtgactggaagatgcagtcccgcaagcgcacgcagacactgcctaacaggaagtgtttcttgacatcggcctttcaaggcgctaactctagcaagatggagatcttcaaaaatgaattctggtcacccagctctgaggccaaggccggagaaggccatcgacgaacgatgagtcaggacctccgccagctgtctgatagtcagcggacctccacatacgacaacgttccaagtctgcccggttctccaggcgaggaagcatcagcattaagttctcaggcttgcgacagtaaaggtgacaccttggcctctcccaattcagaaaccggacctgggaagaaaaattccggagaggaggagatcgactcactgcaaagaatggtgcaagagctgcgcaaagagatcgaaacccagaaacagatgtacgaggaacaaattaaaaacctggaaaaggaaaattacgacgtgtgggctaaggttgtgagactgaatgaggagctggaaaaggaaaaaaaaaagagtgctgccctggaaatcagtttgcggaatatggaacgttccagagaggatgtcgaaaagcggaataaagcattagaggaggaggttaaggaatttgttaagagcatgaaggagcccaaaacagaagcgtag

SEQ ID NO: 238703 - DNA, 1941 bp, synthetic construct
  misc_feature 1..1941: note = Description of Artificial Sequence: Synthetic coding sequence
  source 1..1941: mol_type = other DNA
atgagcttgaagttacctcggaattgggactttaatctcaaggtggaggcagccaaaatcgcaaggtctcggtctgtaatgacaggcgagcaaatggccgcattccatcccagctccacccccaatcctctcgaacgtccgataaagatgggctggctcaaaaaacaacggagcatcgtgaagaactggcagcagcggtacttcgtgctgcgagcacagcagctctactattacaaagatgaagaggacacaaaaccacagggatgcatgtatttacccggatgtacaatcaaagagatcgctaccaacccggaggaggctggcaaattcgtgttcgagatcatcccagcttcttgggatcagaaccgtatgggacaagacagctacgtgttgatggcctcaagccaagcggagatggaagagtgggtgaagtttctacgtcgagtggccggtacaccctgtggcgctgtgttcggccagagacttgacgaaactgtggcttatgaacagaaattcggcccacacctagtgcctatcctcgtggagaaatgcgctgaatttattctggaacacgggaggaacgaagaaggcatcttcagactgccgggacaggataacctcgtaaagcagttacgcgacgcatttgacgccggtgaaagaccatctttcgaccgagataccgatgtgcacaccgtagccagtctgcttaaactttacctgagagacttgcccgaaccagtggttccttggtcccaatacgaggggttcctgctgtgtggacagctgaccaatgccgatgaagccaaagctcagcaggaactgatgaaacagctgtctattctccccagagacaactatagccttttatcatacatctgcagattcttgcatgagatccaactgaattgtgctgtaaataagatgtccgtggataatcttgccaccgttattggcgtgaaccttatccgttcaaaagtagaagatccagcagtgatcatgagggggactccgcagatacagcgggttatgaccatgatgatccgggaccacgaggttctgttcccgaaaagcaaggacatccccctgtcacctccagctcaaaagaatgaccccaagaaggcacccgtggccagaagtagcgtcggttgggacgctactgaagacctgcgtatttcacggaccgacagtttcagctccatgacttccgactcagatactacgtcccccaccggtcaacaaccctcagatgcgtttcccgaagattcaagcaaagtgcctagagagaaaccgggagactggaaaatgcagtcccgaaagaggacccagaccctgcctaaccgcaaatgctttttaactagcgcctttcagggggcaaattcctctaagatggagatttttaagaacgaattctggtccccctcctcagaagcgaaagccggtgaggggcacagaaggactatgtcccaggatctcagacagctctccgattcacagcggacgagcacctacgataacgtgccgtccctacccggatcaccgggtgaagaagcctctgcactatcgtctcaagcctgcgacagcaagggagatacactggccagcccgaatagcgagacgggacccggtaagaagaactccggggaagaagagatcgactcgctgcaacgaatggttcaagagctacgcaaagagatcgaaacacagaagcagatgtacgaagagcagatcaaaaatctggaaaaggaaaattatgacgtgtgggccaaggttgtgagattaaatgaagaactggaaaaagagaagaagaaatcagccgctttagaaataagcctcaggaatatggagcggagccgagaagacgtggaaaagcgcaacaaggccctggaggaagaggtcaaggagttcgtaaagtcgatgaaggaaccaaagactgaagcatag

SEQ ID NO: 238704 - DNA, 1920 bp, synthetic construct
  misc_feature 1..1920: note = Description of Artificial Sequence: Synthetic coding sequence
  source 1..1920: mol_type = other DNA
atgtctctagggcagtcagcatgcctcttcctgtcaattgcccgaagtagaagcgtcatgaccggcgaacagatggcagcttttcatccgagctctaccccaaaccccctggagcgcccaataaaaatgggatggctcaaaaagcagcgctccattgtgaaaaattggcagcagaggtactttgtactgcgagctcagcaactatactattataaggacgaggaggacacaaaaccccagggatgtatgtacctaccgggatgcactattaaagagatcgcgacaaacccagaggaagcaggcaaatttgtgttcgagattattcctgcttcttgggaccaaaaccgcatggggcaagattcctatgtgttgatggccagtagtcaggcagagatggaggaatgggtaaagtttctgagacgcgtggcgggtacgccttgcggggctgtgtttggacagcgcctggatgaaacagtggcctatgaacagaaatttggaccacatctggtacctattttggtggaaaagtgcgcggaatttattctggagcacggccgaaatgaggaaggcatatttagactgccgggtcaagataacttagtgaagcaactcagagacgcgtttgacgctggagagagaccatctttcgatcgggacactgacgttcataccgtggccagtctgttgaagctctatctgagggacttgccagaaccagtggtaccgtggtcgcagtacgaaggctttttattgtgcggccagttaacaaacgcagatgaagctaaggctcagcaagaactcatgaagcagttatccatcctcccacgtgataactacagcctcctctcatatatatgtcgtttcctgcatgagatacagctgaactgcgccgtgaacaagatgtccgtcgacaatctggccactgtgatcggcgtgaacctcattcggtctaaggtggaggaccctgctgtcattatgcgaggtaccccacagatccagagagtgatgacaatgatgattcgggaccatgaggtgttgtttcccaagagtaaagatatccccctgtctccccctgctcagaaaaatgaccctaagaaggcccctgtggcacgatcatccgtggggtgggatgcaaccgaggacttaagaatctcaaggaccgactcattttcctcaatgacctcggattccgataccacgtccccgacaggccagcaaccctcagacgctttccccgaggactcttctaaggtgcctagggaaaagcccggtgactggaagatgcaaagtagaaagaggacacagactttgcccaataggaagtgttttctaacttccgcgtttcagggagccaattcatccaagatggagattttcaagaatgagttctggagtccctctagtgaagccaaagccggagagggccaccggaggaccatgtcccaggacctgaggcagctttctgacagtcagcgtaccagtacatatgataacgtgccaagccttcccggatcgccaggtgaggaggcgtctgcgctgagcagccaggcttgtgactctaaaggtgatactctagccagtccaaattcagagaccggtcccggaaagaaaaactcaggggaggaagaaattgacagtcttcagaggatggtacaggagcttaggaaggagatagagacacagaaacagatgtatgaagagcagataaagaacttggaaaaggagaactacgatgtctgggccaaggttgtgagactgaacgaagagcttgagaaagagaaaaagaaaagtgccgctctggagatctcactcaggaatatggaacgttctcgggaagacgtggagaagcggaacaaggctcttgaggaggaggtgaaggaatttgtgaaatctatgaaagagccaaagacggaagcttag

SEQ ID NO: 238705 - DNA, 852 bp, synthetic construct
  misc_feature 1..852: note = Description of Artificial Sequence: Synthetic coding sequence
  source 1..852: mol_type = other DNA
atgacgggcgagcagatggccgcttttcatccaagcagcacacccaaccccctcgagagacccattaagatggggtggctaaaaaaacaacgctcaattgtaaaaaactggcagcaaagatatttcgtgctgagagcgcagcagctgtactactacaaagatgaggaggataccaaaccacagggctgtatgtacttaccgggatgcaccattaaggagatagctactaatcccgaagaagcagggaagtttgtgtttgaaatcatccccgcttcctgggatcagaatagaatggggcaagactcttatgtcctgatggctagcagccaagcagagatggaggagtgggtgaagtttcttagacgagtcgcgggtaccccctgtggggctgttttcggccagcgccttgacgagacagtagcctatgagcagaaatttggtcctcatcttgtgcccatcctggtggaaaaatgcgcagaatttatattggagcacggcagaaacgaggaaggaattttccgacttcccggtcaggataatctggtgaagcagctcagggatgcatttgacgccggagaacgaccatcattcgatagagacactgacgtccatactgtggcctcgcttctgaagctgtatttacgcgacctcccggaaccagtggtgccttggtcccagtatgaaggatttctcttgtgcggccagctcactaacgccgacgaggcgaaaaattatagaaataggaacgactgccagtctgtggtgtccgcacaaattcaccaattttgcccgagagtgagtctgctagctcacggtcaggctcaccttttggtgaatgatctgctggtgtag

SEQ ID NO: 238706 - DNA, 1776 bp, synthetic construct
  misc_feature 1..1776: note = Description of Artificial Sequence: Synthetic coding sequence
  source 1..1776: mol_type = other DNA
atgagccttggacaatcagcgtgtttgtttctctctatcgccaggagccggagtgtgatgactggcgaacagatggccgcattccatcccagcagtacccccaacccgttggagcgtccgataaaaatggggtggctcaagaagcagcgaagcattgttaaaaattggcagcagagatacttcgttttgagggcacaacaattgtactactataaggatgaggaagacacaaagcctcaggggtgtatgtaccttccgggttgtaccattaaggaaatcgctacgaaccctgaggaagcagggaagtttgtattcgaaatcattcccgcatcttgggaccagaatagaatgggccaggattcgtacgtgctcatggcgtcatcccaagcggagatggaagagtgggtaaaattcctcaggagggtcgccggtactccttgtggcgcagtgttcggccaacgcctcgatgagaccgttgcctacgaacagaagttcggcccacacctggtgcccatcctagtagaaaagtgcgctgaatttatcctggaacatggccgaaacgaagaaggaatcttcagactacctggacaggataatctggttaagcagctgcgagatgcatttgatgcaggagagaggccctccttcgatagagatacggatgtacacacagtcgcatcccttttgaaattgtatctgagggatcttcctgaacccgtcgtgccctggagccagtatgagggttttcttctatgcggacagctgaccaatgccgacgaggccaaagcccagcaggagctgatgaagcagctgagtatcctccccagagacaattactccctcttgtcatacatttgcagattcctccacgaaatacagctgaattgtgccgtgaacaagatgtccgtggacaacctggctacagttataggtgtcaatctgataaggagcaaagtcgaggatcccgctgtgataatgcggggaacgccccagattcagcgggtgatgacgatgatgattagggatcacgaagtcttgtttcccaaatctaaggacattcccctttccccgcctgcacagaagaatgacccaaagaaggcgccagtagcacggagctctgtcgggtgggacgcaaccgaggacctaaggatcagtcggaccgactcatttagctccatgacctctgatagtgacacgacatctccgaccggtcaacagccatccgatgcctttccagaggatagttccaaggtacccagagagaaaccgggagactggaagatgcaatctcgcaaacgcacccagacccttcccaatcgaaagtgctttcttacatctgcattccaaggggctaactcgagcaagatggagatcttcaaaaacgaattctggtccccctcatcagaggctaaagcaggagagggacaccgacgcaccatgtcacaggacttgcggcagttgagtgatagccaacggacctctacatacgataacgttccctccctgcctggcagcccaggtgaagaggcatctgcactgtccagccaggcctgcgattcgaaaggtgatactctggcctccccaaactccgaaaccggccctgggaaaaagaatagtggtgaagaagagattgactcattgcagagaatggtgcaggaactccggaaggaaatcgaaacccaaaaacaaatgtatgaagaacagattaagaatctggagaaggagaactacgacgtatgggctaaagtagtgagaccgtttctcagcgccatctag

SEQ ID NO: 238707 - DNA, 1377 bp, synthetic construct
  misc_feature 1..1377: note = Description of Artificial Sequence: Synthetic coding sequence
  source 1..1377: mol_type = other DNA
atgagcctaggccagtcagcctgcttattcctgtccatagcccgatcccgatccgtcatgactggggagcagatggcggcatttcacccatccagtacgcctaacccattggagcgacccattaagatgggctggctgaaaaaacagcgttctattgtcaagaattggcaacagaggtactttgttctgagggcccagcaactctattattataaggatgaagaggatactaaaccccaaggctgcatgtatcttcctggatgtactatcaaagaaatcgctacaaatcccgaggaagcagggaaatttgttttcgaaatcattcccgctagttgggaccaaaaccgaatggggcaggattcgtacgtcctgatggcctcttcccaggcagaaatggaggaatgggtaaagtttttgcgcagagttgcaggaacgccctgcggggctgtgttcggtcagaggctcgatgagactgtggcatacgaacagaagtttgggcctcatttagtgcccatactcgtggagaagtgcgctgaatttatcttagagcacggaagaaatgaagaggggatcttcaggctgcccggtcaggacaacctggtgaaacagctgcgtgacgccttcgacgccggtgaacgccctagcttcgatagagatactgatgtccatactgttgcaagtctactcaagctgtacctgcgggaccttcctgagcctgtcgtgccctggagccagtacgaaggcttcttactttgcggccagctgaccaacgcagacgaagccaaggcccagcaggaactgatgaagcagctcagtattcttccccgagacaactacagcttattgtcatatatctgcagatttttacatgagatacagctgaactgcgccgttaataagatgagcgtggataatctggcaacggtaatcggcgtgaacctcatccgctccaaagtggaagatcccgctgtgatcatgcggggaactccgcagattcagcgcgttatgacgatgatgattcgcgatcacgaggttcttttccccaaatccaaggatattcctctctcacccccagctcaaaagaacgaccctaaaaaagccccagtggcccgaagcagtgttggctgggatgctaccgaagatctgcggattagcaggaccgattcgttcagctccatggtgcggtgccgagagcccagctgtttccactgggtgctgcctctggtgcaggctattccctgcaaagcctgcagcagagtcgccatatggggcgttttaggagatgctgtggccgttggcgcagctgccacagatagttctgagcacacactgaaagcatggcctctatccaagagttctttctactggcacctttag

SEQ ID NO: 238708 - DNA, 1893 bp, synthetic construct
  misc_feature 1..1893: note = Description of Artificial Sequence: Synthetic coding sequence
  source 1..1893: mol_type = other DNA
atgagtttgggccagtccgcctgccttttcttaagtatcgcccgttcaagaagtgtcatgactggtgaacaaatggctgctttccacccatcatccactcctaacccccttgagagaccaatcaagatgggctggctcaaaaaacagcgcagcatcgtgaagaattggcagcagtcctactactataaggatgaggaagacaccaagccccaaggctgcatgtatctccccggttgtacaattaaagagattgcaacaaatcctgaggaagccggaaaatttgtgtttgaaataatacccgctagctgggatcaaaatcggatggggcaggacagctatgtgctcatggccagttcacaggctgaaatggaagagtgggttaaattccttcggagagtggcgggaactccttgtggggcagttttcggtcagcggctcgatgagacagttgcctatgagcagaagttcggccctcacttggtccccatcctcgtcgagaaatgtgccgagtttattctggaacacggaaggaatgaggaaggcatcttccgcctccccggacaagacaacctggtcaagcaattgcgcgatgcctttgatgccggagagcgaccctcattcgacagggacaccgatgtacacacggtggcaagcttgcttaagctctacctccgggacttacccgagcccgtggtaccatggtcccagtacgaaggatttctcctgtgcgggcagctgacaaacgctgatgaggccaaggcacaacaggaactaatgaagcaactcagtatcttaccgcgtgataactactcccttttgagttatatctgccggttcctccacgagatacagttgaactgcgctgtcaacaaaatgagcgtggataacctcgccacagtgattggtgtgaacctcatccgttcgaaggtagaagatcccgctgtcattatgagaggtacccctcagatccagcgagtgatgactatgatgataagggaccacgaggtgctcttccctaaatctaaggatatccccctgagccctcccgcacagaagaacgacccgaagaaggcccctgtcgcccgaagtagcgttgggtgggacgccaccgaagacctgaggatctcaaggaccgactccttttcatccatgacgtctgatagcgatacaactagccccactggccagcagccatccgatgcgtttcccgaggattctagcaaagtacctcgggaaaagcccggtgattggaaaatgcagtccagaaagcggacacaaacactgccgaaccgcaagtgtttcctcactagtgcattccaaggtgcaaatagtagtaagatggaaattttcaaaaacgaattttggtcacccagtagcgaggcaaaagcgggtgagggtcacaggagaaccatgtcccaagacctcaggcagctgtccgactcgcaaaggaccagcacctatgacaacgtgccttctcttcctgggtccccgggagaggaagctagcgctctgagttcccaggcctgtgactcgaagggcgacaccctagcttctcccaatagcgagacaggcccaggcaagaaaaactcaggagaggaggaaatcgacagtcttcaacggatggtccaggagcttaggaaagaaatcgagactcaaaagcagatgtatgaagagcagattaagaacctggagaaggagaattatgacgtgtgggccaaggtggtacggctgaacgaagagttagaaaaagaaaagaaaaaatctgctgcgctggagatcagtctacggaatatggagcgctcccgcgaggatgttgagaaaaggaacaaagccctggaggaggaagtcaaggagtttgtgaagagtatgaaggagcctaaaactgaagcgtag

SEQ ID NO: 238709 - DNA, 852 bp, synthetic construct
  misc_feature 1..852: note = Description of Artificial Sequence: Synthetic coding sequence
  source 1..852: mol_type = other DNA
atgactggagagcaaatggccgcatttcaccctagcagtactcctaacccactcgaacgccctataaagatgggatggctgaagaaacagagatccatcgtgaaaaattggcaacagagatactttgtgctgcgtgcccaacagctgtattactataaggacgaagaggataccaaaccgcaaggatgcatgtatctgccaggctgcacaatcaaggagattgctactaaccccgaggaggccggtaaattcgtatttgaaatcattcccgcatcatgggatcagaatcggatgggccaagacagttacgtgttaatggcgagtagccaggcagaaatggaggagtgggtgaaattccttcgtcgagtagcgggaactccttgtggtgctgtctttggtcagcggttggacgagacagtggcttacgagcagaagttcggacctcatctagtcccaatactcgtcgaaaagtgcgcagagtttatcctggaacacggtaggaacgaagaaggcatctttaggctacccggtcaagacaatcttgttaagcagctccgtgatgcttttgacgctggggaacgcccatcctttgatcgagatacagatgtgcataccgtggccagcttgctgaaactgtatctgcgggatttgccggaaccagtcgtcccatggagccaatacgaaggcttcctgctttgcggtcagttgactaatgccgatgaggccaagaattaccggaaccggaacgattgccagagcgttgtgagcgcgcagatccaccagttttgccctcgtgtgtcactgttggctcacgggcaggcccacctgctcgtgaatgacctcttagtgtag

SEQ ID NO: 238710 - DNA, 1821 bp, synthetic construct
  misc_feature 1..1821: note = Description of Artificial Sequence: Synthetic coding sequence
  source 1..1821: mol_type = other DNA
atgtctctcaagttgccccgtaactgggacttcaacctaaaggtggaagcagcaaagatcgctcgctcgagatcagtgatgacgggggaacaaatggccgcttttcacccctcaagcacaccaaatcctttagagagacctattaagatggggtggctgaaaaagcaaagatcaatcgtgaagaactggcaacagagatattttgtgttgcgagcccagcaactgtattattacaaggacgaagaagacactaaaccacagggctgcatgtatctccccggatgtacaatcaaggaaatcgccactaatcccgaagaggctggcaaatttgttttcgagataatcccagttttcggacagcggctagacgagacagtagcctatgagcagaagttcggtccacaccttgtcccgatcttagttgaaaagtgtgcagagtttatcctcgaacacggcagaaatgaagagggaattttccggctacccggacaggataacctggtaaagcagcttagggatgcttttgacgctggggagcgaccgagtttcgacagggacactgatgtgcacaccgtcgctagtctgctgaaactctacctgcgggatttgccagagcccgtcgtgccatggagtcaatacgagggctttctgctatgcggacagttgacgaacgctgacgaggccaaggcgcagcaggaattgatgaagcaattatcgattctccccagagacaactacagtcttctcagctatatctgccggtttttacacgaaattcaattgaactgcgccgtgaataagatgtcggtggacaacttagcaaccgtgataggtgtgaatctgatccgctccaaggtagaggaccccgcagttatcatgaggggcactccacagattcagcgcgtcatgaccatgatgatcagagatcatgaggttttgtttcctaagtccaaagacattccactgtcgcctccagcccagaaaaacgatcccaagaaagctccggtagcccgttcatctgtcggatgggacgccacggaagacctgcggatttctcgcaccgactcgttctcttccatgacaagcgactctgacactactagccctacgggccagcaacccagcgacgccttccctgaagattcttcaaaagtcccacgtgagaagccaggagattggaagatgcagtccagaaaaaggacgcaaaccttgcctaacagaaagtgtttcctgacttcggccttccagggggcaaactcttcaaagatggaaatatttaagaacgagttctggagtccgagtagcgaggctaaggctggggagggtcacaggcggaccatgtcacaagatctgaggcaactatctgattctcagcgcacctctacctatgataatgtcccatcacttcccggatcccccggagaggaggctagtgccttgtcctcgcaggcttgcgacagcaaaggcgatacgctggcctcgccaaactccgaaacaggacccggtaaaaagaatagtggcgaagaggaaatcgatagtctgcaaagaatggtgcaggaactgcgcaaagaaattgagacccagaagcagatgtatgaagaacagattaaaaacttggaaaaggagaactacgatgtgtgggctaaggtggttaggctgaatgaggagctggaaaaggagaagaagaagtctgctgccctcgagatttccttgagaaatatggaaagatcccgcgaggacgtggagaaacggaataaggccttagaagaagaggtcaaggagtttgtaaagagcatgaaggagccgaagaccgaggcgtag

SEQ ID NO: 238711 - DNA, 2445 bp, synthetic construct
  misc_feature 1..2445: note = Description of Artificial Sequence: Synthetic coding sequence
  source 1..2445: mol_type = other DNA
atgggcttaccggctctggagtttagtgattgttgccttgattctccccactttagagaaacccttaagagccacgaagcagaacttgacaaaaccaataagttcatcaaggagttgatcaaagatggtaaatcactcatctcagcactgaagaatctatcatccgctaaaaggaagttcgccgatagccttaacgaattcaaatttcagtgcatcggtgatgccgagaccgacgacgagatgtgtatcgcgaggtctctgcaagagtttgctacagtcctcagaaacttggaggacgagcgaatccgcatgattgagaacgcaagcgaggtgctcataaccccattggagaagtttcggaaggagcagatcggtgcggctaaggaagccaagaagaaatatgacaaagagactgagaaatactgcggtatactggaaaagcaccttaatctgagcagcaagaaaaaagaatctcagcttcaggaagcagattcacaggtggacctcgttcggcagcacttctacgaggtgagcctggagtatgtatttaaagtgcaggaagtccaggagagaaagatgtttgaattcgttgaacccctgctcgccttcttacaaggcctgttcactttctatcaccacggatatgagctggcaaaggatttcggcgacttcaagacgcagctgaccatctctattcaaaacaccaggaatcggttcgaaggcacccggtcagaggttgagtcattgatgaagaaaatgaaagaaaatccactcgagcacaaaacgatctcaccttatactatggagggatatctgtatgtgcaggaaaagagacattttggtacatcatgggtgaagcactactgtacctaccagcgggattcaaaacagatcaccatggtcccatttgaccaaaagtctggcggaaaagggggagaggatgagtcggtgattttgaaatcttgcacccgcagaaagacagacagcatcgaaaagcgtttctgttttgatgtcgaggccgtagataggcccggtgtgataacaatgcaggcattgtcagaggaagaccggcgtctttggatggaagcaatggatggtagggagcccgtctataatagcaacaaggactcccagtccgaaggtacagcccaactggactccatcggattttcaattattaggaagtgcattcatgcagtggaaacccgcggaatcaatgagcaaggcctgtaccggatcgtgggagtgaatagccgcgtgcaaaaactgttgtccgtgctgatggatcccaaaaccgcctccgaaacggagaccgacatatgtgcagaatgggagattaagaccatcacgagcgctcttaaaacttacctgaggatgcttcctggcccattgatgatgtatcagtttcaacggtctttcatcaaggcagcgaagctggaaaaccaggaaagcagggtgtcggagatacacagcctggttcatcggctccccgaaaaaaatagacagatgctacaactcctcatgaatcaccttgcgaacgttgccaataaccacaaacagaatttaatgacagtggctaatttgggcgtcgtcttcgggccaacgctgcttaggcctcaggaagagacagtggcagccattatggacatcaagtttcaaaacatcgtcatagagatactcatagagaatcatgagaagatttttaatacagtgcccgacatgcccttgaccaacgcccagctacatttatcgcgaaaaaagtcgagcgactcgaagcccccatcctgctccgaacgtccccttactctcttccacacggtgcaaagcactgagaagcaggagcagcggaacagcatcattaactcttcgctcgagagtgtgtcctcaaatcctaatagtattctcaacagctcctcctcactacaacctaacatgaattcgagcgatcctgatcttgctgtggtaaaacctacacgccctaacagtcttccacccaatcctagtccaacgtctcccctgtcaccgagctggccaatgtttagtgctccctcatcaccaatgcctacttcatccacctcaagtgatagcagtcctgtccggtcagtcgccggattcgtctggttctctgtcgctgcggtggtcttgtccctggcgagatccagtctgcacgcggtcttttccctgctggtcaactttgtgccatgccaccccaacttgcatctgctgtttgatagaccggaagaggcagtgcacgaggatagctccacaccctttagaaaggctaaggccctttatgcatgtaaagctgaacatgattctgagctaagcttcactgccggtacggtctttgacaacgtacatccctcgcaggaacccggttggctggaaggaacactaaacggcaagaccggactgatccccgagaattacgtggagtttctgtag

SEQ ID NO: 238712 - DNA, 2280 bp, synthetic construct
  misc_feature 1..2280: note = Description of Artificial Sequence: Synthetic coding sequence
  source 1..2280: mol_type = other DNA
atgggtctcccagctctggaatttagtgattgttgtttggattcaccacactttagggagacactgaaatcacatgaggccgaattagataaaacaaataagtttattaaagaactgataaaggacggcaagagccttatctccgccctaaagaatttgagctccgccaagaggaaatttgctgattctttgaatgagtttaagtttcagtgcattggcgatgccgagacagatgatgagatgtgcattgccaggtcattgcaggaattcgctaccgtgctccgcaacctggaagacgagaggatacggatgatcgaaaacgcgagcgaggtgctgattactcctctggagaagttccggaaggagcagattggagcagccaaggaggcaaaaaagaagtacgacaaagagacggaaaagtattgcggaattttagaaaagcacctgaatttgagttccaagaaaaaagaaagccagcttcaagaggccgacagtcaggtggacttagtgcggcaacacttttacgaggtgagcctggagtacgtgttcaaggtgcaggaggtccaagagaggaaaatgttcgagtttgtagagcccttactcgccttcttgcaggggctttttaccttttaccaccacggctatgagttggccaaagatttcggggacttcaagacgcagctgaccatttccatccagaatacgcgaaaccgctttgagggaacccggagtgaggttgaatctctgatgaagaaaatgaaagagaacccgctggaacacaagacgatatctccatacaccatggaagggtacctgtatgtgcaggagaaacgccattttggcaccagctgggtgaagcactactgcacataccaacgggattcaaagcagatcacaatggtgccatttgaccagaaatccggtgggaaaggcggagaggatgagtccgtgatcctaaagagttgcactagaaggaaaaccgactccattgagaaacgtttctgctttgacgtggaggccgtagaccggccaggcgtgattacaatgcaggctctgagcgaggaggacagacgcctctggatggaggccatggatgggagagagccagtatataactcaaacaaggacagtcagagtgagggaactgctcaactggacagtatcggttttagcatcattcggaagtgcatccacgccgtggaaactcgcggtattaacgaacagggcctgtatcgtattgtgggcgtgaattcacgggttcagaagttactttctgtgctgatggatcccaaaaccgcaagcgagaccgagacagatatttgtgcggagtgggagattaagaccatcaccagcgcattgaaaacctacctcagaatgctgccgggtccgctgatgatgtaccagtttcagcggtcttttattaaagctgctaaattggagaaccaggagagcagagtcagcgagattcactccctagtgcatcgcctgccggaaaaaaaccggcagatgctgcagctgctcatgaatcacctcgcgaatgtagcaaataatcataaacaaaacctgatgacagttgctaatctgggagtggtattcggtcccactctcctaagaccccaggaggagacagtggcggcaatcatggatattaagttccagaatattgttatcgaaatactcattgaaaaccatgagaagatttttaacaccgtcccagatatgcccctgaccaacgcccagctgcatctgtctcgcaaaaagtcttcagattctaaacctccctcttgttctgagcggcctctgactctctttcacaccgtgcagtctacagaaaagcaggagcaaagaaatagtatcatcaacagttccctcgaatctgtttccagcaaccctaattcaattcttaactcatcgtcatcgctgcagcccaacatgaactcctccgacccagatttggctgtagtgaaaccaactaggcccaactcactgccccctaacccaagcccaacctcaccccttagcccaagctggcccatgttttctgctccttcctccccgatgcctacttccagcaccagctccgactcttcccccgtttccaccccatttcggaaggctaaagcactgtatgcctgcaaggctgaacacgacagcgagctcagttttaccgcagggaccgtgtttgataacgtccatcccagccaagagccaggatggctggagggaactctcaacgggaaaaccggcctgattccagaaaactatgtggaatttctatag

SEQ ID NO: 238713 - DNA, 885 bp, synthetic construct
  misc_feature 1..885: note = Description of Artificial Sequence: Synthetic coding sequence
  source 1..885: mol_type = other DNA
tagcccaagaccgctagcgagactgaaacggacatttgcgcagagtgggaaataaaaacaattacttcagccctcaaaacataccttaggatgttacccggacccctcatgatgtaccagttccagagatcgtttattaaggctgcgaagctcgaaaaccaggagtctagggtgtccgagattcacagcctagtccaccgccttccagaaaagaatagacaaatgctccagttgctcatgaaccacctggccaatgtcgcaaataatcataagcagaaccttatgactgtcgctaatctgggggtggttttcggcccaacactgctgcggcctcaggaggaaaccgttgcagcgatcatggatattaagttccagaatatcgtgattgagatcctcattgaaaatcacgagaagatcttcaacaccgtgccggacatgccactgactaatgcacagttgcatctttctcgtaaaaagtctagtgacagtaagcccccatcgtgctctgaaaggcctttgactctgttccatacagtccaatcgaccgagaagcaggagcagaggaacagcatcatcaacagttcccttgaaagcgtgagctcaaacccgaatagtatcctcaactcctcgtcaagcctccagcccaatatgaacagcagcgaccccgacctcgccgtggtaaaaccaacccgccctaattcccttacgccattcaggaaagccaaagcgctctatgcatgtaaggccgagcacgatagcgagctatcctttacggccggaaccgtattcgataacgtgcaccccagtcaagagcccggatggctcgagggcaccctaaatgggaaaaccggtctgattccagaaaattatgttgagtttctgtag

SEQ ID NO: 238714 - DNA, 861 bp, synthetic construct
  misc_feature 1..861: note = Description of Artificial Sequence: Synthetic coding sequence
  source 1..861: mol_type = other DNA
atggaccctaaaactgcaagcgaaactgaaacggacatttgcgccgagtgggaaatcaaaactatcacatcggcccttaagacctatctgagaatgctacccggacctctgatgatgtatcagtttcagcgatccttcataaaggctgctaagttggagaaccaagaaagtcgcgtctctgagatacactcattggtgcatcggctccctgaaaagaatcggcagatgctccaactgttgatgaaccacctggccaatgtagccaacaatcacaaacagaatctgatgacagtagcaaacctcggtgtggtttttggcccaacactgttgcgtccgcaggaagagactgtggctgcaataatggacataaaatttcagaacattgttatagaaattttaatcgagaaccatgagaaaattttcaataccgttccagacatgccactaacaaacgctcaacttcatctgagccgaaaaaagagtagtgatagcaagccaccctcttgctctgagcggcctttaactttgttccataccgtgcagtccacagaaaaacaggaacagaggaattcgattataaatagctccctagaatcagtgtcctctaacccaaacagtattttaaattcaagcagttcactccagcctaacatgaactccagcgatcctgatctggccgtcgtaaaacctacccgccctaacagtcttcccccaaatcctagtccgacaagtcctctttcacctagttggccgatgttttctgccccttcgagccctatgcctaccagcagtactagttctgacagctccccaagaatcacctggtcgtcctcaaatagggggcctcagcagaactgctag

SEQ ID NO: 238715 - DNA, 1167 bp, synthetic construct
  misc_feature 1..1167: note = Description of Artificial Sequence: Synthetic coding sequence
  source 1..1167: mol_type = other DNA
taagctcagctggactcgataggcttcagtataatccgcaagtgcatccacgcagttgaaacgagggggatcaacgaacagggcttataccgtatcgttggcgttaacagccgtgtccagaaactgctttctgtgctgatggaccccaaaactgcttccgaaaccgagactgacatttgtgccgagtgggagataaaaaccattacgtccgccctgaaaacttacctgcgcatgctgccgggacccctgatgatgtaccaattccagcgatcatttattaaggctgcgaaacttgaaaatcaggagagtcgagtgtcagagatccattctctagtgcaccgtcttcctgagaagaatcgccaaatgctgcagctgctgatgaatcaccttgcgaatgtggccaacaaccacaagcagaatctgatgactgtcgcaaacttaggcgtggtgttcggccctactttgctgcgtccacaagaggagactgtcgccgcaatcatggatataaagtttcagaacatagtcatcgagatcctgatagagaatcacgagaaaatcttcaataccgtccctgatatgccactgaccaacgcacaactccacctgtcaagaaaaaagtcctcggactctaaaccaccttcgtgttctgagaggccattaaccttgtttcacacagtacaatccactgagaagcaggagcagcgcaactccataatcaattctagtcttgagtcagtgtcgtcaaatcctaacagcatccttaactccagctcctccttgcagccaaacatgaactctagcgatcctgatctggctgtggtgaagccaacacggccaaactccctgccacccaatcccagccctacctctccgttgtcaccaagttggccgatgttctccgcccctagctcacctatgccgacaagttctacctcatcagattcctcccctgtgagacctgaagaagcggtacacgaggatagcagcacgccattccgaaaagccaaagctctgtacgcttgcaaagctgaacacgattcagagttatccttcactgcgggaacagtgttcgataacgtccatccctcgcaggagcctggttggctcgaggggacgctaaatggcaagacaggcctgattccggaaaactatgtggaattcttgtag

SEQ ID NO: 238716 - DNA, 792 bp, synthetic construct
  misc_feature 1..792: note = Description of Artificial Sequence: Synthetic coding sequence
  source 1..792: mol_type = other DNA
atggctgccgacgttgtcggggatgtctatgtgctggttgagcatccttttgagtacacaggcaaggacggccgacgagttgccattaggcccaatgagcgctataggttgttgagacggtctactgaacactggtggcacgtccgcagagaaccaggtggccgaccattctacctgccagctcagtatgtccgggaattgcccgcattgggaaaccctgctgcggcagcccctcctggtcctcatccaagtcccgcagcccctgagcccctggcctatgattacaggttcgtctcagccgctgccactgccggaccagacggagctcctgaggagtctggtggcagagcgtcttctctgtgtggacccgcacagcgaggcgcagccacccagcgcagcagtttggcgccaggcctaccagcttgcctgtacttgcgaccggcagccccagtgcggccagcccaatctctgaatgatctcgcttgtgcagctgtgagcccccctgccggacttctgggatcatctgggagttttaaggcttgcagcgttgctgggtcatgggtctgtccgagaccactggccaggagcgatagcgaaaatgtgtacgaggtgatacaggacctgcacgtcccccctccagaggagtcagccgagcaggtcccacccagagcattgggccgagggggtgggtggcgagctagggatcgagccagaaccgagcccggaaggaaagaaacaagatcagcgcaacggagagcccgaagacccccattgagcgaagactttgggtag

SEQ ID NO: 238717 - DNA, 1647 bp, synthetic construct
  misc_feature 1..1647: note = Description of Artificial Sequence: Synthetic coding sequence
  source 1..1647: mol_type = other DNA
atgcaacccggactgtccccaggaagccctggcgatcccaggccacctacacccgagaccgattacccagagtccctaacctcttatcctgaggaggattactctccagtcgggtctttcggggagcccggaccaaccagcccactcaccacgccacctggctggtcatgtcacgtctcacaggacaagcagatgctctacaccaaccacttcactcaggagcagtgggtgcggctggaagatcctcacgggaagccttatttttataacccagaagactcctccgtcagatgggaactgccgcaagtcccagtacccgctcccaggtccatacacaagagttcccaggatggtgacactccggcacaggcctcccctccagaggaaaaagtgcctgctgagctggatgaagttggaagttgggaggaggtttcgccagcaaccgccgcagttagaacaaaaacactagataaggccggagtactccaccgaaccaaaaccgctgataagggaaaacgcttacgaaagaagcactggagcgccagctggaccgttctagagggcggagtgctcacattcttcaaagactccaagacgtccgcggctggcggactcaggcagcctagtaagttcagcacgcctgagtatacagtggagctgaggggggcaactttatcttgggctcccaaagataaatcaagtaggaaaaatgtcctggaactcagatcccgggacggctctgagtatctgatccaacacgatagcgaggctattatctccacatggcacaaggccattgcccaaggcatccaggaattatcagcagagctcccaccagaggaatctgaatccagtcgcgtggatttcgggtctagtgagcggttgggttcctggcaggagaaggaagaggatgcgaggcctaacgcagcagccccagccctggggcctgttgggttggagagcgatctttcgaaggttcggcataaactcaggaaattcctgcagcggaggcctaccttgcagtcactgcgggaaaaaggctatatcaaggatcaagtctttgggtgcgctctggcggcactttgcgagcgtgaacgatcccgtgtgccccgtttcgtgcagcaatgcattcgcgctgtggaggccagaggcctggatatcgacggcctttataggattagcgggaatctggccactatccaaaagttgcggtacaaagtggatcatgatgagagactggacctcgatgatggtcgttgggaggacgtgcatgttatcaccggggctctgaagctgttctttagagagctgcccgagccactttttccttttagccattttcgccaatttatcgcagctatcaagctccaggaccaggcccgacgcagtcgctgcgtccgtgacctcgtaaggtccctgcccgcacctaaccatgacactctgcgtatgcttttccagcatctctgccgggtgattgaacacggagagcagaataggatgagtgtccaatctgtagcgatagtctttggccctacgttgcttcggcctgaggtagaagagacaagcatgcctatgaccatggtgtttcagaatcaagtcgtggagctgatcctccaacaatgcgccgatatatttccaccacactag

SEQ ID NO: 238718 - DNA, 2670 bp, synthetic construct
  misc_feature 1..2670: note = Description of Artificial Sequence: Synthetic coding sequence
  source 1..2670: mol_type = other DNA
atggccgcagacgtcgtgggtgatgtctacgtgctggtcgagcacccattcgagtacactggtaaggacgggagaagagtggcaattcgtcccaatgaacgttaccgcctgctgcggcgaagcacagaacactggtggcacgtgaggagagaaccgggtggtcgtccgttctacctacccgcacagtacgtgcgagaactgcccgcactgggcaatcctgctgctgcggctcccccaggtcctcacccgtccccggcagcaccggagcctctcgcctatgattatagatttgtaagtgcagccgcaacggcaggaccagatggagcaccagaagagtcaggagggcgtgcctctagtttatgtgggcctgctcagaggggggcagcgacacagcggagttctctggccccagggcttcctgcctgtctttatttgcgcccagccgcacccgtgaggccagcccagagcctgaacgacctggcctgtgccgctgtctcccctcccgctgggctgctcggctcttcaggttctttcaaggcctgcagcgtcgcagggtcctgggtgtgcccacggccacttgcgagaagtgatagtgaaaacgtgtacgaagtcatccaagaccttcacgtacctccgcctgaagaaagcgctgaacaagtggacgatccgcctgagcctgtgtatgcaaacatcgagcggcagccaagagcgacctcacctggtgcagccgctgcacctttgcctagcccagtctgggaaactcacacagatgctggtacaggcagaccttactattacaaccccgacacaggggtgacaacttgggagtcacctttcgaggccgctgaaggggctgcctcccctgcgacctctccagcttctgtggactcccacgttagtctggaaactgaatggggtcagtattgggatgaggagtcaagaagggtcttcttctataatcccctgacaggcgaaaccgcgtgggaagatgaggccgagaatgaaccagaagaggagttggaaatgcaacctgggcttagcccaggctcacctggggatccgcgtccgccaaccccagagaccgattaccccgaaagccttaccagttacccggaggaggattattctcctgttggaagttttggagagcctgggcctacatcgcctctgactacgccacccggatggagttgtcatgtttctcaggacaaacaaatgctgtacaccaatcattttacgcaagagcagtgggtccgcttggaggaccctcatggcaagccctatttttacaaccctgaggacagtagcgtccggtgggagctaccccaggtgccggtacccgcacccagatccatccacaagagtagtcaggacggtgacacaccagcccaggctagcccacccgaggagaaggtcccggcagagcttgatgaagtagggtcgtgggaggaagtatcacccgcaacggctgccgtgcgaactaagaccctcgacaaggccggagttttacaccggactaagacagccgataagggcaaacggctgcgaaaaaaacactggagtgctagctggaccgttcttgaggggggtgtcttaacgttctttaaagatagcaagacttccgccgctggaggcttacgacagcctagtaagttctcaactcccgagtacactgtcgagctcagaggagccaccctgtcatgggcccctaaggacaaatcgtctagaaaaaacgtgctggagctgcgatcacgcgatggtagtgagtatttaattcagcatgattccgaagccatcattagtacatggcacaaggccattgctcagggcatccaggaattgtccgcagaacttccaccagaggagagcgagtctagcagagtggacttcggctccagcgagcggctggggtcctggcaggagaaagaggaagacgcacggcctaatgctgcggctcctgctttagggcctgtgggactggaatctgatttgagcaaggtgcgccataagctgcgaaaattcctccagcggaggccaaccctacagtctctccgtgagaaagggtacattaaggatcaggtgttcgggtgcgccctggcagctctctgcgagcgggaaaggtcaagagttccgcgatttgtgcaacagtgtatcagggccgtcgaagccaggggtctggacatcgatggactttataggatctctggtaacctggcaaccatacagaagctccgctataaagtcgaccacgacgaaaggctggaccttgacgacggtagatgggaagatgtgcatgtgattacaggtgctcttaagctctttttccgggaactgcccgaacccttgttccctttctcccatttcagacagttcatcgccgctattaagctgcaggatcaagcccgacggtcccgttgtgtgcgggaccttgtgcgctccctcccggctccaaaccacgacaccctgagaatgctatttcagcatctgtgccgggtgatagaacacggagaacagaaccgtatgagcgtccagtcggttgccattgttttcggaccaacactactgaggcccgaagtagaagaaacaagtatgcctatgaccatggtatttcagaatcaggtcgtagagctcattctgcagcaatgcgcagacatcttccctccacactag

SEQ ID NO: 238719 - DNA, 2589 bp, synthetic construct
  misc_feature 1..2589: note = Description of Artificial Sequence: Synthetic coding sequence
  source 1..2589: mol_type = other DNA
atggccgctgatgttgtgggagacgtgtacgtcctggtagagcacccgttcgaatacaccggaaaggatggcagaagagtggctattagaccgaacgagaggtatcgcctgcttcgcaggagcactgaacactggtggcacgtgcgcagagagcccggagggagacctttttacctgcctgctcaatatgtacgggaacttccggctttggggaacccagccgctgctgctcctcccggaccccatcccagtccagcagcccctgagccactcgcgtatgattataggtttgtgagtgccgcagcgactgcgggacccgatggagctcctgaagagtcaggcggtagagcctccagcttatgcggccctgcccagcggggagcagctacacagaggtctagtctcgcacccggactgcctgcctgtttgtacctgaggccagcagctcctgttagacccgcacagagtctgaacgacttagcttgcgcagccgtgtctcccccagctggactactgggcagctctggatccttcaaggcctgtagtgtcgctgggtcatgggtgtgtccacggccattggctagatcagattcagaaaatgtctatgaggtcatccaggatcttcacgttccccctccggaagagtccgcggagcaagtggacgacccacctgagcccgtgtatgctaacattgagcggcagcccagagcaaccagtccaggtgcagccgcagctccattgccgtcgcctgtatgggaaactcacacagatgcagggacaggaagaccatactattacaatcccgacacaggagtaacaacctgggaatccccctttgaagcagctgaaggcgctgcctctcccgctactagccccgcttctgtggattctcatgtgtccctggaaactgagtggggccagtactgggacgaggaatctcgcagagtgtttttctacaatccgctgaccggagagactgcttgggaggatgaagcagagaatgaacccgaagaagagctggagatgcagcccggactctctccaggctccccaggagatccaaggccacccacgccagaaacggactaccctgagagtctaacctcatacccggaggaggactatagtcccgtcggaagtttcggggaacctggacccacatctccattgactactcctccgggttggtcctgtcatgttagccaggacaaacagatgctgtatacaaaccactttacacaggaacaagttccggtacctgcccctcgtagtattcacaagagctcccaagacggggacacccctgcccaagcctctccccctgaggagaaagtccctgccgaattggacgaggtaggtagctgggaggaggtttcccctgccacagccgcagtgcggacaaagacacttgataaagcaggtgttttacacagaacgaagactgctgataagggcaagaggctccggaaaaaacattggagtgccagttggacagtgcttgagggcggagtgctaacattcttcaaggactcgaagacatcggctgctggaggtttacggcaaccctccaagttttctaccccagagtacacagtggaactgcgtggcgcaaccctgtcctgggcccctaaggataagagcagtcgaaaaaatgttctggaattgagatcgcgcgatgggtcagagtacctcattcagcacgattccgaagctatcataagcacttggcacaaggccattgctcagggcatccaggagctttccgcagaacttccccctgaggagtcagagtctagtagagtggattttggctcctcagaacgcctggggtcttggcaagaaaaagaagaggacgctagaccaaatgccgctgcaccagcgctgggtcccgtgggcttggaatcagatctttccaaggttcgccacaagctgagaaagtttttgcaacgtcgcccaacgctgcagtctctgcgggagaaggggtacataaaagatcaagttttcggttgcgctcttgcggctctgtgcgagcgcgagcgttctcgcgtcccccgatttgtgcagcagtgcattagggcagtcgaagcgaggggactggatatcgacggactgtaccgtatctctggaaacctggccacaatccaaaagcttcggtataaggttgaccatgatgagagactcgatctggacgacgggagatgggaagacgtccacgttatcaccggagctcttaagctcttctttagggagttgcctgaacccctgtttccctttagccacttcagacagttcatcgctgctatcaagctgcaggatcaggctcgcaggtcccgctgcgtgcgggatctggttcgctccctgcctgcgccaaatcacgacacactgagaatgctcttccaacatttatgtagggtcatcgagcacggcgagcagaatagaatgtccgtccagtccgtcgctattgtgttcggccctacactactgcgccctgaagtcgaggagactagcatgccaatgacaatggtcttccagaaccaggtggtggaacttatcctccagcagtgcgctgatatctttccaccccattag

SEQ ID NO: 238720 - DNA, 1647 bp, synthetic construct
  misc_feature 1..1647: note = Description of Artificial Sequence: Synthetic coding sequence
  source 1..1647: mol_type = other DNA
atgcagcctggattatcgcctggctcccccggagaccccagacctcccacaccagaaacggactatccagagtctctgacatcctatcccgaggaggactattcacccgtagggtctttcggagagcccggtcctacttcccccttgactacacctcccggttggtcctgtcatgtgtcgcaggacaagcagatgctgtatacaaaccactttacccaggaacagtgggtcagactagaggatccgcatggtaaaccatacttctataatccagaagactcctcagtgagatgggaattgccccaggtacccgtacctgcaccccgttcaatacataaatcttctcaggacggagacactccagcacaggcatcgcctccagaggagaaggttcctgccgaactagacgaggtggggtcctgggaagaagttagtccagctaccgccgctgtcaggacaaaaaccctcgacaaggctggggtccttcaccgaacaaaaaccgccgacaagggtaagcggctgcgaaagaaacattggtcagcaagctggactgtcctggagggaggcgttctgacattcttcaaggatagcaaaacctcagccgcagggggactgaggcagcccagcaagttcagcaccccagaatatacagtcgaactaagaggggctactcttagttgggcacccaaagataagtcttcccggaagaatgtactcgagcttcgctctcgagatggaagtgagtatttgatccagcatgactcggaggctattatttccacctggcataaagccatcgcccaagggattcaggagttgagcgcagaattgccccctgaggaatctgaaagcagtagagtggactttggaagcagcgaacgtctgggctcatggcaggaaaaagaggaggacgctcgtccaaatgccgcagccccagctttgggacccgtcggcctggaaagcgacttgtccaaggtccgccacaaactgaggaaattcctccagcgtcggcctaccttgcagtcacttagggagaagggctacataaaggaccaggtctttggatgcgcattggccgctctctgtgagagggagagaagccgcgtcccgaggttcgtgcagcagtgtatcagagcagtggaagcccgagggcttgatatcgacgggctttaccggatctccggaaatctcgcgactatacagaaacttaggtataaggtggatcatgacgagagattagacttggacgatggcagatgggaggatgtgcatgtaatcaccggtgccttaaagctgttttttcgggagctgccagaacctctgttccctttctctcatttccgacaatttattgcagccatcaagctgcaagatcaagcacggagatccagatgcgttcgcgacctggtccgttccctccctgctccaaaccatgacaccctaaggatgttgttccagcatctgtgccgtgtcatagaacacggggagcagaaccgcatgagtgtccagagcgtggctattgtgtttggcccaacacttctaaggccagaagtggaggaaacttctatgcccatgacaatggtctttcagaaccaggtggtggagctgatcttgcagcaatgtgccgacatatttcctcctcactag

SEQ ID NO: 238721 - DNA, 792 bp, synthetic construct
  misc_feature 1..792: note = Description of Artificial Sequence: Synthetic coding sequence
  source 1..792: mol_type = other DNA
atggccgcagatgtcgtgggggatgtgtatgtgctggtggaacacccctttgagtacacgggaaaggatggtcgacgagttgctatacgacctaatgagagatacaggttgctgcgcaggtcgacagaacactggtggcacgtcaggcgggagccaggaggccgtccattttatctcccggcacagtatgttcgagagctgccagctctcggcaatcctgctgcagcagctccacctggacctcatccctcgcctgccgctcccgaaccactcgcttatgattaccgatttgttagcgctgccgctactgccggtcccgacggagcaccggaagaaagcggcggacgggctagtagcctctgcggtccagcacaacgtggcgcagccactcaacgcagctcactggctcctgggctcccggcatgcttatatctgcgcccagccgcacctgtccgtcccgctcagtcgcttaacgacctcgcctgcgccgcagtctcccctccagcagggctgctgggttcctcagggtccttcaaggcttgtagtgtcgcaggatcctgggtgtgtcctcgacccttggccaggagtgactccgagaatgtctatgaagtaattcaggatctgcacgtgcctccacctgaggagagcgctgaacaagttcctcctcgggcactgggacgcggaggcggatggagagccagagaccgtgcacgcacggaacccggaagaaaggaaacgcgaagtgcccagaggagagctcgcaggcctcccctctctgaggatttcggctag

SEQ ID NO: 238722 - DNA, 1566 bp, synthetic construct
  misc_feature 1..1566: note = Description of Artificial Sequence: Synthetic coding sequence
  source 1..1566: mol_type = other DNA
atgcagcccggactttccccgggatcccctggggaccctcgccctcccacaccagagactgactatcccgaatcactgacttcgtatcctgaggaggattactctcctgttggctcctttggcgagccagggccaactagcccccttacaaccccaccagggtggagctgccacgtgtcccaggacaagcagatgctgtataccaatcacttcacccaagaacaagttccggtgccagcgcctcgctccatccacaaatcttcgcaagacggtgacacaccggctcaggccagcccgccagaggaaaaggtgccagccgagctggacgaagtggggtcctgggaggaggtgagccccgctacagccgctgtccggactaaaaccctcgacaaagccggagtgcttcaccgcacaaaaactgccgacaaggggaaacgcttgcgcaagaagcattggtccgcttcgtggactgtgttggagggaggcgttttaacattctttaaggactccaaaacctcagcggctggaggcttgaggcaacccagcaagttctcaacacctgagtataccgttgagctgaggggagctacactgtcctgggccccaaaggataagtccagtcgcaaaaatgtgctggaacttagaagcagagatggttccgagtatctcatccagcatgactccgaagcgattatatctacttggcacaaagctattgcccaggggatccaggaactcagcgccgaactcccccctgaggaatccgagtcttcaagggtggacttcggctcctctgagaggctcggatcgtggcaggagaaagaggaagacgctcgccctaacgccgcagctcccgctttgggccctgtcggtctggaatcagacttgagtaaggttcggcacaagctgcggaaatttctacagcgcagacccactttacagtcactgcgagagaaaggctacatcaaagatcaggtatttggatgcgctctggcggcactgtgcgagagggaaagatcaagggtaccacgttttgtacaacagtgcatcagggctgtcgaagctagaggactagacatagacggcctgtaccggatctcgggcaatcttgccacaatccaaaaacttcggtataaggtggatcacgacgagaggcttgatctggacgacgggagatgggaagacgtgcatgtgattaccggagccctgaagctgttctttagagagttacctgagccattatttccattcagccatttcagacagtttattgcagctatcaaactgcaggaccaggctagacggagccgctgtgtgagagacctggtaaggagtttgcctgccccaaatcacgacaccctcagaatgctgttccagcacctttgtcgggttatcgaacacggcgagcaaaaccgaatgagtgtacaatctgtggccatagtattcgggccaactctgctacggccagaggtggaggaaacgtctatgccaatgaccatggtattccaaaatcaggtggtggagttgattttgcagcaatgtgctgatatattcccaccgcattag

SEQ ID NO: 238723 - DNA, 2013 bp, synthetic construct
  misc_feature 1..2013: note = Description of Artificial Sequence: Synthetic coding sequence
  source 1..2013: mol_type = other DNA
atgttgtccaacgagagcctgcaccctcctgcctttagccgtagcaattctgaggcctccgttgacagtgccagcatggaagatttttggcgcgagatcgagagtatcaaggactcgtctatgggaggccaggaggagccgcctccagccgaagtcacaccggtggatgagggtgaactcgaggctgagtggttacaggatgtgggcctgtcgacgttgatcagtggagacgaggaggaagacggcaaggctctcctgtcgaccctaactcgaactcaggcagctgctgttcagaagcgctatcacacctatacccagaccatgcgcaaaaaggataaacagtcaatccgcgatgtccgtgacatctttggagtgtcagagtccccaccccgagacacttgtggcaatcacacgaatcagttagacgggaccaaagaggaaagagagttacccagagtcataaaaaccagtggatcaatgcccgatgacgcaagcctcaacagtacaactttatcagacgccagccaggataaggaaggctccttcgccgtcccacgcagcgattccgtcgccatcttggaaacaattccggtgctaccggtgcacagcaatggcagccctgagcctgggcagccagtacagaacgctatttcagatgatgatttcctggagaagaacattccaccagaggctgaggaactttcgttcgaagtctcttattcagagatggtgacggaggcactcaagcgcaataagctgaaaaagagcgaaatcaaaaaggaagactacgtgctgacaaaattcaacgtgcaaaaaaccagattcggtctaaccgaggctggcgatctctccgccgaagacatgaagaagattagacacctctcattaattgagttgacggctttcttcgatgctttcggaattcagctcaaacgaaacaaaactgaaaaggtcaaagggagggacaacggaatattcggagtgcccttgaccgtgctcttagacggtgatcggaaaaaagacccgggagtaaaggtaccgctagttcttcagaaatttttcgaaaaggtggaggagtcaggtctcgagtctgaggggatcttcaggctctccggctgtacagctaaggtgaaacagtatcgggaggaactggacgcaaagttcaacgctgacaaattcaagtgggacaagatgtgccaccgggaagcggcagtaatgctaaaggcctttttcagggaactgccaacgtccctatttcccgtggaatacatccccgcattcatcagtctgatggagcgcggaccgcatgtgaaagtgcaattccaggccctacacctaatggtgatggccctacccgatgcaaaccgggatgctgctcaggccttgatgacttttttcaataaggtcatcgctaatgagagtaaaaatcgaatgtcactctggaacatctcaacggtgatggcaccgaacctgttcttttcccgctccaaacattcagactatgaggaattgctgctggccaacaccgccgctcacattattagattaatgctgaaataccaaaagatattgtggaaagttcccagcttcctgatcactcaggtcaggagaatgaatgaggctacaatgctcctgaaaaaacaacttccctcggttcgcaaactactgagaagaaagaccctggaaagagagaccgccagtcctaaaactagcaaagtgctgcagaaaagtccctcagccaggcgcatgagcgatgtacccgagggcgttatacgcgtccacgcccctttgctatccaaagtctctatggcaattcagctcaacaaccaaactaaggcaaaagatatcctggcaaaattccagtatgagaatcgcatcctgcactggcagagagctgccctgagctttctgaacggcaaatgggtaaagaaagaacgggaagaaagcacagaaaccaaccgctctcccaagcacgtatttctctttaccatcggtctggacatttcgacttag

SEQ ID NO: 238724 - DNA, 1713 bp, synthetic construct
  misc_feature 1..1713: note = Description of Artificial Sequence: Synthetic coding sequence
  source 1..1713: mol_type = other DNA
atgcggaaaaaggacaaacagtctatccgagacgtgcgagacattttcggcgtgtctgagagcccccctcgggacacatgcgggaaccatacaaatcaattagacggaacaaaggaggaacgggaattgcccagagtcattaaaaccagtggatctatgccagatgatgcaagcctcaattcaacaacgctatcggacgccagccaggataaggagggaagctttgccgtacctcgcagcgactctgtcgcgattctggagactatcccagtgctccctgttcattcaaacggctcacctgagcccggacaacctgttcagaacgccatcagtgatgatgatttccttgagaaaaacattcctcccgaggccgaggagcttagcttcgaggtctcatactcagagatggtcacagaagcactgaagagaaacaagctgaagaagtccgaaataaagaaagaggattatgtgctgaccaagttcaacgtgcagaaaacgcgcttcggcctgaccgaggccggtgacctctctgctgaggatatgaagaaaatccgccatctgtcactgatcgagctgaccgccttttttgatgcttttggcatccaactgaaacggaataagacggaaaaggtaaagggcagggataacggaatctttggcgtcccactaaccgttctcctggacggtgaccgcaaaaaagatcctggagttaaggtgccacttgttttgcagaagttcttcgaaaaggtggaggagtcaggcctggagtcggaaggaatcttcaggctgagcggatgtactgccaaagttaaacagtatcgtgaggagctggatgccaagttcaacgccgataagttcaagtgggacaagatgtgtcacagggaagccgctgtcatgctcaaggcctttttccgagagcttcccaccagtcttttccctgtagagtacatccctgcgttcattagcctgatggagcgtggacctcacgtaaaagtgcaattccaagcactacacctgatggttatggccctccctgatgccaatcgcgacgcagctcaggcattgatgacattcttcaataaagttattgccaacgaatctaaaaaccgcatgagcctatggaacatcagtactgttatggccccaaatttgtttttctcacggtccaagcactccgattacgaagagctgctcttggctaacaccgccgctcacatcatacggctgatgctgaaatatcagaagattctctggaaagtaccaagcttcctgattacccaagtccgcaggatgaatgaggctacaatgctgctgaagaaacagctgccaagcgtgagaaaacttctgcgcaggaagacacttgagcgcgaaaccgcttctccaaagacctccaaagtgctgcagaagtctccctcggctaggagaatgtctgatgtgcctgagggcgtaatccgggtccatgcacccctcctgtccaaggtgtccatggctatacaactcaacaatcaaactaaggcaaaggatatcctggcaaagtttcagtatgagaacagccacggctcgtccgaatgcattaaaattcaaaaccagcgcttatacgagattgggggaaacatcggtgagcactgcctggaccccgacgcatacatccttgatgtgtatagaatcaaccctcaagcagagtgggtgataaaacctcagcagtcaagctag

SEQ ID NO: 238725 - DNA, 1638 bp, synthetic construct
  misc_feature 1..1638: note = Description of Artificial Sequence: Synthetic coding sequence
  source 1..1638: mol_type = other DNA
atgaacgagctgccgagggatacatgcggcaatcacacgaatcaactcgatggcactaaagaagaacgggaactacccagggtgatcaagactagcgggtctatgcccgatgacgcttctctgaactcaactacactttcagatgcaagtcaagataaggaaggcagttttgccgtgcccaggtccgattccgtcgctattctagaaaccattccggtgttacctgttcactcaaatggcagcccagagcccggtcaaccggtccagaacgccatctccgacgatgactttctagaaaaaaacattccacccgaagcagaagagctgagtttcgaggtatcatatagtgagatggtgacagaggcactcaagcgaaacaagctgaagaaatccgagatcaagaaagaggattacgtgcttacaaaatttaatgttcagaaaacgcggttcggactcacagaggctggggacctgagcgcagaggatatgaaaaaaatcagacatctctctttaattgagctgaccgcctttttcgacgcctttgggatacagttgaagagaaacaaaacagagaaggtgaaaggcagggacaatgggatttttggtgtgccgctgaccgtactgctagacggcgataggaaaaaggatccaggcgtaaaagtgccactcgtgttgcagaagttcttcgagaaagtggaggagtctggcctcgaatctgagggcatttttaggctttcaggttgtactgcaaaagttaagcagtaccgcgaggagctcgacgcgaagttcaacgccgacaagttcaaatgggacaagatgtgccacagggaggctgcagtaatgctgaaggcgtttttccgggagcttcccacctcactgtttcccgttgagtatatccccgcatttatctctcttatggagagaggccctcatgtgaaggtacagttccaggccctacacctcatggttatggccctgccagacgctaaccgggatgctgcacaagcattgatgacgttctttaataaagtgattgcaaacgaaagtaagaataggatgagcttgtggaacatcagcactgtgatggctcctaacctcttcttcagcaggagcaaacacagcgattacgaggagctgttgctggcaaacaccgccgcacatataattcggcttatgctgaagtatcagaaaatactctggaaagtgcccagcttcctgatcacccaggtgcgacgcatgaacgaggcgacaatgctgctgaagaagcagctgccctctgtgcgcaagctgctcaggcgcaaaaccctggaaagggaaacagcttcccctaaaacctctaaggtgcttcagaagtccccttccgctaggcgtatgagtgacgtgcctgagggcgtgattcgagtccacgccccattactgtccaaagttagtatggccatccagttaaacaaccagaccaaagcaaaagacatactcgcgaagtttcagtacgagaacaggatcctacattggcagcgcgctgccctttccttcctaaacggcaaatgggtaaagaaagaaagggaagaaagtacggagacaaaccggagccctaagcacgtctttctgtttacaatcggcctggatatttccacatag

SEQ ID NO: 238726 - DNA, 2169 bp, synthetic construct
  misc_feature 1..2169: note = Description of Artificial Sequence: Synthetic coding sequence
  source 1..2169: mol_type = other DNA
atggaggtggaggattctggcggagttgtgttgaccgcatatcacagttacgcccgagcacaaccgcctaacgcagagtcccgctgcgcgcctagggcagcggcttctcacccattgtctagaaaaagcatcccacgatgtagaaggattaaccggatgctaagcaatgagagcctgcacccccctgcgttcagcagaagcaattcagaagcctccgtagacagcgcctcaatggaggatttctggcgggagatcgagagcattaaggattccagcatgggcggacaagaggaaccacccccagcagaggttactcccgtggacgagggcgaactagaagccgagtggttacaggacgtagggctgtccactttaattagtggcgacgaggaagaagatggcaaggccctgttgagcactctgacccgcactcaggcagcggcagtacagaagagataccatacctatacacaaacgatgcggaagaaggacaaacaatccatccgggatgtacgtgatatctttggggtgtcagagtcccccccacgggatacctgtggaaatcacaccaaccagttagacggcacgaaggaagagagagagctacctcgggttatcaagacatccggtagcatgcctgacgatgcatctctgaactcaaccacgctttctgatgcaagccaggacaaagaagggagttttgctgtgcccagatctgacagcgttgctatcctggaaaccattccggtgctgcccgtccactctaatggttcccccgagccaggacaaccggtgcaaaacgctatatccgacgatgacttcctggagaagaatataccacctgaagccgaagagttaagcttcgaggtgagctactcagaaatggtaacggaggccttgaagcgtaataagctcaagaaaagtgaaatcaagaaagaagactatgtgctgaccaaattcaacgtccagaagacacggtttgggttgaccgaggccggagatttgagcgccgaagacatgaaaaagattcgccacttgagtctgatcgaactcactgctttcttcgatgcattcggaatccagctgaagagaaacaaaaccgagaaagtgaaaggaagagataacggcatcttcggagtgccactgaccgtgcttcttgatggagaccgtaaaaaagatcccggagtaaaagttccactggtgctgcagaagttcttcgagaaggttgaagaaagcggcctcgagtctgaggggatctttagactaagcggatgtacggccaaggttaagcagtaccgagaagagctggacgctaaattcaatgctgataagttcaaatgggacaagatgtgccacagagaagcagccgtgatgctgaaagcctttttccgcgaactgccaacgagcctattccccgttgaatatattcctgccttcatctccctcatggagcgaggccctcacgtcaaggttcagttccaggcccttcacctcatggtgatggcactgccagatgctaatcgcgatgctgctcaagctctgatgacgttcttcaataaggtgatcgcaaacgagtccaaaaatcgtatgtccctgtggaacatctcaaccgtgatggcacccaacctctttttcagtcgcagtaagcactctgattatgaggagctgcttctcgcaaatacagcagcccatattatcagacttatgctgaaataccagaaaattctatggaaggttccgagcttcttgatcacacaggtccggagaatgaatgaagctactatgctgttgaaaaagcagttgccctcggtgaggaagctgctgcggcgaaagactctggaacgagagacagccagcccaaagacctccaaggtgcttcagaagtccccctccgctaggaggatgtcagatgttcctgaaggcgtcatcagagtgcacgcacccctgctcagcaaggtgtcaatggctattcagctgaataaccagaccaaagcaaaagatattctggcaaagttccagtacgagaataggatcctgcattggcagagagccgctctgagcttcctgaatggtaagtgggtgaaaaaggaacgtgaggagagcactgaaaccaaccgcagtcctaaacatgtattcctcttcacaataggcttagacatttctacctag

SEQ ID NO: 238727 - DNA, 1692 bp, synthetic construct
  misc_feature 1..1692: note = Description of Artificial Sequence: Synthetic coding sequence
  source 1..1692: mol_type = other DNA
atgcggaagaaagataagcaatccatccgtgatgtacgcgatatttttggagttagtgaatctccacctcgagatacatgtgggaatcacacaaaccagctggacggcaccaaagaggagcgggagctccctcgcgtcatcaaaacttcagggtctatgccagatgatgcttccctgaacagtactaccctgtccgacgccagccaggataaagaaggatcattcgcagttcccagaagcgattcagtggccattctggagaccatcccggtactccctgtccactctaacggaagccccgaacctggccagcccgtgcagaacgccatctcagatgatgatttcctcgaaaagaacatccctcctgaggcagaagagctgtctttcgaggtttcctacagtgaaatggtaacagaggccctgaaacgaaataagcttaagaaatctgaaatcaaaaaggaggattatgtgctgacgaagttcaatgtgcagaagactagattcggcctaacagaggctggggatttgagtgctgaagacatgaaaaagattcgccatctgtcattaatagaactgacagcattttttgacgcatttggcattcagcttaagcggaataagacagagaaagttaaagggagagacaatgggatatttggggtgcctctgacagtactgttagatggagaccgcaagaaggatcccggagtcaaggtgccgctcgtcttacagaagtttttcgaaaaggtcgaggaaagtggcctagaatcggaagggatcttcagattgagtgggtgcactgcgaaggttaaacaatatagggaggagctggacgcaaaatttaatgcagataaatttaaatgggacaaaatgtgtcaccgtgaagcagcagttatgctgaaagcatttttccgcgaattgcccacgagcctgtttccagtggagtacatccctgcattcataagcctcatggaaaggggaccacatgttaaggtccagttccaggctctccatctgatggtgatggctctgcctgacgctaatcgagacgccgcacaggcactgatgacatttttcaacaaagttatagcgaacgaatctaaaaatcgaatgtccctctggaacatatccactgtaatggcacctaatctgttcttttcgagatctaagcactcagattacgaagaactattgctcgccaatacagctgcgcacatcatccggctgatgcttaagtaccaaaagatattgtggaaggtgcctagcttcctgatcactcaagtaaggcgcatgaatgaggctaccatgctcctgaaaaagcagttgccatccgtccggaaattactgcgacgaaaaacattagagcgcgagaccgcatcacccaagacgagtaaggtgctgcaaaaatcaccctctgccagaaggatgtcagacgtccccgagggagtcataagggtgcatgcgccactgctatcaaaagtcagtatggcaatacagctgaacaaccagactaaggctaaggacatactggccaagtttcaatatgagaaccgaattttacactggcagagagcagcactgagctttcttaacgggaagtgggtgaaaaaagaacgggaggaaagtacagagaccaaccggtctcccaagcacgttttcctcttcaccatagggctagatatatctacatag

SEQ ID NO: 238728 - DNA, 1713 bp, synthetic construct
  misc_feature 1..1713: note = Description of Artificial Sequence: Synthetic coding sequence
  source 1..1713: mol_type = other DNA
atgcgcaaaaaggacaaacaatctattagggatgtcagggacattttcggggtgagcgagtcaccacccagggatacctgcgggaatcataccaatcagcttgatggtacaaaggaggaaagggagctccctagggtaatcaaaacctccgggtcgatgcctgatgatgcgagtcttaactctacgacactatccgatgcctcccaggataaggagggcagcttcgcagtgccacggtctgattcagttgcaatcttggaaaccataccggtgctgcctgtccactcaaacggtagtccagaaccaggccaaccagtccagaacgcaatttccgacgatgacttcctggaaaagaatatcccaccagaagccgaggagctatctttcgaggtgtcctactctgagatggttactgaggccttgaagcgcaataaactaaagaagtcggaaataaaaaaagaagactatgtgctaaccaaatttaatgtgcagaagactcgcttcgggttgactgaggccggagacctgagtgcggaagacatgaaaaaaatccggcatctcagtctgatcgagttaactgcctttttcgatgcttttggaatccagctgaagcgtaataagacggaaaaggtaaaagggagagataatggaatttttggggtccctctgacagtactcttagacggggacaggaaaaaggacccaggggttaaggtaccccttgtgctgcagaagttcttcgaaaaagtggaggagtccgggcttgagtcagaaggcatctttcggctttcgggctgcactgctaaagtcaaacagtatagggaggagctggacgctaaattcaatgcagacaaatttaagtgggacaagatgtgtcacagagaggcagccgtaatgctgaaggcattctttagagagttgccaacttcacttttccctgtggaatacattcctgcctttatcagtctaatggagcggggtccccacgtcaaagtgcagttccaggcactgcatcttatggtcatggcactgccggacgctaatagggacgcagcacaggcgttgatgacattctttaataaagtgattgccaatgagagcaagaaccgcatgtcattgtggaatattagcactgtaatggcccctaatctattcttctcccgttctaaacatagcgattatgaagagctgcttctcgcaaacacggcagcacacatcatcaggctgatgctcaagtaccagaaaattctgtggaaagtgccctcctttctgatcacccaggtgcggcgtatgaacgaggctactatgctcctgaagaaacaactcccatccgtcaggaagctgttgcggaggaagacactcgagcgcgaaacagccagtccgaagacctcgaaggtgctacagaagagcccaagtgctcgtcgcatgtccgacgtccccgagggcgtgatccgcgtccacgctcccctcctcagcaaagtctctatggccatccaactcaacaaccagactaaagcgaaggacatccttgctaagttccagtacgagaactcacatggctcttctgagtgcattaagatacagaatcagcgcttatatgagatcggcggaaatattggcgagcactgtttagacccggacgcctacatccttgatgtctatcgaatcaacccccaggcggagtgggtcatcaagcctcagcagagcagctag

SEQ ID NO: 238729 - DNA, 354 bp, synthetic construct
  misc_feature 1..354: note = Description of Artificial Sequence: Synthetic coding sequence
  source 1..354: mol_type = other DNA
atgctctcgaacgaaagcctgcaccctcctgccttttcccggagcaacagtgaagccagcgtggactctgcatcaatggaagatttctggcgtgagatcgagagcatcaaggacagcagtatgggcggtcaggaagaaccaccgcctgccgaggtcacacccgttgatgagggcgaattggaggcggagtggctccaggatgtggggctgagcaccctaatcagcggtgatgaagaagaggatggtaaggccctactttcaactctcactaggacgcaagccgcagctgttcagaagagataccacacatacactcagaccatgcggaaaaaggataaacagtccattcggtag

SEQ ID NO: 238730 - DNA, 1665 bp, synthetic construct
  misc_feature 1..1665: note = Description of Artificial Sequence: Synthetic coding sequence
  source 1..1665: mol_type = other DNA
atggcgttcatgaggatcaatgtaatcatgaatgagttaccaagggacacctgtggaaatcacaccaaccagctcgatggaactaaggaagaacgggagctcccccgagtcattaagacctctggcagcatgcccgacgatgcctccttgaatagcaccaccctgtctgacgcctcacaagacaaggaggggtcttttgcagtgcctcgctctgactctgtagccatccttgaaacaattccagtgcttccggtccactccaacggttcacctgagccaggacagcctgtgcagaatgctataagcgacgacgacttcctggaaaagaacattcctcccgaagccgaggagttgtcattcgaagtctcatattcggagatggtcaccgaggcactgaaaaggaacaaattgaagaaatctgagattaagaaagaagattacgttcttaccaagttcaacgttcagaaaactcgctttggcctgactgaagcaggcgacctctccgccgaagacatgaagaagattagacatttatcattgattgaacttaccgctttttttgacgcctttggaattcagctgaaaagaaacaagacagagaaagttaagggcagggataacggtatcttcggagtgccacttactgtgcttctcgacggagaccgcaagaaggatcccggtgtaaaagtgcccttagtgctgcagaaattttttgaaaaggttgaagagagcggactggagtctgaagggatcttccggctgtctggttgtaccgccaaggtgaagcagtacagggaggagttagacgcaaaattcaacgccgataagttcaagtgggacaaaatgtgccacagggaggctgcagtaatgctgaaagctttttttcgcgagcttcctacatcactttttcctgttgaatacatcccagctttcatcagtttgatggagcggggaccccatgtcaaagtgcagtttcaggcattgcatctgatggtcatggcccttccagacgctaatcgggatgctgctcaggctttgatgaccttctttaacaaggtgatagctaacgaaagcaaaaatcggatgtccctctggaacatttcgacggtgatggctcccaatctgttcttttcccgctccaagcacagcgactatgaagagctcttgctggccaacaccgcagcccacattatcagacttatgttgaagtaccagaagatcctgtggaaggtcccgtccttcctgattacccaggtgcgacgcatgaatgaagccaccatgctcctcaagaagcagctcccaagcgtcagaaagctgctcaggcgcaaaaccctggaacgggagaccgccagtcctaaaaccagtaaggtgttacagaagtcgcccagtgctcgaagaatgtccgatgtccctgaaggcgttatccgggtacacgcccctctgctgtctaaagtctctatggccattcagttgaataatcagaccaaggcaaaagatattctcgctaaatttcaatatgaaaatagaattctgcactggcagcgagctgctctctccttcctcaacggtaagtgggtcaagaaagagagggaggagagcacagaaacaaaccgttcaccaaaacacgtctttttattcacaatcggccttgacatctctacgtag

SEQ ID NO: 238731 - DNA, 3786 bp, synthetic construct
  misc_feature 1..3786: note = Description of Artificial Sequence: Synthetic coding sequence
  source 1..3786: mol_type = other DNA
atgatcgcccacaagcagaagaaaacgaaaaaaaagagggcctgggcctctgggcaactcagtacagatataacgactagtgagatgggcttgaagagcctgtcctcaaatagcattttcgatccagactatatcaaagaactggtcaatgacattagaaaattttcacatatgctactctatctgaaggaggctattttttctgactgctttaaagaagtaatccacattcgactggaggagctcctccgcgttctcaaatctataatgaacaaacaccagaacctgaacagcgtggatcttcagaatgccgcagagatgctgactgccaaggtaaaagcggtaaacttcacagaagtgaacgaggaaaacaagaacgacctcttccaggaagtgttctccagtatcgaaactcttgctttcaccttcggaaatatattaacaaactttttgatgggggatgttggtaacgattccctactgaggctgcctgtgtcccgcgaaactaagtctttcgaaaatgtgagcgttgagtcagtagactccagtagcgagaagggcaatttcagtcccctggagttagataacgtgctcctgaaaaacactgactctatcgaattggccctgtcttacgccaagacttggtcgaagtacacaaaaaacattgtatcatgggtagagaagaaactgaacctagaactggaatctaccaggaatatggtgaagttggctgaggcaacacgtacaaacattggcatccaggaatttatgccactccagtctctatttaccaatgccctgctgaacgatattgaatccagccatctgctgcagcaaaccatcgctgccctccaggctaacaagttcgtgcagcctttactgggtagaaaaaatgagatggagaagcagagaaaggagataaaggagttatggaaacaggaacaaaacaaaatgcttgaggctgaaaatgcactcaaaaaggccaaactgttgtgtatgcagagacaagacgaatatgagaaggctaaatcctcaatgttccgcgcagaagaagaacacctcagcagttcaggcggactggccaagaacctgaataagcagcttgagaaaaagcgcagactcgaggaggaggctctccagaaggtggaagaggctaacgagctttacaaggtctgcgtgactaacgtcgaagaacgaaggaacgacctggaaaatacaaagcgggagatcctcgcacagctccgaaccctagtgtttcagtgtgatctcacactgaaagccgtaacggttaacctcttccacatgcagcacctgcaagcagcttccctcgcggactccctgcagtcgctgtgcgacagcgctaagctctacgatcctgggcaggagtactccgagtttgtgaaggccacgaattccacagaggaggagaaagtagatggtaacgttaataagcacctcaattccagccagccgagcggcttcggtcccgctaacagcctggaggacgtagtgcgcttacccgacagctcaaataagatcgaggaagacaggtgctctaattctgccgacattacaggtccgtcttttattcggagctggacctttggtatgttctctgactcagaaagtaccgggggatcttcagagtctcggagcttggactccgaatctatatcccccggagacttccatcggaagcttcctcgcactcctagctccggaacaatgtcctccgcggacgatcttgatgaacgcgaacctcctagtccatcagagaccggacccaactccttgggcactttcaagaaaacccttatgtccaaagccgcacttacgcacaagtttagaaagttgagatcaccgaccaagtgtagggactgcgagggaatcgtcgtcttccagggagtagaatgtgaggaatgcctgctggtctgccatagaaaatgcctcgaaaatctcgtaattatttgcggccatcagaagctgccagggaaaattcatctcttcggggctgaattcacacaggtagccaagaaagaacccgatggaatcccattcatactgaagatttgtgcatccgaaatcgagaatcgcgctttgtgcctacaaggaatttaccgggtctgtggaaacaaaatcaagaccgagaaattgtgccaggctctggagaacggaatgcatttggtggatatcagcgaattcagttctcacgacatctgtgacgtccttaaactctacttgaggcagctgccagagccattcattttattccgcttgtacaaagaattcattgacctagccaaggagatccagcacgttaacgaggagcaggagacaaaaaagaacagcctcgaggataaaaaatggccaaatatgtgtatcgaaatcaatcggattctactcaagagtaaagacctgcttaggcagctgccggcttctaacttcaatagcctccactttctgatagtgcacctgaagagagtggtcgatcatgcggaagaaaacaaaatgaacagcaaaaacttaggagtcatcttcggaccatctttgatccggcctaggccaactaccgctcccatcaccatttctagccttgctgagtatagtaatcaggcgcgactcgtggagttcctgatcacttattctcagaagatttttgacggatcactccagcctcaagatgtgatgtgcagtatcggtgtcgttgatcagggatgcttcccgaagcctctgctttcaccagaagagagggacatcgagaggtccatgaaaagcttatttttcagttcgaaagaagatatacatacttctgagagtgaatcaaagatctttgagcgggctacgagtttcgaagagtcagaacgcaagcagaacgccctcggcaaatgtgacgcctgcctgtcggataaagcccaattgctgctggaccaggaagctgagagtgcatcccagaaaatcgaagatggcaagacacccaagccgctgtcgcttaaatcagacaggtctacaaataatgtggaacgccacactccacggactaaaataagaccagtgagcttgccggtggaccgtctcctgcttgcctcacccccaaacgagaggaatggaaggaatatgggcaatgtgaatcttgacaaattctgtaagaaccctgcatttgagggcgtgaatcggaaggacgctgccacaaccgtttgtagcaagttcaacggcttcgatcaacagacattacagaagatccaggacaagcaatatgagcagaattcactgactgccaaaactactatgatcatgccctctgccctgcaggaaaagggcgtcactaccagcttgcagatcagcggcgatcacagcatcaacgctacgcagccatcaaagccctacgccgagccagtgagatcagtacgcgaagcttctgagagacgctccagtgattcataccccctggccccagtccgcgcaccacggactctccagccacagcattggaccacattttacaagccccacgccccaatcatctccattaggggcaacgaggagaagccagcctctcctagcgccgcagtgcctccgggaactgatcatgatccgcatgggctggttgtgaaatctatgccagacccggacaaggcctccgcttgcccagggcaagccactggccagccaaaagaagactccgaggagctgggcctaccagacgttaatcccatgtgtcaacggccacgactaaagaggatgcagcagttcgaagacctcgaaggcgagatcccacagttcgtctag

SEQ ID NO: 238732 - DNA, 1182 bp, synthetic construct
  misc_feature 1..1182: note = Description of Artificial Sequence: Synthetic coding sequence
  source 1..1182: mol_type = other DNA
atgatcgcacacaagcagaagaagacaaaaaagaagcgggcttgggcttctggccaactgtccacggacatcaccacctccgagatgggactgaaatcccttagtagcaactccatctttgatcccgattatattaaagagctggtgaacgacattaggaagttctcgcatatgctgctgtatcttaaggaggcaattttctccgattgttttaaagaggtaatacacattcgcctcgaggaactgctaagagtattgaagtccatcatgaacaagcatcagaatctgaattccgttgatcttcagaacgcagccgaaatgctaaccgccaaagtgaaagccgtgaatttcactgaagttaacgaggagaacaagaatgacctgtttcaggaggtgttctcaagcatcgaaactttggcttttaccttcggcaacatcctcacgaactttcttatgggtgacgtagggaatgacagcttactgaggctgccagtgtcacgggagaccaagtcatttgagaatgtgtctgtggaatcagtggactccagctctgaaaagggtaatttctcgccccttgaactggataacgtgcttcttaaaaacacagattccatcgagttagcattatcctacgcaaaaacgtggtctaaatacacaaagaacattgtaagctgggtcgaaaagaaactgaatctggaactggaaagtactaggaatatggtgaaactggctgaggcaacgcgcactaacatcggtatccaggagtttatgccgctccagagcctgttcactaacgctcttttaaatgacatcgagtccagccatctcctgcagcaaactatagctgctcttcaggcaaacaagtttgtccagccactcttaggacgtaagaatgaaatggagaaacaacgtaaggaaattaaggagttgtggaaacaggagcagaataagatgcttgaggctgaaaacgcactgaaaaaagcaaagctgctgtgtatgcaaaggcaagatgagtatgaaaaagccaagagctcaatgttcagagctgaagaggaacatttaagttctagtggaggtctggctaaaaacctcaacaagcagttggagaagaagcgtcggcttgaggaggaggccctgcagaaggttacaatttttttcttctttatttgcaagctcaactag

SEQ ID NO: 238733 - DNA, 3306 bp, synthetic construct
  misc_feature 1..3306: note = Description of Artificial Sequence: Synthetic coding sequence
  source 1..3306: mol_type = other DNA
atgaaatcacgacagaaggggaagaagaaaggttctgcgaaggaaagagtctttgggtgtgacctgcaggagcatcttcagcattccggacaggaagtccctcaagtcttgaagagttgcgcagagttcgtcgaagaatacggggtggtggacggtatttatcgattatccggtgtcagttctaacatacaaaagctgagacaagagttcgagtctgaaagaaagcctgatctgagacgtgacgtgtacctgcaggatattcactgtgtgagcagcctgtgtaaagcctacttccgggaactacccgatccgttactcacgtaccggctgtacgataagtttgctgaggctgtaggggttcagctcgagccggagaggctggtcaaaatcctggaggtgctgagagagctgcctgtcccgaattaccggaccctcgagtttcttatgaggcacttggtgcacatggccagcttcagcgctcagacaaatatgcatgcacgtaaccttgcaatcgtgtgggctcccaacctacttaggtccaaggacattgaggcaagtggcttcaatgggaccgccgctttcatggaagtgagagttcagtccatcgttgtcgaattcatcctgactcacgtggatcagttgtttgggggtgccgctctgtctggaggggaggtcgagtcagggtggaggtccctccccggaactagggcttcgggctcgcctgaggacctcatgcccagacctctgccataccatctcccctcgattctgcaggcaggcgacgggccaccgcagatgcgaccctatcataccatcatagaaatcgctgaacacaagaggaaaggctcgctgaaagtgagaaagtggagatcaattttcaatctgggaaggtcagggcatgagaccaagcgcaagctcccaaggggtgctgaagatagggaagataaatctaataagggaacactgcggccagccaaaagcatggactcactgtctgccgctgccggagccagcgacgaacccgaaggacttgtaggtccttcatcacctagaccttctccgctgctacctgaatctctggagaacgattctatcgaggctgccgaaggcgaacaggaacccgaggccgaggctcttggaggcacaaacagtgagcccggtacccctcgggctggcaggtctgcaatccgagccggtggctcttcccgtgccgagagatgtgccggtgttcatatctccgatccatacaatgtgaatctaccactgcacattacatccatcctgtcagtgcctcccaacatcataagcaatgtatcactggccaggctgaccaggggtcttgaatgccctgcactgcagcaccgtccctctcctgcaagcggccctggccctggtccaggactcgggcctgggccaccggacgagaaattggaggctagtcctgccagcagccctctcgctgatagcggaccagacgacctggcccctgcactggaagattccctctcccaagaggtgcaggattcgttctcatttctggaagacagtagctcgagtgagcctgaatgggtgggggcagaggacggcgaggtggcccaggccgaagctgctggagctgccttttctccaggggaggacgatccagggatgggctacctcgaggagctgcttggcgtaggcccacaagtcgaagagttttccgtggaaccgcctctggacgacctttccttagatgaagcccagttcgtattagctcccagctgttgctcactggattcagctgggcctagacctgaagtggaggaagaaaacggtgaggaggtgttcctgagcgcctacgacgacttatcacctctcttgggccctaaaccaccaatttggaaaggaagcggtagcctggagggagaggcagccggatgcggacgacaggctctgggacagggcggtgaagaacaagcctgttgggaggtgggggaagacaaacaggctgaaccgggtggtagactggacatccgcgaggaagccgaaggctcacccgagacgaaggtcgaagccggaaaggccagcgaggacaggggcgaagctggagggtctcaggagactaaggtcaggctcagagagggttccagggaggaaaccgaggctaaggaggaaaagtccaagggacaaaaaaaagcggacagcatggaagccaagggagtggaagagcccggaggggacgaatacactgacgaaaaggaaaaagaaattgagcgggaggaggacgagcaaagagaagaggcccaggttgaggctggcagggacttggagcagggggcacaggaggaccaggtcgcagaagagaaatgggaggtagtgcagaaacaagaggcagagggagtgagggaggacgaggacaaaggacagcgagagaaggggtaccatgaagccaggaaagatcagggggatggcgaggacagccgttcgccagaggccgctacagaaggtggggctggggaagtgtcaaaggagagggagtcaggggatggcgaggctgagggcgatcaaagagcaggcggttactacctggaggaggacaccctttctgaggggtcaggggtagcgagcctggaagtcgactgcgccaaggagggaaacccccactctagcgaaatggaggaggtcgctccgcagccccctcagcctgaggagatggaacccgaagggcagcccagtcctgatggatgcttatgcccctgtagccttggacttgggggagtcggcatgcgtctggcatccacactcgtgcaggttcaacaggtcagaagcgtaccggttgtcccgccaaaaccccaattcgcaaaaatgcctagtgctatgtgttctaaaatacacgtagcaccagcaaatccttgcccccgaccgggacgattagacgggacacccggtgagcgagcttggggtagccgggctagccgcagcagttggaggaacggtggaagcttgtcgttcgacgcagctgttgccttggctcgagacagacagcggactgaagcccagggagtgagacgcacccagacctgcaccgaaggcggagattattgcttgatccccagaacatcaccttgctccatgatcagcgcccactccccgagaccattatcctgcctggagctgccatctgagggggcagaagggagcggctcccgatcgcggctatcactgcccccacgggagcctcaagttccagatccactgctgtcgagtcagcgccgatcctacgcttttgagactcaggcaaaccccggtaagggcgaaggactgtag

SEQ ID NO: 238734 - DNA, 2673 bp, synthetic construct
  misc_feature 1..2673: note = Description of Artificial Sequence: Synthetic coding sequence
  source 1..2673: mol_type = other DNA
atgaagtcaagacagaaaggaaagaagaaagggtctgcaaaagagcgggttttcggctgcgacctccaggagcacctccaacatagtgggcaggaggtcccacaagttctgaaatcatgcgccgaattcgttgaggaatacggtgtcgtagacggcatctatcgactgtcaggtgtatctagcaatattcagaagttgcggcaagagttcgagtctgagaggaaacccgatcttaggcgggatgtctacctgcaggatatccattgcgtcagctcattgtgcaaggcgtactttagagaactgcctgacccccttttgacgtatcgtctgtatgataagttcgctgaagcagtcggcgttcagctggagcctgaacgtttggtgaaaatccttgaggtgctccgggaacttccggtccccaactaccggaccctggagtttctgatgaggcatctcgttcatatggccagtttctctgcacagacaaacatgcatgcaagaaaccttgctattgtttgggccccaaatttgcttagatcgaaagatattgaggctagtgggtttaatggaaccgctgcttttatggaggtgcgagtacaaagcatcgttgtggaatttatcctaacacacgtagatcagttattcggtggcgctgcactatcgggaggggaggtggagtctggatggaggtccctccccggaactagagcctcgggttctcctgaggacctgatgcctcgccctctgccctaccacttgccaagtatacttcaggcaggagacggccctcctcagatgcggccataccacactatcatcgaaattgcagagcataagcggaaaggatccctaaaagtgcgaaagtggcggtccatctttaacctgggcagatctggccacgagaccaaacgaaagctcccccgaggcgcagaggacagggaggacaagagtaataaaggaacactgcgccctgccaaatctatggactcactttcagccgcagctggagcctcagatgagcccgagggcctggtcggaccgtccagtccgaggccctcccctctactgcccgagtctttggagaatgattccatagaagcagcagagggagagcaagaacctgaagccgaggctctcggaggtacgaattctgaaccaggtactccacgcgcaggcaggtctgctatccgcgctggagggagctctcgtgccgaaagatgtgctggagttcacattagtgacccctacaatgtgaatctcccactgcacatcacatctatccttagtgtcccccctaacattatctctaatgtcagtttggccaggctcaccagaggactggagtgcccggcacttcagcaccgtccctcccctgcaagcggcccaggcccagggcctggtcttggtcctggacctccagacgagaagcttgaagcctcccctgccagctcccctctggccgactctggtccagatgatctcgctcccgctttggaggatagtttgagtcaggaagtgcaggacagcttcagctttctggaagacagctcttcttctgaacccgaatgggtgggggctgaagatggagaagtggcacaagccgaggcggcaggcgctgccttttcacccggtgaggacgatccagggatgggttacctggaagagctcctcggcgtgggcccacaagttgaggaattcagtgtggaaccacctttggatgacttgagtctggatgaggcacaatttgtgctggctcctagctgctgctccctagacagcgctgggccaaggcctgaggtggaagaggagaatggcgaggaggtcttcctatccgcctacgacgatctcagccccctgctgggccctaagcccccaatctggaaggggagtgggtcactggagggcgaggcagccggatgtggccgtcaagccctagggcaggggggagaggagcaggcctgttgggaagtgggcgaggacaagcaggcggagcccggaggcagactggatatcagggaggaggctgaggggacccctcaacctccacagccggaggaaatggagcccgaaggccagccatcccccgacggatgtttgtgtccctgttctttagggcttggcggagtcggcatgcgcctcgcctccacattggtccaggtacagcaggtgagaagtgtgcccgtagttcctcccaaaccccaatttgccaagatgccatcagccatgtgtagcaaaattcacgtggcaccagctaatccatgccccaggcccggtagacttgacggaacacctggtgagcgcgcatggggatccagagcttccaggtcctcgtggaggaatgggggttcattgagctttgacgctgcagtcgcccttgctagagacaggcaacgaaccgaagcgcaaggggtccgacgaacccagacatgcactgaaggcggtgattactgtttgattccgagaacctctccatgtagcatgatctctgcccacagtccgaggcctttgtcctgtctggagctacctagtgaaggtgccgaaggttcggggtcaagaagtaggctgtcactgccacccagagagccccaggtccccgatcctctgctatcgtcgcagcgcagatcatatgccttcgagactcaggccaatcctggaaagggtgagggactgtag

SEQ ID NO: 238735 - DNA, 1500 bp, synthetic construct
  misc_feature 1..1500: note = Description of Artificial Sequence: Synthetic coding sequence
  source 1..1500: mol_type = other DNA
atgaggcatctcgtgcacatggcctcattctcagctcagaccaacatgcacgcaagaaatctggctattgtctgggcgccaaacctactcaggtcaaaggacattgaggcctccggatttaacgggactgctgcgttcatggaggtaagggtccagagcatagttgttgaattcattctgactcatgtggaccagttgtttggtggagcagccctgtcgggaggcgaagtcgaatcaggatggcgatccctgcctggaacaagagcatcaggtagcccagaagacctaatgcccagaccgctcccctaccatttgccttctatcctgcaggccggtgacggacccccacagatgaggccttatcacacgataatcgaaattgccgagcacaaaagaaagggatccctgaaggtccggaaatggcgctccatcttcaaccttgggcgttccggccacgagaccaagagaaaattgccacggggagcagaggaccgggaagacaaatctaacaaaggtactctcagacccgcaaagtcaatggactctctgtccgctgccgcaggagcctccgatgaacccgaggggctggtggggcctagtagcccccgacctagtcccctactcccagaaagtctggagaacgactctatcgaagcagcggagggtgagcaagaaccggaagccgaggccttagggggtaccaactctgaacctgggacccctcgggcagggaggtctgcgatccgcgctgggggttcttctagagccgaacggtgtgcaggagtgcacatctcagacccctataacgtcaatttgccgctgcacatcactagcatcttgtctgtgcctcctaatatcatctccaatgtgtcgctggcacggctaactcgcggactggaatgtcccgcactgcaacaccggccatccccggctagtggtcccggtccgggtcctggtctcgggcctgggccacccgacgagaagttggaggcctctcctgctagctcccctctggcagacagcggcccagatgatttagctcccgctctcgaggattccctgagccaggaagtccaagacagcttctcttttttagaggattcgtcctcgtcggaaccagaatgggtgggagcagaggatggtgaggtggcacaggcagaagccgcaggagccgctttctcccctggggaggatgaccccggaatgggctatctcgaggaactgcttggagtcggccctcaggtagaggaattcagtgtcgaaccccctctggacgatttgtcactggatgaagctcaatttgtgcttgccccttcttgctgcagtctagatagtgctgggcctaggcccgaggtggaggaggaaaacggcgaggaggtcttcctgagtgcctatgacgatctcagccctgcacttgggctacttctgcagcccggatgggggcaccgctcccacagttcagaaggacaatgtctgcgaatcaaggctgtttttctgtag

SEQ ID NO: 238736 - DNA, 4335 bp, synthetic construct
  misc_feature 1..4335: note = Description of Artificial Sequence: Synthetic coding sequence
  source 1..4335: mol_type = other DNA
atgaagaataaaggggcaaagcagaagcttaagcgtaaaggcgcagcttctgcgtttggctgcgacctgacagagtacctggagagctctggacaagacgtcccgtatgtgttgaagagttgcgcagagttcatcgagacacatggaattgtggacggcatctatcggctgagcggggtaaccagtaacatccagaggctgagacaggaattcggcagtgaccagtgtcccgacctgactagggaagtttatcttcaagacattcactgtgtgggctcattgtgtaaattatattttcgggagctgcccaatccgctgcttacttacgagctctacgagaagttcactgaggctgtgtcccactgtcccgaggagggacagctagccaggattcagaatgtcattcaggagctgccaccttcccattatagaacactggagtacctaatcagacacctggctcacatcgcctccttttcctcaaaaaccaacatgcatgctcggaacctagctcttgtgtgggcccctaaccttttaaggtcaaaagagatcgaagctactggctgtaacggcgacgcagcttttcttgcagtacgagtacagcaagtagtgattgaattcattctgaatcatgtcgatcaaatcttcaacaatggagctcccggatccctcgaaaacgatgagaacagaccaatcatgaaatccttgacactcccagcgctgtccctgccaatgaagctcgtctcactggaggaggcccaggctcgcagtctagcgactaatcatcctgcccgtaaagagcgcagggaaaactcccttcccgagattgtgcctccaatggggacacttttccacacagtacttgaactacccgacaataaaaggaagttgagctctaagtctaaaaagtggaagtcgattttcaatttggggaggtccggaagcgacagcaaaagcaaattatcaagaaacggcagtgtgttcgtgagaggccaacgattaagtgtagagaaggctacaatccgcccagctaagtcgatggattccctatgttcggttccagtggagggcaaagagacaaaaggtaacttcaacagaaccgtgactacgggcggattcttcattcctgcgaccaagatgcacagtactggcactggatcatcatgcgatctcacgaaacaagagggcgagtgggggcaggagggcatgccaccaggcgctgaggggggatttgacgtctcaagtgaccggtcacacctgcaaggagctcaggcccgaccgccaccagagcagcttaaggtgttcagacctgtagaggaccccgaatctgagcagaccgctcccaagatgttggggatgttctacacgagcaatgactctccatcaaagtccgtctttacttcatcactcttccaaatggaaccttccccaagaaaccagcgtaaggccctgaatatttccgaaccattcgctgtttcggtgccattgagggtgtccgctgtgattagtactaatagtaccccatgtcggacccccccaaaagagttacagtctcttagctcacttgaggaattctcattccacggatctgagtcaggtggctggccggaagaggagaagcctttgggtgcagagacaagcgcagctagcgtaccaaagaaggctggtctggaggacgccaaagctgtccccgaggctcccggaaccgtggaatgttccaagggattgtcacaggagccgggagctcacctagaggagaagaagacgcccgaatcttctctttcttcccagcacttgaacgagttagagaaacgcccaaatccagaaaaggtggttgaagaaggtcgggaggctggtgagatggagtcatctacgttgcaggaatctccacgggctagggctgaggccgtgctgctgcacgagatggatgaagacgacctggctaatgcactgatctggcccgaaatccagcaggagttgaaaatcatagagtcagaggaggaactctcgagtcttccacctcctgcgctaaagacctcccctatccagccaatcctggagtccagtctggggccttttattccaagtgagccacccggttctctgccttgcgggagcttccccgctccggtatcgactcctctagaggtctggacccgggacccagctaaccagtcaacccagggggctagcacagctgcatccagagaaaagcccgagccagaacagggtctccatcctgaccttgcttctctggccccattagagatcgttccctttgagaaagccagtcctcaagcaaccgtcgaagtgggaggacctggaaacttgagccctcctctgccgcctgctcccccaccgcctacacctctggaagaaagcacccccgtacttctatcaaaaggaggacccgaaagggaggattcatctcgcaaactgcgcacggatctgtatatcgaccagctcaagagtcaggacagccccgaaatttctagcctgtgccagggggaagaggcaacaccgaggcactccgacaaacaaaattcaaagaacgcggcttccgaaggaaaaggatgtggtttcccttctcccacgcgcgaggtggagatcgttagccaggaagaggaggacgtaacgcattcggtgcaagagccatcagactgcgatgaagacgacacagtgactgacatcgcccagcacggcctcgaaatggttgaaccttgggaggagccacaatgggttacttccccgctgcactccccgacactgaaagacgcgcacaaggcccaagttcaaggtctacagggacaccaactggagaaaagactctcccatcgcccaagcctccgacaaagccattccctggattctaaacctactgtgaagtcccagtggactcttgaggtgccttcatcctcctcttgtgccaacctggaaactgagcggaacagcgatccattacagcctcaggcccctcgcagggaaataactggctgggatgagaaggctttgcggtccttccgggagttctcagggctaaaaggtgctgaagctccacccaatcagaaagggccttccggagtgcagccaaatcctgctgaaactagtccgatttcgctggccgagggcaaggaactcggcacccatctgggccattcaagtccgcaaatccgccagggtggagtccccggacccgagagttctaaagaaagctctccatccgtgcaggatagtacatccccgggagagcatcccgcaaagcttcagctgaagagtactgagtgcggacctccgaaggggaagaatagacctagctctctgaatctggaccctgctatccccatcgcagaccttttctggtttgaaaacgtggcatccttttcctccccgggaatgcaggtgtccgaacctggagatccaaaggtgacttggatgacgtccagctattgtaaagcagacccgtggagggtgtacagccaggaccctcaggacctggatatcgttgcacacgccctgaccggtagaaggaatagcgcacctgtgagtgtgagcgccgtccgcacctccttcatggtgaaaatgtgtcaggcccgtgcggtgccagttatccctcccaaaatccagtacacccagatcccccagcccctgccatctcaatcctctggagagaacggggtgcagcctcttgaaaggtctcaggaagggccttcctctacaagcgggaccacccagaaaccagctaaagacgactccccttcctctctggagtcaagcaaggaggagaaaccaaagcaagacccaggagctataaaatcatcccccgtcgacgccacagcgccttgtatgtgtgaaggtcctacactgtcaccagagcctgggtcaagcaacctgctgagcacgcaggatgcagtggtgcaatgtcgtaaacggatgagtgaaaccgagccatccggcgacaatctgttgtcctctaaactagaaagacccagtgggggatctaaaccattccacagatctagacccggtcggccacagtccttgatcctgttctcccccccatttcccatcatggatcatttaccaccaagctccacagttactgattccaaggttttactatcccctatccgcagccctacccagaccgtgagcccgggtctcctgtgtggcgagctggccgagaatacatgggtcacacccgagggagttacgttacggaataagatgaccattccaaaaaacggacaacgtttggaaacctcaacgagctgcttctatcagccgcagcggcgtagtgtcattctcgatggcagatccggcagacagatcgagtag

SEQ ID NO: 238737 - DNA, 3300 bp, synthetic construct
  misc_feature 1..3300: note = Description of Artificial Sequence: Synthetic coding sequence
  source 1..3300: mol_type = other DNA
atgaaaaataaaggggcaaagcagaagctgaaacgcaagggcgcagcaagtgcttttggctgtgatctgaccgaatacctggaaagcagtggtcaagatgtgccttatgtcctcaagagctgtgctgaatttatcgaaacccacggcatcgtggatggaatataccgtctgagcggcgttacgtccaatattcagaggctgcgacaggaattcggatcagatcaatgtccagacctcacacgcgaggtttacctgcaggatatccactgcgtcggctcactctgtaagctctactttcgagagttgcccaatcccctgttaacgtatgaactgtacgaaaagttcacggaagccgtctctcattgcccagaagagggccagctcgcgaggattcagaacgtcatccaggagttacctcccagccattaccggacgcttgaatatctcatcagacatcttgcccacatcgcaagcttctccagcaagaccaacatgcacgcacgtaatctggcccttgtgtgggcccctaaccttttgagatctaaagagattgaggctaccggctgcaatggtgacgctgctttcctcgcagtacgggttcagcaggttgtcatagagtttattctgaaccacgtggatcagatattcaataacggagctcccggtagcctcgaaaacgatgagaaccggccaatcatgaaatctctcacgctaccagcattgagcctccccatgaaactggtgtctctggaggaagcgcaagcacgttccctggctacaaatcatcccgctcgcaaggaaaggcgtgagaactctctgcccgaaattgtaccccctatgggaacactcttccacactgtcttggagctcccagataataagagaaagttatctagtaaaagcaaaaagtggaagtccatcttcaacctcggaagaagtggctctgattccaaaagtaaactgagccgaaatgggtctgtctttgttcgtggccagaggctcagtgttgagaaggccacgatccgtcctgccaaaagcatggactctctgtgctctgttccggtggaaggcaaggagacgaagggtaactttaacagaaccgtgacaaccggcggttttttcatccctgccactaagatgcacagtacaggcaccggaagtagctgtgatctgaccaaacaggaaggcgagtggggccaggaaggaatgcctcccggtgccgagggagggttcgacgtcagcagtgataggtcccacttgcagggcgctcaagcaagaccacccccagagcagcttaaggtgtttcggccagtggaggacccggaaagtgaacagacggccccaaagatgctagggatgttttatacctccaatgatagcccttcaaagagcgtctttacgtcatctcttttccagatggaaccatctcctagaaaccagaggaaggcattgaacatctctgagccctttgccgtgtcagtgcctctgagggtcagtgcggttatcagcacaaattctacgccctgtagaactccgcctaaggagcttcagtctcttagctccctggaagagttctcgttccatggatcagagtcaggaggatggccagaggaagagaagcctctgggggctgagacgagtgctgcaagtgtgccaaagaaggcgggactggaagacgcaaaagcagtgccagaggctccaggaactgtggaatgcagtaaggggttaagccaagaacctggggctcacctcgaagaaaaaaagacaccagagtcttccctgtcttcccagcacctgaatgagctggagaagcggcctaaccctgagaaagttgttgaagagggtagagaggcaggggagatggaatcttcgacattgcaggagagtcccagggctcgcgcagaagcagtcttgctgcatgaaatggatgaggacgatcttgctaatgcactgatttggcccgaaatacagcaggagctgaagataatcgaaagcgaggaggaactcagttctctgccaccaccagcactcaagacatctccaatccaacctatcctggagagcagccttgggccatttattccaagcgagcctccgggttctctaccctgcggatcttttcctgccccagtgtcaacaccactggaggtgtggacccgcgacccagcaaatcaatccactcagggagcttccacagcagcaagccgggagaagccagaacctgagcaggggctgcaccccgatctggcatccctcgccccattggagattgtgccattcgagaaggcctccccacaggcgacagtcgaggtgggtggtcccggtaatctctccccccctcttcctccagctccgccacctccaacccctctggaggagagcacccctgttctgctttcaaagggcggacccgagagagaagactccagtagaaaattgcgaacggacctgtatatagaccagctgaagtctcaggattcacccgaaatttcatcattgtgccagggtgaggaggctaccccgcgacatagtgataagcaaaactctaagaacgcagcctcagagggcaaagggtgcggctttcccagtccgacgcgcgaagtggaaatcgtcagccaggaggaggaagacgttactcactccgtccaggaaccctcggattgcgacgaggacgatactgtgacagatatcgctcagcacggactcgagatggtggaaccttgggaagagccacagtgggtgacgagccccctccattccccgaccctgaaggatgcccacaaggcccaggtgcagggcctccaagggcatcaactggagaagcgcctctctcatagaccttcccttcggcagagccactctctggatagcaagcccaccgtgaaatcgcagtggacactggaggtgcccagcagctcctcatgtgcgaatctcgagactgaaagaaacagcgacccactgcagccccaggctccaagaagagagatcaccggctgggacgaaaaggctttgcgctcattcagagaattttccgggctaaagggtgccgaggcccctcctaatcagaaaggacctagcggagtgcagccgaatcctgctcagcccgtggggccactgaggaaccttccgaagatgattctcccacccccttggaaagcccagaggaagaaaaaccaatctaaaattcctgaaccacttagtcctcatcagtggatgcctctgcaccccgcttgtgcacgagatctgccttttctgcaaaaccaggccaggttaacatgcagtcccccacgtatgcaatag

SEQ ID NO: 238738 - DNA, 4508 bp, synthetic construct
  misc_feature 1..4508: note = Description of Artificial Sequence: Synthetic coding sequence
  source 1..4508: mol_type = other DNA
atgatggccaaaaataaggagccacggccacccagttatactatatccattgtggggttaagtggtaccgagaaagacaaagggaattgcggcgtcggaaaaagttgcttatgcaatagatttgtaagatccaaggccgacgaatattacccggaacacacttcagtgctgtctaccattgactttgggggtcgagtcgtcaataatgatcatttcctatactggggtgatatcatccagaacagcgaggatggcgtcgagtgcaaaatccacgtaatcgaacagaccgagtttattgacgaccagacatttctaccacatcgtagtacgaacctccagccttacattaaaagggcagccgctagcaaactgcagagcgccgagaaactcatgtacatatgcaccgatcagctgggactcgaacaagacttcgagcagaagcagatgccggagggtaagctcaacgtggatgggttcttactttgcatcgatgtgtcacaggggtgtaaccgaaagtttgacgaccagctcaaattcgtaaacaacctgttcgttcagttgtctaagagcaagaagcccgtgattatagctgctacaaagtgcgacgaatgcgttgatcattacctgagagaggtccaagcatttgcctccaataaaaagaacttgctagtggtggagaccagcgctcgttttaatgtgaacatcgaaacctgttttaccgcactggtccagatgctggacaagaccaggtcaaagcccaaaatcattccatacctggatgcatacaaaacccagagacaacttgtagtgaccgcaaccgacaagtttgaaaagctggtgcagactgtgcgggactaccacgctacgtggaagacggtgtctaacaaattgaaaaaccaccccgattacgaagagtacattaatttggagggcactagaaaggctagaaatacctttagcaagcatatcgagcaactgaaacaagaacacattaggaagcgaagggaagagtatattaatacactgccaagggcctttaataccctcctgcccaaccttgaggaaatcgaacacctgaattggagtgaggcacttaaattaatggagaagagggctgacttccaactgtgcttcgtggtgctggagaagactccctgggacgagactgatcatatagataagataaacgaccgaaggatcccttttgacctgttatctacgttagaagccgagaaagtgtaccagaatcacgtccagcacctcatctcagaaaaaagaagggtggaaatgaaggagaaattcaagaaaaccctggaaaagatccagttcatttcccctggccaaccctgggaggaggtgatgtgttttgtcatggaagacgaggcctataagtatataacagaggctgatagcaaggaggtgtatgggaggcaccagagagagattgtggagaaagctaaggaggaattccaagaaatgctgttcgaacattctgaactgttctatgatctggacctgaacgctacaccatcctccgacaagatgtccgaaattcatactgtgctgtccgaggagccacgctacaaagccctccagaaactggccccagaccgcgagtcattgcttttaaaacacattggcttcgtctatcacccgacgaaagagacatgtctgagcggacagaactgtacggatataaaagtggagcagctgctggcaagctccttgttgcagctggatcatggaaggctccgcctatatcacgattccacaaatatcgacaaagtgaacctgttcattctcggcaaagacggtctggcccaggagcttgctaacgaaatacgtacccagagcacagatgacgaatatgcattagatggtaaaatttatgaactcgatctcaggcctgtggacgccaaatctccctatttcttgtcccagctctggactgccgcatttaagcctcatggctgcttttgcgtgtttaacagcatagagagtctttcattcatcggcgagttcatcggcaaaatacggacagaggcgtcgcaaatacgcaaggacaagtatatggccaacctgccattcacactcattctagcaaatcagcgcgactcaatcagcaagaaccttcctatactcaggcaccagggacagcaactggcaaataagttacagtgcccatttgtagacgttcccgctggtacctacccacggaaatttaacgagactcagattaagcaggccctcagaggcgttctggaatccgtcaaacataatctggatgttgtgagccctatcccagcaaacaaggatctgagcgaggccgatctgcgtatcgttatgtgcgcaatgtgcggtgacccattcagtgtggatctcattctcagtcccttcctggactcccattcatgctccgcagcacaggcagggcaaaacaactcactgatgcttgacaagatcattggggagaagcggagacggatccagatcaccattctgagctaccactcatccattggtgtgagaaaggatgagttggtccacggatacatcctggtgtactcagccaagcgtaaagcatccatgggaatgctaagggcattcctgtcagaggtgcaggacactatacccgtgcagctggtcgccgtgacagattctcaagccgacttcttcgagaacgaggcgatcaaggaacttatgaccgaaggtgaacacatagccactgaaatcacagccaagtttactgccctgtatagcctgtcacagtatcacagacagactgaagtatttacactgtttttcagcgatgtgctggaaaagaagaacatgatcgaaaatagttatctttccgacaacacaagggagtcaacacaccagtctgaggacgtattcctgccctcgccgagggattgtttcccgtacaataactacccggatagtgacgacgacacagaggccccacccccttatagcccaatcggggatgatgtccagttgttgcctaccccgtcagaccggtcccgctaccgccttgatctagaggggaatgaataccccattcattctacacctaactgtcatgaccacgagcgaaaccacaaagtgccccctcctattaagcctaaacctgtggttcccaaaactaacgtgaagaagctggatccgaacctccttaaaaccatcgaagcaggaatcggaaaaaaccccaggaagcagacatccagagtccccctggcccaccccgaagacatggaccccagcgacaactatgcggaacccatcgacacaattttcaagcagaagggctattcagacgaaatctacgttgttcccgacgattcccaaaaccgcatcaagattcggaattcatttgttaacaacacgcagggtgatgaagagaacggatttagcgatcggacctctaagtctcacggtgagaggagaccatccaagtacaagtacaagtctaagacattgttcagcaaggcaaagagctactacaggcgtacacactcggacgcttccgatgacgaagcgttcacgaccagcaaaacaaaaaggaaagggaggcacagaggatcagaagaagaccccctcttatctcctgtcgagacctggaaggggggaattgacaatccagcaattacgagtgatcaggagctggacgacaaaaaaatgaagaagaaaacccacaaagtgaaggaggataaaaagcaaaaaaagaaaaccaaaaatttcaatccacctacccgacgcaactgggaatctaactacttcggcatgccactgcaggatctggtcaccgcagagaaaccaatccctctctttgtggagaagtgtgtggagttcatcgaagacacgggactctgcacagaggggctctatcgggtcagcggcaacaagactgaccaggataacattcagaagcagtttgaccaagatcacaatatcaatcttgtctcgatggaagtcaccgtaaacgccgtggccggagctttaaaggcctttttcgcggaccttccagacccactgatcccctatagcctccatcctgagttgcttgaagccgcaaagattcccgacaagaccgagcgccttcacgccttgaaggagatagtgaagaagtttcaccccgtgaactatgacgtgtttcgctatgttattacccacctgaaccgggtgtcccagcagcacaaaatcaacttgatgacagctgacaacttgagtatctgtttttggccaactctcatgaggcctgactttgagaatagggagtttttgtccactactaagattcaccagtcagtggtcgagacatttatccagcagtgccaatttttcttctacaacggggagattgtcgagactactaacatcgttgcccctcctcccccatccaaccccggtcaactagtggaaccaatggtgcccttacagctcccccctccattacagccccagctgattcagcctcaactccagactgaccccctgggtatcatcta

SEQ ID NO: 238739 - DNA, 714 bp, synthetic construct
  misc_feature 1..714: note = Description of Artificial Sequence: Synthetic coding sequence
  source 1..714: mol_type = other DNA
atgtcactacccccaccgcctcccggtcccctgccattgaggcgaagacgcagacggcctaccctgttggggctgtgcactgagggcctgtatcgggtgtcaggaaacaagactgaccaggacaatatccaaaagcaattcgatcaggatcacaatattaacctggtttcgatggaagtaacagtgaacgctgtcgcaggagctctgaaagctttctttgcagatcttcctgacccactgattccctattccctgcatcctgagttactcgaggctgccaagatccccgacaagactgaacgtctccacgccttgaaggaaatcgtgaagaagttccaccctgttaactatgacgttttccgatacgtgattactcatttgaatcgcgtttcacagcagcacaagatcaaccttatgacagcagataatctgtctatctgcttctggcccactttgatgaggccagacttcgaaaacagggagttcttgagtacaaccaagatccaccagagtgtggtcgagacttttattcaacagtgccagttcttcttttataatggtgaaatagtggagacaactaacatcgtggcgccacccccaccatccaatcctggacagctggtggagcctatggtacccttgcagttgcctccgccactacagcctcagctgatacaaccccagctacagaccgatccactcgggataatctag

SEQ ID NO: 238740 - DNA, 4505 bp, synthetic construct
  misc_feature 1..4505: note = Description of Artificial Sequence: Synthetic coding sequence
  source 1..4505: mol_type = other DNA
atgatggctaagaacaaggagcctaggcccccttcctatacaatttcaatcgtgggcttatcaggtactgagaaggataagggtaattgcggcgtgggcaaaagctgcctgtgcaacaggttcgtgaggtcaaaagcagatgagtactatccagagcatacgagcgtgcttagcacaatcgacttcgggggtagagtagttaataacgaccatttcctctactggggggacataattcaaaacagcgaggacggagttgaatgtaaaatacacgtcatagaacagaccgagttcattgacgaccagactttcttgcctcataggtcaaccaacctccagccctatattaaacgggctgctgcatccaagttgcagtccgctgaaaagctaatgtatatctgcaccgatcagctgggattagagcaggactttgaacaaaaacaaatgcctgagggtaaattaaatgtggacggatttctcctgtgtatcgacgtgagccagggctgtaatcgcaagttcgatgatcaactgaagttcgtgaacaacctgttcgttcagctgtccaagtccaaaaagccagtgatcatcgcagcgactaaatgcgacgaatgtgttgaccattatcttcgcgaggttcaagccttcgcctccaacaagaagaacttgctggtggttgagaccagcgccagatttaacgtgaacatagagacttgcttcaccgccttggtgcaaatgttggacaagacacgctcgaaacccaagatcatcccttatctggatgcttacaaaacacagagacagttagtggtgactgcaactgacaaatttgaaaagctggttcaaactgtacgcgactatcatgctacctggaagactgtgtcgaataagttgaagaatcatcctgactatgaggagtacatcaatttggagggcacacgcaaagccagaaacacattttccaagcatattgagcaactaaaacaggaacatattcggaagaggagggaagagtacattaatacactcccaagagccttcaacacactgctacccaacctagaggagattgaacacttgaattggtcagaagccttgaagcttatggagaaaagagcagatttccagctctgttttgtagtcttggagaagacaccatgggacgagactgaccacatagacaagatcaacgatcggagaatacctttcgatctgctctccaccttggaggcagagaaggtttaccaaaatcacgttcagcacctgataagcgagaaacgaagggttgagatgaaagaaaagttcaagaagaccctggaaaagatacagttcatcagccccggacagccctgggaggaagtgatgtgcttcgtgatggaagacgaagcctacaaatatataacagaagctgacagcaaggaagtctatggacgtcatcagcgcgagatagtagagaaggccaaggaagaattccaggaaatgctctttgaacatagtgagttgttttacgatcttgatctgaacgccactccttcctctgacaagatgtccgagatccataccgtgctcagcgaggaacctcgctacaaggccctacagaaactagcccctgatcgcgaaagtctcctcctgaagcacatcggcttcgtataccaccccaccaaagaaacgtgtttgtctggacagaattgtacagatataaaggtggagcaactgctggcaagcagccttcttcagttagatcacggacgcttgcgcctttatcacgattctacgaatattgacaaagtgaacctttttattttagggaaggatggcctagcccaggagctggcaaacgagatccggacccagtccaccgacgatgaatacgctctcgatggaaagatttacgaactcgatctccgcccagttgatgccaagtcgccgtattttctgtcacagctgtggaccgctgcatttaagcctcatggttgcttctgcgtgtttaattctatagaaagcctgagcttcatcggtgagttcattggcaagatacggactgaggcttcacagatacgcaaggacaagtatatggccaatctgcccttcaccttgattcttgccaaccagcgcgactcaatttcgaaaaacttaccaatactgcgacatcagggccagcagctggccaacaaactgcaatgtccattcgtcgacgtccctgcaggcacctaccccagaaagttcaacgaaacccaaattaaacaggctctgcgaggcgttcttgagtccgtgaagcacaatcttgacgtggttagcccaattcccgcaaataaagacttgagcgaagccgacctccggatcgtgatgtgtgctatgtgtggagatccgttcagtgtggacttaatattgtcaccattccttgactcacattcctgcagcgccgctcaggccggtcagaacaacagtttaatgctggataagatcatcggagagaagcgtcgcagaattcagatcacaattctgtcctaccactctagcattggggttaggaaagacgaattagttcacggatacattttggtgtattccgcaaaaaggaaagcctcgatgggcatgttgcgcgcatttctcagcgaagtgcaggacacaatccctgttcagcttgttgccgtgactgactcccaggcggattttttcgaaaacgaggctataaaagagctgatgacagaaggggaacacatagcgactgagattacggccaagttcacagcactttattccctgagccaataccaccggcagacggaggtgttcaccttgttctttagcgatgtcctggaaaaaaagaatatgatcgaaaattcttacctgtctgataataccagggagtctacccatcaaagcgaggacgttttcctgccatctcctagggactgttttccttacaacaactacccagactccgacgatgataccgaggcccctcctccatattctcctatcggcgatgatgtgcaactgctgccgacaccttccgatcgtagtcgttaccgtctggacctcgaagggaatgagtatcccattcattccactccaaattgccatgatcacgagagaaatcataaggtgcctcccccaataaagcccaaacctgtcgtccccaagacaaatgttaagaagcttgacccaaacctgttgaagacaattgaagctggcatcgggaagaatcctagaaaacaaacatctcgggtgcctctagcccaccctgaagacatggatcccagcgacaattatgcagagccgattgacactatttttaaacagaagggctattctgatgaaatctacgtggtgccagacgactcccaaaatagaatcaagatccggaacagcttcgttaataacacccagggagacgaagagaacggctttagcgaccggacctctaaatcacatggagaacggcgaccaagcaagtataaatacaaaagcaaaaccctcttttctaaggcaaaatcttactatagacggactcacagtgacgcctcggacgatgaggctttcacaaccagcaaaaccaagaggaaggggaggcaccggggaagcgaggaggaccccctattgtccccagtcgagacatggaaggggggtatcgataatcccgctatcacttctgatcaggaacttgacgacaaaaagatgaaaaagaaaactcacaaggttaaggaagataagaaaaaaaagaagaccaagaactttaaccctcctacaaggaggaattgggagagtaattattttggtatgcccctgcaggatctagtgacagccgaaaagcctatcccgctcttcgtcgaaaaatgcgtggagtttatcgaagacacaggcctgtgcaccgagggcctctatcgtgtttcgggaaacaagaccgaccaggataacatccagaagcaatttgatcaggaccacaacattaacctcgtgtctatggaagtgactgtaaacgctgtggccggtgctctgaaggccttcttcgcggatctgccagatccactgattccatattcccttcatccagaactgttggaagctgcgaagattcctgataaaacggagagactgcatgccctgaaggagattgtgaagaagtttcatccagtaaactatgacgtgtttaggtacgttataacacaccttaatagagtgagccagcagcataaaattaatctgatgacagcagacaacttatccatatgtttttggccaaccctgatgaggcccgacttcgaaaatagggaatttcttagcaccactaagatacaccagtccgtcgtcgagaccttcattcaacagtgccagttcttcttttacaacggagaaatcgtggaaactaccaacatcgtagcaccacctccaccctctaatccaggacagctcgtggagcccatggttcccctacaactccctccacccctgcaaccacagctgattcagccccaactccagacagatccgctcgggatcatcta

SEQ ID NO: 238741 - DNA, 726 bp, synthetic construct
  misc_feature 1..726: note = Description of Artificial Sequence: Synthetic coding sequence
  source 1..726: mol_type = other DNA
atgcctttgcaggacctagtgacagccgaaaaacctatacccttatttgttgagaaatgtgttgaattcatcgaggatacaggtctatgcacggaagggctctaccgcgtgagcggaaacaagacagaccaagacaatatccaaaagcaatttgaccaagaccacaacataaatctggtgtcaatggaagttactgttaatgccgtggccggagccttaaaggccttctttgcagacctaccagatccactgataccctactcgcttcatcctgagcttctggaggcggctaagattcctgacaaaacagaacggctccacgcactaaaagagatcgtaaagaagttccaccctgttaattatgacgtatttcgctatgtgataacccacctgaacagggtgtcccaacagcataaaatcaatttaatgacggccgacaatctctcaatatgcttttggccaactctaatgaggcccgatttcgagaaccgagagtttctaagtacaaccaagatccatcagagtgtggtggagaccttcattcaacagtgccagtttttcttttacaacggagagatcgtggaaacaaccaatattgttgctccccctccacccagcaaccccggtcagctcgttgaacctatggtgcctctgcagctgccacctcctttgcaaccacagttgatccagccgcagctgcagacggaccctctggggatcatctag

SEQ ID NO: 238742 - DNA, 4509 bp, synthetic construct
  misc_feature 1..4509: note = Description of Artificial Sequence: Synthetic coding sequence
  source 1..4509: mol_type = other DNA
atgatggccaagaataaggaacctagaccaccgtcctacacaatctcaatcgtcggtctgtcaggaacagaaaaagacaagggcaattgcggcgttggcaagtcatgcttgtgtaacagattcgtgaggagtaaagctgacgaatactaccctgaacacaccagtgtgttgagcactattgattttgggggtagagttgtaaacaacgatcactttctgtattggggagacattattcagaactctgaggatggagtggagtgcaagattcacgtcattgagcagacagagtttatcgatgaccagacctttttgcctcacagatctacaaatctgcagccatacatcaaaagggccgcagcgtccaaactgcagagtgctgagaaactgatgtacatatgcacagaccagctgggtctcgagcaagatttcgagcagaagcagatgccagaagggaaactcaacgtcgatggattcctgctgtgtatcgatgtgagtcaggggtgtaaccgaaaattcgacgatcagttaaaattcgtgaataacctgtttgtacagttgtctaaatccaaaaagcccgtgatcatcgcggctacaaagtgcgacgagtgtgttgaccattacctaagggaggttcaggctttcgcctcaaacaagaagaatcttctcgtcgttgagacaagtgccaggttcaatgtgaatatcgagacttgcttcaccgccttggtgcaaatgctcgataaaacacgatccaagccgaagattatcccatacctggacgcctacaagacccagcgacagcttgtcgtgaccgctaccgacaaatttgagaaactcgttcaaaccgtgcgggattatcatgcaacctggaaaacagtctccaataagctgaagaatcacccagactatgaagagtatattaacttggagggaaccaggaaggcacggaatacctttagcaaacatattgaacagttgaaacaggagcacatcagaaagcgtagagaagagtacattaacaccttaccaagagcatttaatacgcttctcccaaacttggaggagattgagcatttgaactggtccgaggcactgaaacttatggagaagcgtgctgactttcagctctgtttcgtcgtgctggagaagaccccctgggacgagactgaccacattgacaagattaacgaccgcagaattccttttgatcttctatctactctggaagcggagaaagtttaccaaaaccatgtgcagcatctgatatccgagaaaaggcgggttgaaatgaaagagaaattcaaaaaaaccctggaaaaaattcagttcatcagccctggtcagccctgggaggaggtgatgtgtttcgtgatggaggatgaagcttataagtacattacggaagccgacagtaaggaagtgtatggtcggcatcaaagagagatcgtggagaaagctaaagaggaattccaggaaatgctgtttgagcattctgaactcttttatgatctcgatttgaatgcaacaccctcatcggataagatgagcgaaattcacaccgtgttgagcgaagagccgcgatataaggcactccaaaaattagcacctgacagagagtcactgttattgaaacacatcgggtttgtatatcatccgaccaaagagacatgcttgagcgggcagaactgcaccgatatcaaggtcgagcagttgttagcatcaagccttctgcagctggatcacggcagactgcgtctgtatcatgacagcacaaatatcgataaggtcaatcttttcatcctgggcaaagatgggctcgctcaggagctcgccaatgagattcggactcagtccaccgatgacgaatacgctcttgatggcaagatctatgagctcgatctacggcctgtcgacgccaaatccccctacttcctctctcagctgtggacagccgcatttaagccccacggatgcttctgcgtcttcaacagcatcgagtctctatctttcatcggagagttcatcggcaaaattcggacagaagccagccaaatacgcaaagataaatacatggccaacctgccctttactctcatacttgccaatcaacgcgactcgatttctaaaaacctgcctatcctaagacaccagggccagcagctcgctaacaagttacaatgccccttcgtggatgtacctgccggaacctatccacgcaagttcaatgagacacagattaagcaggctttgagaggcgtcttagaaagtgttaagcataacctggacgttgtttcaccaatccccgctaacaaggacttgtccgaggctgacctacgcattgtgatgtgtgccatgtgcggtgatcccttctccgtagacctcatcctctcccctttcctcgacagccactcctgctccgcagcgcaggccggacaaaacaatagcctgatgttggataaaattatcggcgagaagaggagacgtattcagatcacgatcttatcttaccacagctctatcggcgtacgcaaggacgagctagtgcatggctatatcttggtttactcggccaagcggaaagctagcatgggaatgctgcgagcctttctgtctgaggtccaggataccatacccgtccagttggtcgcggtgactgactctcaggcagattttttcgagaacgaggctatcaaagagctcatgaccgaaggcgagcacatcgcgacagagataactgctaaatttacggccctctactcactttcccagtatcatagacagacggaggtttttacactcttcttcagtgacgtgttagagaaaaagaacatgatagaaaattcctacctgagcgacaatacccgggagagcactcatcaatctgaggatgtgttccttccatcaccccgtgactgctttccgtataataattaccccgacagtgatgatgatacagaagcccctcctccttattccccaattggcgatgatgttcagttgttgccaacaccctccgacaggagccgctacaggctggacctggagggcaatgaataccctattcacagcaccccaaattgtcacgatcatgagcggaaccacaaagttccaccacctatcaagccaaagcctgtggtgcccaagacaaatgtgaagaaattggatcccaacctcctaaagaccatagaggccggtatcggcaaaaaccctcgcaagcagacaagcagggtgcccctggcacatcccgaagatatggacccgtccgacaactacgccgaacctatagataccatcttcaaacagaagggctactctgatgaaatatacgtcgtccccgacgatagccaaaaccgtattaaaattcggaacagcttcgtgaataacacccaaggtgatgaagagaatggtttttccgaccggaccagcaaatcccacggcgaacgtagacccagcaagtacaaatataaatctaaaactctcttttccaaggccaaatcatattatcggaggacacactccgatgcatctgacgatgaggcatttactacctcgaagaccaagaggaaaggcaggcatcggggatcagaagaagatcctctgctgtcccccgtcgagacatggaaaggaggcattgacaatcccgctattactagcgaccaagagttggacgacaaaaagatgaaaaagaagacgcacaaggtgaaagaagacaaaaagcagaagaagaagaccaagaattttaatccaccaacaagaagaaactgggagtcaaattatttcggtatgcctttgcaggaccttgttaccgccgaaaaacccatccctctgttcgtcgagaagtgcgtggagttcatagaggacacagggctgtgcactgagggcttgtacagagtgtccggcaataaaaccgatcaggataacattcagaagcagttcgaccaggaccacaatatcaacctcgtcagtatggaagtgaccgtgaatgcggtggcaggagcacttaaggcattttttgcagatctgccggatcctctgatcccgtacagcttgcatcccgagctgttggaagccgctaaaatcccagataaaaccgaacgactacacgcgttaaaggaaattgttaaaaaatttcatcctgtgaactacgacgtgttcaggtacgtcatcactcaccttaaccgcgtgtcgcagcagcataagatcaatttgatgaccgccgacaacctttctatctgcttctggccaactctgatgcggcctgatttcgagaatcgggaatttctatcaacgaccaagatacaccagtcggtggtggagacgtttatccagcagtgtcaattctttttttacaatggagagattgtggaaaccaccaatatagtggcaccaccaccaccatctaaccccggtcaactcgttgaaccgatggtgcctctccaactgccacccccattgcagccacagctaattcagccacaactgcagaccgatccattgggcattatttag

SEQ ID NO: 238743 - DNA, 414 bp, synthetic construct
  misc_feature 1..414: note = Description of Artificial Sequence: Synthetic coding sequence
  source 1..414: mol_type = other DNA
atgcccctccaggatttggtgactgccgaaaagcctattcccctctttgtggaaaagtgtgtggagtttattgaagacactggactgtgcacagaagggttatatagagtgtctggtaacaagactgaccaggacaatatccagaagcagttcgaccaggatcacaacataaacttggtgagcatggaggtgacggtgaacgcagtggccggagctctcaaggcctttttcgctgatctccccgaccctttgatcccgtacagcctgcaccctgagctgctggaagctgcgaaaattccagataagactgaacgcctgcatgcattgaaggagatcgttaagaagttccatcctgttaattatgacgtgttccgatacgtcatcacacacttgaatcgggtgagccagcagtag

SEQ ID NO: 238744 - DNA, 114 bp, synthetic construct
  misc_feature 1..114: note = Description of Artificial Sequence: Synthetic coding sequence
  source 1..114: mol_type = other DNA
atgatggctaagaataaagaaccgaggcccccaagctatacaataagtattgtggggctgtccggcactgaaaaggataaaggcaactgtggtgtgggtaagtcatgtctgtag

SEQ ID NO: 238745 - DNA, 423 bp, synthetic construct
  misc_feature 1..423: note = Description of Artificial Sequence: Synthetic coding sequence
  source 1..423: mol_type = other DNA
atgatggctaagaataaagagccccgacccccatcctacactatctccatcgtggggctaagtggaactgaaaaagataagggtaactgtggagtaggtaaaagttgcctgtgtaaccgatttgtccgcagtaaggcagatgaatactatcccgagcatacctcagtgttgagcaccatcgacttcggcggtcgtgtagtcaacaacgaccattttctctattggggggacataattcagaattccgaagatggggtggaatgtaaaatccatgtgatcgaacagaccgaatttatcgatgaccagacgtttttgccacatcgatctactaaccttcaaccatatattaagcgtgccgctgcctctaagctgcagagcgctgagaagttaatgtacatatgcaccgaccagctgggactctag

SEQ ID NO: 238746 - DNA, 4506 bp, synthetic construct
  misc_feature 1..4506: note = Description of Artificial Sequence: Synthetic coding sequence
  source 1..4506: mol_type = other DNA
atgatggcgaaaaacaaggaaccacggcctcctagctacacaatcagtattgtcgggctgtctgggaccgaaaaagacaaagggaattgcggcgtgggaaagagctgcctctgcaatcgcttcgtccgatcaaaagcagatgagtattatccagaacatacctcggtgttgtcgactattgacttcggtgggagggtggtcaacaatgaccattttctgtactggggcgacattatccaaaacagcgaggacggagtggagtgcaagatccacgtgatcgagcagacggaattcatcgacgaccagacgttccttccacataggtcgacgaacctgcagccatacatcaaaagggctgccgcttccaagctgcagagcgcggaaaaactgatgtatatctgcacagaccagttgggactggaacaggattttgaacagaaacagatgcccgagggcaagctcaacgttgacggattcctcctgtgcattgatgtgagccaaggatgtaaccggaaatttgacgatcaattgaaatttgtgaacaatttatttgttcagctatccaaatcaaagaaacccgtgatcatagcagcgactaaatgcgacgaatgtgtggaccattacctacgcgaggtgcaggcctttgcctccaacaagaaaaatctgctcgtggtggagacctctgctcgctttaacgtgaacatagagacctgctttacagccctggtgcagatgctcgacaaaacccgctctaaacctaaaatcatcccatatctggacgcttataaaacccagcggcaactcgttgtgaccgctacagataaatttgagaagctggtccagacagtcagggattatcacgctacatggaaaacggtgtctaacaaactgaagaaccaccccgactacgaggagtacatcaatctggagggaactagaaaggcgcgaaataccttttccaaacacattgagcagctgaaacaagaacatatacgaaaaagacgcgaagagtatatcaacactcttcccagggcgttcaatacgctgctcccaaatctggaagagattgaacacctcaactggtccgaagcgctgaaactcatggagaaaagagccgacttccagctgtgttttgtagtcttggaaaagaccccatgggatgaaacagatcacattgacaaaattaatgatcggagaataccatttgacctgctctccaccctggaggccgagaaggtgtatcagaaccacgtgcagcacctcatatctgagaagcggcgagttgagatgaaggaaaaatttaaaaaaacacttgagaaaatccagttcatcagccccggtcagccatgggaagaggttatgtgttttgtcatggaagacgaggcttacaaatatataactgaggccgacagcaaggaggtgtatggaaggcatcagcgcgaaattgtggaaaaagcgaaagaggagttccaggaaatgctttttgagcattcagagctgttttacgacctggatctgaacgccaccccaagcagcgataaaatgagtgagattcacacagtcctaagtgaagaaccacggtacaaagccctgcaaaaactggcaccagaccgagaatcccttctgttaaagcatatcggttttgtatatcaccctaccaaggaaacctgcctttctggccaaaactgtacagacataaaagtcgaacagctgctggcttcgagcctgctgcagctcgaccacggcaggctgagattataccacgactctaccaatatagacaaagtcaatctcttcatcttaggcaaagatgggcttgctcaagagctggccaatgagattagaactcagagcactgatgatgagtatgcactggacggaaaaatctatgagctcgatctgcggccagtcgatgccaaatccccttatttcctcagccagctgtggacagccgctttcaaaccacacggctgtttctgtgtttttaattcaatcgaaagtttgtccttcataggcgagtttattgggaaaattaggacagaggcctcacagatacggaaggacaagtacatggcaaatctgcctttcaccctcatcttagcaaatcagagggacagtatttctaaaaatctgcctatacttcgacatcagggacaacagctggccaacaagctgcagtgcccattcgttgacgtccccgcaggcacctacccccgaaagtttaatgagacacaaataaagcaagccctgaggggggtactggagtcagtaaaacacaatctcgacgtggtctctcctatcccagctaataaggatttatccgaagcagatctgcgcatcgtcatgtgcgctatgtgtggagaccccttcagtgttgatttgatcctgtccccattcttggattctcactcttgcagcgctgcacaggcaggacagaacaattccctgatgctagacaagatcatcggtgagaagcgccgaagaatccagattaccatcttgagttaccacagctcaatcggcgtgcggaaagatgagctggttcacggttatatcctcgtctactccgccaagcggaaggccagcatggggatgctgagagcttttctgagcgaagtgcaggacacgattcctgttcaacttgttgccgtcactgactcccaggcggatttttttgaaaacgaagctattaaagagttgatgacggagggcgagcatatagctaccgagattaccgccaagtttaccgcactctatagcctgtcccaatatcatcggcagactgaagtgttcactctgttctttagcgatgttttagaaaagaaaaatatgatcgagaatagctacctctctgataatacccgggaaagtacgcaccagagcgaggatgtctttcttccatcacctagagactgttttccctacaataattatcccgattccgacgacgacaccgaggccccaccaccttacagccctatcggggatgacgtgcagctcctcccaactcctagcgaccgatcgcgatatcgccttgacttagaaggcaatgagtatcccatccatagcacacccaactgccacgaccacgagcgcaatcataaggtcccaccaccaattaaacctaagcctgtggtccccaagacaaacgtaaagaagttggatcccaatctcttaaagaccattgaggccggaatcggcaaaaaccctcggaaacagacttctagggtccccctggcgcatcccgaagatatggacccctcagataactatgcagagccaatcgacactatctttaaacagaagggctattctgacgaaatctacgttgttcccgatgactcccagaatcgcattaagattcgaaacagctttgtgaataacactcagggtgatgaggaaaacggtttctcggatcgcacttcgaagtctcacggggagcgcaggccatcaaaatataaatacaaaagcaaaacactcttctccaaggccaagtcctactatagacgtactcactctgacgctagcgatgacgaagcgtttaccacaagcaagactaagcgcaaagggagacaccgcggtagcgaagaagaccccctgctgagtcccgtggagacatggaagggcggaatcgacaaccccgctattacatcggatcaggagctggatgacaaaaaaatgaagaaaaagacacataaggtaaaggaagacaaaaagaagaaaaagacaaagaacttcaaccctcctacacgaaggaactgggagtcaaactattttggtatgccactgcaggatctggtgacggctgagaagcctatccctctatttgtggagaaatgcgttgagttcattgaagacaccggcttatgcaccgaaggactctacagagtcagcggcaataaaaccgaccaagacaatatccagaaacagttcgaccaagatcacaatataaacctggtgtccatggaggtgaccgtgaatgcagtggccggtgctctgaaggcgttttttgctgacctgcccgaccctctgattccatacagcctgcatccagaacttcttgaagcagccaaaatccctgacaaaacagaaagactacatgctcttaaggagattgtgaagaagtttcaccccgtcaattacgacgttttccgctatgtcatcacgcacctaaaccgagtttcccagcagcacaaaataaacctcatgacagccgacaacctgtctatttgtttttggcccactttgatgagacccgactttgagaatagggagttcctgagtaccacaaaaattcaccagagtgtagtggaaaccttcatacagcagtgtcaatttttcttctataacggcgagatcgtagaaactaccaatatagtggccccacccccacctagtaatcccggacagctggtggagccaatggttcctctacaactaccccctcctctgcagccacaattgatccaaccacaactacaaacagatccgttaggcatcatttag

SEQ ID NO: 238747 - DNA, 2316 bp, synthetic construct
  misc_feature 1..2316: note = Description of Artificial Sequence: Synthetic coding sequence
  source 1..2316: mol_type = other DNA
atgtcagggaggagtgtgcggctcagatcagtgcccatacaatctctgagcgaacttgagagggctcgcctgcaagaggtggccttctatcagctacagcaggactgtgatctcagctgccagatcacaatcccaaaggatggacaaaagagaaagaagtcactgaggaagaaactggattctctcgggaaggagaaaaacaaagataaggagttcatccctcaggcattcggaatgccgctgtctcaggtgatcgccaatgatcgagcctataagcttaagcaagacctgcaacgcgatgaacagaaggacgcaagcgacttcgtggcatccctgctcccatttgggaacaagaggcaaaataaagagctgtcaagtagtaattcctcgcttagttctacgtctgaaacccccaatgagagtacatcacccaatactcctgagcctgctccacgagctcgccgaaggggggctatgtcagttgactccatcaccgaccttgacgataatcagagtaggctgctcgaggccctgcagctttccttgcctgccgaggcccagagtaagaaagagaaggccagggataaaaaactgtcactcaaccctatttataggcaggtgccgcgactcgttgattcatgttgccagcacctagaaaaacacggattacagacagtgggcatcttcagagttggcagctcgaagaagagggtgaggcagcttcgtgaagaattcgacagggggatagacgtctccttggaggaagaacactccgtccacgatgttgccgctctgttgaaagaattcctgagggacatgcctgatccactactgacaagagagttatatacagcctttattaacacgctacttctcgagccagaagaacagctcggtactctgcagctcctgatatacctactgcctccatgcaattgcgatacgttacatcggctgcttcaattcttaagcatagtagctagacacgccgatgataatatcagtaaagacgggcaagaagtaacaggcaacaaaatgacctctctcaacctagccaccatctttggtcccaatctgctgcacaagcaaaagtcgtctgacaaggagttctctgtgcagagcagtgctcgggcagaagaatctaccgccattattgccgtggtgcaaaagatgatcgaaaattacgaagctctcttcatggttccaccagacttacagaacgaggtactcatttcactgctggaaaccgatcccgacgtggtggattacctgttgaggaggaaggcttcgcagtctagctcccccgacatgctgcagagtgaggtctccttttcagtgggcggacggcactcctcaacggattcaaacaaggccagctccggcgatatcagcccctacgacaacaattctccagttctgtccgagcgaagtctgctggctatgcaggaagatgccgcaccagggggttccgagaagctataccgtgtccctggacagttcatgttagtcggtcacctgtcgtccagcaagagcagagagtctagccctggtcccagactgggcaaagacctgtccgaggagccctttgacatctggggcacttggcatagcacactgaaaagcggcagtaaggacccgggtatgacgggatcctctggagatatcttcgagagtagtagcctgcgcgcaggaccttgtagcctgtctcagggaaacttatctcccaactggccccgatggcagggaagccccgcagaactggactctgatacccagggggcaaggcggacgcaggcggctgctcccgctacggagggaagagcgcacccagccgtgtcacgcgcatgctctacacctcacgttcaggtggctgggaaagccgaacgtccgaccgcaagatctgaacagtacttaactctgagcggagctcatgatctctcagagagcgagctggacgtcgccggacttcagtcccgtgcaacgcctcaatgccagcgaccacatggctcagggcgtgatgataagcgaccaccaccaccctaccccggaccaggaaaacctgcagccgcagccgcttggatacaggggccaccagagggagtggagacaccaaccgaccaaggaggacaggcagcagagcgcgagcaacaggtcacgcaaaagaaactgagctcagctaattccttacccgctggcgagcaggattcccccagattaggggacgccggatggctggactggcagcgggaaaggtggcagatttgggagctgctctcaaccgataatccagacgccctgccagaaacactggtgtag

SEQ ID NO: 238748 - DNA, 2925 bp, synthetic construct
  misc_feature 1..2925: note = Description of Artificial Sequence: Synthetic coding sequence
  source 1..2925: mol_type = other DNA
atgtctgcccagtcccttttgcacagtgttttctcttgcagttcccccgcttcgtcaagtgccgcttcagccaaaggattctcgaagcgcaagctgagacagaccaggtctttagatcctgctctgatcggagggtgtgggtctgatgaggcaggggcagagggctcagctcggggagcgaccgcgggacggttatatagcccttcactgcctgcggaaagcctgggacctcggctagcctcttccagccgtggacctccaccaagggctactcggctgccccctccaggaccattgtgttcgagtttcagcacacctagcacaccccaggagaaatccccttctggcagcttccattttgactatgaggtgccactgggcagaggtggtttgaaaaaatctatggcttgggatctcccttcagtcctcgcaggtccagcctcgagccgctctgcaagttccattctttgttcaagtggtggtggccctaacggaatttttgcatccccaagacgttggttgcagcagagaaaatttcagtcccccccagatagccggggtcacccgtacgtggtgtggaagtcagagggggactttacctggaactccatgtccgggaggagcgtaagacttcgctccgtccccatccagagcctatccgagttggagcgagcgcgtttacaggaagtggcattctatcaactgcaacaggactgtgacttaagctgtcagattactattcctaaggatgggcagaagcgcaagaagagtctgcggaagaaattggacagcctgggaaaggagaagaataaggataaggagtttattccccaggcattcggcatgccgttaagccaggtgatcgccaatgatcgcgcatacaagctgaagcaggacctgcaaagggatgaacaaaaagacgcttccgactttgtagcctcactgctgccattcggcaataagcggcagaacaaggaactgtcctcgagtaatagcagcctgagttcaacgtccgagacgccaaatgagtccacatctcccaataccccagagccagcacctagagcacgcaggcgtggagcgatgtcagtcgacagcattaccgatctcgatgacaaccagtctaggctcctggaggctttacagctgtctcttcctgctgaagctcagtccaagaaggagaaggcacgggataagaagctgtcgcttaatcctatctacagacaagtgccgaggctagttgactcttgctgccagcacctggaaaaacacggactacaaacagtgggaatcttccgggttgggtcatctaagaagcgagtgcggcaactgagagaagagttcgaccgtggaatcgacgtctctctggaggaggagcactcagttcacgacgtggccgcactccttaaggagtttctgcgcgatatgcctgatcctctcctgaccagggagttatataccgctttcataaacacattactgctggagccagaagagcagttggggactctgcagctactgatctatctgctgcccccatgcaattgtgatacactgcaccgcctgctgcaattcctcagcattgtggcccgtcatgctgatgataatataagcaaggacgggcaggaagtgaccggcaacaagatgacatcactaaatctggcgacaatcttcggacctaatctcctccacaaacagaagagcagcgacaaggagtttagcgtgcagagctccgcccgtgccgaggagagcaccgctatcattgcagtagtacagaaaatgatcgaaaactatgaggccctgtttatggtcccccctgatctgcagaacgaggtgcttatcagcctgttggaaacagaccctgacgtggttgattatcttttacgacgaaaggctagtcaaagctcttcaccagacatgctgcagagcgaagtgtctttctcagtggggggacgtcacagcagcactgactccaataaagcctcctcaggggatatatcaccatacgataacaacagtcccgttctgtcagagaggtccctcctagctatgcaagaagacgccgctcccggagggtctgagaaactctatcgggtaccaggccagtttatgttagtgggccacctatcctcatctaagtcgagagagtcttctcccggacctagattggggaaggacttatctgaagagcctttcgatatctggggcacgtggcattccaccctgaagtctgggtccaaggacccaggcatgacaggttctagcggggacatatttgaatccagtagcctgcgcgctggaccatgtagcctgtcgcaggggaacctgtcaccaaactggcccaggtggcaggggtcacccgcagaactggacagcgacacccagggcgcaaggcgaactcaggccgcagcaccggcaacagaaggaagggctcaccccgcagtgtcacgtgcctgtagtaccccgcacgtgcaagtggctggcaaagccgagagacctacagccagaagtgagcagtatctgaccctgagtggcgcacatgatctgagtgaaagcgaacttgacgtggctgggctgcagtcccgagcaacacctcagtgccaacgccctcacggatctggtcgggacgataagcggccacccccaccataccccggaccagggaagcccgcagccgctgcagcctggatccaaggaccccctgagggagtggaaacgcctactgaccagggaggacaggcagcagaaagggagcaacaggttactcagaagaagctgtcttccgcgaatagtttgcccgcaggtgaacaagactcccctaggttaggcgacgcaggctggctggactggcaaagagagaggtggcagatctgggaactcctttcaaccgacaatcctgatgccctgcccgagacactagtgtag

SEQ ID NO: 238749 - DNA, 1806 bp, synthetic construct
  misc_feature 1..1806: note = Description of Artificial Sequence: Synthetic coding sequence
  source 1..1806: mol_type = other DNA
ctcgaattatatgacttgcagatactcgggactaaacccccaatgaactcagatacgcatagaaacttcgatcccacagctacactgcgaaatcagggcgatttcacctggaacagcatgtccggtagatctgtgcgactccgtagtgtgcctattcagtcgttgagtgaactcgaaagagcccgactgcaggaggttgccttctaccagttgcagcaggattgcgatctcagctgccaaataacaatccctaaggatgggcaaaagcggaagaaaagtctgcggaagaagcttgactccttggggaaggaaaaaaacaaggacaaagagttcatcccacaggccttcggaatgcccttgtctcaggtgatcgccaatgaccgcgcttataagcttaagcaagatcttcagagagatgaacaaaaagacgcctctgactttgtggcctctctgctcccatttggcaacaaacgccagaacaaggaactgtcatcttcgaattctagtctttcatccacatcagaaacgcccaacgagagtacctcgccgaacacaccagagccagcacctagggcgcgacgcaggggggcaatgtccgtggatagcatcactgacctggatgataaccagtcaaggcttctggaggcacttcagctctcactacccgcagaggcccagtctaagaaagagaaggcgagggacaaaaagttgtctcttaatcctatttaccggcaggtccctcgcctggtggattcttgttgtcagcatcttgaaaagcacggactgcagacggttgggatctttcgagtaggatcctctaagaaaagggttaggcagctgcgggaggagttcgacagagggatcgacgtcagtttggaagaggagcactctgtgcacgatgtcgctgcactcttaaaagaatttctgagagatatgcccgaccccctgctcacccgggagctgtacaccgcttttattaacaccttgttgctggaacctgaggagcagctgggaaccctccagctgctgatctatttgctccccccttgtaactgcgacactctgcacaggctgctgcaatttctttccatcgtagctagacatgctgacgacaacatctctaaggacgggcaggaagtgacaggtaacaaaatgacaagcctaaacttagccactatatttggacctaacctgctccacaagcagaaatcttctgacaaggaattcagtgtgcagagttccgccagagcagaggagtccacagccataattgccgtcgttcagaaaatgatcgagaactacgaggcgctttttatggtgccacccgatctgcaaaatgaggtgttgatatccctgctggaaacagatcctgatgtcgtcgactatcttctaagacgcaaggcttcccagagttcaagtccagacatgctccagtcagaggttagctttagtgtgggtgggaggcactcatcaacagactctaacaaggccagctccggagacatctcaccatacgacaacaattctcctgtgcttagcgaaaggtctctgttggctatgcaagaggatgctgccccaggcggttctgagaagctctaccgcgtgccaggccaattcatgctggtcggccatcttagctcctctaaatctagagaaagttcgccgggaccacgcctggggaagggaaattggtctcttgcatccagacggtggcccaaacaggctactctccttctgctccatgtggcatggtgcggagccctgcggaccttctcatcatctctgccatatttgatgttcctgtag

SEQ ID NO: 238750 - DNA, 2298 bp, synthetic construct
  misc_feature 1..2298: note = Description of Artificial Sequence: Synthetic coding sequence
  source 1..2298: mol_type = other DNA
atgagtgcacaatcattgctgcactccgttttttcctgctcatcccccgcatcctcctccgcggctagcgccaagggtttcagtaagaggaaactgaggcaaaccaggagtctcgatccggcactgattgggggttgcggatccgacgaggctggcgctgaaggatcggccagaggcgctaccgcaggcagattgtactccccgagtcttccagcggagagtctgggcccacggctcgccagttccagccggggacctccacctcgcgctactaggctgccacccccaggacctctgtgctcgtcttttagcacgccttcaacccctcaggaaaagtccccatccgggagttttcatttcgattacgaggttcctctaggcagaggcggtttaaagaagtctatggcctgggacctgccctccgttctggctggcccagcaagttctagatccgcctcatccatcctgtgcagttcggggggtggtcctaatggcatctttgcttcgccacggaggtggttgcagcaacgtaagtttcagtcccctcccgattctagaggccatccatatgtcgtctggaaaagcgagggcgactttacttggaacagcatgagtggccgaagcgtgcggctccgatccgtgcctatacagagtctttccgagctggagcgcgcacgactgcaggaagttgcgttctatcagctgcagcaagattgtgacctctcgtgtcagatcaccattcctaaggatgggcagaaacgcaaaaagtcactgcgcaaaaagcttgacagtctgggcaaagaaaaaaataaggataaagaatttataccccaggcctttggcatgcccttatcccaggttattgcaaatgaccgcgcatataaactgaaacaggacctgcagcgtgatgaacagaaggacgctagtgactttgtcgccagcctgcttccattcggcaataaacgacagaataaagaattgtcttcgagtaactcttctctgtccagtacttctgagactcccaacgaatctaccagtcctaataccccggaaccagccccaagagccagaaggcggggtgctatgagtgtggactctatcaccgacttggacgataatcagtctcgcctgctagaggccctacagctgtctctcccggctgaggcacaaagcaaaaaagagaaagctcgcgacaagaagctgtccctgaaccctatctatcggcaggttccacgactcgtggatagctgctgtcagcatctggaaaaacacggcttacagacagtcgggatttttcgggtgggatcttcgaaaaagcgtgtgagacagctgcgcgaagaatttgaccggggtatcgacgtgtctctggaggaggaacactcagttcacgacgtggccgcattgctgaaagagttcttgcgcgatatgcctgatcccctgctgacgcgggagctctacaccgcctttattaatacactgttgttagagcccgaggagcagctgggcactttgcagctgctaatctacttgctaccaccgtgcaattgcgacaccctccacagactgctgcagttcctctccatcgtcgcaaggcacgcggatgacaatatttctaaggacggacaagaagtgaccggaaacaagatgacttctttaaatctggctaccatcttcgggccaaatctcctccataagcaaaagagcagtgataaggagttttctgtgcaatcctctgcacgggcagaggagagcacagcgattatagctgtcgtgcagaaaatgattgaaaattacgaagccctgtttatggtgccccctgatttgcagaacgaagtccttatttcgctgttggaaactgatcccgatgttgtggactatttgctccgtagaaaagcctcccaatcctcgagtcctgacatgcttcagtcggaggtctcctttagcgtaggcggtagacatagcagcaccgacagcaataaagcgtccagcggagacatctcaccatacgataataacagtcctgtgttgtccgagaggtctctgcttgcaatgcaggaagatgccgcacccggaggctctgagaaactttatcgcgtcccagggcagttcatgctcgttggtcacttatcctcctcaaagagccgcgagagtagcccaggacccaggttaggaaaaggaaactggagtctcgccagcaggaggtggccaaagcaggccaccctccttttactgcacgttgcctggtgtggcgcactaaggaccttcagtagctcccttccttatttgatgtttctgtag

SEQ ID NO: 238751 - DNA, 2073 bp, synthetic construct
  misc_feature 1..2073: note = Description of Artificial Sequence: Synthetic coding sequence
  source 1..2073: mol_type = other DNA
atgtctgcccaaagtctgctacactctgtgttttcttgctccagcccagcatcgtcgtcagcggctagcgcgaaggggttctcaaagagaaagctgcgacagactcggtcactggaccctgcgcttattggcggttgtggttctgatgaagctggtgctgagggaagcgcccgaggcgctacagcaggccgactttacagcccctctctccccgcagagagtttgggcccaagacttgcgagttcaagccggggtccccctcctcgggctactaggctccctccccctggcccattgtgctcttccttttcgacaccctctacaccgcaggagaagagcccaagcggttccttccacttcgattatgaggttcctctcggcagaggcggactgaaaaagtccatggcatgggacctcccaagtgtgctcgcgggtcctgcctcttcccggtctgcatcctctatcctctgtagctctggaggaggacctaatggcatcttcgcatctccacggagatggctgcagcagaggaagtttcagtcacccccagattctagaggccatccctacgtggtttggaagtcggagctcgagttgtacgatttgcaaatactgggcacaaaaccacctatgaattcagatacccataggaactttgaccctactgctaccctgcgaaatcagggggatttcacttggaatagcatgagtggtagatcagttcggctcagatctgtgcccatccagtccctgagcgaactcgagagagctcgcttgcaggaggtggccttctatcagctccagcaagattgtgatctgagctgtcagatcaccattcccaaggacgggcagaagaggaaaaagtccttgcgcaaaaaactggactccctgggcaaggagaagaacaaagacaaagaattcatccctcaggctttcggcatgccactgagtcaggtcattgcaaatgacagggcctacaagctgaagcaggacctccagcgtgatgagcagaaagatgcctcagatttcgtagcttcactgctaccattcggtaacaagaggcagaataaggagctgtccagctcaaatagttctctgtcctctacctccgaaacccccaacgagtcaactagccctaacacacccgagcccgcacctcgggctaggagacgcggagccatgagtgtggatagcatcacagaccttgacgataaccaatctcgactgttggaagcactgcagctctccctgcccgcagaggcccagtccaagaaagagaaagctcgggacaagaagctttcgctcaacccgatctacagacaggtcccacgtttggtcgattcgtgctgtcagcatttggagaaacacgggcttcaaaccgtgggaattttccgggtgggctcatctaaaaagcgtgtgagacagctgagggaggaatttgataggggcattgacgtaagtctggaagaggaacactctgtacacgatgtggcagcgttactgaaggagttcttaagagatatgcctgatcctctgctgactcgcgaactgtacactgcgttcataaacacgttactactcgagccagaagaacagctgggtactctgcagctgttgatctatctgctgccgccttgtaattgcgacacccttcatcgcctgctccagttcctctctatcgtcgcgagacacgcagatgataatatctccaaagatggacaggaagtgaccgggaataagatgactagtttaaacctggcaacaatcttcggccctaatttgctgcataaacaaaaaagcagtgacaaggaatttagcgtgcagagctcggctagagccgaggagagcacagccatcatcgccgttgtccagaagatgattgagaactacgaggccctatttatggtccccccagacttgcaaaacgaggttctgatttctctcctcgaaacagatcccgacgttgtggactacctgctgaggcggaaagccagtcaatcttctacatcgtcagttcttcctgcggcagtccaggcctgcccacaatacccagcctcaatgtttaccccatag

SEQ ID NO: 238752 - DNA, 2316 bp, synthetic construct
  misc_feature 1..2316: note = Description of Artificial Sequence: Synthetic coding sequence
  source 1..2316: mol_type = other DNA
atgagcggacgctctgtgaggctgcgttccgtccctatccagtcactctcagagctggaacgggcacggctccaagaggtggcattttaccagttacagcaggactgtgatctaagctgccagatcacaataccaaaggatggccaaaagaggaagaagtcgcttcgtaagaaactcgattcactgggtaaagaaaagaataaagacaaagagttcatcccccaggccttcggcatgccacttagccaagttatagcaaatgacagggcatataagttgaagcaggatctacagcgagacgagcagaaagatgcctccgattttgtggcctccctgcttcctttcggcaacaaacggcagaataaggaactatcttcctctaactcctccttatcctcaacaagtgagacccccaatgagtcaacgagtcccaacactccagagcctgcgccaagagccagacgcaggggtgcgatgtcagtggattcaatcacagatctcgacgacaatcagagcagactcctggaagcactccagctgtccctacccgctgaggctcagagcaaaaaggaaaaggccagggacaagaagttgtccctgaatcccatatatcgacaggtacccagattggtggattcatgttgtcagcacctggaaaagcatggtctacaaacggtgggaatctttagggtggggtccagcaagaagagggtacggcagcttcgcgaagaatttgatcggggtatcgatgtcagccttgaagaggaacattctgtccatgacgtcgccgcactgctcaaggagttcttgagagacatgcccgatcccctgctaacccgcgaactgtataccgcttttatcaacacgctgctcctggagccggaagaacaactcgggacgctgcagctgctgatatatctgttaccaccctgcaattgcgacacgctgcatcgcctcctccagtttctgagtatagttgctcgccacgcagacgacaacatctctaaagatggacaggaagtgaccggcaataaaatgacctccctgaatctggccactattttcggccctaatcttctccataagcagaaatctagcgacaaagagttctcagtgcagtcctccgcaagagcagaggagtctaccgctatcattgccgtggttcagaagatgatcgagaactacgaagcactgtttatggtgccaccggatctgcagaatgaggtactgatctcactactggagacagacccagatgtagtggactaccttttacgcagaaaagcgtcccagagcagttccccagacatgctgcagtctgaggtgtcgttcagcgtgggcggtcggcacagtagcaccgactcaaacaaagcatcctcgggcgacatttcaccgtatgataataattctccagttctcagcgagcgaagcctgcttgcgatgcaggaagacgcagcccctggagggtcagagaaattatacagggtacccggacaattcatgcttgtggggcatctttcaagttccaagtcacgagagtcttccccagggcctagattaggcaaggacctgtcagaggagcctttcgacatttggggcacttggcacagcactctgaaatcaggttccaaggatcctggcatgactggcagtagtggtgacatatttgagagctcaagccttagagccggtccatgctccttgagtcaggggaacttgtctccgaattggcctagatggcagggatcgcctgccgagctggacagtgacacccagggggcaagaaggacccaggccgctgccccagccaccgaaggtcgggctcaccctgcagtaagtcgcgcttgttccaccccgcacgtgcaggtagcgggaaaagccgagcgccctaccgcccgatcagaacagtacctcacactctccggagcacatgacctctctgagagcgagcttgacgtcgcagggctacagtcccgagcaacccctcagtgccagaggccccatggctcggggagagatgacaagagaccaccaccaccttatcccggacccggaaagccagctgctgctgctgcctggatacaggggcctccggagggagtggagacgcccacagaccaagggggacaagctgcagaaagggagcagcaagtgacccaaaagaagcttagttcagcaaactctttgcccgctggcgagcaggactccccccgtctcggggatgctgggtggctcgattggcagagggagagatggcagatttgggagttgctctctacagataaccccgacgcactgcccgagacccttgtctag

SEQ ID NO: 238753 - DNA, 1404 bp, synthetic construct
  misc_feature 1..1404: note = Description of Artificial Sequence: Synthetic coding sequence
  source 1..1404: mol_type = other DNA
atgtacagaatcttcggcgatttcacctggaactcaatgagtggacgctccgttaggctccgatctgtgcctattcagtccctgagcgagcttgaacgcgcaaggctccaggaggtggcgttctatcagcttcagcaggactgcgatctgagctgccaaattactatccctaaagatgggcagaaacgcaagaagagccttagaaaaaagttagacagcctgggaaaggagaagaataaagacaaagagttcattccgcaggcctttggcatgccgttgtcccaagtcatcgctaatgacagagcatacaagctgaaacaggacctgcaacgggatgagcaaaaagacgcctccgactttgttgcatctctgctaccattcggaaacaaaaggcagaataaggaactttcatcctccaacagctccttgtcttctactagcgaaaccccgaacgagagcacatcccctaacacgcccgaacccgcacctagggcaaggcgcagaggtgctatgtcagttgactcaatcaccgatttggacgataaccagtcccggttactcgaagctctacagctttccctccccgcagaggcccaatctaagaaggaaaaggcaagagataagaaactatctctaaaccctatttatcgccaggtgcctcgcctcgtcgactcctgctgtcagcacctcgaaaaacatggattacagaccgtagggatttttagggtaggctccagcaagaagagggttaggcagttacgagaggaattcgatcgcggtatcgatgtgtcattagaggaggaacactcagtgcatgacgtggccgctttgctcaaagaattcctgcgggatatgcccgacccactgcttactcgcgaactctatactgccttcatcaatacgctgctactcgagcccgaggaacagctgggtactctgcagctcctaatttacctcctgcctccctgtaactgtgacacgttacatcggttgcttcagtttctgtctattgtcgcacgtcatgccgacgataacatctctaaagacggccaggaagtgaccgggaacaaaatgacatctcttaacctggctacaatcttcggacctaacttgctgcacaagcagaagagctctgacaaggagttcagtgtgcaaagctctgctcgagccgaggaatcaacagcaattatagccgtggtacagaaaatgatcgagaattacgaggccctcttcatggtcccaccagatttgcagaatgaggtcttaatctctcttttggaaacagatcctgacgtggttgattatctgctgcggaggaaggcttctcaatcctcgacctcatccgttctccctgctgccgttcaagcatgtccccagtatccggcttctatgtttacgccatag

SEQ ID NO: 238754 - DNA, 1815 bp, synthetic construct
  misc_feature 1..1815: note = Description of Artificial Sequence: Synthetic coding sequence
  source 1..1815: mol_type = other DNA
atgaagaggctgcatatttttggtcccaagatccactcttctggtggcttatggcaacaaaaaggggacttcacttggaattccatgagtggacggagcgtgagactccgctctgtgcctattcagtccctgagcgagctggagagagccaggcttcaggaagtggccttctaccagctccaacaggactgcgatctaagctgtcagattactatccccaaagacgggcagaagcgcaagaagtctctgcgcaaaaaactggattcccttgggaaggaaaagaacaaggataaggaattcatcccgcaggccttcggtatgcccctcagccaggtgatcgctaacgatcgggcatacaagctgaagcaggacctacaacgtgacgaacaaaaggatgctagtgatttcgtggcgagtctgctgccattcggaaataagagacagaacaaagagctttcgtcctctaattccagcctgtcaagcacctccgagacgccaaacgagtccacatccccgaacacccccgaacccgctcctcgggcacgtaggcggggagccatgagcgttgattctatcaccgaccttgacgacaatcaatcacgacttctggaggccttacagctgtctcttcctgccgaagcccagagcaaaaaagaaaaggcccgagacaaaaagctgtctctgaatccaatctatagacaggtgccgcgactggtcgacagctgttgccaacatctcgaaaaacacgggttgcagaccgtgggtatattccgcgtcggaagtagcaaaaagcgagtgcgacagctaagagaggagttcgaccgcggtattgatgtctctctggaagaagaacattccgttcacgacgtcgcagcactgctaaaggagttcctccgagacatgccggaccccctcctgactcgcgagttatatacagcttttatcaacactttattgctggagcccgaagaacagctgggaacgctgcaactgttaatctacctccttcccccttgtaattgtgatactttacaccgtctcctgcagttcctcagtattgtggcaagacacgctgacgataatatatccaaggacggccaagaggttactgggaataaaatgacatctcttaatttggctacaatcttcggcccaaacctcctgcacaaacaaaaatcctccgataaagagttctccgtgcagagcagtgcacgcgctgaagagtcgacagccataatcgctgtggtgcaaaaaatgatcgagaattacgaggccctgttcatggtaccccctgacctacagaatgaggtactcattagcttgcttgaaactgatcccgatgttgttgattatctgctccggagaaaggcgtctcaaagctcttcgccagatatgctccagtcagaagtttctttcagtgtcgggggtcgccattctagcactgatagcaataaagcaagctccggagatatcagtccatatgataacaactcgccggtgctgtccgagcgaagcctcctggccatgcaggaggatgctgccccaggaggtagtgaaaagctctatcgagtacccggacagtttatgcttgtaggtcacctatcatcttccaagtctcgcgaaagctcccctggcccacgcctaggcaaggacctgtccgaggagccattcgacatatggggcacctggcacagcacgctcaagtccggctcaaaggacccaggaatgaccgggaccaccccattactaaatattagctcacaggaggatcacagacaaaaggacttgagattgattttcaagatttacccttag

SEQ ID NO: 238755 - DNA, 918 bp, synthetic construct
  misc_feature 1..918: note = Description of Artificial Sequence: Synthetic coding sequence
  source 1..918: mol_type = other DNA
atggcgggtcaggaccctgcactttcaacttcccacccgttctatgacgtggcgcgacatgggatcttgcaagtggccggtgacgatcggttcggcagaagggttgtgacttttagctgttgccgcatgccgccttcgcacgagctggaccaccaaaggttattggagtacctgaaatacacgctggaccagtacgtagagaacgattatacgatcgtgtacttccactatgggctcaactccaggaacaagccctccttagggtggctgcagtcagcctataaggaattcgatcggaaatacaagaagaacttgaaagcgctatatgtggttcaccctacctcctttatcaaggttctgtggaatattctgaagcctctgatcagccataagtttggaaaaaaagtgatctacttcaattatctgtctgaacttcacgaacatcttaaatacgatcagctggtgatcccccctgaagttctccgatacgacgagaagctgcagtctctgcatgaaggcaggacacctcctccaacgaaaaccccccctcccagacctcctctgccaacacaacagttcggggtgagcttgcagtatctcaaggacaagaatcagggagagctcatccctcccgtgttaaggttcactgtgacctatctccgagagaaaggactgagaacagaagggctctttcggcgttccgcgagcgtgcaaacggtccgggagattcaacgcctgtacaatcagggcaaaccagtgaacttcgatgactacggagacatccatatcccggctgttatccttaagacatttctccgcgagttacctcagccattgctgactttccaagcctacgagcagatccttggcataacgtgtgtgcctggggagcacctccaacaaaacgagcagctctag

SEQ ID NO: 238756 - DNA, 1302 bp, synthetic construct
  misc_feature 1..1302: note = Description of Artificial Sequence: Synthetic coding sequence
  source 1..1302: mol_type = other DNA
atggcaggtcaggacccagctctgtcaaccagccatccattctacgatgttgcacgccacggcatcctgcaggtggcaggagacgacaggtttgggcgtcgcgtcgtgaccttttcctgctgtcgcatgcctccaagtcatgagctagatcaccagagactgttggaatatctgaagtatactctggatcagtacgtggaaaatgactacacaatcgtctactttcactatggacttaacagcaggaataaaccaagcctcgggtggctacaatctgcgtacaaagaatttgacagaaaatataagaagaatctgaaagccctgtatgtcgtacacccaacttcctttattaaggttctgtggaacatattgaagcccctgatctcccacaagttcgggaagaaggtaatttactttaactatctgtctgagcttcacgagcacctcaaatatgaccaattggtcataccacccgaagtgttgaggtacgatgagaaactccaaagcctgcacgagggcaggaccccccctcccaccaaaacaccacccccacgaccacctcttccaactcaacagttcggtgtaagccttcagtatctcaaggacaaaaatcagggcgaactgattccacctgtcctcaggttcactgttacttacttgcgagagaaggggctgcgcactgagggactgtttagacggtctgcatctgttcagacagttagagagattcagcgcctatataaccaggggaaaccagttaacttcgatgattacggcgatatccacattccagccgtgatcttaaaaacctttcttcgagagcttccccaacctctcctgacctttcaagcctacgagcagatactcggcatcacttgtgttgaatctagtctgcgtgttaccgggtgtagacagatcctgagaagcctgccagagcacaactatgtggtgctcaggtacctgatgggattcttacatgccgtgtctcgggagtccattttcaacaaaatgaacagttctaaccttgcgtgcgtgttcgggcttaatcttatttggcctagccaaggcgtatcttcgttgtcagcactggtcccactcaacatgtttacagagctgctcatagagtactacgagaaaattttctcaactccggaagccccaggcgagcatggcctggccccttgggagcaggggtctagagccgcacccctccaagaagctgtgccccgtacacaggccaccgggctaaccaagcccactctccccccatccccattaatggctgctcgaaggcgcttatag

SEQ ID NO: 238757 - DNA, 1668 bp, synthetic construct
  misc_feature 1..1668: note = Description of Artificial Sequence: Synthetic coding sequence
  source 1..1668: mol_type = other DNA
atgtcttcgcctagtctctctgacctcggaaaaagagagcctgccgcagccgctgacgagcgagggacacagcagcggagagcctgcgccaacgctacttggaatagcatccataatggcgtgatagctgtgttccagaggaaaggtctgcccgatcaggagctgttcagcctcaatgaaggcgtgcgccaactgctcaaaacagagctgggatcttttttcaccgagtacttacagaaccaactcctgaccaagggaatggtgattttgagagacaaaatcagattctacgaggagctccagagagacaaggctgctgcggcagccgtgctgggggcagtccgcaagcgtccctccgtcgttccgatggcagggcaagaccccgctttgtctacctctcatcctttttatgatgtggcccgtcacggcatcctccaggtggctggggacgaccggtttgggagacgggttgtgacattcagttgttgcagaatgcccccttctcatgaactagaccatcaacggctgctggagtacctgaaatacactttggaccaatatgtggaaaacgactacactatcgtttattttcattatggcctcaattctagaaataagcccagtctgggatggctgcagtctgcttacaaggaatttgatcggaagtataagaaaaaccttaaagcactgtatgtggtgcaccccacttcctttattaaagtcctgtggaatattctcaaaccattgattagtcataagtttggaaagaaggtgatctacttcaactacttaagtgaattgcacgagcacctcaaatatgaccaactcgtgattcctcctgaagtactacgttatgacgaaaaactgcagtcgcttcatgagggacgaacccctccccctactaaaacacccccaccccgacctcccttgcccacgcagcagtttggtgttagtctgcaataccttaaagataaaaatcaaggggaactgattccacccgtgctccgcttcaccgtcacttacttgcgtgagaagggccttagaactgaagggctgttcaggcgtagtgcatctgtgcaaaccgtgcgggaaatccagcgactatacaatcaaggcaaacctgttaatttcgatgactacggagatatccatattcccgcagtcatcctgaagacctttttgagggagttgccacagcctctgcttacgtttcaggcttacgagcagatcctgggtatcacttgcgttgagagttccctgcgcgttactggatgtcggcaaatactgcgaagcctgccggagcataattatgtcgttctgcgatacctcatgggttttctgcatgcagtttcaagggagagtatcttcaacaagatgaattcctctaatttagcctgtgtattcggacttaacctgatctggccgtcgcagggggtgtcatccctgagtgctctcgtaccactgaacatgtttacagaactgcttattgagtactacgagaaaattttctcgacccctgaagctccgggagagcacgggcttgctccatgggagcaagggtccagagcagcccctctgcaggaggcagtgccgagaacgcaagccacaggactcactaagcccaccctgcccccatcccccctgatggccgctcgaaggcggctctag

SEQ ID NO: 238758 - DNA, 1395 bp, synthetic construct
  misc_feature 1..1395: note = Description of Artificial Sequence: Synthetic coding sequence
  source 1..1395: mol_type = other DNA
atggccggtcaggatcccgcactgtcaactagtcatccattctatgacgtggctagacacggaatactacaggtcgctggcgacgacaggtttggccgtcgagtggtaacttttagttgttgcagaatgcctccatctcatgagctggaccatcagcgattgcttgaatacctgaagtacacactggaccagtatgtagagaacgactataccatcgtgtacttccattatggccttaactcaaggaataagccttctctcggctggctgcagtcagcgtataaagagttcgacagaaaggatggagacctgacaatgtggccacggctagtgtctaactccaaattgaagcgttcctcacatctgtcgctccctaaatactgggactatagatataagaagaacctgaaggcactgtatgtcgtgcatcctacatcctttataaaagtgctctggaacattctgaagcccctcatcagccataagtttggtaagaaggtgatctacttcaactatctttccgagcttcatgaacaccttaaatacgaccagttggtgataccaccagaggtgctacgttatgatgagaagctccagtccttacatgaggggagaacaccaccccctacaaaaacacctcccccacgccctcctctacctacacagcagtttggcgtgagtttgcaatacctgaaggataagaaccaaggagagttaattcccccagtgctgcgcttcacagtgacatacctgcgggagaaaggacttcgaaccgaaggactcttccggaggtccgcctctgtgcagaccgtacgagagatccaaagactctataaccaaggtaagcctgtgaactttgatgattacggtgatatccacattccggctgtgattttgaaaaccttcctaagagagctgccacagccccttctcacttttcaagcgtatgaacagatccttggcattacctgcgtggagagcagcctccgcgtaacagggtgccgccagatcctgcggtctttacctgagcacaactacgtggtgctccgctatctcatgggtttcctgcatgcagttagtcgcgaatcaatctttaacaagatgaatagctcaaacctcgcctgcgttttcggcctgaatttgatctggcctagtcagggagtgagcagtctgtcagcccttgtgcctctcaatatgttcactgaactcctaatcgagtactatgagaagatattcagcacccccgaagctcctggagaacacgggctcgcgccatgggagcagggaagccgtgccgcaccactgcaggaagctgtgcctcggacgcaggccacagggctcaccaaaccaaccctgcctccgagcccattaatggctgccaggcgacggctgtag

SEQ ID NO: 238759 - DNA, 393 bp, synthetic construct
  misc_feature 1..393: note = Description of Artificial Sequence: Synthetic coding sequence
  source 1..393: mol_type = other DNA
atggcaggccaggatcccgcactttccaccagccaccctttttacgacgtcgccaggcacggcattctccaagtcgccggtgacgatcggttcggcaggagagtggtgactttctcctgctgcaggatgccacccagccacgagctggatcaccagagactcctggagtatcttaagtacacccttgatcagtacgtggagaacgattacactatagtttatttccactatggcctgaattctcggaacaagccctctctggggtggctgcagtcagcatataaggaatttgatagaaaggatggcgatcttaccatgtggcctcgcctggtttccaactccaagctgaaacgaagctcacatctgtctctcccgaagtactgggattattag

SEQ ID NO: 238760 - DNA, 348 bp, synthetic construct
  misc_feature 1..348: note = Description of Artificial Sequence: Synthetic coding sequence
  source 1..348: mol_type = other DNA
atggctggacaggatccggcactaagcacatcccaccccttctatgatgtagccagacacggcattctgcaggtggctggcgacgatcgcttcgggcgtagagttgttacattttcctgttgcaggatgcctccttcccacgagttggatcaccagcgcttgctcgaatatctgaagtacacgctcgaccagtacgttgaaaacgattatacaattgtgtatttccactacggccttaactcacgaaataagcctagtttggggtggctacaatctgcatataaagaattcgatcgaaaatacaagaaaaatcttaaggccctgtacgtggtgcacccaacttcttag

SEQ ID NO: 238761 - DNA, 1932 bp, synthetic construct
  misc_feature 1..1932: note = Description of Artificial Sequence: Synthetic coding sequence
  source 1..1932: mol_type = other DNA
atgagaactctgcggcgactgaaattcatgtccagcccctccctatccgacctaggaaagcgggagcccgcagccgcagccgacgagcgcggaacccagcagagacgtgcttgtgcaaacgcaacgtggaactccatccataatggggtcatcgctgtgtttcagagaaagggcctgccggatcaggagctattttctctaaatgaaggggtgcgacagctactgaaaactgagctgggttccttcttcacagagtatctccagaatcagctcctgaccaagggaatggtgatcctccgggacaagattagattctacgagggccaaaagttactcgacagcctggccgagacttgggacttctttttcagcgacgtgcttccgatgcttcaggccattttttaccctgtgcaggggaaagagccttccgtccggcagcttgcgctgctgcactttcgcaatgctataacgctcagcgttaaattagaggatgccctggcccgtgcacatgcaagagtccctcctgccatagtgcaaatgctcctcgttctacaaggggtacacgagtccagaggcgttacagaagactatctaaggttggagacactcgttcagaaggtggtttccccctatttggggacttacgggctccattcctcggaggggccttttacccactcctgtattctggagctgcagcgcgataaggccgctgccgcagctgtcctgggagccgtgcgcaagaggcccagtgttgttcccatggcaggccaggaccctgccctaagcacgtctcacccgttctacgacgtcgcccgacacggaattctgcaagtcgctggggatgaccggtttggcagacgcgtggtgacattttcctgctgtagaatgcccccatcacacgagctcgatcaccaacgcctcctggagtacaaaaaaaacctcaaggccctctatgtcgtgcaccctacaagctttattaaggtgctgtggaatatattgaaaccccttatctcacataagttcgggaagaaagtgatctattttaactacctgagtgagctgcatgagcatctgaagtacgatcagttggttatcccccctgaagtgctgcggtacgacgagaaactgcagtccctacacgagggcaggacacctccccctaccaagacccctccacccagacctcctctgccgacacagcagttcggcgtttcgcttcagtacctgaaagataaaaatcagggggagctaatccctcccgtgttgcgatttacagttacgtatctgagagagaaaggactcaggacagaagggctgttccgaagatccgccagtgtgcaaacagttagggagattcaaaggctgtacaatcagggtaaacctgtcaactttgatgattatggcgacattcatatacccgctgtgattctgaagaccttcctcagggaattacctcaacccttgctaacttttcaggcatatgagcagatacttggcatcacgtgcgttgaatccagcctacgcgtcactggatgtcggcagatcctgcgcagcctccctgagcataactatgtggtactgcggtacctcatggggttcctgcacgccgttagcagagagtccattttcaacaaaatgaatagcagcaacctggcttgcgtcttcggcttaaacctgatatggccatcacaaggggtgtcgtcattgtcagccctagtaccactcaacatgttcactgagttactcatcgagtattatgagaagatcttctcaacccccgaggcccctggcgagcacggactcgccccatgggaacaaggctctcgagctgccccactgcaggaggctgtgcccagaacgcaggcgacaggcttaactaaacctacgctacccccatccccccttatggccgcacggaggagactatag

SEQ ID NO: 238762 - DNA, 2322 bp, synthetic construct
  misc_feature 1..2322: note = Description of Artificial Sequence: Synthetic coding sequence
  source 1..2322: mol_type = other DNA
cagacccagaccgagtcacttacattgtgctcaggcgaggcagagagacgaggtaaggaggagtggcctgattcacaccactatccaggtccaactccggcaccagagagttctgacgggcctcacaaagtgactgtgctggccaccatgttgtcctcacgttggtggccgagttcttgggggatacttgggctgggccctcgttctcctcccagaggatcccagctttgcgccctctatgcattcacttatacaggggcagacgggcagcaagtgtcgctggccgaaggcgatagattcctgctcctcagaaaaacaaactctgattggtggctcgcacggaggctcgaagctccctccactagtagacccattttcgtacctgcagcatacatgatcgaagagtccatccccagccaatctcctacaaccgtgatcccgggacaactcttgtggacacccggtccaaaactgttccacggctcactggaagagctttcccaggcactgccatctcgcgctcaagcgtcaagtgaacaacccccaccactcccccgaaaaatgtgtcgctcggtgagtaccgacaatctgagtcctagtctacttaagcccttccaggaaggcccaagcggccgtagcctctcgcaggaggaccttccatcggaggcaagcgcttccaccgctggacctcagccactcatgagcgagccccctgtgtactgcaacctcgtggacctaagaaggtgccctagaagcccacccccaggtcctgcctgtcccttgctccagcggctcgatgcttgggagcaacatctggatcctaatagcggtcgttgtttctacatcaactcgctgaccgggtgcaagagctggaaaccaccacggaggagtaggtccgaaacaaaccccggttcaatggaagggactcagactctgaaacgcaacaatgatgttctgcagccacaggccaaaggctttcgcagtgataccggcacccccgagccgctggacccccagggctctctcagtctatcacagcgtacgtcacagctggaccctccggcactgcaggcccctagaccccttccacagctgctggatgacccccacgaggtcgagaaatccggacttctcaacatgactaagattgcccaggggggaagaaagctgaggaagaattggggaccttcttgggttgtcctgactgggaattccttggtattttatagggagcccccaccaacagccccatcatctgggtgggggccagctggaagtcgacctgaatcctccgtggatttaaggggtgcagctctggcccatggaaggcatttatcatctcgtaggaacgtgttgcacatcaggactatcccgggacatgagtttctgttgcagagcgaccacgagacagaactccgggcttggcacagagcgttaagaaccgttattgagagattagatcgtgagaatccgctcgaactgcgtctgagtggaagtggaccagccgagctatctgcaggagaggacgaggaggaagagagtgagctcgtgtctaagccactccttcggctttcatctagaagatcatcaatacggggacccgaaggcactgagcagaacagggtcagaaataagttgaagagactcattgctaagagaccaccactgcagtccctccaggaaaggggccttctgagggaccaggtttttggctgtcagctggaatcactgtgtcagcgcgaaggagatacggtgcctagcttcctgcgcctttgtattgccgcagttgacaagcgcggattggatgttgacggcatttatagagtttcagggaacctagcagttgttcagaagctccggttcctggtcgaccgcgagcgtgcagtcacctctgacggcagatacgtctttccagaacagccgggacaggagggccgtcttgacctagactctaccgaatgggatgacattcacgttgtgacaggagccctcaagctgttcctacgagagttgccacagccgttggtacccccactgctgctgccacatttccgggcagcgctggccctctctcagattcaggaactgattggcagtatgccaaagcctaaccacgataccctccgatatctgctggagcatctctgtagagtgatagcccatagtgataagaataggatgaccccacacaacttggggatcgtctttggaccaaccctgttcaggcctgaacaggaaaccagtgaccccgcagcccatgctctctaccccggtcagctggttcagctcatgctgacgaacttcacttctctgttcccctag

SEQ ID NO: 238763 - DNA, 2253 bp, synthetic construct
  misc_feature 1..2253: note = Description of Artificial Sequence: Synthetic coding sequence
  source 1..2253: mol_type = other DNA
atgctcagcagccgctggtggccctcatcatggggcattttaggcctcggccctagaagtcccccacgtgggagtcagttgtgcgccctctatgctttcacctacaccggtgcagacgggcaacaggtgtctctggccgagggagacagatttctgttgctgcggaagaccaacagcgactggtggctggccagacgcctggaggctccaagcaccagccggcctatatttgtcccagccgcatatatgatagaggagtccatcccgagccaatcaccaacaaccgtaattccaggacagctactctggacaccaggacccaaactctttcacggatccctggaggaattgagtcaggcactgcccagtagagcccaggcctccagcgagcagccacctccgctaccaagaaagatgtgcaggtccgtgtctaccgataatctgtctccgtcccttctgaagccctttcaagagggccctagcgggagatctctctctcaggaggacctgcccagcgaggcgagcgccagcaccgcagggcctcagccgctgatgagtgagccaccggtctactgtaacttggtcgatctcagacgctgcccacgatcccccccacccggtcccgcatgcccactattacaacggctagatgcttgggagcagcatttggaccctaattctggcagatgcttctatattaactccctgaccggctgtaagagctggaaaccacctaggcgatccaggtccgagacgaatcccggatcaatggagggcacccagaccctgaaacgtaataacgacgtcttgcagccacaggctaagggcttccggtctgacaccggtaccccagaaccactggaccctcagggtagtcttagcctcagtcagagaacaagccagcttgatcccccagcactacaggctcccaggcctttgcctcaactgctggatgacccacacgaagtagagaagagtgggctcttgaatatgacgaaaatcgctcagggaggtcggaagttgcgcaagaactgggggccatcctgggtagtgcttaccggcaattccctagtgttttacagagaacctccgcctactgccccaagttccggatgggggccagctgggagtcggccagagtcgagtgtcgacctgaggggggctgcacttgctcacggcaggcatttaagctccagaagaaatgttctgcacattaggacaataccaggacacgagttcctgctgcaatctgatcacgaaactgagctcagggcctggcaccgcgctctgcgcaccgtgatagagcggctggttcggtgggtggaggccaggcgcgaggctcccacaggccgtgaccaggggagcggagatcgcgagaaccctctggagttgcgtcttagtggtagtggccctgctgaactgtctgccggagaagatgaggaggaagagagcgaactcgtcagtaagccattacttcgactgtcctctcgccgatctagtatccgcggtccagagggtacagagcaaaacagagtgcggaacaaactgaaaaggttgatcgccaagagaccccctctgcagagtctgcaggaaaggggattgcttcgcgatcaagtcttcggatgtcagctggagtctctgtgtcagagggagggagacaccgtgccaagctttctccgcctctgcatcgcagccgttgacaaacggggactggacgtggatgggatctatcgggtatccgggaacctagcagttgtccagaagctgagattcctggtggatcgcgagcgtgccgtgacatccgacggaaggtacgtattccccgagcagcctgggcaggaagggaggttggacctggatagcacggagtgggacgacattcacgtagttacaggggcactcaaactgttcctacgggagctgcctcagccattggtgccaccgttgcttctgccccactttcgtgccgcactggcgttgagtgaatctgaacaatgcctttcacaaattcaagagcttattggtagtatgccgaaacctaaccacgataccttgagatacctcctggagcatttgtgtcgggttattgcccactccgataagaaccggatgacccctcataaccttgggatcgtattcggacccacgctctttagacccgagcaggaaactagcgacccagctgcgcatgcattgtacccgggacagctcgttcagcttatgctgaccaacttcacctccctattcccatag

SEQ ID NO: 238764 - DNA, 2196 bp, synthetic construct
  misc_feature 1..2196: note = Description of Artificial Sequence: Synthetic coding sequence
  source 1..2196: mol_type = other DNA
atgctatctagtaggtggtggccctcgtcctggggtattctgggcctgggcccacggtcaccgcctcgaggttctcaactgtgtgctctgtatgccttcacatatacgggcgcagacggacagcaagtgagtctggctgagggtgatcgctttctgctgctgagaaagactaactctgactggtggctcgcccgtcgcttagaggcccctagcacgtcccgcccaatttttgttccagccgcttatatgattgaggagagtatccccagtcagtcacctaccactgtaatccctggtcagttgttgtggacacccggtccaaagttgtttcacggaagcttagaggagttatcgcaggcccttccctcacgcgcacaagcaagtagcgaacagcccccaccactgccaaggaagatgtgtcgtagcgtgtccactgataatctgagcccatctctgttgaaaccttttcaggaaggaccctctggtcggagtttaagccaggaggacttgccgtccgaggcttctgcaagcaccgccggacctcagccgctgatgtcagagccacccgtctactgcaacctcgttgatttgagaaggtgtccacgaagtcccccacctggaccagcatgccccttactgcagcgcctggacgcctgggagcaacatttggatccaaatagtggaaggtgtttttacatcaacagtttgacaggatgtaagtcatggaagccgcctcgcaggagcagatctgaaacgaatcccggatccatggaagggacacaaacccttaagcgtaacaatgacgtgctccaacctcaagctaaaggatttaggtcagataccggaaccccggaaccgttggaccctcagggttcactgagcctaagtcaaaggacttctcagcttgacccaccggcactccaggccccacgaccactgcctcaactgctcgacgatcctcatgaggtggagaaatcgggtctcctcaacatgaccaagattgctcaggggggaagaaagctccgcaagaactgggggccttcttgggtggttttgactggcaactccctcgtcttttacagggagccacccccaacggccccatccagcgggtggggacctgcaggaagtcggcctgaaagtagtgtggacctccgcggtgccgcactcgctcacggtagacacttatcgagccggaggaatgtcctccatattcgcaccataccaggtcacgagttcctgttacagagcgaccacgagacagagctcagggcctggcatagggccttaagaacagtgatcgagcggctcgatagggaaaaccccttagaattgaggctgtctggcagtggccctgccgaactcagcgccggagaggacgaggaggaggagagcgagctcgtttctaaaccccttctgaggctatctagtagacgtagtagcatcaggggcccagaaggcaccgaacagaacagggttagaaacaaactaaaaaggcttatcgctaaacggccacccttgcagagcttgcaagaaagaggcctcctccgcgaccaggtgttcggctgtcaactcgaaagtctgtgtcaacgggaaggcgacactgtgccgtcattcctgcgattatgtatcgccgctgttgataaaaggggtcttgacgtggacgggatataccgggttagcggcaatctcgcggtggttcagaaactgcggttcctcgtcgatcgagagagggctgtaactagcgatggacgttatgtgtttcctgagcaacccggacaagaaggcagactggacctggattccacagaatgggatgacattcatgtggtgaccggggcactcaagctatttctgcgggagctgccacagcccctcgtgccgcctcttttgttgccccacttcagggcggctctggccctgtctgagtcagaacagtgcctttcccaaatccaggagctgattggctctatgcccaaacccaatcatgacacactaagatatctcctggaacatttatgccgggtcattgcccacagcgacaaaaaccgaatgaccccccataacttaggtattgtgttcggtccaacgctgttcaggcctgaacaggaaactagcgatcctgccgcacacgcactctacccagggcaactggtgcagctgatgcttactaacttcacgagcctctttccttag

SEQ ID NO: 238765 - DNA, 2466 bp, synthetic construct
  misc_feature 1..2466: note = Description of Artificial Sequence: Synthetic coding sequence
  source 1..2466: mol_type = other DNA
atgcggaggggttcgagcgacagctgtgccagtggcagccaggtggcgggaactaccgtcgccggaccagcacaccccgaaagtctaaccctgtgcagcggagaagcagaacggaggggaaaagaagaatggcctgattcccaccactacccgggtcctacccccgcaccagagtcatctgatggaccccataaagtgaccgtgctagcgacaatgctttcatcccgctggtggccatcctcctggggaatcctgggtctgggcccaagatctccaccaagaggtagtcagctctgcgctctgtacgcttttacctacacaggggctgatgggcagcaagttagcctagcagaaggcgatcgctttttattattgcgtaaaacgaattctgactggtggctagctcgcaggttagaggctccttctacgtcccggccaatattcgtgcctgcagcctacatgatcgaggagtccatcccctctcagagccccactaccgtcatccctggacagttgctctggacccccggtccaaagttgtttcacggcagcttagaagagctctcacaagcgttgcctagtcgcgctcaggctagttccgaacagccgcctccactgcccaggaaaatgtgtagatcagtatctacggataacctaagtccaagtctgctgaaaccatttcaagaaggccctagcgggaggagtctgagccaggaggacttacctagcgaggcatctgcctctacagcaggtccccagcctttgatgtccgaaccccctgtctactgtaacctggtcgacctacgcagatgcccaagatctcccccaccaggcccagcatgtcctctgcttcagagactggatgcctgggaacagcacctggaccccaactcgggacggtgtttttacataaattctctcacgggctgcaagtcttggaagcctcccagacgatccaggtccgagaccaaccccggatctatggagggtacccagactctcaaacgaaacaatgacgtgctgcagccccaggctaagggcttccgaagcgatacaggcacgccagagccactggatcctcagggatctctctccctgtcccagcgaaccagtcagctggacccccctgcgctgcaagctccccgtccactacctcagttgctggacgatccacatgaagtcgagaaatctggcctcctaaacatgaccaaaatcgcgcagggtggcagaaaactgcgtaagaattggggccctagttgggtcgtgctaaccggcaattccctggttttctaccgagagccaccacccactgccccttcctctggttggggcccagctggaagcaggccagagtcatccgtcgatttaagaggcgcagccctcgcccatggtcgacacttgtctagcagaaggaacgtgctccacatccgtactattcccggacatgagtttcttctgcagtcagaccacgagaccgaattgcgagcctggcatcgtgcgcttcgtaccgtcatcgagaggctggtccgatgggtagaggcccgaagggaggccccaaccggacgcgaccaagggagcggagatagagagaaccccctggaactgcggctcagcggttctggacccgcagagctgtcggccggagaagatgaagaggaggaaagtgaactggtgtctaagcctttgttaagactctcgagtaggcgctctagcatccgtggtccagagggaacagaacagaatagggtgagaaacaagctcaagaggctgattgcgaagcggcctccgctgcagtcccttcaggagagaggcctgttgagagaccaagttttcggctgccaactggaaagcctgtgccaacgcgagggcgatacagtcccctcattcctgagattgtgcattgccgctgtggacaagagggggctggacgtcgacgggatctaccgtgttagcggtaatctcgccgtcgtccagaagttgaggttcctagtggatcgtgaacgagcagttacctctgacgggcgatacgtgtttccagagcagcctggacaggaaggtaggctggatttggactctacagagtgggatgacattcatgtggtgaccggagcacttaagctctttttgcgggagctacctcagcctctcgtgcctcctctgctgctgccccattttagggccgcactggctctctccgaaagtgagcagtgcctatcccaaatccaggaactgatcggttcgatgcccaagccaaaccatgacactctccggtacctattggaacacctatgcagagtcatcgcccactctgacaaaaaccgaatgaccccacacaatttggggatagtgttcggtccaactttgttccggccagagcaggagacctctgaccctgcagcccatgccctttatcccggacaattggtgcaactgatgctaaccaacttcacatcattatttccctag

SEQ ID NO: 238766 - DNA, 900 bp, synthetic construct
  misc_feature 1..900: note = Description of Artificial Sequence: Synthetic coding sequence
  source 1..900: mol_type = other DNA
atgactaagatcgcacagggcggaagaaagctgcggaagaattggggcccatcctgggtcgtgcttaccggtaattcattagtgttttatagggaacctcctcctacagcgccatctagcggctggggacccgcagggtctagaccggaatcttctgtcgatctgcgtggcgctgccctcgcccatggccgacatctttcttcacgcaggaacgtcttgcacatccgtacgattcctggacacgaattcttgcttcagagcgaccacgagacagagttgagggcatggcaccgcgctctgcggacggtgatcgagagactagatcgggagaaccccttggagctgcgactttcaggttccggacctgccgaactttccgccggtgaagacgaggaggaggagtcagaattagtgtccaagcctttgctgagattatccagtcggcgatcttcgatcagagggcctgaaggaactgagcagaatagagttcgaaacaagctgaagcggctgattgcgaaacgcccaccacttcagagcctacaagaaagagggctcctcagggatcaggtctttggatgtcaactcgaatccctgtgccagagggaaggcgacacagttccctcattcctgcgcctatgcattgcagccgtagacaagcgaggactggacgtggatggaatctacagagtgtctggcaacttggcagtggtgcagaaacttcgcttcctagtggaccgtgaacgtgccgtaactagtgatggcaggtatgttttcccagagcagccaggacaggctctcagtgagagcgagcaatgcctaagtcagatccaggaactgattggcagcatgcccaagccaaatcacgacacactgcggtatctgctggaacacctctgctag

SEQ ID NO: 238767 - DNA, 1923 bp, synthetic construct
  misc_feature 1..1923: note = Description of Artificial Sequence: Synthetic coding sequence
  source 1..1923: mol_type = other DNA
atgctttcttcacgctggtggccttcctcctggggaatcctgggcttgggaccaaggtcaccgcctagggggtctcaactgtgtgcactgtacgcctttacatacacgggtgccgacggacaacaggtgtccctagcagagggtgataggttcctgctgctgagaaaaacgaattcggattggtggctcgcaagaagactggaggccccttccacctcacggcctatttttgttcctgctgcttatatgatcgaggaaagtattccaagccagtcccctactactgtcatccccggtcagctgttatggactcctgggccaaaactgttccacggcagcctggaagagctgtcccaggctctgccaagtcgagcgcaggcctcctcagagcaacctccccctctgccccgaaagatgtgtcggtccgtgagcacagataatctttctcccagtctgcttaaacccttccaggagggccctagtggtcggtccctctctcaagaagatctgcccagcgaggctagtgcttcgaccgctggccctcagcccttgatgagcgagccacctgtgtactgcaacctcgtggatttgaggcgctgtcccagatcgccaccacctgggcctgcttgcccccttttacaacggttggatgcctgggaacaacacctggatcctaatagcgggaggtgcttttacattaattctctgactggctgtaaaagctggaagccgccacgacggtcacgatcagaaacaaaccctggtagcatggaaggtacacagactcttaaaaggaacaatgacgtcctgcagccccaagcaaaggggttcaggtccgatacaggtacaccagagccgctggatcctcagggcagcctcagtctctcgcaaaggacctcgcaattggatccacctgcactccaggcgcctaggcctctcccccaactccttgatgatccccatgaggtggagaagagcggactgctgaatatgacaaagattgcccaagggggaaggaagctgcgcaaaaactgggggccatcatgggtggttttaaccggcaacagcctggtcttctatagagaaccgccacccacagccccatcatctggttggggaccggcaggatccagacctgaatctagcgtggacttgaggggggcagctctggcccatggaaggcacctgtcttctcgtcggaatgtgctccacataaggaccatccccggacacgagttccttcttcagtcagaccacgagacagaattgagagcctggcacagagccttgcgcacggtcattgagcgcctggaccgagagaaccctttagagttgcggttgagtggcagtgggccagctgaattatctgctggcgaggatgaagaggaggaatccgagcttgtgagcaagcccctgcttcgcctcagctcacggcgaagcagcataaggggcccagagggaaccgagcagaatcgggtccggaacaagctcaaacggctgattgctaagcggccacctctgcagagtctccaagaacggggattgctccgggaccaggtgttcggctgccagttagaaagcctgtgtcagcgggagggcgacacagtacccagcttcctgcgcctgtgcattgcagccgtagataagagaggactcgacgtcgatggcatttaccgcgtgagcgggaatctggcagtggtgcagaaactgcgattccttgtcgacagggaacgtgccgtgacaagtgacggaagatacgtttttcctgagcaacccggacaggaggggaggctcgacctggacagcacggagtgggatgatatccacgtggtcacaggcgctttaaagctgttcttgagagagctcccccagcccttggtgccacctctgctgctgcctcacttccgagcggctctcggctag

SEQ ID NO: 238768 - DNA, 1644 bp, synthetic construct
  misc_feature 1..1644: note = Description of Artificial Sequence: Synthetic coding sequence
  source 1..1644: mol_type = other DNA
atgagtgagccaccagtatattgcaatttggtggaccttcgcaggtgtccaaggagcccccctcccggacccgcatgtcctctgctgcagagactggacgcatgggaacagcacttggaccccaattcagggaggtgtttctacatcaactcgctgacaggctgtaaatcttggaaacccccacggaggagccgaagcgagactaatcccggttcaatggaaggtacgcagacattgaagcggaacaacgatgtattgcagccacaggcaaagggtttccggtctgacacagggacccccgagcctctagacccacaaggtagcctgagtctgtcacagcgaacaagccagctggatcccccagccctgcaggctccacgccctctgccccagctgctcgacgatccgcacgaagtggaaaagtccggtctgctgaacatgactaagatcgcccagggagggcgaaagctgaggaaaaactggggacctagttgggtagtcctaaccggaaattccttggtcttctaccgagagccacctcccactgcaccaagctcaggatggggtccagccggttcacgtccggagtccagtgtcgatctgcggggtgctgctctggcacacggaagacacctgagcagcagaagaaatgtgctgcacattcgaacgataccaggacacgagttcctgctccagagcgatcacgaaacagagttacgagcctggcacagggcccttaggactgtgatagagcgcctagatagagagaaccccttagagttgcggctgtccggaagtggacccgctgagctctcagccggtgaagacgaagaggaagagtccgagctggtcagcaagcctctcctacgactcagctcaagacgttcttcaatccgtggtcctgaaggtactgaacagaatagagtgcggaataagcttaaaaggctcattgcaaagcgcccaccactccaaagtcttcaagagagaggactgcttcgcgatcaggtttttgggtgccagctggaaagcctatgtcaacgcgagggagacactgtccctagcttcctgcgcctctgtattgccgcagtggataaacgagggttggacgtcgacggtatctatagagtgtctggcaatctggccgtcgtgcaaaaactcagatttcttgtggatcgagaacgggctgtgacatccgacggacgctacgtttttccggagcagcctgggcaggagggacggctggacttggactccaccgagtgggacgacatccacgttgtgacgggcgcactgaagctattcctacgggaattgccgcagcctctggttccacctctacttctgccccatttccgggctgccctggctctgagcgagtcagagcagtgcttaagtcagattcaggaattgatcgggagcatgccaaagccaaatcatgacacattaaggtatttgctagagcacctatgtcgggtgattgcgcattctgataaaaatcggatgacgcctcacaacttgggtatcgtcttcggccctactctgttccgccctgagcaggaaacgtccgatcctgccgcacacgcactgtacccaggacagttagtacagcttatgcttacaaattttacctcactcttcccctag

SEQ ID NO: 238769 - DNA, 894 bp, synthetic construct
  misc_feature 1..894: note = Description of Artificial Sequence: Synthetic coding sequence
  source 1..894: mol_type = other DNA
atgtcagaaccaccggtatactgtaacctggtggaccttagaagatgcccacgttcccctcctcccggaccagcatgtcccctgctccagcggctagacgcatgggagcaacatctcgatcccaattccggaaggtgtttttacatcaactctctcactggttgtaagtcctggaaacctccccgaaggagcaggtccgaaactaacccaggaagcatggaaggaacacagacattgaagaggaacaacgatgtacttcaaccccaggctaaaggattccggtctgacaccggcactcccgagccacttgatccgcagggcagcctttcattgtcccagagaacttcacaattggatccacctgcgctccaggctccccgacccctgcctcagctcttggatgatccgcatgaagtggagaaatcagggctgctgaacatgaccaaaatcgcccaagggggtcgaaaactccggaagaattggggcccaagttgggtcgtactgactgggaactcactggtcttttacagggaaccaccccctaccgctcctagcagcggttggggacctgcgggatctaggcccgaatctagtgtggacttgcggggtgccgcattggctcatggccgtcatctcagttcccggcgaaacgtgctccacataagaacgatccctggccatgagttcctcctgcaatccgatcatgagacagaattacgggcttggcatagggctttgcgcaccgtaatcgaaaggctggatcgtgaaaaccccttggagctgcgcctctctggtagcgggccagccgagctgtcggccggtgaggacgaagaggaggaaagcgaactggtgagcaagccactgctgagattgagctctaggcgctcgtcatag

SEQ ID NO: 238770 - DNA, 186 bp, synthetic construct
  misc_feature 1..186: note = Description of Artificial Sequence: Synthetic coding sequence
  source 1..186: mol_type = other DNA
atgagcgagcctccagtttactgcaatttagtcgatctgaggaggtgccccaggtctcctccgccaggtcctgcttgcccgctgttacagcgccttgacgcatgggagcagcatcttgacccgaattccggaaggtgcttttacataaattctctgactgggtgcaagtcctggaaacccccttag

SEQ ID NO: 238771 - DNA, 471 bp, synthetic construct
  misc_feature 1..471: note = Description of Artificial Sequence: Synthetic coding sequence
  source 1..471: mol_type = other DNA
tgagagggggacaccgtccctagtttccttcgactgtgtattgctgccgtcgacaaaagagggctggatgttgatggcatttatagagttagtggcaatctggctgtggtgcagaagttacgcttcttggttgatagagaacgcgctgttacttccgacggacgctatgtgtttccagaacagccgggtcaggcgctcagtgagtccgagcaatgtctttcccaaatacaggagctgatcggttctatgccaaaacctaaccacgacacgctcaggtatctgctggaacacctttgccgcgtgatcgcccattctgacaagaaccgtatgacaccacacaatctgggaatagtttttgggccaaccctcttcaggcctgagcaagagaccagcgaccctgcagcacacgccctgtacccaggccaactggtgcaactcatgctgacaaactttactagcttatttccgtag

SEQ ID NO: 238772 - DNA, 396 bp, synthetic construct
  misc_feature 1..396: note = Description of Artificial Sequence: Synthetic coding sequence
  source 1..396: mol_type = other DNA
atgagtgagccacctgtgtattgtaatctcgtggacttgagaagatgtcccaggtctccccctcccggacccgcttgtccattgctgcagaggctcgacgcatgggagcagcacctcgaccccaattcagggagatgcttttatataaattcactcaccggttgtaagtcttggaagccacctagacgtagcaggtcagagactaatcccggatctatggagggcactcagacactcaaacggaacaatgacgttttacagcctcaggccaagggcttccggtcagatactgggacccctgagcccctcgatccccaggggtccttatctttatcccaacggactagccagctcgatcctccagccctgcaggcccctaggccacttccacaatag

SEQ ID NO: 238773 - DNA, 2028 bp, synthetic construct
  misc_feature 1..2028: note = Description of Artificial Sequence: Synthetic coding sequence
  source 1..2028: mol_type = other DNA
gaacctggatcaggcagtagggacccaggtccaggtattgcagagccggacttaggccgacctgccggacacctgcgcgcagatacttcccccgctgaacctcgggagatggaagattttgcccgtggcgcagcctcacccggaccctcaaggcctggattagtgcctgtgtccattattggggctgaggatgaggatttcgagaacgagctggagacaaacagtgaagagcagaactctcagtttcagagtttggagcaggtcaagcggcgtcctgcccatctaatggcattactgcaacatgttgcactgcaatttgagcccggacccctcttgtgttgtctccacgcagacatgctcggatcgttgggccctaaagaagcaaaaaaggcgttcctggatttctaccattcatttcttgaaaaaacggctgttctgagagtgcccgtgcccccaaacgtggcctttgaactcgaccggacccgcgctgatctgatctctgaagacgttcagcgcagattcgtgcaggaagtggtgcagtctcagcaggttgctgtgggcagacaattggaggacttcaggtccaagaggctgatggggatgacaccttgggagcaggagctcgcacaactggaggcatgggtaggacgggacagagctagctacgaagctagggagcgtcatgtggccgagcggctcctgatgcatctggaagagatgcagcataccatctcaaccgatgaagagaagtctgccgctgtggtgaacgccatcggcctgtatatgaggcacctgggcgtcaggacaaagtccggagacaaaaagtctggacgtaattttttcaggaagaaggtgatgggcaacaggaggagtgacgaaccagccaaaaccaaaaaaggcctaagctccatccttgatgccgctagatggaatcggggagagccacaggtcccagactttagacatctcaaggctgaagtggatgccgaaaaacctggggcaaccgacaggaagggcggagtgggcatgccaagtagggatcgcaatattggagccccaggacaggacacccccggtgtctccctccaccctttatccctggactctcccgaccgcgaaccaggggcagatgcgccactggagttgggcgatagttctccccaaggccctatgagccttgagagtctggcaccccctgaatccactgacgaaggagccgaaactgagcgttgtcccggatggggcgcaggcgcaggcggagtggcctactgggctcttgtcggaggttgccgtgtgacagctgccatatgcgcgtgcctcagccaggctttggccccacacgcccctctcctgcttagtggaagtggccactcttcccctttctttttcccttttctgatctcactgctgctgccacactgccccccttttttactctcctttctgttcccacttctgttgcccctgctgcccttctttaccaatccgtcccctccaccattcctgagcactacccccagcatctccttcatcagctctccactcctgtcccatctgccaccacccttattccctccccattctagcctcacttgggtattcttcccccacctaccaagcccctccgacttgcctgcaactttccactttttttcaccctcgcccttctctttcaaaccaccatgccctctgccacctacccccagacttgccccagccagttggtgcccatcactgaatccacccccactttgtagcgtcccctggggcccatgcccaccctacagctggggagcaggtagtgccagttgcccatctctgtgcaggtgcttcggggaccccctggtgggcgcaggtaggtgggtgcgttttcacctgggaccaccacttaccctgtgcccttctctgccccgtcgatggaagcgctgggtgccgggtccatgggtcggcgaaggattggcaccacccccttttttgccagcaccccctctgtcaccatggcccctgccgcctctgcacagtctctag

SEQ ID NO: 238774 - DNA, 2784 bp, synthetic construct
  misc_feature 1..2784: note = Description of Artificial Sequence: Synthetic coding sequence
  source 1..2784: mol_type = other DNA
atggcttcactatctacgtggtcctctcctgctgaacctcgggagatggaagatttcgcgagaggtgcagcttctcccggaccttcaaggccaggcctggtgccagtgagtattatcggggcagaggatgaagacttcgaaaacgagctggagacaaatagtgaagaacaaaactcgcaattccagtccctcgagcaggtgaagagaaggccagctcacctcatggccttgctccagcatgtggccttgcaattcgaacccggtccacttctgtgctgtctgcacgccgacatgctcggcagcctgggtcccaaggaagccaagaaggccttcctggatttttatcatagtttccttgagaagaccgccgtcttacgagtgcctgtgcccccaaacgtcgcctttgaactggacagaactcgtgcagatcttatctcagaggatgttcagagacgattcgtacaggaggtcgtgcagtcacagcaggtggccgtgggaagacaactcgaagattttaggtctaaaaggttaatggggatgaccccatgggagcaggagcttgctcaacttgaggcttgggtgggtagggaccgggcatcctatgaagccagggagaggcatgtcgcagagcggttactgatgcacctggaggaaatgcagcacaccatcagcacggacgaggaaaagagcgccgctgtcgtgaacgcaattggtctgtatatgaggcacctcggagttaggactaagtccggcgataaaaagtcaggacgaaactttttccgaaagaaagtgatggggaatcgtaggagtgatgaacccgcaaagacaaaaaaaggcctgtccagcattctggacgctgccagatggaaccgaggggaacctcaggttcccgattttcggcacctcaaggcagaggtggacgctgaaaagcccggagcgaccgatcggaagggaggtgtgggaatgccttcacgggacagaaacatcggagcccctggacaggacacacccggtgtgtctctgcatcccctcagccttgactcccctgacagagagcccggtgctgatgccccacttgagcttggcgattctagtcctcagggacccatgagcctcgagagcctggccccacctgagtctaccgatgagggcgcagagactgagagcccagaacctggtgatgaaggtgagcctggccgttccggtttggagctggagcccgaggaaccgcctggctggagggaactggtgcccccagatactctgcactcactgccgaagtcccaagtgaaaagacaggaggtaatctccgaattgctcgtgacagaggctgctcacgtgcgcatgctgcgggtacttcacgacctattcttccagcctatggccgagtgtctcttttttccactcgaagagttacagaatatctttccttccctcgatgagttaatagaagtgcatagtctgtttctggatcggcttatgaaacgtcggcaggaatccggctacttaatcgaggaaattggagatgtccttctcgcccgtttcgatggcgctgagggcagctggttccaaaagatcagcagccgcttctgttctcgacaaagctttgctttagaacagctcaaggctaaacagcgcaaggatccaagattctgcgcattcgtacaggaggcagagtccagacctcgttgtcgcagactccagctgaaggatatgatcccaacagaaatgcaacgactgactaaataccctctcctcctccagagcattggtcaaaatactgaggaacccaccgagagggagaaggtggagctggctgccgagtgctgccgggagattctgcaccacgtgaaccaggctgttcgtgatatggaagacttactgcggcttaaagattaccagcgtagactggacctttcacacctgagacaaagcagcgatccaatgctcagcgagttcaaaaacctggatattaccaagaaaaagctcgtgcatgagggccctctcacttggagggttactaaggataaagcagtggaagtgcatgtgcttttattagatgatcttctgctgctcttacagcgccaagatgaacggttgcttctcaaaagccattcaagaacactgacgcctaccccagatggcaagaccatgctgcgacctgtccttagattaacctccgcaatgactcgcgaagttgccacggatcacaaagctttttatgtactgtttacctgggaccaggaggcccagatttatgagttggtggcccagaccgtgtcagaacgtaaaaactggtgcgcccttattaccgaaactgccggatcactgaaggtgcctgcacctgccagccggcctaaacctcggccatctccctcctccacccgagaaccacttctgtcatcaagcgagaatggcaatggcggacgcgagacttcaccagctgatgcacggactgagcgaattctttccgacctgctccccttctgtcgcccaggacctgaagggcagttggcagctacagctctccgaaaagttctaagtttaaaacaactgctcttccccgctgaggaagataacggcgctggccctccaagggatggagacggggtgccgggtggtggtcccctctcacccgctcgaacacaggaaatccaggaaaacctccttagcttagaagagaccatgaagcagctggaagagctcgaagaggaattttgccgtctgcgcccacttctgagtcagcttgggggaaactccgtgccccagccagggtgcacgtag

SEQ ID NO: 238775 - DNA, 2640 bp, synthetic construct
  misc_feature 1..2640: note = Description of Artificial Sequence: Synthetic coding sequence
  source 1..2640: mol_type = other DNA
atggaagacttcgcaaggggcgcagcctccccagggccatcccggcctggtcttgtgccagtatcaataatcggagccgaagacgaggacttcgaaaacgaactggaaaccaactcagaagagcaaaactcacaatttcagtcgctggaacaggttaaacgccgtcctgctcatttgatggctctccttcagcatgtggcgctgcagtttgaaccaggccctctggtcctccgcgtgcctgttcctccgaacgtggcattcgagctggaccggacgcgggctgacctaattagcgaggatgtccagcgcaggttcgtccaggaggtcgtgcaatcccagcaggtggccgtcgggcgacaactcgaagatttcagatccaaacggcttatgggtatgactccatgggagcaggaactcgcccagctggaggcatgggtgggacgcgacagggcaagttacgaagctagggagcggcacgttgccgaacgtttgctgatgcacctcgaggaaatgcagcataccatctccactgatgaggaaaaaagtgctgccgtggtcaatgcaatcggtctgtatatgaggcacctgggagtccgcaccaaatccggcgataaaaagtcgggtcgcaacttttttagaaaaaaagtgatgggcaatcgccgatctgacgagcctgccaagaccaagaaggggctcagttcgattttggatgccgcaagatggaatcgcggagagccccaggttcctgacttccgacacctgaaagctgaggtagatgcagaaaagccaggagccactgatcgaaagggaggcgtcggcatgccgagcagagatcgcaacataggtgcccctggccaagatacgcccggagtgtccctccaccctttgagccttgactcccccgatcgggaacctggggctgatgctcctttagagctgggcgatagtagcccccaggggcctatgtctttagagagtctggctccacctgagtctacagacgaaggtgccgagactgagtcacccgaaccgggagatgaaggcgaacccggtagaagcggcctggaactcgaacctgaagagccgcctggctggcgagagctggtcccaccagatacattgcattccctgcctaagagtcaggtgaagagacaagaggtgatcagcgaacttctcgttactgaggccgcacacgtacggatgctccgcgtcttgcacgatctcttctttcaacccatggccgaatgtctattctttcctctggaagaactccagaatatctttccaagtctggacgaactgattgaggtgcactccctgtttctggacaggcttatgaagcggaggcaggaatcggggtacctgattgaagagataggtgacgttttgctcgccaggttcgatggggctgagggcagttggtttcagaagatatcctctagattttgttccaggcagagcttcgctttggaacagttgaaagcgaagcaacggaaggatccgaggttttgcgcatttgtgcaggaggcggagtcacggccaagatgtcgcaggctccagttaaaggatatgattcccactgaaatgcaacgattaacaaagtaccctctgttgctccagtccattggacagaacaccgaggaacctacagagcgagaaaaggttgaactggcagcggaatgctgcagagagatcctacatcatgtaaaccaggccgtgagggacatggaggatttgctccggttgaaagattaccaaaggcgactcgatttgtctcatttgcgccagagctctgatcccatgctgtctgagttcaaaaatctggacattacaaagaaaaagcttgtgcacgaaggacccctgacttggagagtgaccaaagacaaagctgtcgaagtccatgtcctcttgctggacgatttgctgctgctgctccagagacaagacgagcgtctgctactgaaatcacatagccgaaccctcacccccaccccagacggaaaaactatgctgagacctgtgctgagactgacatctgccatgacccgcgaggtagctactgatcacaaggctttctacgtcttattcacttgggaccaggaagcacaaatttacgagctggtagcccaaacagtgtcagaaaggaaaaactggtgcgcgctgatcaccgagaccgccggttctctgaaagtacccgcaccagccagtagacctaagcccaggccaagccctagctcaactcgggaaccgctactctcttcctctgaaaatggtaacgggggaagagaaaccagtcctgcggacgccaggaccgagcggatactctctgacctgttaccgttctgcagacctggacccgagggtcaactggcggcaacggcgctgcgtaaagtgctcagcttgaagcaattgttattcccggcagaggaagataacggcgctggaccaccccgagacggggatggcgttcctggcggtgggcctctgagtcccgctaggacccaggaaattcaggaaaatctcctgtccctggaagagactatgaaacaattggaagagctcgaggaggaattttgtcgccttagacccctgctgagccaactcggcggaaattcagtgccgcagcctggatgcacctag

SEQ ID NO: 238776 - DNA, 2739 bp, synthetic construct
  misc_feature 1..2739: note = Description of Artificial Sequence: Synthetic coding sequence
  source 1..2739: mol_type = other DNA
atggaggattttgcacggggagccgcatcacccggaccatcccggccagggcttgtgccagtctccataatcggcgcagaagatgaggacttcgaaaacgaattagagaccaatagcgaagagcagaactcccaatttcagagtttagagcaggtgaaaagaaggccagcccacctaatggccctgttacagcatgtggcactgcagttcgagcccggtcccctactgtgctgtctccacgccgacatgctgggctcacttgggcctaaagaagccaagaaagcctttctggatttttaccactcctttctggaaaagactgcggttttgcgtgtgccggtcccaccaaatgtcgcattcgaactcgataggacgagagccgacctgatctctgaagacgtgcagcgacggtttgttcaggaggtggtccagagccagcaggtcgctgtaggaaggcaattggaagacttcaggagcaagagattaatgggcatgacaccatgggagcaggaacttgcccagctggaggcttgggttggcagggatagggctagctacgaagcacgagagagacatgtggccgagagactcttgatgcacttggaagaaatgcaacatacaatcagcaccgacgaggaaaaaagcgctgctgtcgtcaatgctatagggctgtacatgcgtcatctcggggtgcggacgaaatccggcgataagaaaagtggccgaaatttcttccgaaagaaagtgatgggcaaccgtaggagtgatgagcctgccaagaccaaaaagggcctctcgtcaattcttgacgcagcccgttggaacagaggcgagccccaggttcctgacttcagacacctaaaagctgaagtcgacgccgaaaagcccggagcaactgatagaaaggggggagtggggatgccctctcgtgatagaaatattggtgcaccagggcaggatactcctggtgtgagcctgcacccgttgtctctggattcccctgaccgggaaccaggagcagatgctcccttagaattgggcgactcctccccccaaggtcctatgtcgctcgagagcttggctcctccagaaagcactgatgagggagctgaaaccgagagtcccgaacccggtgatgaaggcgagccgggacgctcgggcttagaactggaacctgaagagcctccaggttggcgggaactggtgccgcctgacaccctgcactcactgccaaagtcccaggtaaagcgccaggaggtcatttccgaacttctcgttactgaggcagcgcacgtcagaatgctccgggtcctgcacgacctgttctttcagccgatggctgagtgcctgtttttccctctcgaggagctgcaaaacatcttcccttcacttgacgagctaattgaggttcattctctgtttcttgacagactcatgaagcgtcgacaggagtctggatatctgattgaggagattggcgacgttcttcttgcccgatttgatggcgctgagggttcatggtttcaaaaaattagcagtcggttttgctctagacagtccttcgcactcgagcaactcaaggcgaagcagcggaaagacccaagattttgcgctttcgttcaagaggcggagagccgacctagatgtagacgcttacagttgaaggatatgattcctacggaaatgcaaagattgaccaagtacccactcttactccaatccattgggcagaacaccgaagaacccacagagcgtgaaaaagtggagctggcagcagaatgttgtcgtgagattctgcaccacgtcaatcaggccgttcgcgatatggaagatctgttaaggctgaaggactatcagcgccgattagacctcagtcatctaaggcaatcttcagacccaatgctctccgagtttaaaaacttagatatcactaaaaagaagttagtgcacgaggggcctttgacatggcgggtgaccaaagacaaggccgtcgaggtccatgtgttactgttggatgacctgctgctattgcttcagagacaagatgagagacttcttcttaaatctcacagtcgcacactcaccccgacaccagatggcaaaactatgctgagacccgtactgcgactgacttccgccatgacacgggaggtggctaccgatcacaaggcattctatgtactgttcacatgggatcaagaggcccagatctacgagctcgtcgcacagactgtttccgagcggaaaaactggtgcgcactcataaccgaaaccgccggatctctcaaagtgcccgctcctgcctccaggcctaagccccgtccctccccctcttctacacgagagccgctgctatcttcctctgagaacggcaacggaggcagggaaacgagcccggcagacgctagaaccgaacgcattcttagcgacctcctgccattctgtagaccaggaccagagggccagctcgctgccactgcactgcgcaaggtcttatccttaaagcagttgctattcccagccgaggaggacaatggggcaggtcccccacgtgacggcgacggtgtgcccggagggggtcccctttctcctgcacgaacacaagagattcaggagaacctcttgtctctcgaggaaaccatgaaacagctggaggaactggaggaggagttctgtagactccgcccacttctgtcgcaattagggggtaactccgttcctcagcccggatgcacgtag

SEQ ID NO: 238777 - DNA, 2847 bp, synthetic construct
  misc_feature 1..2847: note = Description of Artificial Sequence: Synthetic coding sequence
  source 1..2847: mol_type = other DNA
atggcatcactgagtacatggagctcacccgcagaaccaagggaaatggaggatttcgctagaggggctgcctcaccaggcccttcacggccaggtctcgtgccagtctccatcataggagcagaggacgaagatttcgaaaacgagcttgaaacgaacagcgaggaacagaatagtcagtttcagtcactggaacaagtgaagaggagaccggcacacttaatggctctcctgcagcacgtcgctcttcagttcgagccaggcccactcgtcctgcgggtgccagtgccaccaaacgttgcctttgaactggataggacacgagcagatctaatcagtgaggatgtgcagcgacgcttcgtgcaagaagtagtgcagtcccagcaggtggcagtgggtcgccagttggaggactttcgcagcaaacggctgatgggaatgactccgtgggagcaggagctggcacagctagaggcttgggttggtagggatcgcgctagctatgaagcccgagagcgccatgtggccgagagactcctcatgcacttggaggagatgcagcacaccatttccacggatgaagaaaagtctgctgcagtggtgaacgcaatcggactctacatgagacatcttggggtaaggaccaaatctggggacaagaagtccgggagaaattttttcaggaaaaaggtgatggggaaccggaggtcagatgagcctgccaagaccaaaaagggactctcctcaatcctcgatgccgctcggtggaataggggcgaaccccaggtgccagatttccggcatttgaaggccgaggtggacgcagaaaagcctggggcaactgatcggaaagggggtgtgggaatgccatccagagatagaaatatcggggcacccggtcaggacacccctggtgtcagcttgcatcccctttctctggactctccggatcgtgaacctggcgcagatgcccctctggagctcggggattcctccccccaaggtcccatgtccttggagtctttggctcctcccgaaagtactgacgaaggcgctgaaacagaatcaccagaacccggagacgaaggggaaccgggaagatccgggctggaactcgaaccagaagaacctccgggatggagggagttggttccacccgacactctgcattcactgcccaaatctcaagtcaaacgtcaggaagtgatttcagagctcctggtgaccgaggccgctcacgtccgaatgctgagggtgctccatgacctcttttttcagcccatggctgagtgcctcttcttcccacttgaggaactacagaatatcttcccatcactggacgagttgatagaggtacactctctttttctcgaccggttgatgaaaagacgacaggagtcaggctatctcattgaggaaattggagatgtgctcctggcacgattcgacggcgcagagggttcgtggtttcagaaaataagttcccgattctgttcccggcagagttttgcacttgaacagctcaaggcgaaacaacgcaaagacccgaggttttgtgcgtttgtgcaggaggccgagagcaggccacggtgtcggcgactgcagctaaaagacatgattcccacagagatgcaacgtctcaccaagtatcccctgctcctgcagagcatcggtcagaacaccgaagagccaacagagcgggagaaggtggaactcgccgctgagtgctgtcgcgagatcctccatcacgtcaaccaggcagtcagagacatggaggacctgttgcgccttaaggattatcagcgcaggctggacctgtcacacctcaggcagtcttccgatccaatgctcagtgaatttaaaaacttggacattacaaaaaaaaaactggtgcacgaaggccctctgacatggcgggtaaccaaagacaaggctgtcgaggtccacgtgttactcctagacgacttgctccttctcctgcagcggcaggacgaaaggctgctgctgaagagtcacagccggaccttgactccaacgcctgacggcaagacgatgctgcgtccagtcctccgactaacaagtgccatgacgcgcgaggtagcgacagatcataaagctttctatgttttatttacatgggaccaggaggcacagatctatgagctggtggcacaaaccgtgtccgagagaaagaattggtgcgcacttattaccgaaaccgccggaagtctaaaggttcctgcaccagccagcagacccaagccacgaccaagccccagcagcactagggagcctctcctcagctctagtgagaatggaaacgggggacgggagacttctcccgcagacgccagaaccgaacggattttaagcgatttgttgcccttctgtaggcctggccctgaagggcagctagccgctactgcactccggaagggtgttgggggaggaatcctgcctcctgagacgcctcccgtgagcgcttggggggaactttgccccccagcttggctgcaccttcgttttccgccaaggaaagctttttgtaaaaaagaacgaaacggtggggaggacgtgcgagatcacccccaccctcattcctgtagatccatttctcaccctgaggggctgcgcagggggtcatgcgggcctaggctggggggagcccagctgggcctgctcgcaccccacgagccaaggccgtctctcccccctgcgttatgtctcggtgatagcggcttacactctggcggacatcatggagacccagggcatctcagtatcgcgtgtgggggtcacccttcaacaccgacgcccaaatgcctccgatccgtatttattccctag

SEQ ID NO: 238778 - DNA, 4023 bp, synthetic construct
  misc_feature 1..4023: note = Description of Artificial Sequence: Synthetic coding sequence
  source 1..4023: mol_type = other DNA
atgaggccacccggttttctgagtcgggcaccctcccttaacagggcagaaaggggcatatggagctgtagtatggaccagcgggaacctctgcctccagccccagcagagaatgaaatgaagtatgatactaacaataatgaagaggaggagggtgagcagtttgactttgattcaggtgatgagatcccagaagccgaccgccaggcccctagtgctcctgagaccggcggtgccggtgcttccgaagccccagctcccaccggcggtgaggacggggcaggagctgaaacaacccctgtggctgagccgactaagctggtgctgcctatgaaggttaatccatatagtgttatagatatcaccccctttcaggaggaccagcctcccacccctgtacctagtgccgaggaagagaacgtggggctgcacgtcccttgcggatatctcgtacccgtaccttgcggatacgcagtgccctccaatctgccactgttgctgcccgcttactcatccccagtaattatctgtgcgacatctctggatgaagaggctgagacccctgaagtgactgaagatagacagcccaactccctttcttctgaagagcctcccacgtcagaggaccaggtgggtagagaggactccgccctagcccgttgggctgctgaccctgcaaataccgcatggatggaaaatcccgaggaggcaatttatgacgatgtgccgagagaaaacagcgattctgagcctgacgaaatgatttacgacgacgtggaaaacggtgatgagggtggcaatagctccctagagtacgggtggtcttcgtctgagtttgagtcctatgaggagcagtctgattctgagtgcaagaacggtataccccgaagctttctgcgcagtaaccacaagaaacaactctcacatgacttaacccggcttaaggagcattatgagaagaaaatgcgagatctgatggcctccacggtcggcgtagtggagatacaacaacttcgccagaagcacgagctgaaaatgcagaaactggtgaaggctgccaaagacggcactaaggacggcctcgaaagaactcgtgcggcagttaagcggggaagatcctttatacggacaaaaagcctgattgctcaggaccacagatcttcgctagaagaggagcaaaacctgttcattgatgtggactgcaaacacccagaagctattcttactccaatgccagagggactctcacaacagcaagtcgtccggagatacatcctcggaagtgtggtcgattctgaaaagaattacgtggatgccctgaaacgcatcctcgaacaatacgagaaaccgctgagcgagatggaacccaaagttttgtcagagcgtaaactgaagaccgtgttttaccgcgtcaaggagatccttcagtgtcactcactgttccagatcgccttggcatctagagtcagtgaatgggatagcgtggagatgatcggtgacgtgttcgtggcaagcttctccaaaagcatggttctggatgcctattcagagtacgtcaacaacttctctacagccgtggctgtactgaagaaaacttgtgccactaagcctgcattccttgaatttttgaagcaggaacaggaggccagtccagataggaccaccttgtattccctgatgatgaaacctattcagcgcttcccccagttcatcttgttgctacaggatatgttaaagaacaccagtaagggacaccccgaccgattgcctctgcagatggccctcacagaactggagacattggctgaaaaactgaacgagcggaaaagagatgctgaccaacgctgcgaagttaaacagatcgctaaagccattaatgaacgatatttgaataagcttctgagtagcggaagtaggtatctgatccggagtgatgatatgattgaaactgtatataacgatcgcggtgaaatcgttaaaacaaaggagcgtcgtgtttttatgctcaacgacgtgctgatgtgtgccactgtttcttctcgcccaagtcatgattctcgagtcatgagctcccagcgttatctgctgaagtggtccgttccacttgggcatgtggatgctatagagtacgggagttccgcgggaactggggaacattcacggcacttagcagtacatccccctgaatccttggccgtcgtggcaaacgcgaaacctaataaggtctatatgggccctgggcagttataccaggacctccaaaacctgctccacgaccttaatgtaattgggcagataactcaactgatcgggaatttgaagggaaattatcagaatttgaatcaatctgtcgcgcacgattggacttccggcttgcaacgcctgatcctcaaaaaggaggatgagattcgggctgcagactgctgccggattcagctgcagttacccggaaagcaggataaaagcggacgcccaaccttcttcaccgccgtgttcaatacttttacgcccgctataaaagaatcctgggtgaattctctacaaatggctaaactggccctggaggaagagaaccacatgggttggttctgcgttgaagacgacggtaatcacattaagaaagagaaacacccactcctggttggacacatgccggtaatggtggcaaagcagcaggaatttaaaatcggcagttgtactcatcaaatgggccagattgccatcgtgtcgtttcagaacagtacccccaaagtcattgaatgctttaacgtagagagcaggatcctctgtatgttgtatgttcccgtagaggagaaaaggcgagaacctggcgctcctcctgatccggaaactcctgctgttagggcctccgatgtgccaactatctgtgtcgggacagaagagggaagcattagcatctacaagtcttctcaagggtcgaaaaaggtgagacttcaacatttctttaccccagagaagtcaacggtgatgagtttagcctgcacaagccagtctctgtatgccggactggtgaatggagctgttgccagttatgcgagagcacctgacggctcctgggacagcgagccacaaaaagtaataaaactgggggtgctaccggttcgatcactcttaatgatggaagataccctgtgggccgctagcggcggacaggtgtttataatcagtgtcgagactcacgccgttgaggggcagctggaagcacaccaagaggagggcatggtgataagtcatatggccgtgtcaggcgttggcatctggatagctttcacgtccggtagcacacttcggctgttccatacagagacgttgaaacatttgcaggatatcaatatcgccacccctgtccataacatgctgccaggccaccaacggctttctgtcactagtcttctggtctgccatggcctgcttatggtgggtacttcgcttggcgtgttagtggcattgcccgtgcccaggctgcaaggaattcctaaggtgaccggcaggggtatggtaagttatcacgcacacaatagtcccgtaaaatttatcgtgctcgccactgctcttcacgagaaggataaggacaagtcccgcgattctctcgcacctgggcctgagcctcaggatgaagaccagaaagatgcattgcccagcggcggagccggatcctctctgtcccagggcgatcccgatgccgcaatttggctgggagactctttaggcagcatgacccagaaaagcgacctgtcatcaagcagtggttctttgtctctctcccacgggtcttcgagcttagagcatagatcagaggactctacaatttatgacctgctgaaggacccagtgtcattgcggtctaaagcgcgacgggctaaaaaggcaaaggctagttccgcgctggtcgtgtgcggcggtcagggacacaggcgcgtgcacaggaaagctcgtcagcctcaccaggaggagctggcacccactgttatggtttggcagataccattgctgaatatttag

SEQ ID NO: 238779 - DNA, 4035 bp, synthetic construct
  misc_feature 1..4035: note = Description of Artificial Sequence: Synthetic coding sequence
  source 1..4035: mol_type = other DNA
atggatcagcgcgagccacttcccccagctcccgcagaaaacgaaatgaagtatgacaccaataataatgaagaggaagagggcgagcaatttgattttgactccggcgatgagatccccgaagctgatagacaagcgccatccgcaccagagacaggcggtgccggagcaagcgaagcacctgcaccaactggcggtgaagacggtgctggcgcagaaaccacccccgtggccgagccaacaaagctggtccttccaatgaaagtgaatccgtacagtgtgatcgatatcactccgttccaggaggaccagcccccaacccccgtgccgtcagctgaagaggagaatgtgggcttgcatgtgccttgtggatatcttgtccccgttccttgcggctacgcggtgcctagcaacttgccgctgctgctgcccgcatacagtagcccagttatcatctgcgcaacaagtctggatgaagaagagacccccgaggttacagaggatagacagcccaattccctgtcttctgaggaaccccctacaagcgaggaccaggtcggacgggaggatagtgcactggcacgctgggccgcagacccagcaaacaccgcatggatggaaaacccagaggaggccatctatgatgacgtgcctagagagaatagtgactctgagcctgatgagatgatctacgatgacgtcgagaacggagacgaagggggaaattcctccttagagtatggttggtcttcctcagaatttgagtcttacgaagaacagagtgactccgaatgtaagaatgggatccctaggagctttctcagatctaatcacaaaaaacagcttagccacgatctcacaagactcaaggaacactacgagaaaaagatgagggatctgatggcctcaaccgtcggagtagttgaaatccagcagcttcggcagaagcacgagcttaagatgcagaaactggtgaaggcggcaaaggacggcacaaaagacgggctggagagaaccagagcagctgtgaagcgcggtaggagctttattagaaccaaaagtttaatcgcccaggaccatcggtcctcccttgaagaggaacagaatctgtttatcgatgtggattgcaaacatccagaggctatccttactcccatgcccgaagggttaagccaacagcaggtcgtacgtagatatatccttggatcagtcgtggactccgaaaagaattatgtggacgcgctgaaacggatacttgagcagtatgaaaaacccctgagtgaaatggaacctaaagtccttagcgaacggaagctcaaaactgtgttttatagagtcaaagaaatcctgcaatgccactcactgtttcagatagccttagcatctagagtgagcgagtgggactcagtggaaatgatcggggatgtcttcgtggcatcattttcaaaaagtatggttctggacgcatacagcgaatatgtgaacaacttttcaaccgcagtggctgtgttaaaaaaaacatgcgcgactaaacccgcttttctggagtttctcaaacaggagcaggaagccagcccagacagaacgactttgtattctcttatgatgaaaccaattcagcgcttcccgcagtttattttactgctccaggacatgctgaaaaacaccagtaagggccaccccgacagattgccactgcagatggccctgactgagctggagactctggctgaaaaactgaacgaacgcaaacgggacgccgaccagagatgcgaagtcaagcagatcgccaaggctatcaacgagcggtaccttaacaaacttctgagctccgggagtagatatctgatacgttctgacgatatgatcgagactgtctataacgaccggggagagattgtgaagactaaggagaggagagtgtttatgcttaatgacgtcctgatgtgcgccactgtgtcttctcgcccatcacacgactcaagggtgatgagctcgcagcgttacttgctaaagtggtccgttccactagggcacgtcgacgccatcgaatacggctcatctgccggaactggcgagcatagtagacacttggccgtccaccccccagagtcgctcgctgtggtggcaaatgccaagcctaacaaagtttatatgggcccaggacagttatatcaggacctgcagaatctcttacacgacctgaatgtgattggtcagatcactcaactgatcggaaacttgaagggtaactaccagaacctgaatcagagcgtcgctcacgattggaccagtggcttgcagcggctgattctgaaaaaggaggacgagatcagagccgctgactgctgtcgcatccagttacagctgccaggaaaacaggataagtcaggacggccaactttcttcacagctgtttttaatacctttacccctgctatcaaggaatcctgggttaattccttacagatggccaagcttgccctcgaggaagagaaccatatggggtggttctgtgtggaggatgacgggaatcacattaaaaaagagaagcatccactgctggttggccatatgcccgtgatggttgccaagcagcaggaatttaagatagaatgcgcagcatataatccggagccttacttgaacaatgaatctcagccagattcttttagtaccgctcatggctttttgtggatcgggagttgtactcaccagatgggacagattgctatcgtaagcttccagaacagcacgccaaaggtaattgagtgcttcaacgtcgagtccaggattctgtgcatgctatatgtccctgttgaggaaaagcggagagagcctggcgcacctcccgatccagagaccccggcagtgcgagcctcagatgtgccgactatctgcgtcgggaccgaagaaggctccatatcgatatacaagagctcacagggatctaagaaggtgcgcttgcaacacttctttaccccagaaaagagtaccgtgatgtctctcgcctgtacctctcaaagcctctatgcgggactcgtgaacggcgctgtggcttcctatgctcgagcccctgatgggtcttgggactcagaacctcagaaggtgattaaactaggggtattgccagtcaggagcctgcttatgatggaagatactctatgggccgcttcaggaggccaagtctttatcattagtgtggaaacacacgccgttgaaggacagctggaagctcatcaggaagagggcatggtaatcagccacatggctgtgtccggggtcggtatttggatcgcatttacatctgggtctactttacggctgttccacacagaaaccctgaaacatctgcaggacatcaacatagccacccccgtgcataatatgctgccgggtcatcagcgcttgagcgtgacatcactgctagtttgccatggccttctgatggtgggaacctcactgggggtgctggtggctctgcctgtgcctcgtctgcaaggaatacccaaggtgacgggaagaggaatggtctcttatcatgcccataatagccctgttaaattcatcgtccttgcaacggctctccacgagaaggataaagataagtcccgcgactcattggcaccgggtccagagccccaggatgaggaccagaaggacgcgctccctagcggtggggctggctcttctttgtcacaaggcgacccagatgcagcgatttggcttggggattcactcggatcaatgacacaaaagtctgacctgtcctcttcatccggctcactgtctctttcacacggatccagctccctggaacacaggagcgaggacagtaccatctatgacttgctgaaggatccagtcagcctgcggagcaaagcacggagagctaagaaggcgaaagcttcttccgctcttgtagtgtgtggtggacaggggcatcggagggtccaccggaaagctaggcagcctcatcaggaggagctggcacctactgtgatggtttggcagatccctttactcaatatttag

SEQ ID NO: 238780 - DNA, 1833 bp, synthetic construct
  misc_feature 1..1833: note = Description of Artificial Sequence: Synthetic coding sequence
  source 1..1833: mol_type = other DNA
atgaggccccctgggtttttgtccagggctcctagtttaaaccgagcagagagaggaatctggtcatgcagtatggatcagagggagcctctgccaccagccccagcagagaatgagatgaaatatgatactaataataacgaggaggaggagggtgaacagtttgatttcgactctggcgatgaaatcccagaagctgaccggcaggcacccagcgcacctgagactggtggagctggggcttcagaggcaccagcacctacagggggagaagatggcgctggcgctgagaccaccccagtcgctgaaccaaccaagctggtcctgcctatgaaggttaatccctactctgtgatcgatatcacaccttttcaggaagatcagccgcctacccctgtgccttccgccgaagaggagaatgtggggctacatgtgccgtgtggctacctggtgcccgtgccatgtgggtacgcagttccctctaacttgccgctgttattgcctgcatacagctctcccgtgatcatctgcgctacctcgcttgacgaagaggcggagacacctgaggtgacggaggacagacagcccaattccttgtcaagcgaggaacctccaacgtctgaagaccaagtaggcagagaagactctgctctggctcgatgggccgctgatccggcaaacactgcttggatggaaaatcctgaagaggcaatctacgatgatgttccccgagaaaactcagatagcgagcccgacgagatgatttacgatgacgtggagaatggggacgagggcggaaatagtagcctggagtatggatggtcctcaagcgagtttgaatcatatgaggagcagtccgactccgagtgtaagaatggtatccctagatcctttttaagaagtaaccacaaaaaacagatgcagaagctggtgaaggccgctaaggacggcaccaaggacggcctcgagcgaactagagccgctgtgaagcgcggtcgcagttttatcaggacaaagtcactgatcgcccaggaccaccgatcaagtctcgaggaggaacagaatctgttcatcgacgtcgactgtaaacaccccgaggcaattcttacaccaatgcccgaaggcttaagccagcagcaggtggtgaggcgatatattctcggttctgtagtcgactctgagaaaaactatgtggacgctctaaagcggattctggagcaatatgaaaagcccctgagcgagatggagcccaaagtactgtcagagcgcaaactcaaaacggtcttctatcgagtgaaagaaatcctgcagtgtcactcgctcttccagatagccctcgcttctcgcgtgagcgaatgggatagtgtcgagatgattggagacgtctttgtggcctccttctctaaaagtatggtgctggacgcctactccgaatacgtgaacaacttcagcaccgccgtggccgtgttaaagaagacgtgtgcaacaaagccggcattcctcgaattcctaaagcaagaacaggaggcctccccggatcgtaccacgctgtacagcctgatgatgaagccgatccaaaggtttccccaattcattttgctgctgcaggatatgcttaaaaatactagcaaaggccatcccgaccgattaccattgcagatggccctgacagaactcgagaccctcgccgaaaaactgaatgagcgaaaacgtgacgctgaccagaggtgcgaggtgaagcagatcgctaaagctataaacgaacggtatctgaacaaggttgagcggggtttcctccagctctactccaaaattatattcgctctctgctag

SEQ ID NO: 238781 - DNA, 4110 bp, synthetic construct
  misc_feature 1..4110: note = Description of Artificial Sequence: Synthetic coding sequence
  source 1..4110: mol_type = other DNA
atgcgccctcccggtttcctgagccgtgctccttccttaaaccgggctgagaggggaatttggagttgttccatggaccagagggaaccgctgcctcccgctcctgcggaaaacgaaatgaagtatgatactaataataacgaagaagaagaaggtgagcagttcgattttgatagcggggatgaaatcccggaagctgacagacaggctcccagtgcaccggaaaccggaggagcaggcgctagcgaggctccagcccctacagggggagaggacggcgctggcgctgagacaaccccagttgccgagccaacaaagctggtcctgccaatgaaggtgaatccctatagcgttattgatattacgccattccaagaagaccagccaccgacacctgtcccatccgcagaagaggaaaacgtgggcctccacgttccttgcggctatctggtgcccgtgccctgtgggtacgctgtgccatccaaccttcccctcctgctgccagcctacagtagtccagtgatcatctgtgccacctctcttgacgaggaggccgaaacccccgaggtgaccgaggacagacagcccaattcactgtcatctgaagagccgccaacttctgaggaccaggtgggcagagaggattcggcattagctaggtgggccgctgatcccgctaatacagcctggatggagaatcccgaagaggcaatctatgatgacgttccgagagagaactctgactcggagcccgatgagatgatctatgatgacgtggagaacggggacgagggaggtaattccagcctggaatacggttggtcgtcttctgagttcgaatcttatgaagagcagtctgactccgaatgtaagaatggaattcctaggagctttctccggtcaaatcacaagaaacagctgtcccacgacctgactcgcttgaaagagcattatgaaaagaaaatgagggacctgatggccagcactgttggcgtagtggaaatccagcagttaaggcagaaacatgagctgaagatgcagaagcttgtgaaagcagctaaagatggcacaaaagatggcctggaaaggacacgggcagccgtgaagagaggtcgctcgtttattcgaaccaagtctctgatcgcgcaagatcacagaagcagcctagaggaggagcagaacttgttcatcgacgtagactgtaaacaccctgaggcaattctgacccccatgcccgaggggctgtcccagcagcaggttgtccgacgatacatacttggctcagttgtggactcagaaaaaaattacgtggatgcactgaagagaatcttagagcagtacgagaagccattgagcgagatggaacctaaagtattgagcgagagaaaactcaaaacagtcttctacagggtcaaagaaattctccagtgccattccttatttcagatcgctctcgcgagccgagtctccgagtgggattctgtcgaaatgatcggagatgtgttcgtcgcctccttttccaagtccatggtgttggatgcatattcagaatatgtgaataatttttccaccgcagtggctgtactgaaaaagacctgcgccaccaagccggcatttctcgagttcctaaaacaggagcaggaggctagtcctgacaggactacactgtattccctcatgatgaaaccaatacagcgcttcccccagttcatcctactgctgcaggacatgctgaagaacacctcaaagggccatccagataggctgcctctgcaaatggcactgacagaattggagactctcgcagagaagttaaacgaacgcaagcgtgatgcagaccagagatgtgaggtcaaacagatcgcaaaggctatcaatgaacgctatctgaataagttgctctctagcggtagccgctatttaatacggagcgacgacatgatcgagacagtgtataatgacaggggcgagatcgttaaaactaaagaaaggcgagtgttcatgctcaatgacgtgctgatgtgtgcaacagtgtccagccggcctagccacgattcgcgggtcatgtcgagccagcgatacctactcaagtggagcgtacctctcggccatgtagacgctatcgaatacggcagcagcgcagggacaggggagcactctagacatttagccgttcatcctcccgaatctctggccgtagtggccaatgccaaacccaacaaagtgtatatgggtccgggacagttatatcaggacttacagaacctattgcacgatctgaatgtcatcggacagattactcaattgataggcaatttgaaaggaaactaccaaaatttgaatcagtctgttgcccatgattggacaagcggccttcagcgccttattctcaaaaaagaggacgagattagggccgcagattgttgcaggatccagctgcagttgcccggaaagcaggacaaatccggcaggcccacatttttcacggccgtcttcaatacgtttacacctgccatcaaggagtcctgggtgaactctctccagatggctaagcttgccctggaggaagaaaatcacatgggatggttttgtgtggaggatgatggcaatcacatcaaaaaagagaagcatcctcttctggtgggacacatgccggttatggtggccaagcagcaagaattcaaaattgaatgtgctgcttacaatccagagccatacctgaacaacgaatcacagccagatagcttctcaaccgcacatgggtttctgtggataggaagttgcacccaccagatgggccaaattgccattgtgagctttcagaattccacccccaaagttatcgaatgctttaacgtggagagccggatcctatgcatgctgtacgtaccagtggaagagaaacgcagggaaccaggcgctccccctgatcctgaaactccggcagtaagggcaagcgatgtgccgaccatttgcgtggggacagaggaggggtcaatatctatctataagagttcccagggatcaaaaaaggtgcgattgcagcatttcttcacccccgaaaagtctacagtcatgagcttggcatgcacgtctcagtcgctttacgctggactggtgaacggcgctgttgcttcctatgcgagggcaccagatggttcttgggattctgagcctcagaaagtgattaagctgggcgtgctgccagtgcgctctctcctaatgatggaggacaccctgtgggccgcatcagggggacaggtgtttatcatttcggtcgaaactcacgcagtcgaggggcagctcgaagctcaccaagaggagggtatggtcatctcccacatggcggtgtctggggtgggcatctggatcgctttcacatctggttccacacttcggctcttccacaccgagacccttaaacacttacaggacatcaatatcgcaacacccgtacacaatatgcttccaggacatcagaggctcagcgtgacttcccttttggtgtgccacggactgctaatggtcggtacaagcctcggcgtcttggtggcgctgccagtccctcgactacaagggattcctaaggttactggcaggggtatggtctcctatcacgctcacaactctcctgtgaagtttatagtgctggctacagcactacacgagaaggacaaggataagagtcgggattcacttgctccagggccagagccccaagacgaggatcaaaaagatgccctccctagtggaggggcaggcagtagccttagccagggtgacccagatgcagctatatggcttggcgactctcttggctcgatgacacagaaaagcgacctgtcgtcctcctccggcagcctgtcgttaagtcacggatctagcagtctggagcatcgtagcgaggacagcacaatttacgatttgctcaaagatcctgtctcgcttaggagtaaagctcgcagagccaagaaggcgaaagcctcatccgccctcgtggtgtgcggaggtcagggacatcgacgtgtgcacaggaaggctcgtcaacctcaccaagaggaacttgcgcctaccgtgatggtctggcagatcccactgctaaacatttag

SEQ ID NO: 238782 - DNA, 4107 bp, synthetic construct
  misc_feature 1..4107: note = Description of Artificial Sequence: Synthetic coding sequence
  source 1..4107: mol_type = other DNA
atgagacctcccggttttctgtccagagcccctagcctgaatcgcgctgagaggggcatctggtcgtgtagcatggaccagcgagagcccttacctcctgctcccgctgaaaatgagatgaaatatgatacaaataataatgaggaagaggaaggtgaacaattcgacttcgatagcggcgacgagatcccagaggccgaccggcaagccccaagtgctccggagaccggtggagcgggagcttctgaagcaccagcacccactgggggagaagacggcgcaggtgcagagacgacaccagtggccgagccaaccaaactggtgctgcctatgaaagtgaatccgtattctgtaatagacattacgccattccaggaggatcagccacccacgcccgtgccgtcggcagaggaagaaaacgtggggttacatgtaccctgtggctatctcgttccagtgccgtgcggatatgccgtgcccagtaatctgcctctgttattgccagcatactccagccctgtgatcatctgcgcgacatcattagatgaagaggcagaaactcctgaggtgacagaggatcgccaacccaactcactttcatctgaggaacccccaactagcgaggatcaggttgggagggaggactccgcgctcgctcgatgggccgcagatccagctaacacagcatggatggaaaaccctgaggaagccatctatgatgacgttccacgagaaaactctgactctgagccagatgaaatgatctacgacgacgtcgagaatggggacgaaggagggaattcttctctcgagtacggctggtcttccagcgaatttgagagttacgaggagcaaagtgatagtgagtgtaagaacgggatcccccgtagcttccttaggagcaaccacaaaaagcagctttcacatgatctgactcgtctgaaggagcactacgaaaaaaagatgcgggacctcatggcgtccaccgtgggcgtagtagagattcagcagttgaggcaaaagcacgagctgaaaatgcagaaacttgtcaaagcagctaaggatggaactaaagacggtctggagagaacgagagcagccgtgaaacggggaaggagttttatcagaacaaagtcactcattgcccaggatcacaggtccagtctcgaagaggagcaaaacttgtttatcgatgttgactgcaagcatcctgaggcaattcttactccaatgcccgaggggctgtcacagcaacaggtcgtgcgtcgctacatcctggggtctgttgtggactcagaaaaaaactacgtagacgcattgaaaagaatcctagaacagtacgagaagcctctgtccgagatggaacccaaagtcctctctgagcgaaagctgaaaacagtgttttaccgagtcaaagaaatactgcaatgccactctttgtttcagatagcgctggcttccagagtctccgagtgggattcagttgaaatgattggagatgttttcgtcgcatctttctccaagtccatggttctggacgcctactctgaatatgtgaataatttttcgactgctgtggcggtcctcaaaaagacatgcgccactaagcctgccttcctggaatttctgaaggagcaggaggccagtccagaccggaccactctctacagcctgatgatgaaaccgatccagagattcccccaattcatccttctactgcaggacatgctcaaaaatacctccaaaggtcacccggaccgtctgcccctgcagatggctctgactgaacttgagactttagctgagaagctcaacgaacgaaagcgggatgctgaccagcgctgtgaggttaagcagatcgcaaaggcaataaatgagcgttatctgaataagctactgtcctcaggaagtcggtaccttatccgtagcgacgacatgattgagaccgtgtataacgaccgaggggagatagtcaagacaaaggagagaagggtttttatgctaaatgacgtgttgatgtgcgccaccgtttctagcagaccatcacatgactcccgggttatgagctcccagagatatcttctgaagtggtctgtcccgctgggccacgtggatgccatcgagtatggctcctccgccggaactggcgaacacagccgtcacctcgcggtgcaccctccagaatcgctggcggttgtggctaacgccaagccgaataaggtctacatgggacctggccagctgtatcaggatctgcagaatctgctgcatgacctaaatgttattggccagatcacccagttgatcggaaacctgaaaggaaattatcagaacctgaatcagtcagtcgcccatgattggacctccggccttcagcggttgatcttgaagaaagaggacgagatacgcgctgccgattgttgccgcatccaattacaactacctgggaagcaggacaagtctgggcgaccaacattttttacagccgtcttcaataccttcaccccagccattaaggaaagctgggtgaattcactccaaatggccaaactagctttagaggaggaaaatcatatgggttggttctgcgttgaggatgatgggaaccacatcaaaaaggaaaagcacccattgctcgtgggacacatgccagtcatggtcgctaagcagcaagagtttaagatcgagtgtgcggcttacaatccagagccttatctgaacaatgaatcacaacctgactccttttcgacagcgcacggatttctgtggatcggatcttgtacacatcagatggggcagatcgcgatcgtgtccttccagaactctactccaaaggtgatcgaatgcttcaacgttgagtctagaatcctgtgcatgctgtatgtcccagtcgaagagaaacgtagagagccaggggcacccccagacccagaaacccccgcagtcagggccagtgacgttccaacaatttgcgtgggcacagaagagggttcaatctccatctataaatctagccagggcagcaaaaaagttcgcctccagcacttttttacacccgagaagagtaccgttatgagcttagcttgcacctctcagagcctgtacgcgggactagtgaatggcgcagtcgccagttacgctagggccccagacggttcatgggacagtgagcctcaaaaggtcatcaagctgggcgtattacctgtccggtcactacttatgatggaagacacactctgggccgcttccggaggacaggtttttatcatcagtgttgaaactcacgccgtcgaggggcagctagaggcccaccaggaggagggcatggtaatatctcacatggcagtctcgggagtcgggatctggatcgcgtttacgagcggcagcacattgagactgttccatacggagacccttaagcatttgcaggacattaatatcgccacacctgttcacaacatgctacccggtcaccagagattgtctgtgacctcactgttggtttgccacggactgttgatggtgggtacgtctctgggggtgcttgtcgcacttccagtgccacgtcttcagggaatccctaaagttaccggccgtggcatggtcagctatcacgcccacaactctccagttaagttcatcgtcctggccactgccctgcacgagaaggataaagacaaatctcgcgactcactggcaccagggccagagccacaggacgaagaccagaaagatgcgctgccatcaggtggagctggcagcagtctgtcacagggcgacccagacgctgccatttggctaggggacagtctcggctcaatgacacagaagtctgacctgagcagttccagtggcagcctgagcctgagtcacggctcatcctcgctggaacatcgcagcgaagactcaacgatctatgaccttttaaaagatccagtcagcctgaggtccaaggcaaggagagccaagaaggcgaaggcttcgagtgccctagtagtatgtggcggtcaggggcaccgccgagtgcatcgcaaggcacgacaaccccaccaagaagaactggctcccacagttatggtctggcagattccattgctaaatatctag

SEQ ID NO: 238783 - DNA, 2949 bp, synthetic construct
  misc_feature 1..2949: note = Description of Artificial Sequence: Synthetic coding sequence
  source 1..2949: mol_type = other DNA
atgctgccctcctcctcctggggcaagcgtaaactgcggggacggctcgggtgggtaagatcagacgccaggggggtgatgtgggcacgccaggagggactgcaccacccccatccacatgcagttatccgatgtccctcatcatcaagtagcagcgtgagctgctccggtgactctgaggaggaggacatgggattgctggaggttagcgtaagcgacattaagccacccgcacctgagctggggcctatgccagagggactctctccacaacaagtcgtgcgcagacacatcctgggttcaatagtgcaatcagaaggctcatacgttgagtcactgaagcggatcctgcaggattacaggaatccacttatggagatggaacctaaagcccttagcgctcgaaagtgccaggtcgtattctttcgcgtaaaagagatcttacactgtcactccatgttccagatcgcgctgagctcccgcgtagccgaatgggacagtaccgagaagattggtgatttattcgtggccagcgatatgttgaaaaacacgcctcgaggacatcctgatagactatcccttcaattggccctcaccgaactggagaccttagcagagaaacttaacgagcagaagcggctggccgatcaggtcgcagagattcagcaactgacgaaatccgtctctgaccgctctagcctgaataaattactgaccagcggtcaacggcagctgctgttgtgcgagaccctgactgagacagtgtacggggatcggggacagctgatcaaaagtaaagagcgtcgtgtgttccttctcaacgacatgctggtgtgtgccaatatcaactttaaaggtcagttagagatctcttctctcgtgccattaggaccgaaatacgtggtgaaatggaacacggcgcttccccaggttcaggtggtggaagttgggcaagatggaggaacctacgataaggacaacgttctcatccaacactctggtgcgaaaaaggccagcgcttctggacaggctcagaacaaggtatacctgggtccgcctaggctgtttcaggagttacaggatctgcagaaagatttggctgtggttgagcaaattacattattaatttctactctccacggcacatatcagaaccttaatatgactgttgcccaagactggtgtctggctctgcagagacttatgcgtgtaaaggaagaagagatccattcagctaataagtgccgcctgcggctattgctgcccggaaaacccgacaagtcgggaagacctatatcatttatggtcgtttttatcactccaaatcccctgagtaagatttcctgggtgaatcggctccacttggcaaagattgggttgcgggaagaaaatcagcccggatggctgtgccccgatgaggataagaagtcaaaggccccattttggtgccctatcctagcctgctgtattcccgctttctcatctagagccctgagtctgcagctgggagctctggtgcactctccagtgaactgccctctgcttggtttctctgccgtgagcactagcctgccacaaggctatctgtgggtgggaggcggtcaagagggcgcagggggacaggttgagatcttcagccttaatcggccatcccctcggaccgtcaagagcttccccctcgccgcacctgttctttgcatggaatacatccccgagctagaagaagaggctgaatctagggacgaaagtcctactgttgcagatccctcggcaaccgtccaccctacaatctgccttggtctgcaggatggaagtatcctgttgtattcctctgtagacactgggacacaatgtctggtcagttgcagatctccaggcctgcaacctgtgctctgtttacgacatagtcctttccaccttctggctggcttgcaggacggaaccttagccgcatacccaaggacatctggcggagtgctttgggacctggagagccccccagtttgtctcacagttgggccaggcccagtgcgtactcttctgtctctggaagacgctgtgtgggccagttgtggtccatgggtgaccgtcctagaagccacaactttgcagccccaacaatcttttgaagctcaccaggatgaagcagtctcggttacacacatggtaaaagccggttcaggagtttggatggccttcagctcaggcaccagtatccggctgtttcacaccgagacccttgagcacctccaggagatcaatatagcaaccagaacaactttcctcctgcccggtcagaaacatctctgtgtaacttcgctgctaatatgtcagggactcttgtgggtcggcaccgaccagggagttattgtcctgctgcctgttccgaggttggaggggatcccaaagatcacagggaagggtatggtgtccctcaacggtcactgtggccctgtggccttcctggctgtggctacctctattctcgccccagatatcctgcgctctgatcaagaagaggccgaggggcctagagccgaggaagacaaaccagatgggcaggctcatgagccaatgccggactctcacgtcggcagggagctgaccaggaaaaaggggatactgttgcagtacagactaagatccactgcacatctgccagggccactgctctcaatgcgggagcccgcacctgctgatggtgccgcattggagcacagcgaggaggacggaagcatttacgaaatggctgatgaccctgacatttgggtgaggtctaggccctgcgccagagacgctcaccgtaaagagatatgtagtgtggctatcatcagcgggggacaggggtaccgaaactttggctccgccctaggatcttcaggcaggcaggccccatgcggagaaactgattccacgctcttaatctggcaagtgccactgatgttgtag

SEQ ID NO: 238784 - DNA, 3840 bp, synthetic construct
  misc_feature 1..3840: note = Description of Artificial Sequence: Synthetic coding sequence
  source 1..3840: mol_type = other DNA
atggcttctagcaatcctccccctcagcctgctatcggtgaccaattggttccaggggtacccggacccagctctgaagctgaggatgaccccggagaggcttttgaattcgacgacagcgacgatgaagaggatacctcagcagcgttgggagtgcctagcctcgcccctgagcgggataccgacccacctcttatccacctcgacagtatcccagttaccgacccagatcctgccgcagcgccacccggaaccggggtgcccgcatgggtgagcaacggagatgcggctgatgcagccttctccggggctcgccattcctcttggaaacgtaaatcatctagacggatagaccggtttacatttcccgcattggaggaggatgtgatttatgatgatgtgccatgcgaatctcctgacgcccaccagcctggcgcagagcggaatctgctctacgaggatgcccatagagcgggagccccacgccaggccgaagatctgggatggagcagctccgaattcgagtcctacagtgaggactctggagaagaagccaaaccagaggtagaagtcgagccggcaaagcatcgggtatcctttcagcctaagttgtctcctgatttgacccgcctgaaggagcgatatgctcggacaaagcgggatattctggctttacgagttggaggaagagacatgcaggaactgaaacacaagtacgactgtaagatgacccagcttatgaaggctgctaagtctggtactaaagatggactggagaagactcgcatggccgtaatgagaaaggtgagttttctacaccggaaggatgtgctaggggactcagaggaggaggatatgggtctcctggaggtgtctgtgagcgacatcaagccacctgcgccagagttggggcctatgcccgaggggcttagtccccagcaggtcgtgaggcggcacatccttgggagcatcgttcagtccgagggctcctacgtagaatcactgaagaggatcttgcaggactacaggaacccattgatggaaatggagccgaaagcactctcagcccgaaaatgccaggtagtgtttttcagagtgaaggaaatacttcattgccactccatgttccagattgcactgagtagccgcgtggctgaatgggactccactgagaagatcggagatctctttgtagcatctttctctaaaagcatggtcctggacgtttatagtgactatgtgaataatttcacaagcgccatgtccatcatcaagaaggcttgtctgacaaaacctgcatttctggaatttctgaagagaaggcaggtgtgctctccagatcgagtaactctttacggtctaatggtcaagccaattcagcggttcccccagttcatcctactcttgcaggacatgctaaagaatacacccaggggccacccagatcggttgagcctgcagctcgccctgaccgagctggaaaccctggcagaaaaactgaacgaacagaaacgattagccgaccaggtggctgaaattcaacaattgactaagtctgtaagcgatcggtccagcctgaataaactgctgacaagcgggcagcggcagcttctactgtgtgaaacgttaacggagacagtgtacggggataggggccagttaatcaaatctaaggagcgtcgagtgtttctcctgaacgacatgttggtctgcgccaatattaattttaagccagccaatcacaggggtcagctggaaatttcttccctagttcccctaggcccaaaatacgtggtgaagtggaacaccgccctccctcaggtgcaggtagtagaagtcggacaggatggagggacatatgacaaagacaatgttttaatacaacactctggtgctaagaaggcttcagccagtggccaggcccagaacaaagtctacctgggaccacctcgattattccaagaactccaggaccttcagaaggacctcgctgttgtggagcaaatcacactgctgatcagtacactacacgggacttatcagaacctcaacatgacggtagctcaggactggtgcctggccctgcagagattgatgagagtgaaggaagaagaaattcactcggcaaataaatgccgcctgaggctcttactaccaggaaaacccgacaagagtgggagacccataagtttcatggtggtgttcatcacccctaaccccctttctaagatctcttgggtaaatcggctccatctggccaaaattgggctgagagaggaaaatcagccagggtggttatgccctgacgaagacaaaaagagtaaggcccctttctggtgtcctattctggcttgctgcatcccagcctttagcagccgggcacttagtctccagctgggtgccctggtccactctccggtaaattgccccctgctgggtttttccgccgtctcaacctcactgcctcaggggtacctgtgggtaggcggaggacaggagggcgctggagggcaggtcgaaattttctctctaaatagaccatcaccgagaacggtgaaatccttccccctggcggctcctgtgctgtgcatggagtacatcccggaacttgaagaggaagcagagagtcgggacgaatcccctaccgtggccgatccatccgccaccgtacatccaacaatttgcctgggccttcaggatggatcaatcctcctgtacagctcagtggatacaggcacacaatgtctggtgtcttgtcgcagcccgggtctgcaaccagtactttgtcttaggcactcccctttccatttgctggccggtttgcaagacggcacactagccgcttatcccagaactagcggcggtgttctttgggacctggaaagccccccagtgtgtcttacagtaggtcccggacctgtgagaactttgttatccctagaggacgcagtgtgggctagttgtggcccatgggtgaccgtccttgaggccaccactctacagccccagcagtccttcgaggctcatcaagacgaagccgtgtcagtaacacacatggttaaggcgggaagcggggtatggatggctttctcaagtgggacatccatcaggttgtttcataccgaaacactcgagcatttacaggagatcaacattgctacacgtacaaccttcctgctgccagggcagaagcatctgtgtgtcacctctctccttatctgtcagggattgctgtgggtgggtactgatcagggagtaatcgtcctactgcctgtgcctaggttggaaggaatacctaaaatcactggaaaggggatggtttctttgaacggccactgcggaccagttgcttttctggctgtggccacctcaatcctggcgccagacattcttagaagtgaccaggaggaggcagagggacccagggctgaagaagacaaacccgatggacaagctcatgaacccatgcctgactctcatgtgggcagagagcttaccaggaaaaaaggcattcttttacagtaccggttacggagtacagcccatctgcctgggcctctgctgtcaatgcgcgaaccagctcccgctgacggggctgcgttggaacactcagaagaagatggttcaatttatgagatggcagatgacccagacatttgggtcaggagtcgcccatgcgcgagagatgctcatcggaaggagatttgctcagtcgccataatttctgggggacagggctataggaacttcggctccgctctgggaagctctgggaggcaggccccttgtggcgaaactgactccaccctcctgatttggcaggtgcccctgatgctttag

SEQ ID NO: 238785 - DNA, 3159 bp, synthetic construct
  misc_feature 1..3159: note = Description of Artificial Sequence: Synthetic coding sequence
  source 1..3159: mol_type = other DNA
atgctgcccagctccagctgggggaaacgaaagctaagaggacggctaggctgggtccggagtgatgcgcgtggagttatgtgggccaggcaggaagggttgcatcatccccacccccacgctgtaatcagatgtccaagctcctcctcgtcctccgtatcctgtagcggggacagtgaagaggaagatatgggactgctcgaggtttcagtttccgatattaagccaccagcaccagagcttggccctatgccggagggcctgtccccccagcaggtggtgagaagacacatcctaggctccattgttcaatcagagggctcctacgtcgagtccctgaaacgtattctgcaagattatcgaaatcctctgatggagatggaacctaaagctctaagcgcacgcaagtgtcaggtggtgttttttagggtgaaagagattctgcattgccattctatgttccagattgccctcagttctagggtcgccgagtgggattcgacagaaaagataggagacctgtttgtggcctcattttctaaaagcatggtgctcgacgtttactctgactatgtgaataattttacaagcgcaatgtccattattaagaaagcttgtctcaccaaacccgctttcctggaatttctaaaaaggagacaagtatgttcgccagacagggttacactatacggactaatggtgaaaccgattcagaggtttccccaatttatcctgctcttacaggatatgctgaaaaacacgcccaggggacatccggaccgactgtctctccaactggccctgaccgagcttgagaccctggctgagaaacttaacgagcagaagagactcgcagaccaggtggctgaaatccagcagcttaccaagtccgtcagtgatagatcatcgttaaataagctgctgacttcgggtcagcggcagcttcttttatgtgaaaccctcaccgagactgtctacggagataggggccagctcatcaagtctaaggagcgcagagtattcctgctcaacgacatgctcgtctgcgctaacataaatttcaaagggcaattggagatcagcagcctggtgccactcgggccaaagtatgttgttaagtggaataccgccctgccgcaggtgcaggtcgtggaagtagggcaggacggcggaacgtacgataaggataatgttcttattcagcacagcggggcaaagaaggcttccgctagcggacaagcgcaaaacaaggtctatctgggtccccctagactgtttcaagaacttcaggacctccagaaggatttggccgtcgtcgaacaaatcactctgcttattagcactctgcatgggacttaccaaaatcttaatatgaccgttgctcaggattggtgcctggccctgcagagactcatgcgggtaaaagaagaggagattcattcggccaataaatgtaggctgagactgcttttaccagggaaacccgataagagtgggaggcccatctcattcatggtggtgtttataacaccgaacccactttccaaaatctcctgggtcaataggctacacctcgctaagatagggttaagagaagagaaccagcccggatggttatgcccagatgaggataagaagtctaaggctccgttctggtgccctatactggcctgctgcatacctgcatttagtagtagggccctgtctctgcagctgggtgcattagttcacagtccagtcaactgtcccttgctcggcttctctgcagtgagcacttcactgcctcaaggctacttatgggtcggagggggacaggaaggtgcaggcggacaggtggaaattttctctctcaatcgcccaagcccacgaaccgtgaagtccttccccctggctgcccctgtgctgtgcatggagtacattcccgagctagaggaggaggccgaaagccgggatgagtctccaaccgtggcagacccgtcggctacggtccatcctaccatttgtctggggctgcaggacggttccattcttctgtattctagtgttgataccggcactcagtgtctcgtatcttgtaggtctcccggacttcagcctgtgctgtgtctccgccattccccatttcacctgctcgcgggtctgcaagacggcactctggcagcttatccgaggacctcaggcggagtgctttgggatttggagagtccgccagtatgtcttacagtcggtcctgggccagtgagaacgttactttcactggaggatgccgtgtgggcgtcttgcgggccatgggttacggtcctcgaggcgactactcttcagccccagcagagctttgaagcccaccaggacgaggctgtgtctgtcacacacatggtgaaggctggcagcggagtgtggatggcattcagttccgggacctcaataaggctcttccacacagagaccctcgagcatctgcaggaaattaatatcgctactagaaccacgttcctgcttcccggacagaaacatctgtgcgtgacctcactcttgatctgccaagggctgctgtgggtaggaacagaccagggggtgatcgtcctgcttccggttccgcgactcgaagggatccctaagatcactggcaaggggatggtttcactcaatggacactgcggccctgtagcttttctcgcagtcgccactagcatattagccccagatattctgcggtctgatcaggaggaagccgaagggcctagagctgaggaagacaaaccagacggacaggcacacgaacccatgcctgactcccacgttgggcgagagctgactcgtaagaaaggaatcctgctgcaatatcggcttaggtcaaccgcccatctgcccggtccactgctgtctatgcgagaacctgcccctgccgatggcgctgctctggagcactctgaggaggatggcagcatctacgagatggcggacgaccctgacatatgggtccgcagccgcccttgcgcgcgagacgcacacagaaaggagatttgtagcgttgctattatctccggcggtcagggatacagaaactttggttctgctctgggaagtagcggacgccaagccccttgcggagagaccgacagtaccctgctgatctggcaagtccctcttatgctctag

SEQ ID NO: 238786 - DNA, 3723 bp, synthetic construct
  misc_feature 1..3723: note = Description of Artificial Sequence: Synthetic coding sequence
  source 1..3723: mol_type = other DNA
atggcatcctcaaaccctccgcctcagcctgccataggcgaccagttggtgccgggtgtaccaggccctagtagcgaagccgaagacgatcctggcgaggcattcgaatttgacgactcggacgacgaggaagatacaagtgctgcgctgggcgtgcccagcctggccccagaacgagacacagacccgccactcatccatcttgattcaatcccagttactgaccctgatcccgctgcggctccaccgggaactggagttcctgcttgggtctctaacggggacgcagcggacgcagctttctctggcgctaggcacagttcgtggaagcgaaagagcagtcgcagaatagaccggtttacttttcccgcactggaagaggatgtgatctacgatgatgtcccatgcgaaagccctgacgcccatcagcccggagcggagaggaatctcttgtacgaggatgctcatagagccggagcacctcgacaggccgaggatcttgggtggagctcctcagaatttgagtcatattccgaggattcaggggaagaggcaaaaccagaagtggaggtggagcccgcaaaacatagagtgagctttcaacctaaaatgactcagttgatgaaggccgctaagtccgggactaaggatggcctggagaagacccgcatggcagttatgaggaaagtttcctttttacacaggaaggatgtgcttggggactctgaggaagaagacatgggacttttggaggtctcagtgagcgatatcaagcccccagcccctgaattgggcccaatgcctgagggtctgtcaccccagcaggtggtcagacgccacatactgggctccatcgtgcaaagtgaaggtagttacgtggaatctctaaaaaggatactgcaggactatagaaacccgctgatggagatggaacccaaggccctgagtgctcgaaagtgtcaggtcgtgttctttagggtaaaggagatcctgcattgccattctatgttccagattgccctgtccagcagggtggccgaatgggattctactgagaagatcggggatctttttgtggcctcgttttcgaagtcgatggtgcttgacgtgtacagcgactatgtgaacaacttcacttctgcaatgtcaattattaagaaagcatgcctaacaaaaccagcttttcttgagtttctgaagcgcagacaggtgtgctcgcctgatcgagtgaccctgtacggcttgatggtgaagcctatccagcggttcccgcagttcatccttctgctgcaggatatgctcaagaatacacctagaggacatccagatcgcctgagcctgcagttggcactcaccgaactggagacgctagcggaaaagctcaatgaacagaagcgactggcggaccaggtggccgaaatacaacagctgaccaagagcgtcagcgacaggtcatctttgaacaaattgctgacctcaggacaacgccagttgctactgtgcgaaacccttaccgaaactgtctacggtgataggggccagctgatcaaatcaaaagagagaagggtgttcctgcttaacgatatgcttgtgtgcgcgaatatcaatttcaagcctgccaaccaccgcggtcagctggaaattagttctctggtgccccttggccctaaatatgttgtgaagtggaataccgcactgccacaagtgcaggtggtagaggtggggcaggacggagggacctatgacaaggacaatgtcctcattcaacactccggcgctaagaaggcctctgccagtggccaagcccagaataaagtgtatctcgggccaccgcgactattccaggagttacaagacctgcagaaggacttggctgtggtggaacagatcacacttctcatctccactctccatggaacttaccagaatctgaacatgactgtggctcaggattggtgtttggcactgcaacgtctcatgagggttaaggaagaagagatccattcggccaacaagtgtcgactcagacttctgctaccgggaaagccggacaaaagcggccgtcctatctctttcatggtcgtcttcataactcctaatccgctgtcgaaaatttcctgggtcaacagattgcaccttgccaagatcggtttgcgggaagagaaccagcctggctggctttgccccgatgaagacaagaaatccaaggcacctttttggtgcccaattttagcctgttgcattcctgctttttcgtccagggcgttgtccttgcagttgggagctttagtgcactctcctgttaattgccctctcctcgggtttagtgcggtcagtacttccctcccgcagggttatctgtgggtgggcggaggccaggagggggcaggtggccaagttgaaatcttttcgctcaatcggcctagccccaggaccgtgaaatcttttccccttgcggctcccgtcctttgtatggagtatattcctgagctcgaggaggaggccgaatcaagggacgaaagtcctaccgttgctgacccatctgccaccgttcatcccaccatttgcctggggttacaggacggctccatactcctctacagttcggtggacacgggaacccaatgtctggtgtcgtgcaggtcgccaggattacagcctgttttatgcctaaggcacagtcctttccatctcctggcagggctacaggatggaactctcgcggcatatcccaggacctctggtggcgtgttgtgggatttagaatctccaccggtgtgcctcacagtaggcccagggccagtccggaccctgctgagcctagaagacgcagtctgggccagttgcggcccatgggttaccgtgctggaggcgacaactttgcaacctcagcagtccttcgaggcccatcaggatgaagccgtttccgttacccacatggtcaaggcaggcagcggggtgtggatggcattctcgtctggcacctccattaggctgttccacacggaaacccttgagcatttacaagagattaacatagccacaagaaccacatttcttctgcccggtcagaagcacttgtgcgttacatctttgcttatatgccaggggctgctgtgggttggcacagatcagggggtcattgtgttgctgccagtgccccgactcgagggtatcccaaaaattactgggaaagggatggtgtcactgaacggccattgcggccctgttgcctttctggcagtggcgacttcaatcctcgcacctgatatactgcggagtgaccaggaggaagccgagggccctcgagctgaggaagataaacccgatggtcaagcccatgagcccatgccagacagccacgtgggcagagagctcacaagaaagaaaggcattctgctgcagtacaggctgcgttcaacagcccaccttcccggaccactactttccatgagggagcccgctcccgctgacggtgccgcactggagcatagtgaggaggacggctctatctatgagatggccgatgacccagacatttgggttagaagtcgcccatgcgctagagacgcccaccggaaagagatctgctcggtggcaatcattagtggtgggcaaggctacaggaactttggcagtgcgctcggttccagcggcagacaagctccgtgtggtgaaaccgactccacacttctgatttggcaggtcccacttatgctttag

SEQ ID NO: 238787 - DNA, 1467 bp, synthetic construct
  misc_feature 1..1467: note = Description of Artificial Sequence: Synthetic coding sequence
  source 1..1467: mol_type = other DNA
atgacacagctgatgaaggccgcaaagtctggaacaaaggacggcttggagaaaacgcgtatggccgttatgcggaaggtaagcttcctccacaggaaagatgttctgggggactctgaggaggaagacatgggcctgttggaagtgtcagtgagtgatatcaagccacccgcacccgaacttggtccaatgccggaaggactctcccctcaacaggtggtaagaaggcacatcctaggctcaatcgtgcagtcagaaggatcgtacgttgaaagcctgaagagaatcctccaggactataggaatccactcatggagatggagcccaaggccctgtccgcaagaaaatgccaggtggtgtttttccgtgtcaaggagatcttacactgtcactctatgttccagattgccctcagcagccgcgtcgccgagtgggattcaaccgagaagattggtgaccttttcgtcgcatccttttccaagtcaatggtgctcgacgtgtacagcgactacgtgaataatttcacgagcgcaatgtccatcatcaagaaggcctgcctgactaagccagctttcctggaatttctgaagaggcgccaggtgtgttctcccgatagagttaccttatacggtctgatggtaaaacccatccagcgcttcccccagtttatcctgctactacaggatatgctgaaaaacactccacgtgggcacccagatcgcctgagcttgcagctggcgctaacggaactagagacccttgcggagaagttgaacgagcagaagagattggccgatcaagtagccgagatccagcagctgactaagtcggtcagcgatcgatcttccctaaacaagctgttaacctcaggccaacgccagctgctgctctgcgagactctcacggagacagtgtatggcgataggggccaacttattaaatccaaggaaaggcgagtattcttactgaacgacatgctggtctgcgcaaacatcaactttaaacccgctaaccaccgaggccaattagagatatcgtctctcgtgcccctgggccctaagtacgtggtaaagtggaatacagctctacctcaggtgcaggtcgtggaagtcggacaagatggaggtacatatgataaggacaatgttcttattcagcactccggcgcaaaaaaggcatccgccagcgggcaggcccagaataaggtctatctaggcccacctcggttatttcaggaactccaagatctacagaaagacttggcagtcgtagaacagatcacacttttaatttctactctccatgggacataccagaacctgaatatgacagttgcccaagactggtgtctggccctgcagcgcctcatgcgtgtgaaggaggaagaaatccactccgccaataagtgtcggcttagactgcttctgcccggaaaaccagataaaggcacgtggtcagacatgtag

SEQ ID NO: 238788 - DNA, 3204 bp, synthetic construct
  misc_feature 1..3204: note = Description of Artificial Sequence: Synthetic coding sequence
  source 1..3204: mol_type = other DNA
atggcgtcgagcaatccaccgccacagcccgctatcggggatcagctggtaccgggagtgcccggtccatcttcagaggccgaagacgacccaggagaggcctttgagtttgacgactccgatgatgaagaggacactagtgccgctctgggagtgccatccctggctcccgaacgcgacacagatcccccattaattcacttggactcaattcctgtgactgacccagacccggctgcggctccccctggaaccggggtgcccgcttgggtgagcaacggagacgcggcagacgccgctttctccggcgcaagacacagttcctggaaacgaaagtctagcagaaggatcgaccgattcactttcccagccctagaggaggatgtaatatacgacgacgtaccttgcgaatcccccgatgctcaccagcctggcgctgagagaaatcttctgtacgaggatgctcatcgtgccggagctccaaggcaagctgaggatcttggctggtcttcctccgagttcgaatcttattctgaagatagcggagaggaggcaaagccggaagttgaggtagagccagcaaagcaccgggtcagctttcagccaaagctatcacccgacctgactaggcttaaggagcgctatgccaggacaaaacgggacattttggctctgagggtaggaggtcgggatatgcaggaactgaagcacaagtatgactgcaagatgacccagctgatgaaagccgcaaagagtggcactaaagatgggcttgagaaaaccagaatggctgtgatgcgcaaggtgagctttttacatagaaaagacgtgctcggggactcagaagaagaagatatggggctactggaagtctcagtatcagacataaaaccccctgccccagagcttggcccaatgccggaaggcctctccccccagcaagttgtccggaggcatatcctcggatcaattgtacaaagcgaggggtcctacgtagaatccttgaaacgaattttacaggattaccggaaccctctcatggagatggaaccaaaagccctgagcgcccgtaagtgtcaggtcgtgttctttagggtaaaggaaattttgcactgtcacagtatgttccagattgctctgagttcaagagtggccgaatgggattcgacagagaagatcggcgacctgtttgtagcatctttcagcaagtcgatggttctggatgtgtattccgattatgttaacaatttcacttccgcaatgtctatcataaaaaaggcttgccttactaaacccgctttcctggaatttttaaagcgccgacaggtatgttctcccgatagagttaccctgtatgggcttatggtaaaacctatccagcggttccctcaatttattttgcttttacaggatatgctcaagaacacaccaagaggccatccggacagactgtccctgcagctcgcgctgactgaactggaaactctggcagagaagctgaatgaacagaaacgcctggcagaccaggtggcagaaatccagcagctgacaaaaagcgtgtcagatcggagcagcctgaacaagctgctgacctcaggtcaacggcagctcttactatgcgagacacttaccgagacagtttatggagacaggggccagctgatcaaaagtaaagagaggcgtgtgtttctgctaaacgacatgcttgtatgcgccaacatcaattttaagggccaactcgaaatcagctccctggtgccactggggcctaagtatgtggtcaaatggaatactgcgctgcctcaggtccaagtggttgaggtgggccaggacggcggaacttatgacaaggacaacgtcctcatccagcactctggagccaaaaaggcatctgcctcaggtcaagcgcaaaacaaggtgtaccttggccctccacgtctgttccaggagttacaggatctccagaaagacttggccgtggtagagcaaatcacactcctgatctctacactccacgggacataccaaaaccttaatatgacagtggcccaagactggtgcctcgccctgcagcgacttatgcgtgttaaagaggaggagatccacagcgcgaacaagtgtcggctaaggctcctccttcctggcaaacctgacaaaagtgggaggcctatctcgtttatggtagtcttcataacaccgaatccacttagcaaaataagctgggtgaatcgcctgcacctggcaaagattggcctcagagaagagaatcaacctgggtggttgtgtccggatgaagacaaaaaatccaaagcccctttctggtgtcctatattggcctgctgtatcccagctttcagcagccgtgctctctctttgcagttaggtgctcttgtgcactcccccgttaactgtcccttgctcggatttagcgccgtctctaccagcttgccacagggatacctctgggttggaggagggcaagagggagctggcggtcaggtggaaatattctcactgaatcgcccaagccccagaactgtgaagtccttccctttggccgcacccgtgttatgcatggaatacatcccagagttagaggaggaggccgagtctcgggatgagtctcccactgttgccgatccgtcagcaactgtacacccaacaatctgccttggactccaggacgggagcattctgttatatagctctgtagacacgggaacccagtgcctggtgtcatgccgatctcctggcctgcagcctgttttatgtctgcgtcacagcccttttcacctattagctggactccaggacggaaccctagccgcatatcccaggacaagcggtggcgtgctgtgggacctcgaaagtcccccagtgtgtctgactgtgggaccaggtccagtgcgcaccctattgagcctcgaggatgctgtttgggcatcttgtggaccctgggtgactgtgctggaagcaacgaccctacagcctcagcaatcctttgaagctcaccaagatgaagccgtgagcgtgacacacatggtcaaggcagggtccggcgtttggatggctttttccagtggaacaagtattaggctgtttcacacagaaacccttgaacacctgcaggaaataaacatcgcaacacgcaccaccttcttgctccctgacaggtcacttattaaatgttctcctcgggcttag

SEQ ID NO: 238789 - DNA, 3723 bp, synthetic construct
  misc_feature 1..3723: note = Description of Artificial Sequence: Synthetic coding sequence
  source 1..3723: mol_type = other DNA
atggcttctagtaatccgccaccacagcctgcgatcggagatcagttggtcccgggtgttcctggcccatcctctgaggccgaggatgatccaggcgaggcattcgagttcgacgactctgacgatgaagaggatacctccgccgctcttggcgtccctagcctcgccccagaaagggatacagatccgcctttaattcatctcgactcgatcccagtaaccgatcccgatcccgctgccgctccacctggaacaggagtgccagcttgggtgtcaaacggcgacgccgcagacgccgcattctctggggctcgccatagttcatggaagcgcaagtcttcccggaggatcgaccgctttacattccccgctttggaggaggatgttatctatgatgacgtcccctgcgaaagtcccgacgcccaccaaccaggggcagagagaaatctgctgtacgaagacgctcacagagcaggggctccccgtcaggccgaggacctcggctggtcaagctccgaattcgaatcctactctgaagattccggagaggaagcgaagcccgaagtggaggtcgagccggcaaaacatcgggttagcttccagccaaaaatgacacagctgatgaaagctgccaagagcgggacgaaggacgggcttgaaaagacacgcatggctgtgatgcggaaggtctcattccttcataggaaagacgtcctcggggatagcgaggaggaagatatggggctcctcgaagtgtcagtgtccgacattaagccaccagccccagaacttggtcccatgcccgagggcctgtctccccagcaggtagtgagacggcatattctcgggtcaatcgtccagtccgagggttcttacgtcgaatcacttaagaggatcctacaagattacaggaacccattgatggagatggagcccaaagccctgtctgcacgcaaatgtcaagtggtgtttttcagagtcaaggaaatcctgcattgtcactctatgttccagatcgctttaagctctagggtagccgaatgggactctactgagaaaattggtgacctctttgtggctagctttagcaaatctatggtcctcgatgtgtactccgattatgtgaataattttacatccgctatgagcattatcaaaaaggcctgcttaacgaaacccgcattcctggagttcttgaagcgtagacaagtctgctcgcctgaccgtgtcacactctacggcctgatggtgaaacctattcaacgcttccctcagttcatcctgctgcttcaagatatgttgaaaaacacacctagaggccaccctgatcgcctaagtcttcagctggctctcacagaactagagacactcgcagagaaactgaatgagcaaaaacggttggcagaccaggtcgccgaaatacagcaactgactaagtctgtaagcgatagatcctcattgaacaagcttttgacttctggccagagacagttactcctatgcgagaccctgaccgaaaccgtctacggggacaggggccaactgattaagtccaaggaacggcgtgtgttcttgctgaacgacatgctggtctgcgctaacatcaattttaagccggcaaatcacagaggccagctggagatctcctctctggtcccgcttggcccaaaatacgtcgtcaagtggaatactgctttgccacaggtccaggtcgtggaagtaggccaggacggaggaacctacgataaggataacgtcttaatacagcattccggagccaaaaaagcctctgcctccgggcaggctcagaacaaggtctacctgggaccaccccgtctgttccaggagcttcaggacctgcagaaggacttagctgtcgttgaacagatcactttgctgatatcaaccctgcatggcacctaccagaaccttaatatgacagtggcccaagactggtgtttagccctgcaacgtctgatgagagtgaaagaggaagaaatacactccgcgaacaagtgccgcctgagactgttgctacccggtaagcctgataaatcaggcaggcctatttcttttatggtcgtatttattacacccaatcctctcagcaaaatctcttgggtgaatcggctgcacctggccaagatcggattacgggaggagaaccagcctggctggttgtgtcccgatgaggataagaaatctaaggcacctttctggtgtccaatcttggcctgttgtatcccagcgttcagctctagagctctttcactccaactcggggctctggtacactctccggttaactgcccactgcttggattcagtgctgtgagtacttcgcttccccaggggtacctttgggttggagggggtcaggagggggcagggggtcaggtcgagatctttagcctgaatcgcccaagccctaggacagtgaagtcattcccattggccgcaccagtcctgtgtatggagtacattccagagctggaggaagaagctgagtcgcgtgatgaatccccaacagtagcggatcccagcgccaccgtgcaccctaccatctgcttaggtctccaagacggatcgattctgctctactcttccgtggatacaggaacacagtgcctcgtgtcctgcaggtccccaggattacagcccgtgttatgcctgcggcacagcccattccacctcctcgctggccttcaggatggtacactggccgcatacccaaggactagtgggggagtgctgtgggatcttgagtctccaccggtgtgtctgaccgttgggccaggacctgtgcgcacgctactgtccctggaggacgctgtttgggccagctgcggcccatgggtcaccgtgcttgaagcaactaccctgcaaccgcagcagagctttgaagcccatcaggacgaggcggttagcgtgactcacatggtcaaggccggaagcggagtgtggatggcattctctagcggcacaagcatccgcctcttccacaccgaaaccctagagcacctgcaggagataaatatcgccacccgaaccacttttctgctcccaggccaaaagcacctgtgtgtcacaagcctgctcatttgtcaggggttattgtgggtggggaccgatcagggcgtgatagtcctgttgccagtcccacggctggagggcattcccaagattacaggcaaggggatggtttctctcaacggacactgtggacctgtcgcctttctcgcagtggccaccagcatactcgccccagacatcctcagatccgatcaggaggaggccgagggcccaagggccgaagaggacaaaccggacggacaggctcacgagcctatgccagatagtcacgttggaagggagttaactcgtaagaaaggcatactgctgcagtatagactgcgatccaccgcccatttgcccggtccactcttgagtatgcgagagcctgccccagctgacggcgctgctcttgagcatagtgaagaggatgggagcatctacgaaatggccgacgatcccgacatttgggtgaggtcaaggccatgcgcacgggacgcacatcgaaaggagatctgctccgtggccataatcagcggcggacaaggttatcggaactttggaagtgctttggggagcagcgggaggcaggcgccttgcggtgagacagattcaaccctactaatttggcaggtcccccttatgctgtag

SEQ ID NO: 238790 - DNA, 3129 bp, synthetic construct
  misc_feature 1..3129: note = Description of Artificial Sequence: Synthetic coding sequence
  source 1..3129: mol_type = other DNA
atgctcccctcgtcaagctggggcaaacgcaaactgaggggaaggctggggtgggttagatcagatgcacgaggggtgatgtgggcaagacaggaaggtctgcaccatcctcacccccacgccgtaattcggtgtccgagtagtagtagctcgagcgtctcttgcagcggagattcagaggaagaagacatgggacttctcgaagtaagcgtgagtgacataaaaccacctgcacctgagctagggccaatgccagaagggctttcccctcaacaggtggttaggcgccacattctggggtccatcgtgcagtccgagggctcatatgtcgaatcccttaaaagaattctgcaggattatagaaaccccctgatggaaatggaaccaaaggcgttgagcgccagaaaatgccaggtcgtgttttttagggtgaaggaaatcttacattgtcactccatgttccagatcgctctcagttcccgtgtcgccgaatgggattcgacagaaaagatcggcgacctctttgtggcatccttcagtaagagcatggttctggacgtgtacagcgactatgtgaacaacttcacaagtgcgatgagcataattaagaaagcctgtctcaccaaaccagcatttcttgagttcctgaaaaggcgccaggtgtgttctcccgacagagtaaccctctatgggcttatggtgaaacccattcaacggtttccacagttcattctccttctgcaggacatgcttaagaacaccccacggggtcacccagacagattgtctctccagctggctctgacagaactggagactctcgctgaaaagctgaatgagcagaagaggctcgccgatcaggttgccgagattcaacaactcacgaaatccgtcagtgacaggtcaagtctcaacaagttgctcacttccggacagagacagctgctgctgtgcgagacactgacagagaccgtgtatggagatcgagggcaactcatcaaatccaaagagagacgggtgttcttgttaaatgatatgctggtctgtgctaacatcaacttcaaggggcagctggagatcagctccttggtgccgctgggcccaaagtacgtggttaaatggaatacagccctaccccaagttcaggttgtcgaagtgggccaggatggcggtacctacgacaaagacaatgtccttatacaacattcgggcgcaaagaaagccagtgcatcgggccaagcacagaacaaagtatacctgggcccaccacgcctttttcaggagcttcaggacttgcaaaaggatctggcagtagtggagcagattactctactaatttccaccctgcatggtacttatcagaatctgaacatgaccgtcgcccaggactggtgcctggctctccagcgcttaatgagagtgaaagaagaggagatccactctgcaaacaaatgcagactccgactgttgctccccggtaaaccagacaagtccggcaggcctatctctttcatggttgttttcatcactcctaaccctttgtctaaaatttcatgggttaatcggctgcatctggcaaagatcgggttaagggaggagaaccaacccggatggttatgtcctgacgaggataagaagtccaaggctccattctggtgcccaatcctggcctgctgcatacccgcattttcctcacgcgctttgtcactgcagctcggcgctcttgtccactctcccgttaactgtcctctgctcggattctccgccgttagtacatcactcccccagggttacctgtgggtcggaggcggacaagagggagccggaggacaagtggaaatcttctccctgaatcggccatcacccaggacagttaagtcatttcccctagccgctccagttttatgtatggaatacataccggaactggaagaggaagctgaaagtagggatgagtcaccgacggtggccgatccctctgcgacagtgcatcccacgatttgcctggggctgcaagacggctccattctgctgtactcgtcagttgacacaggcacccaatgtctcgtgtcctgcagatccccaggcctccaacccgtcctgtgcttgcgccactctccttttcatctgctggctggcttacaagatggtactctggcagcttatcctcgcacctcaggcggtgtgctttgggatctggagtccccccctgtgtgcctaactgtcggccctggcccagtcagaactctcctgagcttggaagatgcggtgtgggcgagctgcgggccttgggtaacagtactagaggctaccacgcttcagccccagcagagtttcgaagctcaccaggatgaggctgtgagtgtaacacacatggttaaggctggcagtggggtctggatggctttttccagcggcacttcgatcagactgtttcatacagaaacattggaacacctgcaagaaatcaacattgccactaggaccacgtttctgctgcccggacaaaagcacctctgcgtcaccagcctgctcatttgccaagggttactctgggtcggaaccgaccagggcgtgatcgttttgctccctgttccaaggttggaggggatccccaagatcactggtaagggcatggtctctctcaacgggcactgcggtcctgtggccttcctcgcagtagcaaccagcatactggccccagacatcctccgctctgaccaggaagaggcagaagggcctcgggctgaggaagataagcctgatgggcaagcccacgaaccaatgccagactctcatgtaggccgagaattgactaggaaaaaagggattttgctacagtaccgtctgcgctccactgcgcacctgccagggcctctcctctctatgagggaacctgccccagccgatggagccgcactcgagcacagcgaggaggatggttcaatctacgaaatggctttttttctcaaagccaaaaatactaaaccccataactgcctggcaagccccgtgagcctggtctgggcccttgctggtctacagggttcccatacccctctgctcgagggatgcgtgagagtgtccgtctgcgagtgcgtgggctggtgcgtaaatatctacaagtag

SEQ ID NO: 238791 - DNA, 4577 bp, synthetic construct
  misc_feature 1..4577: note = Description of Artificial Sequence: Synthetic coding sequence
  source 1..4577: mol_type = other DNA
atgtcagggactcagtctaccattacggatcgatttcccctgaagaaacccatcagacacggctctattcttaaccgagagtcacccactgacaaaaagcaaaaggttgaaagaattgcaagccatgacttcgatcccacaggtctggtacagagatgtgtgatcatccagaaagacgacaacggcttcggactcacggtgtccggagacaaccctgtctttgtgcagtccgtgaaagaagacggggcagctatgagggcgggtgttcagacaggcgatcgcatcataaaggtgaacggtactctggtcacacactctaaccacttggaagtggtgaaactaataaagtcagggagctacgtggcactgaccgttcagggcagaccacctggcagcccacaaattcccctcgccgattctgaggtggagccaagtgtcataggccacatgtcgcctatcatgacaagcccacattcacctggagcatcagggaatatggagcggataacctctccagtgttgatgggagaggagaataacgttgtgcacaatcagaaggtggaaatcctccgcaagatgctgcagaaggaacaggaaagattacagctgctacaggaggactacaacagaacccccgcacagaggctcctcaaagaaatccaggaagcaaagaaacacattccgcagctgcaggagcagctctcaaaagccaccggcagcgctcaggatggtgccgtggtaacacctagtcgcccactaggcgatacccttacagtatccgaggccgaaaccgatcctggcgacgtactggggaggacagactgtagctctggggatgcctccagacctagctccgacaatgcggatagccccaagtccggtccgaaggagcgcatttacctggaggaaaaccctgaaaaaagtgagactatccaggacacagatacacaatcattggtcggctctccttccactaggattgctccccacataattggggctgaagacgatgatttcggaactgagcacgaacagatcaatggtcagtgtagctgctttcagagcattgagttgctcaagagcagacctgcgcacctggccgtctttctccatcatgtggtctcccaatttgaccctgcaacactcctttgctatctatatagtgacctatataagcatacaaactctaaggagactaggcgcatcttcttggaatttcaccagttttttttagataggagtgcacatcttaaggttagcgtaccggacgagatgagtgccgatttggagaaacggcgacccgaactcatccctgaagatctacaccggcactatatccaaacgatgcaggaacgtgtgcaccctgaagtgcagcgacacctagaagacttccggcaaaaacggagcatgggtctaacgctggctgaaagcgaactgacaaagctcgacgcggaaagagataaagacagactgaccttagagaaggagcggacatgcgccgaacagattgtggcgaagatcgaagaggtccttatgaccgcccaggcggtggaagaggataagagctctacaatgcagtatgtaatacttatgtacatgaaacatctcggagtcaaagttaaggagcctaggaatctggaacataagaggggaagaatcggctttttgcccaagattaagcaatccatgaagaaagataaggaaggtgaagagaagggtaaacggagaggttttccctccatcctcgggcctccgagacggccttctaggcatgataacagcgctattggcagagccatggagctacagaaagcaagacatcccaaacacctgtcaacacctagtagcgtgtctccagaacctcaggatagcgctaagttacgtcagtccgggcttgccaacgaggggactgacgccggatatctgccggctaattccatgtcgagcgtggcatcaggcgctagcttttcacaagagggaggcaaggagaacgacaccggcagcaaacaggtcggcgaaacctccgcgcctggtgatacactcgatggcactcccagaaccctgaacaccgtcttcgacttccctcccccaccgctcgatcaggtccaagaggaggagtgtgaagtggagcgggtaactgaacacggcactccaaagccattccggaaatttgatagtgttgctttcggagaaagccagtcagaggatgaacagtttgagaacgacttggaaacagatccacccaattggcagcagctggtgagccgggaagtgttactgggcttaaagccttgtgagattaaacggcaggaagtcataaacgaactcttctacaccgaacgagcgcacgtccgcaccctgaaggttctggaccaggtcttctaccagagagtgagtagagagggcatcttgtccccatccgagctgcggaagattttctcaaacttggaagatattttacaactccacatagggcttaacgagcaaatgaaggcggtgagaaagagaaatgaaaccagtgtgattgaccagattggcgaagacctcttgacctggttttctggccctggagaggaaaagttgaaacacgccgctgcgaccttctgcagtaatcaaccatttgccttggagatgatcaagtcccggcagaagaaggactcccggttccaaaccttcgtgcaagacgctgaatctaaccccttgtgccgacgcttgcagctcaaagatatcatccctacccaaatgcagcgcttaaccaagtatcctctccttctggacaatatcgccaagtatacagaatggccgacagagcgcgagaaagttaaaaaggcagctgaccactgccgccagattcttaattacgtaaatcaggccgtgaaggaagccgagaacaaacagcgcctcgaagattaccagagacgcttggatacaagctcactgaaactgtcagagtaccctaatgttgaggagttacgaaacctggatttgactaaacggaaaatgattcatgaaggtcccttggtctggaaggtgaatcgtgacaaaaccatcgacctctacactctgcttctggaggatatcttggtcctcctgcagaaacaagacgaccggctcgttctccggtgccattctaagatcttagcaagcacagccgattccaagcacacattctcccctgtaatcaaactctctacagtgctcgtcagacaggtggccacagacaacaaagcgctgttcgtcatcagcatgagcgacaacggagctcagatctacgaactcgtggcacagaccgtctccgagaaaactgtgtggcaggacctcatctgtcgcatggcggctagcgtcaaggaacagtccacaaaacctatacccctgccgcagagcaccccaggtgaaggggataacgacgaggaggatccttcgaaactgaaagaggagcagcatggaatatctgtcactggcctccagtcacctgatagagacctgggcctggaaagtactctcatctcttccaagccgcaatcacactccctgtcaactagcgggaaaagtgaggtaagggatctgttcgtggctgagcggcagttcgccaaagagcagcatactgatggtactttgaaggaggtgggggaagattaccagatcgctattccagacagtcacttgcctgtgagcgaagaaaggtgggcgctggatgccctgcggaatctcggactccttaagcagttactggttcaacagctggggctgactgagaagagcgtgcaagaggattggcaacacttccctagataccgcacagctagtcagggcccacagacagactccgtcattcagaactccgagaatatcaaggcctatcattccggggagggccacatgccctttagaaccgggaccggagatattgccacctgctattcgccaagaacctccacagaaagttttgcgccacgagattctgtggggttggctccgcaggatagtcaggcaagcaacatcctggtcatggatcacatgatcatgacaccagaaatgcccacaatggagcctgagggaggacttgatgattctggtgagcatttcttcgacgctcgggaggcacatagtgatgagaacccaagcgagggcgatggagcagttaataaggaggagaaggatgtcaacttgcggatttctgggaactatctgatcctggacggctacgatcccgttcaggagtctagcaccgacgaggaggtagcatcttcacttacactacagccaatgaccggtatccctgccgtggagtctacacatcagcagcagcatagcccgcaaaacacacattcagatggagccatcagcccctttactcccgagtttctggtgcagcagcgctggggtgccatggagtactcatgctttgaaattcagtcgccatcaagctgcgcagattctcagagccagattatggagtatatccataaaatcgaggccgacctcgaacacctcaagaaggtggaggaaagctatacaatcctgtgtcagagacttgctggcagcgcacttactgacaagcactccgacaagtccta

SEQ ID NO: 238792 - DNA, 4634 bp, synthetic construct
  misc_feature 1..4634: note = Description of Artificial Sequence: Synthetic coding sequence
  source 1..4634: mol_type = other DNA
atgtctgggacgcaaagcaccattaccgaccggttccctctgaagaagccaattcgacatggctccattttaaatcgggagagccctactgacaagaagcaaaaagtggaacggatcgccagccacgattttgatccaacagattctagttctaagaagacaaaatcgagttccgaggaaagtagatcagaaatctacgggttggtgcaaagatgcgtcattattcagaaggacgataatggattcggtttgacagtcagtggtgacaaccctgtgttcgttcagagtgtgaaagaagatggagcagccatgcgggcaggcgtccagacgggagataggataataaaagtcaacggcacactggtgacccactcaaaccacctggaggtcgtaaagctcattaagagcggtagctatgtggccctcacagttcagggccgaccaccaggctccccccagatccccttggcagacagtgaggtggagcctagcgtgatcgggcatatgagcccaatcatgacttcacctcattcaccgggagcttcaggaaacatggaacgcatcaccagccccgtgctgatgggggaagagaataacgtggttcacaatcagaaagtggaaatccttcgtaaaatgctgcaaaaagaacaggagagactgcagctgctgcaagaggactacaacagaactcctgcgcagagactgctgaaggagatccaggaagcgaaaaaacacattccccagctccaagaacagctgagcaaagctaccggaagcgcacaagacggcgcagtggtaactccatccagacccctgggggatacgctgacagtttctgaggcagagacagaccccggagacgtgctcggccgaactgactgtagcagcggagacgcctcccggccatcgtcagacaatgccgatagcccgaagtccgggccaaaggaaagaatttacttagaagaaaaccctgaaaagagcgagaccattcaagacaccgatacccagagccttgtagggtcgccttcgacccggatcgctccccatataattggggctgaagatgatgatttcggcaccgagcacgagcagatcaacggccagtgtagctgtttccagagtattgagctcctgaagagtagacctgctcatcttgcggtttttctgcatcatgttgtctcacaatttgatcccgctacccttctgtgctacttatattcagatctctacaaacataccaacagcaaggagacaaggagaatttttctggagtttcatcagttttttctggatcggtccgcacatctgaaagtgtccgtgccagatgagatgagtgccgatctggaaaagcgccgaccagagcttatccctgaagacctgcatcggcattacattcaaaccatgcaggagcgtgtacatcccgaagtgcagaggcacttagaggattttcggcagaaacgctccatgggattaaccttagccgagtcagagttgaccaaactggacgcggaaagggataaagataggctcacattggaaaaggagcggacatgtgccgaacagatagttgccaagatcgaggaggtccttatgacagcccaggctgttgaagaggataaaagctctaccatgcagtatgttattctgatgtatatgaaacatttgggagtaaaagtgaaggagccccgtaacctcgagcataaaaggggccgaatcggcttcttaccaaagataaagcagtcaatgaaaaaagataaggagggggaagagaagggcaaaaggcgcggtttcccaagcatcttgggaccaccccgacggcctagccgtcacgacaatagcgccatcggccgagcaatggaactgcagaaagctcgccatcctaagcacctgagcaccccatcctctgtcagtccagaaccacaagattccgctaagctgcgccagtctgggctcgcgaatgagggcactgatgctggctacttgccggctaatagtatgtcgtccgtggccagcggtgcctcctttagtcaggaaggaggcaaggaaaacgacacgggttcaaaacaggtcggtgagacgagtgcacctggggacacactggacggtacccctcggacattaaatacagtgtttgatttcccgcctccccctctcgaccaggtgcaggaagaagagtgtgaggtcgaacgagtgaccgagcatggcacgcccaaaccttttaggaaatttgactctgtggcattcggagagagccagtccgaggacgaacagtttgaaaatgacctggagacggacccacctaactggcagcagctcgtaagtagggaggtgttgctcgggctgaagccttgtgagattaagcggcaggaagtgatcaatgagcttttttacaccgaaagggctcatgtgcgcacgctgaaggtcttagatcaggtgttttatcagcgcgtatccagagagggcattctgagcccttcagagctgaggaagatattctctaacttagaggacatcctgcaattgcacatcggcctcaacgagcaaatgaaggctgttaggaaaaggaatgaaactagtgtgatcgatcaaattggagaagaccttctgacatggttttccggacctggcgaggaaaaactcaagcacgctgctgcaactttttgtagcaatcagcccttcgctctcgaaatgattaagagccgccaaaagaaagattcaagattccagacattcgtccaagatgctgaaagtaaccccctatgtcggaggctgcagctcaaggatatcattcccacccagatgcagaggctgacaaaataccctctcctgctcgataatattgcaaagtacaccgaatggccgactgagcgcgagaaagttaaaaaagctgcggaccactgccgtcaaatcctgaactatgtcaatcaggctgtaaaagaagccgagaataaacaacggttagaggattatcaaagaagactggatacatcatccttaaaactcagtgagtacccaaatgttgaggagttaaggaacctggacctcactaagaggaagatgattcacgaagggcctctggtgtggaaagtaaatcgcgacaaaactattgacctgtacaccctgctgctggaagatattctcgttctgctccaaaagcaggacgacaggctcgtgctgcgatgccattcaaagattctggccagtactgccgactcgaaacacacatttagtccagtgatcaaactcagtaccgtcctggtgcgtcaggtggctacagataataaagccttattcgtcatttctatgagcgataatggggcacaaatctacgagctcgtagcccagacggtgagcgaaaagacagtgtggcaggacctcatctgccgaatggcagctagcgttaaagaacaatctactaagccaatcccactgcctcagtcgacccctggtgagggcgataatgacgaggaagacccgtcaaagctgaaagaggaacagcacggcatttcagtgacagggctccagtctccagatagagatctcggcctagagagtacgctgatttcctccaagccacaaagccactcattatccacatctggtaaaagcgaggttcgcgacctttttgtagccgaacgccaatttgcaaaggaacaacacaccgacggcactctgaaggaggtgggggaggactaccagattgcaattccagattctcacctgccagtgagcgaagaaaggtgggccttggacgctcttcgcaacctagggctgctaaagcaactgctcgtacagcaattgggattgacggaaaagagcgttcaggaagactggcaacattttcctaggtacaggaccgcatcccaggggccacagactgattctgtgattcagaactcggagaacataaaggcttaccatagcggggagggacacatgccgttccgtacgggcacaggagacatcgcaacctgttatagcccacgcacttcaacagaaagtttcgcaccgagggattccgttggattggcaccgcaagacagccaagcctcaaacatcctggtgatggaccacatgattatgacccctgagatgccaaccatggaacctgagggcggactggatgattcgggggaacacttcttcgatgctcgggaggcccattcggatgagaacccgagtgaaggggacggggcagtcaataaagaggagaaggacgtgaacctgcggatctccggaaattatcttatcctcgacggatatgatcctgttcaggagtcatctaccgacgaggaggtcgcctcctccttgaccctccaacctatgactggaataccagctgtcgagagcacccaccagcagcagcatagccctcagaatacccattcagacggagcgatctccccattcacaccggagttcctcgtccagcagaggtggggggcaatggagtactcctgctttgagattcagtcaccatcttcatgcgcagactcacagtcccagatcatggaatatattcacaagattgaggccgacctggagcatctgaaaaaagtggaggagagttacacaatactgtgccagcgactggcgggatccgctttaaccgacaaacacagtgataagagcta

SEQ ID NO: 238793 - DNA, 2409 bp, synthetic construct
  misc_feature 1..2409: note = Description of Artificial Sequence: Synthetic coding sequence
  source 1..2409: mol_type = other DNA
atggactgtgggccacccgctaccctacagccacacctcacaggacccccaggcaccgcgcaccatcctgtggcagtgtgccaacaggagtcactctcgtttgcagagcttcctgcactgaagcccccttctcccgtgtgcctggatttgtttcccgtggctccagaggagttgagggcacctgggtccaggtggagccttggtaccccagctccccttcagggtctcctgtggcctttgtcacctggaggttccgatacggaaattacctccggaggcatgagaccaagccgagctgggagctggccgcattgtcctggagctcagccacctgctcttgaagggccatggagtccacggcacacccagccccagcggcgagcctcacacggcagtgaaaagaaatccgcatggagaaagatgagagtgtatcaacgagaagaggtgccaggatgtccagaggcacatgccgtctttctcgaacctgggcaggtggtccaagagcaggcgttaagtactgaggagcccagagtggagctgagcggatctactcgagtgtccctggaaggacccgagaggcggaggtttagcgcatcagagctgatgactcggcttcactcttccctcaggcttggacgcaacagcgcagcaagggctctgatctccgggtcaggcaccggagctgcgagagagggaaaagcctcaggcatggaggctcggagtgtcgagatgagcggtgacagggtgtcccgtcccgcacctggagattcgcgcgaaggagactggagtgagcccagactcgatactcaagaagagcccccattgggaagtagaagcacgaacgaaagacgccagtccagatttctgctgaattcagtcctttatcaagaatattctgacgtggcctctgctcgcgaactccggcgacagcagcgagaggaggaaggccctggagacgaggcagaaggcgcagaggaaggcccaggccctccgcgtgcgaacttgagtcccagctcctctttccgggcacagcgtagcgcccgtgggagcactttttcactgtggcaagatatccctgatgttagaggcagcggcgtgttagcaactttatcactcagggactgcaagttacaggaggctaagtttgaattaatcacaagtgaggccagttatatccactcactgagcgtcgctgtgggtcactttctcggatcagctgagctgtccgaatgcctgggtgcacaggacaaacaatggctgttctccaaacttccggaggttaagagcacatctgagagatttttgcaagacctggagcaacgcctggaggccgatgttctgagattctctgtgtgcgacgttgtgctggaccactgcccggctttccgacgcgtttacctcccatacgttactaaccaagcttatcaggaacggacataccaaagactgttgctcgagaaccccaggtttccgggtatcctggctcggttagaggagtctccggtctgtcagcggctgccattaacttcctttctcattctgccttttcaaagaatcactagacttaagatgctggtggagaatatcctgaagagaacagcccaaggctctgaagatgaggacatggccaccaaagcgttcaacgcgttgaaggaactggtgcaggaatgtaatgcctccgtgcagagcatgaagcggacagaggagctaatccatctttctaaaaaaattcactttgaagggaaaatatttcctctgatctcacaggccagatggctggtacgacacggggagcttgtcgaactcgcccctttgccagccgcaccacctgcgaaactgaagctgtctagcaaggcggtgtatttacacctattcaacgattgcttgctgctgtctcgcagaaaggagctcggtaagtttgccgtttttgtccatgccaagatggctgagttacaagttcgcgacctttcactgaagctccaggggatcccaggccatgtgttcctgctacagctgttgcatggacaacatatgaagcatcaattcttgctccgagctaggaccgaatctgaaaagcaaagatggatttccgcactttgtccctctagccctcaagaggataaagaggtgatctccgagggtgaggactgtccacaagtccagtgcgttaggacttacaaagcactccaccctgacgagctcaccctcgaaaaaactgacatcctgagcgtaagaacctggacaagcgatggatggctggagggcgttagacttgctgatggagaaaagggatgggtgccacaggcgtatgtggaagagataagtagcctctcagccaggctgaggaatcttcgagagaacaagcgggtgaccagcgcaacctctaaactgggagaggctcccgtctag

SEQ ID NO: 238794 - DNA, 1575 bp, synthetic construct
  misc_feature 1..1575: note = Description of Artificial Sequence: Synthetic coding sequence
  source 1..1575: mol_type = other DNA
atggattgtggccctccggcaacactacagccccacttgaccggcccacctggtactgcccatcatccggttgcagtatgccagcaagagagcctgagtttcgccgagctgccggctcttaagcccccaagccctgtgtgtctagacctattccccgtggctcccgaagagttgagagcgccaggcagtagatggagtttgggaacgcccgcacccctgcaaggacttctgtggccgctgtctcccggaggatccgacacggaaattacctctgggggaatgaggcccagtcgcgcaggcagttggccacactgtcctggagcccagcctccagccttggagggaccctggtctccacgccacacccagcctcagagaagggccagtcatggcagtgagaaaaaatcagcctggaggaagatgcgcgtgtaccagagggaagaggtacctggatgtcctgaggcacacgccgtgttcctcgagccgggacaagtggtgcaagagcaggctctttctaccgaggaaccaagggtggaactgagcggctccacccgcgtatcactggaaggacccgagcgcagacggttttcggcctcagaattgatgacgcgcttgcatagttctctgagattgggacgcaactctgccgctagggctctgatctcaggaagcgggaccggagccgcaagagaaggcaaagctagcgggatggaggctaggtcggtcgagatgtccggagaccgagtgagtaggccggctcctggtgattctcgagagggagactggtccgagccgcgacttgacacacaggaggagccacctttgggctcacggtccacgaacgagcgacggcagtccagatttctgctgaacagtgtcctctaccaggagtattctgatgtggcctccgctcgggaactgcgtagacagcagcgcgaagaggagggacctggagacgaggcggaaggcgctgaggagggtccaggcccaccacgggcaaacctgtcaccaagctcctcttttcgggcacaacggtcagctcgcggttcaacctttagcctgtggcaagacatcccagatgtgcggggatcaggtgtgttggccacactgtcacttcgagattgcaagttgcaggaagctaaattcgaacttatcacctccgaagcctcctacattcactccttatcagtggcagtagggcatttcctcgggagcgcagagctgagcgaatgtctcggagcacaggataagcaatggctcttctcaaaactcccggaggtgaagtctacctcagagcgtttcctccaggatctggagcagcgactggaagctgacgttcttaggttttctgtgtgcgatgttgtgctggaccactgccccgcatttcgcagggtgtacctcccctacgttaccaatcaagcatatcaggaacgcacctaccagagattgctgctggaaaatcctaggttccctggaatcctagcaaggctcgaggagagccctgtttgccagcggttaccactaaccagcttcctgatcctgcagcccccaggaggccaggggggacaccaatag

SEQ ID NO: 238795 - DNA, 1509 bp, synthetic construct
  misc_feature 1..1509: note = Description of Artificial Sequence: Synthetic coding sequence
  source 1..1509: mol_type = other DNA
atggattgtggccctcccgctacactgcagcctcacctgacaggtccaccaggcaccgctcatcatcctgttgccgtttgtcaacaggagagtttatcctttgcagaactacctgccctgaaaccgcctagccccgtatgtctggacctgttccccgttgcacccgaagaattgcgagcgcctggctctcggtggtcgttgggcacccccgctccattgcagggcctgctctggcctctgtcccctggaggcagcgacaccgaaatcacctccggtggcatgcgccctagtcgggcagggagctggcctcattgtccaggagcacagccccctgctctcgaaggcccatggagcccaagacacactcagccccaaaggagggcatctcacggcagcgaaaaaaagtcagcttggcgcaaaatgcgcgtatatcagagggaggaggtgcccggatgtcccgaggcgcatgccgtattcttggaaccgggacaagtggtgcaggagcaagccctgtctacagaggagcctagagtggaactctccggatctacaagagtctctctagagggcccagaaagacgaaggtttagtgctagcgagcttatgacccggctgcactctagcctgcgcctgggtcgcaattctgccgctcgggctttaatcagtggttcaggtaccggcgctgcaagggagggcaaggcctctggcatggaagccagatccgtagaaatgtccggcgaccgcgtgtctcgaccagcccctggcgatagtcgagagggtgactggtccgagcccagactagacacacaggaggaaccgcctctagggtctcgctccacaaatgagaggcgacaatcaaggttcctgcttaacagcgtcctgtatcaggagtacagtgacgtggcaagcgcgagagagctgcggaggcagcaaagagaggaggaaggccctggcgacgaggcagagggagccgaagaaggaccaggacccccaagagcaaatctctcaccctccagctccttccgggctcagaggtctgcccgaggttccacctttagcctctggcaagacattcccgacgtgcggggttcaggagtcctggctacactgagcctgcgtgactgtaagctgcaggaagccaagtttgagcttattacctccgaagcctcttacattcatagcctcagcgttgcagtgggacattttctcgggtcagccgagctgagcgaatgtctgggcgctcaggataaacagtggctattttctaagctacccgaagtgaagtctactagcgaaagatttctgcaggacctggagcagcgccttgaagccgacgtcctgaggttctccgtgtgtgatgttgtactagaccactgtcccgcattccgtagagtgtacctgccttatgtgacaaaccaggcctatcaagagaggacctatcagcggctccttcgggaaaataagcgcgtcactagcgcaacttcaaaactgggggaagccccagtctag

SEQ ID NO: 238796 - DNA, 504 bp, synthetic construct
  misc_feature 1..504: note = Description of Artificial Sequence: Synthetic coding sequence
  source 1..504: mol_type = other DNA
gagcgactggcgcaattccctgccgcaggacgcggtagccccggtccaccgggtgctcgactgggagtgggactggaaaaaggtagaggcagggaagtatggaggccaggcgtttggggctgtgaggcaagggcctcagaggtgaactggtcatgtccctttgacccggtctgcgctctgccacaggcaaagttcgagctgatcacttcagaggccagctacatccattctctgtccgtggccgtgggccattttctgggctcggccgaactttccgagtgccttggtgcccaagataagcaatggctcttttcaaagctgcccgaggtgaagtcaaccagtgaacgctttcttcaggacttggagcagaggctggaagcagacgtgttaagatttagtgtgtgtgacgtggtgctcgatcactgtccagcatttcggagagtttatttaccgtacgttacaaatcaagcttatcaggaaagaacataccagagattgctctag

SEQ ID NO: 238797 - DNA, 924 bp, synthetic construct
  misc_feature 1..924: note = Description of Artificial Sequence: Synthetic coding sequence
  source 1..924: mol_type = other DNA
tgacgagatagaggtcaggagcggctggctcagttccctgcagcaggaaggggcagtccgggtccccctggtgcccgactaggagtgggactcgagaaaggaagaggtagggaagtgtggaggccaggcgtatggggatgcgaggcaagggcctctgaagtcaattggtcatgtccctttgatcccgtctgtgctctcccgcaggccaagttcgagctgatcaccagcgaagcctcctacatccattccctgtcggtggccgtggggcattttctgggcagcgccgaactctctgagtgtctcggggctcaggacaagcagtggttattttccaaacttcccgaagttaagtctacatctgagcgctttctgcaggacctggaacaacggttggaagctgatgtactgcgattcagtgtgtgtgatgtggtgttggatcattgccccgcttttcgcagagtttacctgccatacgtgacgaatcaggcttaccaggagcgcacttaccagagacttttgctggaaaatccacgtttcccaggcatcctcgccaggctggaggaatcgcccgtctgccagaggctgcctcttacgtcatttcttatactgcccttccagagaatcacccgccttaagatgctagtggagaacattctgaaaagaacggcccagggatctgaagacgaggacatggctaccaaagcgttcaacgcgttaaaggagctggtacaagaatgcaatgcaagtgtacaatctatgaagcgcaccgaagagctgattcacctgtcgaaaaaaatccattttgagggtaaaatatttcccctaatctcccaggcacgctggctcgtccgccatggtgaactggtggaactagccccactgcccgctgcccctcccgctaaactgaagctgagttccaagtag

SEQ ID NO: 238798 - DNA, 1581 bp, synthetic construct
  misc_feature 1..1581: note = Description of Artificial Sequence: Synthetic coding sequence
  source 1..1581: mol_type = other DNA
atggtcgctaaggattaccctttctatctgactgtcaagcgtgcaaactgtagcctggagctgccccctgcaagcggcccagctaaagacgcagaagaaccctccaacaagagagtcaagcccttatcacgcgtgacttctctggccaaccttattccaccagtcaaagcgacgccgctaaaacggttttcccagacattgcagagatctatctcctttaggtccgaaagtcgtccggatatcttagccccaagaccttggtcacgcaacgccgcaccatccagcactaagcgccgagactctaaactctggagtgagactttcgatgtgtgcgtgaatcaaatgctcactagtaaggagattaagagacaggaggcgatcttcgagctgagccagggcgaagaggatctcatcgaggacctgaaattagccaaaaaggcttaccacgatcccatgctgaaactctctattatgaccgaacaggaactgaaccagatcttcggaactctggactctctaattccactgcatgaggaactcctgtcacagcttcgcgacgtcaggaagccggacggcagcaccgagcacgtagggccaatactggtgggctggctgccctgcctgagttcatatgattcttattgtagcaatcaggtggccgctaaagccctactggaccacaaaaagcaagaccatagggttcaagactttcttcaaagatgcctcgaatctcctttcagtcgaaaactggatctttggaatttcttggatattccacgcagccgcctagttaaataccctctcctcctcagggaaattcttcgccatactcctaatgataacccagatcaacaacatttggaagaggccattaatattatacagggaattgttgcagaaattaatactaaaacgggcgagtcagagtgtaggtattacaaggagcggctgctatatctggaggaaggccagaaggatagtcttatcgactctagtagggtgctgtgctgccatggagagcttaaaaacaatagaggggtgaagctgcacgttttcctatttcaagaggtcctcgtcatcactagggccgtaacccataacgaacagctctgctaccaattgtaccggcagcccatccccgtgaaggatcttctccttgaagacctccaagatggagaggtgaggctgggaggctcattgagaggagcattttctaacaatgagaggattaagaattttttccgggtgtcttttaagaacggctcgcagagccagacacatagcctccaagccaacgatacgttcaataagcagcagtggctgaattgcattagacaggcaaaggagacagtgctctgcgctgcagggcaggcaggcgtgttggactcagagggctcattcctgaaccctaccaccggatcccgggagcttcagggagaaacgaagctggagcaaatggaccaatccgactcggaaagtgattgttcaatggacaccagcgaagtttcactggactgcgaacgcatggagcagaccgactctagctgtggcaatagcaggcacggggagtccaatgtctag

SEQ ID NO: 238799 - DNA, 1677 bp, synthetic construct
  misc_feature 1..1677: note = Description of Artificial Sequence: Synthetic coding sequence
  source 1..1677: mol_type = other DNA
atggatagctctaccgcaatgaaccagtgctcctgtagggggatggaagagaataaagagaggcctaagaggcagcgtcagaacaactttcctatgttcccctctcccaaagcttggaacttcaggggacggaagcgtaagcaatccacccaagacgaggacgccgtgtcgctgtgctccttggatatctctgagccgtcaaacaaaagggtcaaacctttatcccgcgtcacctccctggcaaatcttatacctccagtcaaagcaactcccctgaaaaggttttcacagaccctgcagcggagtatttctttccggagcgaaagtcgcccagatatactggcgccacgcccttggagccgcaacgcggcaccaagctccacaaagcggcgtgattctaaactctggtcagagactttcgacgtatgcgtcaaccagatgctcacatctaaggagatcaagaggcaggaagctatctttgagctcagccagggggaggaggacctgatcgaggatttaaaactggctaaaaaggcctatcatgatcccatgctcaaactgtcaataatgacagagcaggagttgaatcaaatctttggtaccctggattctctcatacccctgcatgaagaactgctttcccaactgcgcgacgttaggaagcctgacggcagtacggagcacgtgggtcccattttggtgggctggctgccctgtttgagctcctatgactcctactgttctaatcaggtggctgccaaagcgctcttggaccacaagaagcaagatcatagggttcaggactttctgcagcgatgtctcgaatctcctttctctagaaagctggacctctggaactttctcgatattcccagaagcaggctcgtgaagtatcctttgttactgcgtgagatcctgagacataccccaaacgacaacccagaccagcagcacctggaagaagctatcaatatcattcagggaatcgtggcggaaataaataccaaaacgggcgagagcgaatgtaggtactacaaagagagactcctctacttggaggaagggcagaaggattcacttatcgattcttcaagagtgttgtgttgtcacggagagctgaaaaacaaccggggagtcaaactacacgtgtttctgttccaagaagttctggtcattacccgggcagtcacacacaacgagcagctttgctatcagttgtatcgccagcccattccagtcaaggatctcctgctcgaggatctgcaagatggagaggtgagactaggcggttccctgcgaggagctttctccaacaatgaacgaattaaaaattttttccgagtgagctttaagaatggctctcagagccaaacacactccttgcaggccaatgatactttcaacaagcagcagtggttaaactgtattcggcaggccaaggaaacagtgctttgtgccgctggacaggcaggggttctcgactccgaaggcagcttcttaaacccaaccaccggcagccgagagcttcagggagagaccaagctggagcagatggaccagtcagactcagagagcgactgcagtatggatacaagtgaagtgagcctggattgcgagagaatggagcagacggacagctcctgcgggaacagtcgccacggagaatccaacgtatag

SEQ ID NO: 238800 - DNA, 1599 bp, synthetic construct
  misc_feature 1..1599: note = Description of Artificial Sequence: Synthetic coding sequence
  source 1..1599: mol_type = other DNA
atgattgaagtgtgccaccataattggctcctttggctctgtccatctaagttcggcatctttatgtgctgtctcgcaagcacgaccgggcaaatggagttaagacgaaccagggagccttcaaataagcgcgttaagcccttgagtcgggtaacatctctggctaacttgatccccccagtcaaagccactcctttgaaaaggttctctcagaccttgcagagatcaatttcttttaggtccgaatctcgaccagacatcctggccccaaggccttggtctcgcaatgccgctccctctagtacaaagcggagagactccaagctctggtctgagacttttgacgtctgcgtgaatcagatgcttacatcaaaagagatcaagcgacaagaggcaatcttcgaattgagtcagggagaggaggatctgattgaggatttgaaactggctaagaaagcctatcatgaccccatgctgaaactgtccatcatgactgagcaggagctgaatcagatttttgggactctggacagcctcatccctttacatgaggaactgctgagccagctccgcgacgtaagaaagccggacggcagcaccgagcacgtgggccctattcttgtgggatggctgccttgcctgagttcatatgattcgtattgcagcaatcaggtagccgctaaggcactgttggaccacaaaaaacaggatcatagagtgcaggatttcctccagcgttgtctcgaatcccccttcagcaggaaacttgacctgtggaatttcctggatatcccaagaagcaggctcgtgaaatatcccctcttgttgcgggaaattctgcgccacacgccaaacgacaaccccgaccaacagcatctcgaagaagccattaacattattcagggaatcgtcgccgaaatcaacaccaaaacaggtgaaagcgaatgccgttactataaagaacgtcttctttacctcgaggaaggacagaaagacagcttgatcgactcctctcgcgttctttgctgtcatggcgaactaaaaaataatagaggggttaagctgcacgtcttcctctttcaggaagttctggtcatcacccgtgcggtcactcataatgaacagctgtgttatcaactgtatcggcagccgattcctgttaaggacctgctgcttgaagacctccaggacggggaagtgagattaggtggcagcctccggggagcattttcgaataacgagagaatcaagaatttcttcagagtatccttcaagaatggcagtcagtcgcagactcattccctgcaggccaacgacacattcaataaacaacaatggctaaactgtattcggcaggcaaaagagacggttctttgtgccgcaggacaggctggggtcctcgattctgagggctcttttctcaatcccaccacaggatccagggagctccagggagaaactaagctcgagcagatggatcagtcagacagcgaaagtgattgtagcatggacacgtccgaagtaagcctggactgtgaacggatggagcagacagactcttcgtgtggcaattcaaggcatggcgagtctaatgtgtag

SEQ ID NO: 238801 - DNA, 2073 bp, synthetic construct
  misc_feature 1..2073: note = Description of Artificial Sequence: Synthetic coding sequence
  source 1..2073: mol_type = other DNA
atgccttgggaagaacctgctggggagaagccatcatgcagccacagtcaaaaggctttccatatggagcccgctcagaagccctgctttaccactgatatggtaacgtgggcactgttatgtatctccgcggagactgtgcgcggagaggctccttctcagcctcggggtattccacaccgctcaccagtgtccgtagacgatttatggttggaaaagactcaacgcaagaaattgcaaaaacaggcccacgtggaaagaaggctccatattggcgcagtgcataaagatggcgtgaaatgctggcgaaagacaattatcacaagccctgagtcgctgaatctgcccaggaggtcacatcccctgtcacagtccgccccaaccggattgaaccacatgggttggcccgaacatacaccaggcacagccatgcctgatggcgctctggacaccgccgtttgcgctgacgaggtggggagtgaggaggacctatatgacgacttgcactccagttcccaccactattcccaccctggcggtggtggcgagcagttggctatcaacgagctcatctctgatggttctgtggtttgcgccgaagccctgtgggaccacgtgactatggacgaccaggaactagggtttaaagccggagacgtgatcgaagttatggatgccactaacagggaatggtggtggggtcgcgtcgccgatggtgagggctggttccctgcttctttcgtgaggctgagagtcaatcaggatgagcctgctgatgacgatgccccactggcaggcaactcaggggctgaggacggcggagccgaagcccagtcatctaaagatcagatgagaaccaacgtgatcaatgagattctgagcaccgagagggattacatcaaacacctgcgggatatatgcgaggggtacgtgcgtcaatgcagaaaacgagctgatatgttcagcgaggagcagcttcgaacaatattcggcaacatcgaggacatctatcgttgccagaaagcatttgttaaggcactggaacagagattcaatagggaacgcccacacctgagtgagttaggcgcatgcttcttagagcatcaggccgatttccagatctactcggagtattgcaataaccaccccaatgcatgcgtagaactgagcagactgaccaagctgtccaaatatgtctattttttcgaggcatgtagactgctacagaagatgatcgatatttctcttgatgggttcctgttgacgcctgtgcagaagatttgtaagtacccccttcaactggctgagttactcaaatacactcacccacagcatagagactttaaggacgtggaggctgctctccacgccatgaagaacgttgcgcaactgattaatgagcggaaacgcaggctcgagaacatcgacaaaatcgcacagtggcagagctcaatcgaggactgggaaggtgaggatctcttagtacgatcctcagagctaatctactcgggtgagctgactagagtgacccagcctcaggcgaagtctcagcagaggatgttctttttatttgaccaccagttaatttattgtaagaaagacttactgcggcgtgacgtgctctactacaaggggagactcgatatggatggcctggaagtggtagatctggaggatggcaaggaccgggatctgcatgtttcaatcaagaacgcctttcggctgcatcgtggtgctacaggtgactcccaccttctgtgcaccagaaagcctgagcagaagcaaagatggcttaaggctttcgctagggaaagagaacaggtgcagctcgaccaggagacgggtttctctataacagagttacagcgaaagcaagccatgctgaatgcttcaaagcagcaggtcacaggcaagcctaaggctgtggggagaccatgctacctcactaggcagaagcacccagcactgccttcaaaccgaccccaacaacaggtactcgtgcttgctgaaccgagacgcaaaccatcgactttttggcattccatcagtcgtcttgccccattcaggaagtag

SEQ ID NO: 238802 - DNA, 1860 bp, synthetic construct
  misc_feature 1..1860: note = Description of Artificial Sequence: Synthetic coding sequence
  source 1..1860: mol_type = other DNA
atgcggccagatggccaacaggcactggacgctgtggtgcggagcttcgactgccactcagaggctgccctgcgccagcgcaacgacgtgatatactgttcactgcctaggactgcacaaggtattgttcagcgcgaggatcagctcgaggtcctggtgtcattaagggaggtctgggggagaagacgcggtagagatgggacctgtaccggtgctatgccggacggggctctcgacaccgcagtgtgtgccgatgaagtagggtctgaggaggacttgtatgatgatctgcatagttcgtcacatcattacagccatccgggtggagggggtgaacaattggcaatcaacgagttgatctccgacggtagtgtcgtatgcgctgaggcactatgggaccacgtcactatggacgaccaagaactggggtttaaggctggtgatgtgatcgaggtgatggacgctactaaccgtgaatggtggtgggggcgtgttgcagatggcgaagggtggttcccggcttcattcgtccggctaagagtgaaccaagacgagccagctgacgacgacgccccattagccggtaactcaggcgctgaagatggtggggcagaggcacagtcatccaaggatcagatgcggacaaatgtaatcaatgagatcctgtccaccgaaagggactatattaaacatttgcgcgacatctgcgaaggctatgtccggcaatgccgcaaaagggctgacatgttttccgaggaacaattgcgcactatctttggaaatatagaggatatttatcgctgccagaaagccttcgtgaaagcgctggaacagcgatttaaccgggaaaggccacacctttctgaactgggagcctgcttcctcgaacatcaggcggactttcaaatttactccgagtattgcaacaatcaccctaacgcctgcgtggaactcagccgcctgaccaaactgtccaagtatgtctatttctttgaggcttgtcggctcctccaaaagatgatcgacatcagcctggacgggttcctactcaccccggttcagaaaatctgtaaatatcctctgcagctggcagaactgcttaagtacactcaccctcaacaccgggacttcaaagacgtggaggcggcactgcatgcaatgaagaacgttgcccagctgatcaacgaacgaaaacgaaggctggaaaacattgataaaatcgcccagtggcagtcttctatcgaggattgggagggggaggacctgctggttcggtcttccgagctgatttactccggagagttgaccagggtgacccagccacaagctaagtctcagcagcgcatgttcttcttgttcgaccaccagctgatttactgtaaaaaggacctcctgaggcgtgatgtcctctattataaagggcgacttgacatggacgggctggaggttgtcgacctggaagatggaaaagatagggaccttcacgtcagcattaagaatgcgttccgccttcataggggcgctactggagattcacatctgctttgcacacggaaacccgaacagaagcagagatggcttaaagcctttgcaagagagagggagcaagtgcagctcgaccaagaaacagggttcagcataacggaactgcagaggaaacaggccatgttgaacgcatcaaaacaacaggtaactggaaagccgaaagcggtcgggagaccgtgctatctgactagacagaagcatcctgccctcccgtcaaacagaccacagcagcaggtcctggtgcttgcggagccacgccgaaaaccaagtactttttggcatagcattagcaggctggctcccttccgtaaatag

SEQ ID NO: 238803 - DNA, 2013 bp, synthetic construct
  misc_feature 1..2013: note = Description of Artificial Sequence: Synthetic coding sequence
  source 1..2013: mol_type = other DNA
atgccttgggaggagcccgcaggcgaaaaaccgtcatgcagtcatagccagaaggcctttcacatggagcccgctcagaaaccctgctttacaaccgacatggttacctgggccctgttgtgcatcagcgctgagacggtgcggggtgaagcaccctcccagcccaggggtatacctcatagatctcccgtgtccgtggacgatctgtggctcgaaaagacacagaggaaaaaattgcagaaacaggcccacgttgaacgacgcctgcacatcggtgcggtgcacaaggacggcgtgaaatgctggcgcaagactatcatcacctcacccgaaagtctgaatctacccagaagatcccatcctctctctcagagcgccccaacaggactgaaccacatgggctggcccgagcatacacctggtactgcgatgcctgacggagctctggataccgccgtatgcgctgatgaagtaggtagcgaggaggatctgtatgacgatcttcactctagtagccatcactattcgcaccccggtggaggcggtgagcagctcgcaattaacgagctgattagcgacggcagcgtggtctgtgctgaggccctgtgggaccatgtcactatggacgaccaggagctcggttttaaggccggagacgttatcgaggtgatggatgcgaccaatcgggagtggtggtgggggagggtggctgacggggaaggttggtttcccgcatcattcgtgcggcttagagttaaccaggatgagcccgcagacgatgatgcacccctcgcaggtaacagcggggctgaggatggcggagctgaagcccagtcttccaaagaccaaatgagaacgaatgtgattaatgagatcctctctaccgaacgtgactatattaagcatctcagagacatatgcgaaggctatgttcgccaatgccgcaagcgagcagatatgttcagtgaggagcaactgcggacaatcttcgggaacattgaggatatttataggtgtcagaaggccttcgtcaaagcactggaacagcggtttaaccgggaacggcctcacttatccgagctcggagcctgtttcctggaacaccaggctgattttcagatttacagcgagtactgcaataatcatcccaacgcttgtgtggaactgtcccgtctgactaagctcagcaagtacgtttattttttcgaagcgtgccgcttgctacaaaagatgatagacattagtctcgatggtttcttgctgacacccgtacagaaaatctgtaagtatcccctacagctcgctgagctgctgaagtacacccaccctcagcaccgcgattttaaggatgtcgaggcagcgctacatgcaatgaagaatgtcgcacagctcattaatgaaaggaaacgaaggttggagaatatcgacaaaattgcgcaatggcagagctccatcgaggactgggagggcgaagatctgctggtgcggagtagcgagttaatatactccggcgagctgacacgagtcacccagccccaggcaaaatctcagcagcgtatgttttttttgttcgaccaccagctcatttattgtaagaaggatttattgcgcagggacgtgttgtactacaaaggcaggcttgatatggacggcctcgaggtggtcgacctggaggatggcaaagatcgtgacctgcatgtgtcaattaagaacgctttccggctccacagaggcgcaacaggcgacagtcatttactttgtacaaggaaacccgaacagaaacagcgatggctgaaagccttcgctcgcgagcgcgaacaggtgcagctcgaccaagaaacgggattctccataacggaactgcagaggaaacaagccatgcttaacgccagtaaacagcaggtgaccggcaaacctaagggtcgccgtacagccgctcccccaccacgccttccaggcccataccccgctgacataataccattctcagaaccccagtcccaggctagctag

SEQ ID NO: 238804 - DNA, 1893 bp, synthetic construct
  misc_feature 1..1893: note = Description of Artificial Sequence: Synthetic coding sequence
  source 1..1893: mol_type = other DNA
atgccctgggaagaacctgccggagagaagccaagctgctcccacagtcagaaggcattccatatggagcctgcccagaagccctgctttactacagacatggtcacctgggccctgttatgtatctctgccgagacagttcgcggagaagcaccttcccagccccgaggcatcccacacagatcccctgtgtctgtggacgatctctggttggaaaagacgcaacgaaagaaactccagaagcaagcccacgtcgagcggaggctgcacatcggggcagtccataaagacggggtgaaatgctggcgaaagaccataatcactagtcctgagtcccttaacctcccacggcgtagtcacccactgtcgcagtcggcccctacgggcctgaaccacatggggtggccggagcacactcctggtactgccatgcccgatggcgcactagacacagccgtgtgcgccgacgaggtcggcagcgaagaagacttgtacgacgatctgcacagctcttcgcaccactatagccaccctggcggaggcggagagcagctggccattaacgaactcatcagcgatggaagcgtggtgtgtgcggaggccctatgggatcatgtgactatggacgaccaggagctggggtttaaggccggtgacgtcatcgaagtgatggacgcaactaatcgcgaatggtggtgggggagagtggccgatggcgaggggtggtttcctgcatcatttgtacggctccgcgttaatcaggacgagcccgcagacgacgatgcccctctggcaggcaacagcggagcagaggatgggggagcagaggctcagtcttctaaggatcagatgcgtacaaatgtgattaacgaaatactttccactgagagggattacatcaaacatttacgggacatctgtgagcaggcagatttccagatttatagcgaatactgcaacaaccatcccaacgcttgtgttgaactctccaggttaaccaagctgtctaagtatgtctatttttttgaagcttgccggctactgcagaagatgattgacatcagcttggacgggtttctcctgacacctgttcagaaaatttgtaagtacccgctacaacttgccgaactcttaaaatatactcacccccagcatcgggacttcaaggacgtcgaggctgccctgcacgctatgaagaacgtggctcagctgatcaatgaaaggaaacgaaggttggagaacatagataaaatcgcccagtggcagtcgagcattgaagattgggagggcgaagacctgctcgttcgctcttcagagctgatctacagcggcgaactcacccgggtcactcaaccccaggccaaatcccagcagcggatgttttttctgtttgaccatcagctcatatactgcaagaaggacctgctccggagggacgtgctgtactacaagggcagactagatatggatgggttagaagtagtggatttagaagatggaaaggatagggacttgcatgtgagtattaaaaacgcctttaggctccatcgcggtgccacgggagacagccacctgctgtgcactcgaaagccagagcagaaacagagatggctgaaagcctttgccagggagcgggagcaggtccaactggatcaagaaacgggcttcagtatcactgagctgcagaggaaacaggccatgctgaacgcttctaaacagcaagtcaccggcaagcccaaagccgtcggaagaccttgttacctgacaaggcaaaaacaccctgctcttccttcaaacagacctcagcaacaagtgctcgtgctggcggagcctagaaggaagccctccactttttggcacagcatctccagactcgccccatttaggaagtag

SEQ ID NO: 238805 - DNA, 579 bp, synthetic construct
  misc_feature 1..579: note = Description of Artificial Sequence: Synthetic coding sequence
  source 1..579: mol_type = other DNA
atgccctgggaggagcccgcaggcgaaaagccgtcttgttcgcactctcagaaggcttttcatatggagccagcacagaaaccttgcttcacaacagacatggttacatgggcactgctgtgcatttccgccgaaacagtaaggggggaggcaccgtcacagcctcgaggaatccctcaccgctctccagtgtccgtggacgacctctggctggaaaagacccaacggaagaagttgcaaaaacaagctcacgttgaaaggcgcttgcacatcggtgctgtacataaggatggcgtcaagtgttggcgcaagactataattacgtcacccgagtccttgaatttgccccgacggagccaccccctttcccaatccgccccaaccggcctgaaccacatgggttggccggagcataccccgggtacagccgtcggacggccttgctatctgacccgtcagaaacatcccgcacttccttcgaatcggccacagcagcaggtactcgtactggctgaaccgcgacggaagccctcgacattctggcattccatctcccgcctcgccccatttaggaaatag

SEQ ID NO: 238806 - DNA, 2013 bp, synthetic construct
  misc_feature 1..2013: note = Description of Artificial Sequence: Synthetic coding sequence
  source 1..2013: mol_type = other DNA
atgccctgggaggaacctgccggtgagaaacctagctgtagccattctcagaaggctttccacatggagcccgctcagaagccttgcttcactaccgacatggtgacctgggcgctgctgtgtataagtgctgagacagttcggggtgaggcaccctctcagccacggggaatcccgcatagatctccagtaagcgtcgacgacctatggcttgagaaaacccagcggaagaaacttcaaaaacaggcccacgtcgaacgcagattgcacataggggctgtgcacaaagacggcgtgaagtgttggaggaagacaatcattacatctccagagtccctcaatctgcctagaagatctcacccactgtcacagagtgccccaacaggtttaaaccatatggggtggccggagcatacccccggaacggctatgccagacggggctttagacaccgccgtgtgcgccgatgaggtgggcagcgaggaagacctatacgatgacctgcattcaagttcccatcactacagtcatcccggaggcggtggcgagcaactagcaataaatgagctgatctcagatgggagtgtggtctgtgccgaagcgttgtgggaccacgtgactatggatgaccaggagctaggtttcaaggcaggagatgttatcgaagtcatggatgctaccaacagagaatggtggtggggacgcgtggcagacggcgaaggttggttcccagcttcatttgtgcggttgagggtcaatcaagacgagccggcagacgatgatgctcctctggcaggcaacagcggcgctgaagacggcggagctgaggcacagagttccaaggaccaaatgagaaccaatgtcattaacgagattctttctaccgagcgagattatataaaacatctacgtgacatatgtgaaggctacgttcggcagtgtaggaagagagccgatatgttttctgaggaacagttgcgcaccatatttggcaatattgaagatatttaccgatgccagaaagcttttgtgaaggctctcgaacagagattcaaccgagagcgtcctcacctgtctgagctgggagcatgcttcctagagcaccaggccgattttcagatttattcggagtactgcaacaaccatcctaacgcttgtgtggagctctctcggcttaccaagctgagtaaatacgtgtatttttttgaagcctgtcgtttgctccagaagatgatcgacatctcactggacggcttcctcctgacccccgtgcagaaaatttgtaagtaccccctccaattggccgagctgcttaaatatacccatccacagcatcgggactttaaagacgtggaagccgctctgcacgcgatgaagaacgtggcacaacttattaacgagagaaaaagacgactggagaatatagacaaaattgcccagtggcagtcgagcatagaagactgggagggagaagacttgttagtgcgcagtagtgagctgatatacagtggagagctgacacgggtgacacagccccaggccaaatcacaacaaaggatgttttttcttttcgaccatcagttaatctactgtaagaaagatcttcttaggagagacgtactgtattacaaagggaggttggacatggatggccttgaagtggtggatctggaggacgggaaagatcgagacttgcacgtatccattaagaatgctttcagacttcacagaggtgccaccggcgattctcatctcctgtgcactagaaaacccgaacagaagcagcgatggttgaaagcgttcgctcgcgaacgcgagcaagtgcaactcgaccaggagacggggttcagtatcaccgaactgcagaggaagcaggctatgctcaacgctagcaaacagcaggtcaccgggaaaccaaaaggacgtaggactgccgctccacccccacgcctgccgggaccttaccccgctgacataatcccattctcggaacctcagagccaagccagttag

SEQ ID NO: 238807 - DNA, 4794 bp, synthetic construct
  misc_feature 1..4794: note = Description of Artificial Sequence: Synthetic coding sequence
  source 1..4794: mol_type = other DNA
atggaggcagaagaggcccagaggggagcaagccctcctatcagtgccattgaggagttctcaattattcctgaggccccaatgcggtcttcacaggttagtgccttgggtctggaggcccaggaggatgaggacccaagctataagtggagggaagaacatcggctgagtgccacccagcaatcggaactccgagatgtgtgtgattacgctattgaaactatgccttcatttccaaaggagggcagtgcggacgttgaacccaaccaagaaagtttggtggctgaggcctgtgatacaccagagcactgggaagccgtgcctcagtcgcttgccggaagacaggccagaacgctggctcccccagagctctgggcctgtccaattcaatctgagcacctggacatggcccctttttctagcgaccttgggtctgaggaagaagaagtggaattttggcccggactgactagcttgaccctgggaagtgggcaagctgaagaagaggaggagacaagcagtgacaacagcggccagacacgctactatagcccttgcgaggaacatccagccgaaaccaaccagaacgagggatccgagtccggtacaatcagacagggcgaggagctccctccggaagaacttcaggaatctcagggactactccacccacaggaagtgcaagttcttgaggagcaggggcagcaggaagcaggttttcgcggtgaagggactctgcgcgaagacgtatgtgccgatgggctcttaggggaagaacaaatgatcgaacaggtcaatgacgagaaaggcgaacagaagcagaagcaagaacaagtgcaggacgtaatgctggggcgacagggggagaggatgggcttaaccggcgagcccgaaggactgaacgatggcgaatgggaacaagaggatatggagcgcaaggctcaaggtcagggaggacccgagcagggtgaagaaaggaagagggagctgcaggttcctgaggaaaaccgcgctgacagccaggacgaaaaatcccaaacgttcctgggaaagtcagaggaagtgactggaaaacaggaagaccatgggataaaggagaagggagtccccgtctcaggccaggaggctaaggaacccgagagttgggatggaggacggttgggagcggtgggcagagcccgaagcagagaagaagagaacgagcaccatggacctagtatgccagctctgattgctccagaggactcaccacactgcgatctttttccaggggcatcatacctgatgacacagattccaggcacgcagactgaatctcgagccgaggagctctcccctgctgctctctctccatctttagaacctatcaggtgttctcaccagccaattagcctgttgggtagctttttaaccgaggaatcaccagacaaggagatcgatcagaactctcagcaggaagaatcccgactgagaaagggcacagtcagcagtcagggcaccgaggtggtgtttgcgtccgcgagcgtcacccctcccagaacgcctgatagtgctcccccatcaccggcagaggcctatcctattactcccgcatctgtgtccgccagaccgcctgtcgcttttcctcgcagagaaacgtcctgtgccgctcgggcacctgagactgcctctgcaccattaagtatggacgaccccagtccgtgtgggacctccgaaatgtgtccagccgcactgtacggattcccgtctactggaacgtcaccacccagaccacccgctaactccacaggaacagtgcagcacctacgctctgattccttccccggaagtcacaggaccgagcagactccagacctcgtgggcatgcttctatcctattcgcattcggaactaccgcagcgccctcccaagcctgccatatacagttctgtgacccctagacgagacagacgttcagggagagattacagtacagttagtgcatctccgaccgctttaagcaccctgaagcaagactcacaggaaagcattagcaatcttgagcgaccctcctccccgcctagcatccagccttgggtgtccccacacaacccggcttttgctaccgagtcaccagcttacggtagtagcccctcctttgtctctatggaagatgtccgaatccacgagccccttccacctccacctccccaaagaagggacacgcacccttctgtcgtcgagacagacgggcatgcacgagtcgtggtccctactctgaagcaacacagccatccccctcctctcgccctcggtagcggactgcacgctcctcacaaaggcccactgccccaggcgagtgaccccgcagtggccagacagcaccgccctttgccatctactccagacagcagccatcacgctcaagcaaccccacgctggcgttacaataaacctctcccgccaacccctgacttgccacagccacacctgcctcctatctccgctcctggcagctcacggatctaccggcctctgccaccgctcccaatcatcgatccccctactgagcctccacccctcccccctaagagccgcggacgctcccggagcacaagagggggtcacatgaactctggtgggcacgctaaaacccgcccagcctgccaggactggacagtcccgctaccagcttcagccggaaggacatcctggcctcccgcaactgcccgttctactgagagctttacctccacgagccgatccaagtcagaagtgtcccctggcatggcatttagtaacatgaccaacttcctgtgtccttcttcgccaactacgccatggacaccagaacttcaaggtccgaccagcaaagacgaggcaggggtgtccgagcaccccgaagctcctgcaagagaaccacttcgccgaaccactccccagcagggcgctagcggacccggacggtccccagtggggcaggctcgccagcccgaaaagccaagccacctacacctcgaaaaagcttcatcatggcctcacagaagggatagcggccgaccccctggcgatagttctgggcaggcagtcgctccatctgaaggtgccaataagcacaagggatggtccaggcaggggctgcggaggccgtcaattctacccgaaggatcttctgattctagaggccctgcggtggagaagcaccctggaccttcagacaccgtggtgttccgcgagaagaaaccaaaagaagtgatggggggattttcccgcaggtgctcaaagctaattaatagcagccagctgctctatcaggaatacagtgacgtcgtgctcaacaaagagatccagtcccagcagagactggagagcctttccgagaccccagggcctagctctccgagacagccacggaaggccctggtgagcagcgaatcatatctccaacgcctgtcaatggcgtcctcaggcagcctatggcaggaaatacccgttgtcaggaactctacagtcctcctgagcatgacccatgaggatcagaaactgcaggaggtgaagtttgagctgatcgtgtccgaagcttcgtacctgcgcagtctgaatatcgccgtagaccattttcaactgtcaacatccctccgggctaccctgagtaaccaggagcaccagtggctcttttcacggctgcaagacgtgagagatgtcagtgctacgtttctctccgacctcgaagagaacttcgaaaacaacattttctcttttcaggtatgtgacgtggtgttgaaccatgcccctgactttagaagagtgtacctcccctatgtgactaaccagacctatcaagagagaacgttccagagcttgatgaactccaactctaatttcagggaggtacttgagaaactggaaagtgatccagtctgtcagaggctatccctgaagagcttcctgatcctgccgtttcagaggatcacacgacttaaactcctgttgcagaatattctgaaacgaacgcaacctgggtcttctgaagaggcggaggcgaccaaggcacaccacgcgcttgaacagctcattcgggattgtaataacaatgtgcagtctatgcggaggaccgaagagctcatttacctgagccagaaaatcgaatttgaatgcaaaatctttcctttaatctcccaaagccgctggctcgttaagagtggggagctaaccgccctcgagttttccgcctcgcccggattgcggagaaagttgaatacccgtccagtgcacctgcacctgtttaatgattgtctgttattatcccggcctcgcgagggcagcagatttctggtgttcgatcacgccccattctcttccatccgtggtgagaagtgtgagatgaagttgcatggaccacacaagaatctgttccggctttttctccgccagaatacacagggtgcccaagcggagttcttattccggacagaaactcagtctgaaaagctgagatggatatcagcgctggctatgcctagagaggagctggatctactggagtgctataactcccctcaggtgcagtgtttgagggcctacaaaccccgtgagaacgatgaactcgccctagagaaggcagacgtggtgatggtgacgcaacagtctagtgatggatggctggagggtgttagactgtctgacggcgagcgcggttggttcccagttcagcaggtggagttcatctcaaacccagaagttcgtgctcaaaatctcaaggaagctcaccgcgtcaagacagccaaactgcaacttgtggaacagcaggcttag

SEQ ID NO: 238808 - DNA, 1197 bp, synthetic construct
  misc_feature 1..1197: note = Description of Artificial Sequence: Synthetic coding sequence
  source 1..1197: mol_type = other DNA
atggcctcctccggcagcctttggcaggaaattccagtcgtccggaacagcaccgtgttattgagcatgacacacgaagaccagaaattacaggaagtgaagtttgaactcatcgtgagcgaagcgtcctacttaaggagtcttaatatcgccgtcgatcattttcaactgagcacgtctctacgagccactctgtccaatcaggaacaccaatggttgtttagtagactgcaagatgttcgagatgtttctgccacttttctgtctgatctggaggagaatttcgagaacaacatcttcagcttccaggtgtgtgacgtggtgctgaatcatgccccagattttcgaagagtgtacctcccctacgtcactaaccaaacttatcaagaacggactttccaaagcctgatgaattctaactccaacttcagagaggtgctagagaaactcgagtccgatcctgtctgtcaaagacttagcctgaagtcgttcctgattctgcccttccagcgaattactagactgaagctgttgctgcagaatatcctgaagagaacacaacctgggagcagtgaagaagcagaagctactaaagctcatcacgctctcgagcagctgatcagagactgtaataacaacgttcagtctatgagacggaccgaggagttgatatacctcagtcaaaagattgaattcgaatgtaaaattttcccgctgatatcacagtcccggtggttagtcaaaagtggtgagctgactgcgctggagttttcagccagccccggactgcggaggaaactgaacacacggcctgtccacctccatctgttcaacgattgccttctgctgtctcgcccacgggagtcggagaagctccggtggatttccgcgctagctatgccaagggaagaactggacctgcttgagtgttacaactctccccaggttcagtgcctgagggcctataagccacgcgagaatgatgagctcgctctggaaaaggcagacgttgtgatggtcacccaacagtcctccgacggctggctggaaggagttaggcttagcgacggtgagcgtgggtggttcccagttcagcaagttgagtttatctccaatcctgaagtcagggcccaaaatcttaaggaggcacaccgtgtgaaaactgctaagttacagctcgtagagcagcaggcctag

SEQ ID NO: 238809 - DNA, 1560 bp, synthetic construct
  misc_feature 1..1560: note = Description of Artificial Sequence: Synthetic coding sequence
  source 1..1560: mol_type = other DNA
atgggtggcttttctagacgctgcagtaagttgatcaattcgtcacagcttctgtatcaggaatactctgacgtggttcttaacaaagagatccagagccagcaacgactggaatcattgtctgagacccccggacccagctcccccaggcagcctcggaaagcccttgtgtcatcggagtcctatctgcaaaggctgtctatggcttcgagcggaagtctgtggcaggaaattccagttgtccgtaactcgactgtgctgctctcaatgacacacgaggatcaaaagctccaagaggtcaagtttgagcttatcgtctcagaggccagttacctaaggagccttaatattgctgtcgaccatttccagttgtctacctctctccgggctacactgtcaaatcaggagcaccagtggttgttttcacgtctgcaagacgttagggatgtgtcggccaccttcttgtccgatttggaagaaaacttcgaaaataatatcttctccttccaggtatgcgacgtggtgctgaaccacgcccctgacttcaggcgagtctacttgccttacgtgactaaccagacttaccaggaaagaaccttccagagcctaatgaatagtaatagtaatttcagagaggttctcgaaaagctggaaagtgacccggtgtgtcagcggctctcactgaagagcttccttatccttccttttcaacggatcacgcgcctgaagttgctactgcagaacattttaaaacggactcagcccggaagcagcgaagaggctgaggccaccaaagcccatcacgcattagagcaattaatcagggactgcaacaacaatgtgcagagcatgcggaggacagaagaactgatttacttgagccagaaaattgaatttgagtgcaaaatcttccccctgatatcccagtcacggtggctggttaagagtggggagctgacggccctggaattcagcgcttcccccggacttcgccgaaaattgaacacccgtccagtgcatctgcacttatttaacgattgtctgcttctttcacgacctagagaggggagcaggtttcttgtgttcgaccacgcccctttctccagcatcaggggcgaaaaatgtgaaatgaagctccatggccctcataagaacctcttccgcctttttctgagacagaacacccagggcgctcaagccgaatttttgttcaggactgagacgcagtccgagaagcttcgctggatctccgcgctcgctatgccaagagaggaactggaccttctcgagtgttacaatagcccccaagttcaatgtcttcgcgcttacaaacctcgtgagaacgacgagttagctctcgagaaagctgacgtcgttatggttacgcagcaatccagcgatgggtggctggagggggttagattgtccgatggcgagcgcggatggttccccgtgcaacaggtagaattcatcagcaaccctgaggttcgggcacagaacctaaaggaggcgcacagggtgaagacggctaagctgcagctagtggaacaacaggcttag

SEQ ID NO: 238810 - DNA, 2394 bp, synthetic construct
  misc_feature 1..2394: note = Description of Artificial Sequence: Synthetic coding sequence
  source 1..2394: mol_type = other DNA
taggtagtggtgcccactttgaaacagcattcccaccctcccccactggccctgggatctggactccatgccccacacaaggggccactgcctcaggccagcgatccagccgtcgcaagacagcacagacctctgcctagtacccccgattcttcgcatcatgcgcaggcaacccctaggtggaggtacaataagcccctgccaccaacacctgacctgcctcagccccatctgccccctatcagtgctccaggaagctcacgaatctatcggcctttgcccccattgcctattatcgatcctccaactgagccgccacctctccccccaaagagtagggggagatctaggtccactagaggtgggcatatgaattctggcggtcatgcgaaaactcgacctgcttgtcaggactggactgtccccctgccagccagcgctggtagaacaagctggcctccagccactgcacgtagtactgaaagctttaccagcaccagtcggtccaagtcagaggttagtcccggaatggctttttctaatatgactaacttcctgtgccccagcagcccaaccaccccctggacacccgagttacaaggccctacatcaaaagatgaggcgggtgttagcgaacacccggaggctccagccagagagcctttacgacgaacgacccctcaacagggggcttcaggccctggtcggtcgcctgtgggtcaggcacgccaaccagaaaaaccctcccacctgcatcttgagaaagcatcttcctggcctcacaggcgggacagtggtcgcccacccggagattcaagcggacaggccgtggctcccagtgagggtgctaacaaacataagggctggtccaggcaggggctgagacgcccaagtattttgcctgaaggaagctccgatagtaggggccctgccgtagaaaaacaccccggtccctcagacaccgtggtcttccgagaaaagaagcccaaggaagttatggggggtttcagcaggagatgctctaagctcatcaactctagccagttgttgtaccaggagtactcagacgtggtcctgaataaagagattcaatcccagcaaaggctggagagcctcagcgagaccccaggtccctctagcccccgacagcctaggaaggccctggtgagcagcgagtcttacctccagagactcagcatggcctctagtgggagcctctggcaggagattccagtggtgcgaaactcaacagtattgctgagtatgacccatgaggatcaaaagctccaggaggtcaagtttgagcttattgtctctgaggcctcatatcttcgttccctcaatatcgccgtcgaccacttccagctcagtacatccttaagggccacactctccaaccaagagcatcagtggctgtttagcagactccaggacgtgcgtgatgtttctgcaacattcctgagcgatcttgaagaaaatttcgagaacaatattttctctttccaggtttgtgatgtggtgttaaatcatgctcctgattttagaagggtatatctcccctacgttacaaatcagacttaccaagagcgcactttccagtccctaatgaactccaattccaatttcagggaggttctcgaaaagttggaaagcgaccctgtttgccagcgattgtcactcaaatctttccttatactccctttccagcgaatcacaagattgaagttgctcctgcagaatattctgaagcgaacccagcccggatcaagtgaggaagcagaggccaccaaagcacaccatgctctggagcagcttataagagattgcaacaacaacgtgcagtctatgcgtcggactgaggaattgatttacctctcccagaaaatcgagttcgagtgtaagatctttccgctgatttcccagagtcgttggctagtgaagagtggcgagctcaccgcactggagttttccgcgagcccgggacttcggaggaagctcaacacccggcctgtgcatctgcatttattcaacgactgcttgctgctgagccgacctcgagaatcagaaaagcttaggtggataagcgccctggcaatgcccagggaggagttagatctcttagaatgttataactccccacaggttcagtgcttgagggcttataagcccagggagaacgatgagttggctttggagaaggccgatgtggtgatggtcacgcaacagtccagcgacggctggctggaaggagtgcggctaagtgacggagaaagaggctggtttcctgttcagcaggtggagtttatctccaatcccgaggtgagggcccagaacctgaaggaggcacacagagtcaaaaccgcaaagctgcagcttgtagaacagcaagcatag

SEQ ID NO: 238811 - DNA, 2958 bp, synthetic construct
  misc_feature 1..2958: note = Description of Artificial Sequence: Synthetic coding sequence
  source 1..2958: mol_type = other DNA
atgtctaggatcgagtcgctcacccgggcaaggatcgataggtctcgtgaattggcttctaaaacccgcgagaaagagaagatgaaagaagcgaaggacgctcggtacacgaacgggcacctgttcactaccatttccgtcagtggaatgaccatgtgctacgcttgtaataagtccatcaccgccaaggaggcactgatttgccctacatgtaacgtgaccattcataaccgctgcaaggatacacttgctaactgcactaaagtgaagcagaaacagcagaaagccgctctcttaaagaataatacagccttacagtcagtaagcctcagatcaaagacgaccattcgggaaaggcctagtagtgccatttacccttccgattcctttaggcaatctttactgggctcaaggagaggacggagcagcctctcactggccaagtccgtctctacgaccaatattgccggacactttaatgacgagagtccactcggccttagacgtatcctctctcaatcgactgattctctgaatatgcgcaatcgcactctcagtgtcgagtcacttatcgatgaggaggtgatttactcagaattaatgagcgattttgagatggatgagaaggatttcgctgccgactcctggagtctggctgtcgacagttcttttttgcagcagcacaagaaggaagtcatgaagcaacaggatgtgatttatgagctgatccagacggagttgcaccacgtgcggactcttaagatcatgacacgactgtttagaactggaatgttggaagagctgcatctcgaaccgggagttgtacagggactctttccttgcgttgacgaactgtccgacatacacacccggttcctgtcgcagctgctggagcgaagacggcaggccctctgtccgggtagcacaaggaattttgtgatccaccggcttggtgacctattgatctcccagttctctggccctagcgctgagcagatgtgcaagacttattcagaattctgtagtcggcacagcaaagcgctgaagctgtacaaagagctgtacgcaagagacaagcgatttcaacagtttattcgcaaggtgacaaggcccgctgtcctcaagaggcacggtgtgcaggagtgtatactattggtcactcagagaattacgaagtatccgcttttgatcagtcggattctccaacattcacacgggatcgaggaggaacgccaggaccttaccaccgcacttgggctggtcaaggagctgcttagtaacgtggacgagggaatctaccaactggaaaaaggagccaggctgcaggaaatatataatcggatggacccaagagcccagaccccagtgccaggcaaaggacctttcggtcgtgaggagctgcttcgtcgaaaattgattcacgatggatgtctactgtggaagacggcgaccggtaggttcaaagacgtgctcgtgctgttgatgacggatgtgctcgtgtttctccaggaaaaagaccagaaatacatttttcctacactcgacaagccctccgtcgtgtccctgcaaaacttaattgtgagagacatcgccaatcaagaaaagggaatgtttctcatctctgccgcacctccagagatgtacgaggtccataccgcttctagggacgatagatccacgtggatcagggtgatccagcaaagtgtgagaacatgcccaagcagggaggattttccccttatcgagactgaagacgaagcttatctaagacgcattaagatggagctgcaacagaaggatagagcgctggttgagctcttgagggagaaggtcgggctgtttgccgagatgacccatttccaagccgaggaagacgggggatctgggatggccctgcctacactgcctagagggttgttcaggtcagagagcctcgaaagtcccagaggggaacgactgctgcaggatgccattcgggaggtggaaggattaaaggacttgctggtgggcccaggggtcgaactgctgctgacacctcgagagccggcactgcctctggagcccgactccgggggtaatacgagcccaggagttacggcgaatggcgaagccagaactttcaatgggagcatagagctttgccgggctgattctgactcatcccagagagatcggaatggtaaccagctgcggtctccccaggaggaagcactccagaggttggtgaatttgtacggactgctgcacgggctgcaggctgccgtcgcacagcaggatacactcatggaggcgagattccctgaggggcctgaaaggcgagagaaactctgcagggccaactcccgcgacggcgaagcaggaagagctggggctgcgccagttgcgccagaaaaacaggccaccgagctcgccctactccagcgccagcacgctcttttgcaggaagagctcagacgttgtaggaggctgggcgaagagcgtgctaccgaggcaggttctctcgaggctcgcctgagggagagcgagcaagcacgcgcactgctggaacgagaggctgaggaggcccgacggcaactagctgccctgggacagactgaacccctccccgcagaggctccctgggcgcgtcggcctgtagatccgcgaagacgtagcctgccagcaggcgatgctttgtacctaagctttaaccctccgcaaccaagcaggggcacagaccgcctggatcttcctgttaccacacgaagtgtccataggaactttgaggaccgtgagcgccaggagttggggagtcccgaggaaagactgcaggatagttctgatcctgatacaggtagtgaggaggaggggtcctcacggctttctccgcctcactcacctcgagattttacccgaatgcaagacatcccggaagagactgaaagcagggatggcgaggcagtcgccagcgagtcgtag

SEQ ID NO: 238812 - DNA, 2877 bp, synthetic construct
  misc_feature 1..2877: note = Description of Artificial Sequence: Synthetic coding sequence
  source 1..2877: mol_type = other DNA
atgaaggaggctaaagatgctaggtataccaatggtcacctgttcaccaccataagcgtgagtggcatgacaatgtgttacgcctgcaacaaatccataaccgccaaagaagctctcatctgtccaacatgtaacgtgacaattcacaatcgctgcaaagacaccctggctaactgcacgaaggtgaaacagaagcagcagaaggctgcactcctcaaaaacaatactgcacttcagagtgtttccctgcggtcgaaaaccaccatccgggaaagaccttccagcgccatctacccttctgattctttccggcagtcattgctaggtagcaggcggggtcgcagctctcttagtcttgccaaatccgtgtccacaaccaatatcgctggacatttcaatgacgaaagcccactcggcttgaggagaattctcagccagtcgaccgacagtctgaacatgcggaatagaactttgagtgttgaaagcctaatcgatgaagaggttatctattccgagctcatgtctgactttgaaatggatgagaaggattttgccgcagattcatggtcgttggcggtagacagtagctttctccagcagcacaagaaggaggtgatgaaacagcaggacgtgatctacgagctcatccagacggagcttcatcacgtccgcactctgaagatcatgactaggctgtttcgcactggtatgctcgaggaacttcaccttgaacctggggtcgttcagggactatttccatgcgtagacgaactatcggatatccatactcgcttcttgtctcagctgctggagcgtcgacgtcaggctctttgccccggttcaacacgcaattttgtaatccacagattgggcgacctcctgatttcccagttctccgggcctagtgccgaacagatgtgcaagacctattccgaattttgctcacggcatagtaaggctctcaaactgtacaaagagctatatgcgagagacaagcggtttcagcagttcatacggaaagtgacccgccctgcagtgcttaagcggcatggcgtgcaggaatgtattttgctggtgactcagaggattacaaagtacccgctgctgatcagccgcatactccagcattctcacggaatagaggaggagcgacaagatctcaccaccgcgctgggccttgtcaaagagctgctttcaaacgtggacgaaggcatctaccagctagagaagggagccaggcttcaagaaatttataatcggatggacccacgcgctcaaactccagtgccaggcaaagggccatttggcagagaggaactcttgcgcagaaagctgatacatgacggctgtttgctttggaagactgcaactggtcgatttaaggatgtcctagtcctgctgatgacagatgtcctggtcttccttcaagagaaggaccaaaaatacatctttccaacactcgacaaaccctccgttgtcagccttcagaatctgatcgtgcgagatattgcaaaccaggaaaagggaatgttcctcatcagcgctgcccctcccgagatgtacgaggttcacacagcttcaagagacgaccggtcaacatggatccgcgtgattcaacaaagcgtcaggacttgtcctagcagagaggatttccccttaatcgagaccgaggacgaggcctacctacgcagaatcaagatggagttgcagcagaaggaccgcgctttagtggagctgctgagggagaaggttggcctattcgctgagatgacccattttcaagcagaggaggacggcggatctgggatggctcttcccaccctgcccagagggctcttccgtagcgaaagtcttgagagccccaggggcgaaagactgctccaggacgctatccgcgaggtggaaggcctgaaggacctgctcgtgggccctggagtggagctactactgaccccacgcgagcccgcactgccccttgaacccgacagcggcggtaatacctctccaggggtgacagctaacggcgaggctcgaacgtttaacgggtcaatcgagctctgccgggcagactccgactcttcacagagggacaggaatggcaatcagctgcgcagccctcaggaggaggctctgcagaggttagttaatctttacggtctgttacatggcttgcaggcagccgtcgcacagcaagatactctcatggaagccagattcccagaaggcccagaaagaagggagaaactctgtcgggctaacagccgcgacggcgaagcaggacgggcaggggcagccccagtggcccctgagaagcaggcaacggaactggctctcctgcagcggcagcatgccctactgcaggaggagctcaggcgttgtcggaggctgggtgaagaacgcgctactgaagcgggtagcctcgaagccagactccgcgaatcagagcaggccagggcactacttgagagagaagccgaggaggcacggcgacagctggcagctctcgggcagactgagccgctgcctgcagaggcaccctgggcacggaggccggtggatcctaggcggcgaagcctccccgcaggcgatgcactatatctgtcctttaacccgccacaaccgagtcgtggcactgaccgcctcgatcttcccgttactacacgcagcgtgcaccggaactttgaggacagagagcgacaggaactggggtccccggaagagcgtctgcaggacagctcagaccccgatactggatctgaggaggagggttctagccgcctctctcctccgcacagtcctagggacttcacaagaatgcaggatattccagaagagacagaatcacgagatggcgaggctgtcgcctccgaatcttag

SEQ ID NO: 238813 - DNA, 2961 bp, synthetic construct
  misc_feature 1..2961: note = Description of Artificial Sequence: Synthetic coding sequence
  source 1..2961: mol_type = other DNA
atgtcgagaatagaatctcttacccgggcaaggatcgaccggtcgagagagctagcctctaagacccgtgagaaagaaaagatgaaggaggcgaaggacgcacggtatactaacggtcacctcttcactacaatatctgtttctggaatgaccatgtgttacgcttgtaacaagtctattactgccaaggaggccctgatatgtccaacctgtaacgtcactatacacaaccgatgtaaggacactttagccaactgcaccaaggttaaacagaagcagcagaaggcagctttactgaaaaacaataccgcactgcagtccgtttctcttcggtctaagacaacgatccgggagagaccaagttcagctatttacccctcagatagcttcaggcagtcgctgctcggctccaggcgcggacgctcttctctgtcgctcgccaagtccgtatctacaaccaatatcgctggacattttaatgacgaaagtccactcgggctccgcagaattctctctcagtcgactgacagcctgaacatgaggaatcggaccctctctgtcgaatccctaatcgatgaagcagaggtaatttattcagagttgatgtcagacttcgagatggatgaaaaagatttcgccgctgactcatggtccttggcagtcgattcttccttcctgcagcagcacaaaaaagaggtgatgaagcagcaggatgtcatctacgagctcatccagactgagctccatcacgtccggactctcaagatcatgacccgccttttcaggacaggaatgctagaagagctacatctcgagcctggcgtagtgcaaggcctgtttccttgcgtggacgagttgtctgatattcacacacgcttccttagtcagttattagagagacgacgtcaggccctatgtccaggtagcacccgcaatttcgtgatccataggttgggcgatctgcttatctctcagttctcagggccttccgccgagcagatgtgcaagacctacagcgaattctgcagccgccacagcaaggccctgaagctgtacaaagagctatacgccagagacaagaggtttcaacaattcattcgaaaggtgacaaggccagccgtgctcaagcgacacggcgttcaggagtgtatccttttagtaactcaacgcattaccaagtacccgcttctcatctcaaggatcctccaacactctcacggcatcgaggaggaacgccaagacctgaccaccgccctcggtctggtaaaggaactgctgtcaaacgtggatgagggaatttaccaacttgaaaagggagcccgactgcaggagatttacaatagaatggacccgagggcccagaccccggtaccaggaaagggcccatttggccgtgaggagctgctgcgcaggaagctgattcatgatgggtgtcttctatggaaaaccgcaaccgggagatttaaggatgtactggtactgctgatgactgacgtattggtattcctccaggagaaagaccagaaatatatcttccccacgctggacaaaccaagtgtagtgtcgctccaaaatctgatagtgcgagacatcgccaatcaggaaaaagggatgtttctgatcagcgctgcccctcccgagatgtatgaggtccataccgcctcgagagacgacaggagtacatggatccgggttatccagcagagcgttcggacttgtcctagccgcgaggattttcctttgattgaaactgaagatgaggcttacctgcgacggattaaaatggagttgcagcagaaggacagggctctcgtcgaactcctgcgtgagaaagttggcctgtttgcagagatgacccatttccaggcagaggaggatgggggttccggcatggcccttcccactttacctaggggtctgtttcggtctgaaagcttggagtcccccaggggcgagcgtctgctgcaggatgcgatccgtgaagtcgaggggttgaaagacctgctcgttggtccgggagtggagctgctgttaacgcccagggaacctgccctcccactggagcccgactcagggggaaataccagtcccggtgttaccgctaacggcgaggcaagaacattcaatggctctatagagttatgtagagctgatagcgacagctcccaacgagaccgtaatggtaaccagctcaggagcccacaggaagaagctctgcaaaggttagtgaatctctacggactcctgcatggtttgcaggccgctgtggctcagcaggatacgttaatggaggccaggtttcctgaggggcctgagagacgcgaaaagctgtgcagggccaatagccgggatggcgaggcgggacgtgccggagccgctcccgttgcccctgagaagcaggctacggagttggctctcctccagcgtcagcatgccctcctccaggaagagttgcggaggtgtagacggctcggcgaagagagagccaccgaagccggatcactggaagcacgcctgcgggagagtgagcaggcaagggctctgctcgaaagagaagcggaggaagctcgacgacagctagccgctctgggtcagactgaaccacttcccgcagaagcaccttgggcccgaagacccgtggatccaagacggcgttcattgcccgcaggtgatgcgctgtatctgtcttttaatcctccccagcctagcaggggtaccgacagactggacttgcccgttacgaccaggtctgtgcacaggaacttcgaagaccgggagaggcaggagctcggatcgccagaagagcgtcttcaggattcaagcgacccagacaccggttcagaagaggaaggttcaagcaggctgtccccaccccatagtccgagggattttacaaggatgcaggatatccctgaggagaccgaaagtagggacggcgaggccgttgctagtgagagctag

SEQ ID NO: 238814 - DNA, 2964 bp, synthetic construct
  misc_feature 1..2964: note = Description of Artificial Sequence: Synthetic coding sequence
  source 1..2964: mol_type = other DNA
atgtgttgctgctgcggctgttgtccattgctagcccacctagagcaaggtagcctgcgtgaacggacaagggagaaagagaagatgaaggaggcaaaagatgcacgttataccaacggccacttgtttaccacaatctccgtgtcggggatgacaatgtgctatgcttgcaacaaaagtatcacagccaaagaagctttgatatgtcccacctgcaatgtgactatccataatcgctgtaaggatactcttgccaactgtaccaaggtgaaacagaaacagcagaaggccgctctactgaaaaataatacagccctacaatctgtgtctttgcgcagcaaaactacaattagggagagaccttctagcgccatctacccgtctgactcttttcgacaaagcttgctcggctctagaagaggtcgctcatcactctcgcttgcaaagagtgtgtctaccaccaacatcgccggacacttcaatgacgaatctcctctgggccttagacggatcttgagccagtcaaccgacagccttaacatgagaaacagaacattgtcggtggagtcactgatcgatgaagctgaagtaatttattctgaacttatgtctgactttgagatggacgaaaaggacttcgccgctgacagctggtccctggccgtggacagttcgttcctacagcaacacaaaaaggaggtgatgaaacaacaagacgttatctacgagctgatccagaccgagctacatcacgtgagaacactgaagatcatgacgcgcttgttcagaacaggaatgctggaggagctgcacttggaaccgggagtcgtacagggactgtttccatgcgtggacgaactgtccgatattcatacccgcttcctctcccagttgctagagaggcgcagacaagcgctatgccccggatccacacgcaacttcgtgattcaccggctgggagatctgctcatttcccaattcagtggcccttcagccgagcagatgtgtaagacgtacagcgaattttgctctcgccactccaaggcccttaaactgtataaagagctctacgccagagacaagcgattccagcagtttatccgtaaagtcactagaccagccgtcctgaagcgtcacggggtgcaggaatgcattctgcttgtgactcagaggatcactaaatatcctcttcttatcagcaggattttgcagcacagtcacggtatcgaagaagagcgccaagacctcactaccgccctgggcctggtgaaggaacttctcagcaacgttgatgaagggatttaccagctcgagaagggagccagactgcaggaaatttataaccggatggatcctagagctcaaacacctgtgccaggtaaaggcccattcggacgagaggaactcctcagacgaaagctgattcatgacggctgtcttctttggaaaaccgctactggacggtttaaggatgtacttgtgctgttgatgacagacgtcctggtgttccttcaggagaaagatcagaaatacatctttcccaccctcgataagcccagtgtggtctctctgcagaacctgatcgtccgggatattgctaaccaggaaaagggaatgttcctcatatccgcagcaccaccagaaatgtacgaggtgcacactgcctcccgggacgaccgatcaacctggattagagtgatccagcagagcgtccgcacctgtccttccagagaggatttccctctgattgaaactgaagatgaggcctacctgagacggatcaaaatggaactgcagcagaaggatagggctttggtggagttgctgcgcgaaaaagtgggactctttgctgaaatgacccattttcaggccgaagaggacggtggctctggcatggctctgccaacattacccagaggactcttcagaagtgagtccctcgaatcacctaggggagaaagattgttgcaggatgctattagggaggtggaaggcctgaaagacttgctcgtgggccctggtgtggaactgttactgacccccagagaacccgctttacctctcgaacccgattccggcggtaatacgagccccggtgtgaccgccaacggagaagctcgaactttcaacggcagtattgagctttgtcgcgctgacagcgacagttcccagcgggaccgaaacgggaaccagctaaggagcccccaagaggaagccctgcagagacttgtcaacctgtacggtcttcttcatggactgcaggccgctgtggcccagcaggacactttgatggaggccaggttcccggaaggaccggagaggagggaaaagctgtgcagggcaaacagtcgcgatggtgaggcaggcagggcgggagctgcaccagtggctcctgaaaagcaggccacagaactggccctcctgcagagacagcatgctctgctccaggaagagctcagaaggtgtagacgtttgggcgaagagcgggcaaccgaagcaggtagtttggaggctaggctgcgagaaagcgaacaggccagggctctgttggaaagagaagccgaggaagccagaagacaactggctgctttgggacagaccgagccactacctgcggaggcaccgtgggctcgaaggccggtggatcccagaaggcgttccctgccggcaggagatgccttatatttgtccttcaacccaccacaaccgtctcggggaactgatagattggatttacccgtgacaacccggtccgttcatagaaattttgaagacagagagaggcaggagctgggcagtccagaggagaggctgcaggattcgtcggatcccgacactggctccgaagaggaaggctcttcacggctatccccccctcacagcccacgggactttactcgtatgcaggatattccagaagagacagaatctagagatggtgaagcagtagccagcgagtcttag

SEQ ID NO: 238815 - DNA, 2877 bp, synthetic construct
  misc_feature 1..2877: note = Description of Artificial Sequence: Synthetic coding sequence
  source 1..2877: mol_type = other DNA
atgaaagaagctaaagacgctagatataccaacggtcatctatttactaccattagcgtgagtggaatgacaatgtgctacgcctgcaataagagcatcacagccaaagaggccttaatttgcccaacttgcaacgtaacaatccataatcgatgcaaggacacattggccaactgtaccaaggttaagcaaaaacagcagaaagcagcgctgttgaaaaataacacagctctgcagtccgtgtctctccgctcaaagacgacaatccgcgaaaggccgagctccgccatttacccttccgattcttttaggcagagtttgctcggcagccgtagaggaagatcaagtctgagcctcgcgaagagcgtgtcaacgactaatattgcgggtcactttaacgatgaatcacctctcgggttgaggaggatactttctcagagcaccgatagcttgaacatgagaaaccggactctgtcagttgaatccctcatcgatgaagaggtaatttactccgagttgatgtccgactttgaaatggatgagaaggactttgccgcagactcatggagcttggccgttgacagctccttccttcagcagcataagaaggaggtcatgaagcaacaggatgttatttacgagctgatccagacagagttgcaccatgttagaacgttaaaaatcatgacacgcttattcaggaccggtatgcttgaggaactgcacctggaacctggcgtggtgcaggggctgtttccgtgcgttgatgaactgtccgatatccatacaagattcctttctcagttactggaaagacgcaggcaggccttatgtcctggttccaccaggaacttcgtgatccaccgactgggcgacttactcatttctcagttctccggccctagcgcagagcaaatgtgcaagacttacagcgagttttgttcaagacattctaaagccttgaagctgtacaaagaactctatgcacgggacaaacggttccagcagttcattcgaaaagtcacaaggccggcagtgctgaaaaggcacggggtacaggaatgtatcctcctggtgacgcaacgaattacgaagtaccccttactgataagcaggatactgcagcacagtcatggaatagaagaggagcggcaagacctgacaactgctcttggtcttgtgaaagaactgctgagcaacgtggacgaggggatttatcagctagaaaagggcgctcggttgcaagagatctataaccgtatggatcccagagcccagactcccgtgccaggcaagggcccatttggaagagaggaactcttgcgcaggaagctgatccacgacggatgtctactatggaagacagctactgggagatttaaggacgtgcttgtactcctcatgactgatgtacttgtgttcctgcaggaaaaggatcagaaatatatttttcctacgttggataaaccctccgtggtttccctgcagaatttaatcgtgcgagacatcgcgaaccaggaaaagggcatgttcctgattagtgctgccccacccgagatgtacgaggtgcataccgcgtcaagagacgatcggtccacctggataagagtgattcagcagtctgtgaggacatgcccttcccgggaggattttcctctgatcgagaccgaggacgaggcttatctgcggaggatcaagatggaactgcagcagaaggaccgtgcactggtcgagcttctgcgcgaaaaggtgggtctgttcgcagagatgacccacttccaggccgaggaggatggaggctcgggtatggccctcccgacgctccctaggggtctcttcaggtccgagtcactcgaatcacccaggggggagcgcctgcttcaggatgcaatcagggaagtcgaaggactgaaagatttgttagttggcccaggtgtcgaacttttgttaacgcccagagagcccgcactgcctttagagcccgattctgggggaaatacttcaccaggggtgactgcaaacggtgaggccaggaccttcaacggttccattgagttgtgccgtgcggactctgacagctctcaacgcgatagaaacggcaaccagttacgatccccacaggaggaggctctgcagaggctggttaacctgtacggtctactgcatggcctgcaggcggcagtggctcaacaggataccttgatggaagctcggttccccgaaggaccagaacgacgagagaagctttgccgggcaaattccagggacggggaagctggtagggcaggcgctgcccctgtcgcccctgaaaagcaagcgacagagttggccctcctccagagacagcacgcactgcttcaagaagaactccgtaggtgccggagactaggggaggagagagccaccgaagccggatcactggaggccagattgagggagtctgagcaagctcgagcactgttagagcgtgaggcagaagaagccagacggcaactggcagccttgggccaaacagaaccgcttcccgcagaggccccatgggcaaggcgacccgtggacccaaggcgcagaagcctgcccgcaggagatgctctttacctgtctttcaacccaccgcaacccagtagaggtacagatcgcttagaccttcctgtgaccacacgaagcgtgcatagaaacttcgaagaccgggaacggcaggagttagggagtccagaagagcgcctccaagacagctccgacccagatactggatccgaagaagaaggcagcagccgcttgtctccacctcacagccctagagactttacccggatgcaggacattcctgaggagacagagagcagggatggagaggctgtggcatccgagtcatag

SEQ ID NO: 238816 - DNA, 1548 bp, synthetic construct
  misc_feature 1..1548: note = Description of Artificial Sequence: Synthetic coding sequence
  source 1..1548: mol_type = other DNA
atgctcagtaaatccgtacccgtaagtgggatcaactgtctgttggaccgcagtgacaccgatggcaatgtctctcagtcttcagcgattgatctgcgcaaacggtgcagccagttggagggacattctggcactagagtgggcagctctctcaggcagactttctcctttttaagcggaatgacagggaaagccaaaacccgggagaaagaaaagatgaaagaggcaaaggacgcaaggtacacgaacggacatctgttcacaactatttcagtgagcggcatgactatgtgctatgcttgcaacaaatcgattactgctaaggaagccctaatatgccccacttgtaatgtcactatccacaatagatgcaaggacacactcgccaactgtacaaaggtaaaacagaaacagcagaaagccgctctgctgaaaaacaatacggctctgcagagtgtgtccctgaggtccaagaccactattagggagcgcccttcaagtgcaatctacccctcagatagttttcggcagtccctgttggggtctcgcagagggaggtcctccctctcactggcaaaaagtgtgagcacaactaatattgctgggcactttaatgacgaaagcccgctgggactgagacgaatcttgtcccaatccaccgactccttgaatatgaggaatcgcacactcagtgtcgagtctttaatagacgaggctgaggtcatatacagtgagctgatgagtgattttgagatggacgaaaaagactttgccgctgactcatggagtctggcagtggatagtagtttcttgcaacagcacaaaaaagaggttatgaaacaacaagacgtgatatacgagctcatacagactgagctgcaccacgtcaggactcttaagatcatgacacggctgttcaggacggggatgctagaggagcttcatttagagccgggagtggtccagggactatttccctgtgtcgacgagcttagtgacattcacacccggtttctttctcaacttctggagaggcggcgtcaagctttgtgtccaggtagcacccgtaattttgtgatccatcggctgggagacttactgatctcacaattttctggccctagtgcagagcagatgtgtaaaacctacagcgagttttgtagccgccattcaaaagccctgaaactctacaaagagctatacgcgagggataagaggtttcagcaattcatccgaaaggtgactcggcctgcggtgctcaaaaggcatggggtgcaagaatgcattctgctagtgacccaacgtattactaaatatccactgctcatctcaaggattttgcagcacagccatggtattgaggaggagcggcaggatctgacgaccgccctgggcctcgtgaaggagctcctctccaacgtcgacgagggcatttaccagctggagaagggcgctagactccaggagatctacaatttgctcctcctcttctccctgtcaccctcgttcatggaggccctgggcgataatctggctagctggtcctag

SEQ ID NO: 238817 - DNA, 1332 bp, synthetic construct
  misc_feature 1..1332: note = Description of Artificial Sequence: Synthetic coding sequence
  source 1..1332: mol_type = other DNA
atgaaagaagccaaggatgccaggtatacaaacggacacctgtttacaactatatctgtgtctggcatgacaatgtgttatgcctgcaacaagtccatcacggccaaggaagccctgatttgcccaacatgtaacgttactatccataaccgttgcaaggatacgctcgctaattgcacaaaggtgaagcaaaagcaacagaaggccgctctgttaaagaataacacggcattacagtcagtgtcgcttcgctcgaaaacaactatccgggagaggcccagttctgcaatctatccatctgatagcttcagacagtctcttcttggcagccgtcgaggaagatcgtcgttaagtctggccaaatcagtcagcactactaatatcgcaggacacttcaacgacgaaagtcctctgggcctcaggaggatcctgagtcagtctacggattctctcaatatgaggaaccggaccctatccgtcgagagcctgatcgatgaagctgaggttatctactctgaacttatgtccgacttcgagatggacgagaaagatttcgcggcagatagttggagtttggcagtggactccagtttcctccagcaacacaagaaggaagtcatgaaacagcaggatgtgatttacgaactcatccagactgaactgcatcatgtgcggacattaaagataatgacacggctgtttcggactggaatgctggaggaactgcacttggagccgggtgtggtgcagggcttgtttccttgcgtggatgagctgtcagacattcacacacggttcctctctcagctcctcgaaagacgcaggcaggccctgtgccctggaagcactagaaattttgttatccaccgtcttggtgatctcttgatatctcagttctctgggccaagcgcagagcagatgtgcaagacatatagcgaattttgttccagacacagtaaagccctcaagctatacaaagaactttacgctagggataagcggtttcagcagttcatacggaaagtaaccagacctgccgttctcaaaaggcatggtgtgcaggaatgcatattacttgtgacgcaacgaattacaaagtatcccctcctgatttctcgcattctccagcactcacatggcatcgaggaagagaggcaggacctcacaactgccctcgggttagtaaaggaactgctcagcaatgtcgacgaggggatataccagctggagaaaggagccaggctacaggaaatttacaatctgttgctgcttttctctttgtccccctcattcatggaggccctgggcgataacctggcttcatggtcctag

SEQ ID NO: 238818 - DNA, 4167 bp, synthetic construct
  misc_feature 1..4167: note = Description of Artificial Sequence: Synthetic coding sequence
  source 1..4167: mol_type = other DNA
atgtccagacccccacctaccggcaaaatgcccggagccccagagaccgcgccaggagatggggcaggggcatccagacagcggaaactagaggcactgatccgagatcccagatcccccattaatgtcgagtctcttctggacggcctgaacagcctggtcctggacctggactttcctgccctgaggaagaacaaaaacattgacaacttcttaaaccgctatgaaaagatcgtgaagaaaataagaggactgcagatgaaggctgaagactatgacgtcgtgaaggttattggacggggagccttcggggaggtccagttagtgagacataaggcttctcagaaggtgtatgccatgaagctcctttccaaatttgagatgataaagagatctgacagtgcttttttctgggaggaaagggacattatggccttcgccaattccccttgggtggtgcagctattctacgcctttcaggacgacagatacctgtacatggtgatggaatatatgcctggtggggacttggtgaatttgatgagcaattatgatgtgcctgagaaatgggccaagttttacacagccgaagtggttttggccctggatgccatacacagcatgggtctgatccaccgggatgtaaagccagataatatgctgcttgacaagcacggacacctgaaactcgctgacttcgggacttgtatgaagatggatgaaaccggtatggtccattgtgacactgccgtgggcacacctgactacatttctcctgaagtacttaagtcacagggaggcgatgggttttacggtagagaatgtgactggtggtcggtgggcgtgttcctgtacgagatgcttgtgggagacacaccattctacgccgactctttggtggggacctactctaagattatggatcacaaaaacagtctctgcttccccgaggacgcagagatatctaaacacgcaaaaaacttgatttgcgctttcctgacagatcgagaagttcgcctcggaaggaatggggtggaagagattaggcagcacccattcttcaagaatgaccagtggcactgggataatatccgtgaaacagccgctccagtggtgcctgaattaagtagtgatattgatagtagcaattttgatgacatcgaggatgataagggagacgtcgagactttccctatcccaaaagccttcgtcggaaatcagttgccatttataggcttcacatattaccgggaaaatcttctgctcagcgattccccctcctgccgcgaaacagatagtatccagagccggaagaacgaagagtcccaagaaatacagaagaagctgtatacccttgaagaacatctgtccaatgagatgcaggctaaggaggaattagaacaaaaatgcaagagtgtgaacaccagattggaaaagaccgcaaaagaactcgaagaggagattacgttgaggaagtcagtggagagtgccttacgacagttagaacgcgagaaggccctgctacagcacaaaaacgctgagtatcagaggaaggccgaccatgaggcagataaaaagcgcaacctcgagaacgatgttaactccctgaaagaccagctcgaagatcttaaaaagcggaatcaaaattctcagatttccactgagaaggttaaccagctccagcgtcagctcgatgaaacgaacgccctcctgaggacagaaagcgatacagcagcacggctccgtaagactcaggcagagtctagcaagcagatccagcaactggagtccaacaacagagacctccaagacaaaaattgtctgctggagacggccaagctcaaactcgaaaaggaattcatcaatctccagtcagcgctggagtcagaacgccgagaccggacccatggatccgagataatcaatgacctgcagggccgtatctgtggattagaggaggaccttaaaaatggaaagatccttctcgccaaagtcgagttggagaagcgtcagctgcaggaacgtttcacggatctcgagaaagagaaatcaaacatggaaatagatatgacctatcaactcaaggtcatccagcagtccctggaacaggaagaggcagaacacaaggcaaccaaagctcgtcttgcggacaagaacaaaatttacgagtcaatcgaggaggccaaatcagaggccatgaaagaaatggagaaaaaactgctcgaagaacgaactctgaaacagaaggtggaaaacctgctccttgaggccgaaaagcgatgttcactgctcgattgcgatctaaaacagtctcagcaaaaaattaacgagctgctgaaacaaaaggacgtgttaaatgaagatgtgcggaacctgacgctgaagattgagcaggagactcaaaagaggtgcctcacccaaaacgacctgaaaatgcagacccagcaggtcaacaccttgaaaatgtctgaaaagcagctgaaacaggaaaacaaccacctaatggaaatgaagatgaacttggaaaagcagaacgccgaactcagaaaggagcgccaggacgctgacggccaaatgaaggagctgcaggatcagctcgaagcagaacagtatttttctacattgtacaagacccaagttcgcgaactgaaggaggaatgcgaggaaaagactaagctcggcaaggaactgcagcaaaagaagcaggaactgcaggacgaaagggatagtttggccgctcaactcgagatcacactgacgaaggcagacagcgaacaactggcacggtccatcgccgaggagcagtactccgatctggagaaagaaaaaattatgaaggaattggagatcaaggagatgatggctaggcacaaacaggagctcacagaaaaggatgccacaattgcctctctggaagagacaaatcgaactcttacaagcgatgtggctaacctagcaaatgaaaaagaagagctaaataataagctgaaagacgtgcaggaacagctgtcacgcctgaaggatgaggagatcagcgctgctgcaattaaggcccaatttgagaagcagctgctcaccgaacggacgctgaagacgcaagcagtgaacaagctcgccgaaattatgaatagaaaggagcctgtgaaaaggggaaacgacactgacgttagaagaaaagaaaaggagaaccgaaaactgcacatggagctcaagtcagaaagagaaaagctcacccagcagatgatcaagtatcagaaggaactcaatgagatgcaggctcagatagctgaggaaagccagatccgcatcgagcttcagatgacacttgatagtaaagacagtgacattgagcagttgcggtctcaactgcaagccctacacatcggattagatagttcgtctataggcagtggtccgggagacgctgaagccgatgatgggtttcccgaatccagactcgagggatggctgtcattgcctgtacgaaacaatacgaagaagtttggctgggtgaagaagtacgtcattgtctcttcaaaaaaaattctgttctatgattccgagcaggataaagagcagtccaacccttatatggtactggacatagataaactgttccacgtgagacccgtcactcaaacggacgtctatcgggctgatgctaaagagattcccaggatctttcagatcctgtacgccaatgagggagaatccaaaaaagaacaagagttcccagtcgagcctgtgggcgagaaatccaattatatctgccacaaagggcatgagtttattccaactctctaccacttcccaacaaactgtgaagcgtgcatgaaacctctctggcacatgttcaagcccccacccgctttggagtgcaggcggtgccacatcaagtgccataaggatcacatggacaaaaaagaggaaatcatcgcaccatgcaaggtatactacgatatctcaaccgcaaagaatttattacttttggccaactccaccgaggagcagcagaagtgggtgagccgtctggttaaaaagattccaaaaaagcctcccgcaccggacccgttcgcgcgaagcagccccaggacatccatgaaaatccaacagaaccagtccatacgccgtccgtccagacaattggctcccaacaagccgagttag

SEQ ID NO: 238819 - DNA, 2241 bp, synthetic construct
  misc_feature 1..2241: note = Description of Artificial Sequence: Synthetic coding sequence
  source 1..2241: mol_type = other DNA
atgatttacaaggtggagtgtgggcttgaggaggatctgaagaacggcaaaatcctcctggccaaggttgagctcgagaagcggcagcttcaagagcgtttcacagatctggagaaggaaaagagtaacatggagattgatatgacgtaccagctgaaggtgatccagcagagtctcgaacaggaggaagctgaacataaagctacaaaagctaggcttgccgataagaacaagatctacgagtccatagaagaagcaaagagtgaagccatgaaggaaatggagaaaaaactgctggaagagaggactctgaagcagaaagttgagaatctcctgctagaggccgagaagaggtgctccctactagattgcgatcttaaacagagccagcagaagatcaacgagcttctcaaacagaaggatgtgctcaacgaggacgtccgtaatcttacgctaaaaattgaacaagaaacccagaaacgctgcctgactcagaacgacctgaaaatgcagactcagcaggttaataccttgaaaatgtccgagaagcagctcaaacaggagaataatcatttaatggagatgaaaatgaacttggaaaagcaaaatgcagaactgcgtaaggagcgacaagacgcagatgggcaaatgaaagaactgcaggatcagttggaggcagaacagtatttcagcacactgtataagactcaggtgcgtgagttgaaagaagaatgcgaagaaaagacaaaattaggcaaagagttacagcagaaaaaacaggagctgcaggatgagcgagactcattggcagctcagctggagattactctaacgaaagccgattctgagcagttagccaggagtatagccgaagaacagtactccgatctggaaaaagaaaaaatcatgaaagaattggagattaaagagatgatggccaggcacaagcaggaacttactgagaaggatgcgaccatcgcatctctggaggagaccaatcggactctcactagtgatgtggccaatcttgctaacgaaaaggaggaactgaataacaaattgaaggacgtccaggagcagctgtctaggctgaaagatgaggagatctcagctgctgcaatcaaagcacagtttgagaagcagctcttgaccgagcggacccttaaaacgcaggctgtgaataagctggccgagatcatgaatcgcaaggagcctgttaaacgcggtaacgatactgatgtgcggagaaaagaaaaagaaaatcgtaaacttcacatggaactgaagtccgaacgcgaaaagctgacacagcagatgataaagtaccagaaggaactaaatgaaatgcaagcccagatagcggaggagtcacagatccgtatcgagctgcagatgaccctggactcaaaagatagcgacatagaacaactgcgcagtcagctccaggcacttcacatcggtctcgacagctcaagcataggaagcggacccggagacgctgaagccgacgacgggttcccggaatccagactcgaaggctggctgagcctccccgttcgaaacaatactaagaaatttggttgggtgaagaagtacgtgatcgtctcttcgaaaaagatcctcttttacgattccgaacaggataaagaacaatctaatccctacatggtgctcgatatcgacaagctgtttcacgtgcgaccagtgacacagacggatgtgtatcgcgctgatgcaaaagagattcctcgaatctttcaaatcctttatgctaacgagggagagagcaagaaggagcaggagttccccgtggagcccgtgggagagaagtcgaattacatttgccacaaggggcatgagtttatcccgactctgtatcattttcctacgaactgcgaagcatgcatgaaacccttgtggcatatgtttaaaccccctcctgccttagagtgcagaaggtgccatattaagtgtcacaaggaccacatggacaagaaagaagagataattgcgccttgcaaggtgtactacgacatttcaaccgccaagaatctcctgttgctagccaacagcactgaggagcagcaaaagtgggtttctcgccttgtcaaaaaaatacctaaaaaacctccagctccagatccgttcgccagatcctcacctcggacaagcatgaagatccagcaaaaccagtccattagaaggccctctcggcagttggctccaaacaaaccttcctag

SEQ ID NO: 238820 - DNA, 3438 bp, synthetic construct
  misc_feature 1..3438: note = Description of Artificial Sequence: Synthetic coding sequence
  source 1..3438: mol_type = other DNA
atggttcattgtgatacggccgttgggaccccagactacatatcgccagaggtgctgaagagccagggaggtgatggcttttatggacgagaatgtgactggtggagtgtgggcgtgtttctgtatgagatgctggtcggagatacgcccttttacgctgacagcctagtcggtacgtactcaaagatcatggaccataaaaactctctttgctttccagaagacgcggagatctccaagcatgcaaaaaatctgatctgcgcttttctcaccgacagagaggtaagattgggtaggaacggggtcgaggaaatacgccagcatccattctttaagaacgatcagtggcactgggacaatatccgtgaaaccgccgctcccgtggtccctgagcttagcagcgatatcgacagctctaattttgatgacatcgaagacgataagggcgacgtcgagaccttcccgataccaaaggccttcgttggtaaccaactcccttttatcggctttacttactatagggagaatctcctgctctccgattctcccagctgtagagagactgatagcatccagtctaggaagaacgaagaatcacaggaaattcagaaaaaactgtatactcttgaggagcatcttagtaatgagatgcaagcaaaggaagaattggaacaaaaatgtaaaagtgtgaatactagactggagaagaccgccaaggagttggaggaggagatcacactacggaagtccgtggagagtgctctgaggcagcttgaaagagagaaggctttactccagcacaagaatgccgaatatcagagaaaggccgaccatgaggccgataagaaacgcaatctggagaacgacgtcaacagcctgaaggaccagctagaggacctgaaaaaaaggaaccaaaactcacagataagcaccgagaaggttaaccagcttcagaggcaactggacgagactaatgcactgctgaggaccgaatctgatacagccgctcgccttaggaaaacccaggcagagagcagtaagcagatccaacagctggaaagcaataaccgcgacctgcaggacaaaaattgtcttctggagacagccaaactgaagttagagaaggaattcattaacctgcagagtgctctcgaatccgaaaggcgtgataggacacacgggtcagaaataattaacgacctgcagggcagaatttgtggactggaggaagacctcaaaaatggcaagatcctcctggctaaggtggaattagagaaacgtcaactgcaggagaggtttaccgacctcgagaaagagaagtcaaacatggagattgacatgacgtaccaactgaaggtgattcagcagagtcttgagcaggaggaagccgagcataaggccactaaggccagactcgcggacaagaacaaaatatacgagtcaatcgaagaagccaagtctgaggccatgaaggaaatggaaaagaagctgctcgaagagaggacacttaagcagaaggtagaaaacttgctgctcgaggccgagaagcgttgctctttattggactgtgatttgaaacagtctcagcaaaagattaacgaactgctgaagcagaaagacgtactgaacgaagacgtgcgcaacttaaccctgaaaattgagcaggaaactcaaaagaggtgcctaacacagaatgatctgaagatgcagacgcagcaggtgaataccttgaaaatgagcgagaagcaattaaagcaagaaaataaccatttaatggaaatgaagatgaacctagagaagcaaaacgcagaactgagaaaagagcgacaagacgcagacggccagatgaaggaactccaggatcagcttgaggccgagcagtacttctccactctgtacaagactcaggtgcgcgagctgaaggaggaatgcgaggaaaagacaaaactcggaaaagagctgcagcagaaaaagcaggagctgcaggatgaaagagatagcctcgctgcccaacttgaaattactcttactaaggctgactcagaacagctggcgagaagtattgccgaagagcagtacagtgacttggaaaaagagaaaatcatgaaagaactggagatcaaagagatgatggctcggcacaagcaggaactgactgaaaaagacgccacaattgcaagcctcgaggaaacaaatagaacactgaccagcgacgtagcaaacttagctaacgagaaagaagaactgaataacaagctgaaggatgtccaggaacaattgtctagacttaaggatgaagaaatcagcgcggcagcaatcaaggcacagttcgagaagcagctgcttactgagcgtacccttaaaacgcaggcagtgaataagttggccgagatcatgaaccggaaagaacctgttaaaagaggcaacgacacggacgtcagacggaaggaaaaggaaaatagaaagttgcacatggagctgaagtcagagagggagaaacttacacagcaaatgattaaataccaaaaggagctcaacgaaatgcaggcacagatagcagaagagagtcagatcagaatcgaacttcagatgacccttgacagcaaggacagtgatattgagcagcttagatcccagctgcaggcgctgcatattggcctcgattcgtcatccattgggtccgggccaggggacgccgaagctgatgacggtttcccagagtctagacttgaaggttggttgtccctaccggtcaggaataacaccaaaaaattcggatgggtgaagaagtacgtgatagtgagcagcaagaagattctgttctacgatagcgagcaggataaggagcagtctaacccatatatggttctggacatagacaagctcttccacgtgcgccctgtcactcagacagatgtgtatagagccgacgccaaggaaatcccaagaatcttccagatcctgtacgccaatgagggcgaaagcaagaaggaacaggagtttcctgtggaaccagtgggcgagaaaagtaactatatctgtcataaaggccatgagttcatccctactctgtaccactttcccactaattgcgaggcttgtatgaagcctttgtggcacatgtttaagccgcctcccgctcttgagtgcaggcggtgtcacataaagtgccacaaagatcacatggataaaaaagaggagatcattgccccatgcaaagtgtattatgatatttcgacagccaagaatctcttgctcctggcaaatagtactgaagaacagcagaagtgggtcagccgcttagtaaaaaagataccgaaaaaacctcccgctcctgatcctttcgctcgttccagccctaggacatctatgaagattcagcagaaccagtccatccgacggcctagtagacagttggcacctaacaagcccagctag

SEQ ID NO: 238821 - DNA, 2568 bp, synthetic construct
  misc_feature 1..2568: note = Description of Artificial Sequence: Synthetic coding sequence
  source 1..2568: mol_type = other DNA
atgagtgaggccagaagggattctacctcatcgttacaacggaaaaagccaccatggctgaaactggacatcccctctgcagtccctctcaccgccgaggagccgtcttttttgcagcccttgcggaggcaagccttcctccgatctgtgtcgatgccagcggaaactgcccacatcagcagcccccatcatgaacttaggcggcctgttctgcagcgtcagacttctatcacccaaaccatacgccgtggcacggccgactggttcggggtgagcaaagacagcgacagtactcagaaatggcagaggaaatctattcgacattgtagtcaaaggtacgggaaactaaaaccccaggtgctccgagagctcgatctgcccagtcaggacaatgtgagcctgacctctactgaaacccctcctcccctgtacgtcgggccttgccagctggggatgcagaaaattatagaccctctagcgagaggccgagcctttagagtggctgatgacaccgcggaggggctaagcgccccacacactcccgtcacaccaggagccgcttctctgtgttccttttcttcaagtcgttccggtttccacaggcttcctcgccgacggaaaagagagtccgtcgcaaagatgtccttccgcgctgccgctgcgcttatgaaaggtagaagcgtaagggacggtaccttccgacgtgcacaacggcgttcatttaccccagcgagctttctggaagaagataccacagacttcccggacgagttggatacctctttttttgcccgagagggcatactgcacgaggagttgtccacctaccctgatgaggtgttcgaaagccccagtgaagccgctctgaaagactgggaaaaagctccagagcaggctgatctgacaggtggagctcttgacaggagcgagcttgagagaagccatctgatgctccccttggaaagagggtggcgcaaacaaaaggagggggctgcagcgccacaaccaaaggtgcggctgaggcaggaagtggtttccactgctggcccaaggcgcggacagaggatcgctgtgcctgtgaggaaacttttcgcacgggaaaaaagaccctacgggcttggaatggttggccgtctgaccaaccgcacctaccgcaaacggattgacagcttcgtgaagcggcagattgaagatatggatgatcacaggccctttttcacctactggttgacatttgtacatagtctggtgactattctggccgtatgtatctacggaatcgctccggttggtttttcacaacacgagactgtcgatagtgtgttgcgcaaccggggagtgtatgaaaacgtcaagtacgtacaacaggaaaacttctggatcggtcctagtagtgaggcactgatacacctgggcgctaaattcagcccatgcatgcgtcaggacccccaggtgcacagctttatacgctcagccagggaaagagagaaacacagtgcttgttgcgtgagaaatgataggagcgggtgcgtgcagacatctgaggaagagtgctccagtactctcgcggtctgggttaagtggcctattcaccctagcgcgcctgagctggcgggtcataagaggcagttcggtagtgtttgccaccaggaccccagagtgtgtgatgaaccgtcttccgaagatcctcatgagtggccagaggacatcactaagtggccgatctgcaccaagaattcagctggaaaccacaccaatcacccacacatggattgcgtcatcactgggaggccttgttgcattggcacgaaaggacgatgtgaaataacatcaagagaatattgcgatttcatgaggggttacttccacgaagaggccacattgtgttctcaggtacactgcatggatgacgtgtgcggcctcctgccttttctcaaccctgaagtgcccgaccaattttatcgattgtggctctctctctttctgcacgctgggattctgcactgtctcgtttcaatatgctttcaaatgacagtcctccgcgacctcgagaaactcgctgggtggcaccggattgcgataatttacctcctgagtggagtgacggggaacctggcttccgcgatttttctcccataccgggcagaggtaggacccgctggcagccagtttggtatccttgcctgcttgtttgttgagctgtttcagtcgtggcagatactcgccaggccttggagggctttcttcaagcttttagctgtggtactgttcctgttcacatttggcttgctgccttggattgataactttgcccatatttctgggtttattagtgggttgtttctgtccttcgccttcttgccctacatatcattcgggaagttcgacctctacagaaaaagatgccagataatcatcttccaggtcgtattcttgggactcttggctggcctcgtggtcctgttttatgtctaccccgtgagatgcgagtggtgcgaatttcttacctgcatcccgtttacagacaaattttgtgagaagtatgaactggacgcccaattacactag

SEQ ID NO: 238822 - DNA, 573 bp, synthetic construct
  misc_feature 1..573: note = Description of Artificial Sequence: Synthetic coding sequence
  source 1..573: mol_type = other DNA
atgtcagaggcacgcagggattcaacatcctccctccagagaaaaaagcctccatggctaaaactggacattccaagtgcggtgcctctgactgctgaagagccaagttttctgcaacctctccgcagacaagcatttctgaggagcgtgtcgatgcctgctgagaccgcgcatatatcaagtccccatcacgaattgagacggccagtgctacaacggcaaacatccatcactcagacaatacggtccagtagacaagttcgatttgggagggtccatacactgccgctcttgggtcctcgcgctgcccgacgcgcatttcctcaacgccagtccctgagttggagcttactgcgaggtaccgccgactggtttggggtgtccaaggactcagattcaactcaaaaatggcaaagaaagagtattcgtcactgctcgcagaggtacggcaaactcaaaccccaggtattgcgggagctggatttgccttctcaggataacgtgagcctgactagcacagaaacacctccaccactgtacgtcgggccttgccaactaggaatgcagaaatag

SEQ ID NO: 238823 - DNA, 699 bp, synthetic construct
  misc_feature 1..699: note = Description of Artificial Sequence: Synthetic coding sequence
  source 1..699: mol_type = other DNA
tgacgcccatgttgcatcgggacgaagggtagatgcgaaattactagtagagaatactgtgatttcatgagaggctactttcacgaggaggccactctctgcagtcaggtgcactgtatggacgacgtatgcggcctgctgcctttcctaaatccagaaatgacggtcctcagggatttggagaagcttgccggttggcataggattgcaatcatatacttgctgtctggtgtcaccggcaacctcgcctccgcaatctttcttccctaccgcgcagaggtgggacctgctggatcccagttcggtatcctcgcctgcttgtttgtggagctttttcagagctggcagatccttgcaaggccatggcgtgctttctttaaactgctggccgtggtgctgttcctgttcacttttggattattaccatggatcgacaacttcgctcacatcagcgggttcatatcaggcttgttccttagtttcgcctttttaccctacatctcgtttggtaaatttgacctgtaccggaagcggtgccaaatcatcatatttcaggttgtctttctcggcttactggccggactggtggtcctcttctatgtgtacccagtgcgatgtgagtggtgtgaatttctgacttgtattccctttactgataaattttgcgaaaaatacgaactggatgcccaactccattag

SEQ ID NO: 238824 - DNA, 492 bp, synthetic construct
  misc_feature 1..492: note = Description of Artificial Sequence: Synthetic coding sequence
  source 1..492: mol_type = other DNA
atgtctgaagcccgtcgcgactccacttcgtcccttcagaggaaaaaacctccctggctaaagctcgatatccctagcgctgtgcctctgaccgccgaggagccttccttcctgcagccactccgcagacaggcgtttctcagaagtgtgtctatgccagcggagaccgcgcacatttctagcccacaccatgagctccgtagaccagtgctccaacgtcagacaagcattacccagacaattaggcggggtaccgccgactggttcggggtatcaaaggatagcgactccacacagaaatggcagcggaagagtattcgccactgttctcagaggtatggaaagctgaagccacaggtcctgagagagcttgatctgccaagccaggacaatgttagccttacaagtacggagacaccaccgccactgtacgtgggtccttgtcagctcggaatgcagaaaatcatcgacccattggcaagaggacgatag

SEQ ID NO: 238825 - DNA, 1740 bp, synthetic construct
  misc_feature 1..1740: note = Description of Artificial Sequence: Synthetic coding sequence
  source 1..1740: mol_type = other DNA
atgtctgaggcacggagagatagcaccagctcactccaaagaaagaaacccccttggctgaagctcgacatccctagcgcagtgccgctaactgcggaagaacccagctttttgcagccactgcgcagacaggcctttctccggtccgtttctatgcctgccgagacagcccatatctctagcccgcatcacgaactcagacgacctgtcctgcagaggcagacatcgataacccagaccatccggagagggaccgccgattggtttggagtgtccaaagatagtgattctacccagaagtggcaacgcaaatccatacggcattgcagtcaaagatatggcaagctcaagccccaggtactgagggagctcgacttacctagtcaggataacgtgagcctgacaagcacagaaactcctccccctctgtacgtcggaccctgccagctgggtatgcagaaaatcatcgatcccttagcgagaggaagagctttcagagtggccgacgacacagcagagggcttgtcagcccctcataccccagtgacccctggtgcagcaagcctatgcagctttagctcatcacgaagcggattccatagactccccaggcggaggaaaagagaatccgtcgcgaagatgagtttccgcgctgctgcagccttgatgaaaggtaggtcagtcagggacggaacatttagaagggctcagaggaggtccttcactccggcatcattcctggaggaagacaccaccgatttcccagacgagctcgacacctctttttttgcgagggagggcattctccacgaggaactgagcacttatccagacgaggtcttcgagagccctagtgaggccgctttgaaggattgggaaaaggcaccagagcaagccgaccttactggcggtgccctggatcgatctgagctggagcggtcacatctgatgctcccgttagaaagagggtggcggaaacagaaggagggagcagcggctccacagccaaaagttaggctgaggcaggaagtagtgagtaccgcaggccctagacggggtcaacgcatagctgtcccagttcgcaagcttttcgcaagagaaaagagaccttacgggctgggcatggtggggaggcttacaaatcgcacgtaccgaaagcgcatagactcgttcgtgaaaaggcagatcgaggatatggatgatcataggccgtttttcacttattggctcacctttgtacactccctcgtgacaatcttggccgtgtgcatctacgggatcgcgccagtgggtttctctcaacatgagacagtggacagtgtactcagaaatcgaggggtctacgagaatgtgaaatacgtgcagcaggagaatttctggatcgggccatcatctgtcagaacaggcttgggagccggaccagccggtgccggacctgggggagctcgcagaggacaggaggctccggactgcggtcgttcttctcccagtcccgcaggtgggccacacccacctggaagacaggtgtttgcattgcacgcgccaggaccagccggtgctcaactccactccctgggggcacgagctcgtgaggccttaaggctactgagagcccagaggcaggtcgggcttagagcggacctgggcggtggcgtgctcggggctttccccaggcctggactcccaccctcaagcgccagatgtagcctcttccggcctcagattgattccgcagagtag

SEQ ID NO: 238826 - DNA, 2571 bp, synthetic construct
  misc_feature 1..2571: note = Description of Artificial Sequence: Synthetic coding sequence
  source 1..2571: mol_type = other DNA
atggcctccgccgataagaacggcggttctgtgtcgtctgtgtcctcaagccgccttcagtctaggaagccaccaaacctgagcataactatcccccctccggaaaaagagactcaggcgcctggtgagcaggacagcatgctgccagagggtttccagaaccgcagactcaagaaaagccagccacgtacttgggccgctcacaccaccgcatgcccccctagctttctgcccaagcgcaagaatcccgcttacctaaagtccgtgagcttacaagaacctcggtctaggtggcaggaaagtagtgagaagcgccctggcttccggagacaggcctcactgagccagtcgattcggaaaggcgctgcacaatggtttggggtgagtggcgattgggagggacaacggcagcaatggcagagacgaagtctacatcactgttctatgcgttacggtcgactcaaagctagttgtcagcgagatctggagcttccctcgcaggaggccccatcctttcagggtactgagtcccccaagccttgtaagatgcctaagatcgtcgatccacttgctagaggtcgcgctttcaggcatcccgaagaaatggataggccgcacgccccacacccccctctcacccctggggtgttgtccttaacaagttttaccagtgtgagaagtggatattcccatctgcctagacgaaagagaatgagtgtggcccatatgtcactccaggcagccgcagctctgctaaagggccgtagcgtgctcgatgcaaccggacagcggtgcagagtggtgaaacgcagctttgcttttccaagctttctcgaggaggacgtcgtggacggagcggatacattcgattctagcttcttcagtaaggaggagatgtcaagtatgcccgatgacgtcttcgagagccccccactgagcgcgtcatacttccgcggaatcccacatagtgctagccctgtttcacctgacggtgttcagattccgctcaaggaatatggacgggcaccagtccccggacctcgacggggtaaacgcatagcgtcaaaggtcaagcatttcgctttcgatcggaaaaagcgacattatggcctgggcgtcgtggggaattggctcaacagaagctatcgtcgttcgatttcaagcacggtgcagagacagctggaatcctttgatagccacagaccttattttacttattggttaaccttcgtccatgttattatcactctcttggtcatttgtacctacggtatcgcacccgtgggatttgcacagcatgtgacaacccagctggtgctccggaataagggcgtgtatgagagtgtcaaatacatccaacaagaaaatttctgggtcggccctagtagcattgatcttatccatctgggggctaaattctctccatgcatcaggaaggatggacagatcgagcagctcgttctgcgggaacgcgatttggaacgcgactcgggttgttgcgtgcagaatgatcattcaggatgcatccagacccaacggaaagactgttcagagaccctggctaccttcgtgaaatggcaagacgataccgggccacctatggacaaatcagaccttggccagaaaagaacttcgggggcagtctgccaccaagacccacggacatgtgaggagcccgcttcctcaggcgcacacatttggcctgacgatattacaaagtggcctatttgtactgaacaagcccgaagtaaccacacaggctttctccatatggattgtgaaatcaagggcagaccctgttgtattggtactaagggctcgtgcgaaatcactacgcgggagtactgtgaattcatgcacggttattttcatgaagaggctacactctgctcgcaagtgcattgcctcgataaggtctgcggactgctgccatttctgaatcctgaggttccagatcagttttatcgcctgtggctttcccttttcctccacgcaggagtggtacattgtctggtatcggtcgttttccagatgacgattctcagagacctcgagaagctagccggttggcaccgcattgccatcatcttcattctctctggtattacaggcaacttagcaagtgctattttccttccataccgggcagaggttgggccagctgggagtcagtttgggcttctggcatgccttttcgttgaactgtttcagagttggcctttactcgagaggccctggaaggcatttctgaacctgtcggcaatcgtcctgtttctttttatttgtggcctgctgccctggattgacaacatcgcccacattttcgggtttctctctggactgttgcttgcttttgcgttcctgccctacatcaccttcggcacatcagacaagtaccgcaaaagggctttgatcttggtgtccctcttagcatttgcaggcctttttgcagctttagtgctgtggttgtacatttatccgattaactggccttggattgagcacctgacatgtttcccattcacctcccgcttctgcgaaaaatacgaactagatcaggtcttgcattag

SEQ ID NO: 238827 - DNA, 2484 bp, synthetic construct
  misc_feature 1..2484: note = Description of Artificial Sequence: Synthetic coding sequence
  source 1..2484: mol_type = other DNA
atggcgtcggccgataagaatggtggatctgtctcctccgtttcctcaagtcgcctgcagtcccggaaaccccctaatctctctataacaattccgccacccgagaaagaaacacaggctcctggcgagcaggacagtatgctgcctgaaaggaaaaatccagcctatctcaaaagtgtgagcttacaagaacccaggtctagatggcaggagtcgagtgaaaagagacctggctttcggcgacaggccagtctgtcacagtcaattagaaaaggggctgcccaatggtttggggtgagcggggattgggagggacagcgccagcagtggcaacgccgttctctccatcactgcagtatgcggtatggacgcctgaaggctagctgccagcgcgatttggagttgccttctcaagaagccccaagttttcagggcacagaatcgcccaagccttgtaagatgccaaaaatcgtggatccactggcaaggggaagggcatttcggcatccggaagagatggaccgaccccacgcaccgcaccctcctctgactccgggagtcttaagtcttacaagctttaccagtgttcgtagtggctatagccacctgcctcggcgaaaacgcatgtcggtggctcacatgtcccttcaagctgccgctgccttattgaaggggcgatcagtgttagatgccaccggccagcgctgtcgcgttgtgaaaagatccttcgcgtttccctcttttctggaagaggacgtggtggatggcgctgatacttttgactcgtcgtttttcagcaaagaggagatgtcgagcatgcccgacgatgtatttgaaagccctcctctatctgctagctactttcgaggaatcccacatagcgcttccccagtgtctcccgacggtgttcagatccctctaaaagaatacggccgtgctccagtgcctgggcctcgaagggggaaacgcatcgcctccaaagtcaagcattttgctttcgatcggaaaaaacggcattatgggctgggggtggtgggcaactggctaaatagatcctatagaaggtccatttcctctacggtccaacggcagctggagtctttcgacagccacaggccctacttcacctactggctgacctttgtgcatgtcattataactctcttggtcatatgcacctatggtattgctcccgtgggctttgcacaacatgtgacaacgcagctggttctgaggaacaagggtgtttatgaatccgtcaaatacattcaacaggagaacttttgggtgggccctagcagcatcgatttaattcatttgggcgctaaattcagcccctgtatccgcaaagacggtcaaattgaacagctcgtgttgcgcgagcgcgacctggaaagggactcaggatgttgtgtgcagaacgaccatagcggatgtattcagacccagcggaaagattgtagcgaaaccctggctacgttcgtaaaatggcaggatgatacagggccacccatggataaaagcgacttgggccagaagagaacctcaggagcggtttgtcaccaggaccctcggacatgcgaagaaccggcttcctctggagcacatatctggcccgacgatatcacgaagtggccaatttgcacagaacaggctcgcagtaatcacacaggttttttacatatggactgcgaaataaagggcaggccatgctgcatcgggacaaagggatcctgtgagattacgactcgcgagtattgcgagtttatgcatggatatttccacgaagaagcaacactgtgcagtcaggtgcattgtcttgataaagtttgcggcctgttaccctttctgaatccggaggtgcctgatcagttttacaggctttggctgtctctttttctgcatgcaggagtggtccactgcctggtcagtgtggtatttcaaatgacaattctgagggatcttgaaaagttggccggatggcaccggattgccattatttttatcctctccggaataactggtaatctggcgtcggctatttttctgccttacagggccgaggtcggccctgccggttcgcagttcggtcttctggcctgtcttttcgtggaactgttccaaagctggccccttctggagcgcccatggaaagcttttctaaacctgtccgctatagtgctgttcctttttatctgcgggctgctcccttggattgacaatattgcccacatctttgggtttctgtctgggctgcttctcgccttcgctttcctaccctatatcacctttggcacttctgacaagtacaggaagagggccctaattttagtcagcttgctggccttcgcgggactatttgcagccctggtgctgtggctctacatatacccaatcaactggccgtggatcgagcatttgacatgtttccctttcaccagccgattttgcgaaaagtacgagctggaccaggtgcttcactag

SEQ ID NO: 238828 - DNA, 2151 bp, synthetic construct
  misc_feature 1..2151: note = Description of Artificial Sequence: Synthetic coding sequence
  source 1..2151: mol_type = other DNA
cctggaagctcacggtccaggcacccacttttactgctgatctggtcccttggtagttctcagggtcctcatagacaaattcgccctccaccaccctgcagacacgccggaacacacgtgccgagtcctttgccccatacccaagtgcaccggaggcggcaagcgtacgcccacctgtcactggtgtgcttccggagaggggcagctcagtggtttggagtcagcggggactgggaaggacagaggcaacagtggcagcgacgctccctgcatcactgtagtatgcgatacggccgactgaaagcctcatgccagagggatttggaactgccatctcaagaggccccttcttttcaaggaaccgaaagtcctaaaccctgcaagatgcctaaaattgtagaccccttggcgaggggcagggcctttcggcatcctgaagaaatggaccgccctcacgcaccccacccccctcttacacccggagttcttagtttaacttccttcacatcagtccgcagcggctactcccacctgccgaggagaaagcgcatgagtgtggcgcacatgtcactgcaagccgctgccgcactgctgaagggacgctcagtgttggacgccaccggacagaggtgtcgggtagtgaagaggtcatttgctttccctagttttcttgaagaggacgtcgtggacggtgctgacacctttgactccagtttctttagcaaagaggagatgagctctatgccggacgacgtgttcgagagtcccccactgtccgcatcatatttccgcggtatcccgcattcagccagtcccgtcagccctgatggggtgcagattccccttaaagagtacggaagggcacctgtccccggtccaaggcgagggaagcgcatcgcctcaaaggtgaagcatttcgctttcgaccggaagaagagacattatggcctgggagtcgtcggaaactggcttaacaggtcttatcgccgttccattagctcaacagtacagcgtcagctggaatcatttgacagtcaccgaccttattttacctactggttgacattcgtgcacgttatcataacattattggtcatctgtacgtacggtatagcgcctgttggctttgcccagcacgtcacaactcaactcgttttaaggaacaaaggggtatacgaatcagttaagtatatccagcaggaaaacttctgggtagggccatcttcaatcgatctgattcacctaggcgcaaagttctcaccgtgcatccgcaaggacggtcaaatcgaacagctcgttctcagggaaagagatctagaaagggattctggttgttgcgtccagaacgatcacagcggttgtattcagacccagcggaaagactgtagtgaaacactagcaacattcgtgaagtggcaagatgacacaggccctccaatggataaatctgacctcggtcagaaaagaacgagcggggctgtgtgccaccaggatccgaggacttgcgaagaacccgcatcttctggcgcacacatctggcccgacgatattaccaagtggccaatatgcacagaacaagcgagaagcaaccataccggctttctccatatggactgtgagatcaagggtagaccctgttgcatcggtactaagggcagctgcgagataactacacgcgaatattgcgaattcatgcacggctacttccacgaggaggctactctgtgcagtcaggtgcactgtctggacaaagtctgtggactgcttcccttccttaaccccgaggtacccgaccagttctaccggctatggctgtccttgttcctacacgcaggtgtagtccattgtctggtctcagttgtctttcaaatgaccattctcagagaccttgagaaactggctggctggcatcggattgcgatcatttttatccttagcggtataaccggaaacctggcatcagcaatttttctgccctacagggcggaagtccgcatgtggagaatgggacctctccctcacattggaggacagccttgttgttcttactcaacccatctcggatcagctcgcggtacacgatgtccttcctgtaccggtctgcacagtggaggaactgccaacctgggtgcatattggctggtgtcatag

SEQ ID NO: 238829 - DNA, 639 bp, synthetic construct
  misc_feature 1..639: note = Description of Artificial Sequence: Synthetic coding sequence
  source 1..639: mol_type = other DNA
atggcccagacagacaagccaacctgcatcccacctgagctgccaaagatgctgaaggaattcgctaaggcagccattcgggtacagccccaggatctgattcaatgggctgccgactatttcgaggctttgtcacggggtgaaacaccacccgtcagagaaagatcagagagggtagccctctgtaacagggctgagcttacccccgagttgctcaagatcctgcactcccaagtggccggtcggctgattattagggctgaggaactggcgcagatgtggaaagtcgtcaatctacctacagacttgttcaattctgttatgaatgtggggaggtttacagaggaaatcgaatggctcaaatttctcgcactggcttgcagcgctctaggagtcacaataaccaagacactgaaaatcgtgtgcgaggtcctcagttgcgatcacaacggcggatctccaagaattccctttagtacttttcagttcttatacacctacatcgccaaggtggatggtgagatttccgcatcacacgtcagccggatgttgaattatatggaacaggaagttatcggccctgatggaatcataactgtgaacgatttcacccaaaatccgcgtgtgcagctggaatag

SEQ ID NO: 238830 - DNA, 639 bp, synthetic construct
  misc_feature 1..639: note = Description of Artificial Sequence: Synthetic coding sequence
  source 1..639: mol_type = other DNA
atggcccaaaccgacaagccaacgtgcattcccccagaactgccaaagatgctcaaggagtttgcaaaggcagctatccgcgtccaaccgcaggacctgattcagtgggctgccgattactttgaggctttgagtaggggggagacaccaccagtcagagagagaagcgaaagagtggcattgtgtaacagagccgagctgacccctgagcttctcaagatcttgcacagtcaggtcgccggtagactgatcattagggccgaagaactagctcaaatgtggaaggtagttaaccttccaacggacctgttcaactccgtaatgaacgtggggcgtttcaccgaggagatcgaatggctcaaattcctggccttggcctgcagcgcgctaggagtaaccatcacaaagaccctgaaaattgtgtgcgaagtccttagttgcgatcacaatggcggaagcccgcgtataccgttctccacatttcagttcctttatacttacatcgctaaagtggatggcgagatcagcgcgagtcacgttagtcgaatgctgaattatatggagcaggaggtaatcgggccagatggcatcataaccgtgaatgattttacccagaatcctagggtccagctcgagtag

SEQ ID NO: 238831 - DNA, 351 bp, synthetic construct
  misc_feature 1..351: note = Description of Artificial Sequence: Synthetic coding sequence
  source 1..351: mol_type = other DNA
atggcccagactgacaagcccacgtgcattccccctgagctcccgaagatgctgaaggagttcgcaaaggccgctatcagggtgcagccacaggacctaatacagtgggccgcagactatttcgaggctctctcccgcggagaaaccccaccagtgcgcgagagatccgagagagtcgctctgtgcaaccgggcagaattgacaccagaactgctaaaaatcctgcatagccaagttgccggaaggttaatcattcgggcagaggagctggcccagatgtggaaagtagttaatctgccaacagatctgttcaattctgtcatgaacgtcgggaggtttaccgaagagtag

SEQ ID NO: 238832 - DNA, 393 bp, synthetic construct
  misc_feature 1..393: note = Description of Artificial Sequence: Synthetic coding sequence
  source 1..393: mol_type = other DNA
atggcgcaaacggataaacccacatgtatcccaccggaactgccgaaaatgctcaaggagtttgcaaaggcggctatccgagtgcaaccgcaagacctgatccagtgggctgctgactatttcgaggcactcagccggggagagacaccaccagtgcgcgagcgatccgaacgagtggctctctgcaatagagccgaactgacaccagagctcctgaaaatcctgcactctcaggtggcgggacggcttatcattcgggctgaagagctggcccagatgtggaaggtagttaacttaccaacagacctcttcaattctgtgatgaacgtaggtaggtttactgaagaaatcgaatggttgaaattcctggcactcgcctgcagcgccctctag

SEQ ID NO: 238833 - DNA, 312 bp, synthetic construct
  misc_feature 1..312: note = Description of Artificial Sequence: Synthetic coding sequence
  source 1..312: mol_type = other DNA
atggcccagactgataaaccaacatgtattccacctgagttaccaaagatgctcaaggagttcgctaaagcggcaattcgggttcagccacaggacctgattcagtgggcagccgattattttgaggctctgagccgtggagagactccgccagttcgagagcggtcggagagagtagccctgtgcaacagagcagagctcactccagagttgctcaagattctgcattcgcaggtggcagggaggctaataatccgtgccgaggagctggcacaaatgtggaaagttgttaatctcccaacagatttgtag

SEQ ID NO: 238834 - DNA, 234 bp, synthetic construct
  misc_feature 1..234: note = Description of Artificial Sequence: Synthetic coding sequence
  source 1..234: mol_type = other DNA
atggcccaaaccgacaagcctacgtgcataccacctgagctgcccaaaatgctcaaggagttcgctaaagccgctatccgcgtccaacctcaggacttgatccaatgggcggctgactattttgaggccctcagccgaggcgaaacacctcctgtcagagagagatcagagagagtggcattatgcaatcgggcagagctgactccggagctgttgaagatcctccattcctag

SEQ ID NO: 238835 - DNA, 693 bp, synthetic construct
  misc_feature 1..693: note = Description of Artificial Sequence: Synthetic coding sequence
  source 1..693: mol_type = other DNA
atgccactgcccgataccatgttctgcgcccagcagattcacataccccctgagctgcctgacatcctgaaacagttcactaaggctgcaatcaggacccagccggctgatgtgctccgctggtccgccggatattttagcgccctctcccgcggtgaccccctcccagtaaaagatcgaatggagatgccaacagctacccagaagactgatacagggcttacacagggtttgctgaaagttctgcataaacagtgtcatcataagcgctatgttgagctgacagatctggaacagaaatggaaaaatttgtgtctccccaaggagaaatttaaagctcttctgcagctggacccctgcgaaaacaagatcaagtggatcaatttcctggcacttggctgctcaatgctaggagggagcctcaacacagccctgaaacacttgtgcgagatccttacagatgatccagaaggaggacctgctcgcatccctttcaaaactttttcctatgtttatcgctatctagctagacttgattcggacgtgagcccattggagaccgaaagctacctagcgtccctgaaggagaatatcgatgccaggaaaaatggcatgataggtcttagcgacttttttttccctaagaggaagctgttggaatcaatcgaaaacagcgaagatgtgggtcattag

SEQ ID NO: 238836 - DNA, 693 bp, synthetic construct
  misc_feature 1..693: note = Description of Artificial Sequence: Synthetic coding sequence
  source 1..693: mol_type = other DNA
atgccgttgcctgacacaatgttttgtgcccagcagattcatatcccacccgagctgcccgatatcctcaaacagttcactaaggcggctatccgaacgcagccagcggatgtgcttagatggagcgccggatacttttccgcactatctcggggagatccactcccagttaaggaccgcatggagatgcctacagccacccagaaaacagacacaggactgacacagggccttttgaaagtgcttcacaagcagtgccaccacaaaaggtatgtagaattgacggacctggagcagaagtggaaaaatctctgcctgcctaaagaaaaatttaaggctcttttgcaactggatccatgcgagaacaaaattaagtggattaactttttggcgcttggatgtagcatgctcgggggaagcctaaacactgccctgaagcacctgtgtgagatattgaccgacgacccggaaggcggacctgcaaggattccttttaaaacattttcctatgtatataggtacctggctcgactggacagcgatgtgtcacctcttgagacagagagttatctcgcaagtctcaaggaaaatattgacgccaggaaaaatggtatgattggcttaagcgatttctttttcccaaagaggaagctattggaaagcatcgagaacagtgaggacgtcggacactag

SEQ ID NO: 238837 - DNA, 2091 bp, synthetic construct
  misc_feature 1..2091: note = Description of Artificial Sequence: Synthetic coding sequence
  source 1..2091: mol_type = other DNA
atggatgctgatatggactatgagaggcctaatgtggagaccataaaatgcgtagtggtcggagataatgccgtgggtaaaactcggctgatctgcgctagagcatgcaatacaaccctgactcagtatcaactgctggccactcacgtacccaccgtttgggctatagaccagtatcgcgtatgtcaggaggtgctggaaagaagtcgagacgtggtggacgaggtatccgtgagtctccgtctgtgggatacctttggcgaccaccacaaggaccgaagattcgcttacggcagaagcgacgtggtggtgctgtgcttctctatcgccaaccccaactcattgaatcacgtgaagagtatgtggtatccggaaattaaacacttctgcccaagaacacccgtcattctcgttgggtgccagctggacctacgctacgcagatctggaagcagtgaaccgggctcgacgcccactggcccgtcctataaagaggggtgacattctacctcctgaaaaagggcgagaagtggctaaagagctcggattaccatactatgagacctctgtattcgaccagtttggtatcaaggacgttttcgacaatgccataagagccgcactgatctctaggcgccatctgcagttctggaaatcgcacctgaaaaaagtgcaaaaacccttattacaggccccttttctgccccctaaggcacccccaccggtgatcaaaattccagagtgccctagcatgggcactaatgaggcagcgtgcctccttgacaatcccctctgtgctgatgtcctgtttatcctgcaagaccaggagcacatcttcgcccacagaatctacctagccactagttcaagcaagttttacgacctgtttctgatggaatgtgaagaatcgcctaatgggtcagagggggcttgcgaaaaggaaaagcaaagcagggacttccagggcaggatcctgtcggtggaccccgaagaggagagggaggagggccctccgcgaatcccacaggccgatcagtggaaaagctctaacaaatccttagttgaggcactggggctggaggctgagggggcagtcccagagactcagaccctgactggctggagtaagggttttatcgggatgcaccgggagatgcaggtgaacccaatctccaagaggatgggcccaatgaccgtcgttcggatggatgcatcagttcagccgggtccattcaggacactgctacaattcctgtacaccgggcagcttgatgagaaggagaaagacctggtggggctggcccagatcgccgaggtgctggaaatgtttgatcttcgcatgatggtagaaaatataatgaacaaggaggcctttatgaatcaggagatcactaaggccttccacgtccgtaaggcgaaccgcatcaaagagtgcctctcaaaaggcaccttctccgacgttacctttaaactcgatgacggcgctatcagtgcccataaacctctcctgatctgctcttgtgaatggatggctgccatgttcggtggctctttcgtggagagcgccaattctgaagtgtacttaccgaatatcaataagatttcgatgcaggctgtgttagattacctctacacgaagcagctctcccccaacctggacctggaccccttagaattaatagctcttgcaaatcggttctgtctgccccatctggtggccctagccgaacagcatgccgtgcaggagctcacgaaagccgcaacctctggtgttggaattgatggcgaggttctgtcttaccttgagcttgcacagtttcacaatgcccaccagctggcagcctggtgcttgcaccacatctgcacgaactacaatagcgtctgctcgaagttccgcaaagagatcaagtccaaaagcgccgacaaccaggagtattttgaaaggcacaggtggccgccagtctggtacctcaaggaagaagatcattatcaacgggttaaacgagaacgcgagaaagaagatatcgccctgaacaaacataggagcagaaggaaatggtgcttctggaactccagccctgcggtcgcatag

SEQ ID NO: 238838 - DNA, 2091 bp, synthetic construct
  misc_feature 1..2091: note = Description of Artificial Sequence: Synthetic coding sequence
  source 1..2091: mol_type = other DNA
atggatgctgacatggactatgagcgcccaaacgtggaaacaattaagtgcgtggtggtgggggacaacgctgtcgggaagacacgcctcatctgcgcccgtgcctgtaatacaaccttgacccagtaccaactactggcgacccacgtgcccacagtgtgggctatcgatcaataccgcgtatgtcaagaggttctggaaaggagtcgggatgtcgtcgacgaagtgtcggtttcactgaggctgtgggataccttcggagaccatcacaaagaccgcaggttcgcctacggcagatccgacgtggtggtcctgtgcttctctatcgccaaccctaatagtctgaatcatgtaaagagcatgtggtacccagagatcaaacatttctgtccaagaacccccgtgatcctggtgggatgtcagctcgatctgcgttacgccgacctggaagccgtaaatcgcgcacgcagacccctggctcggcctattaaaaggggcgacatattgcctccagaaaaggggagggaagtggccaaggaactgggactgccttactatgaaacctccgtgtttgaccagtttggtataaaagacgtgtttgataatgccattcgcgcagccctcattagcaggcgtcacttgcagttttggaaaagccacctgaagaaagtgcaaaagcccctcctgcaagcgccatttttgcctccaaaggcccctcctccagtcatcaaaatcccagaatgtccgagcatggggaccaatgaggcagcgtgtctactcgacaaccctctctgtgcagacgttctcttcatcctgcaggatcaggagcacatcttcgcgcacagaatctacctggcaacgagcagctcgaaattctatgacctctttctcatggagtgcgaggagtccccgaacggttctgagggagcctgcgagaaggaaaaacaatcacgcgatttccaaggacggattttgtcagtggatcccgaggaggagcgggaagagggccctcctcgcattccacaggccgaccaatggaaatcatcaaacaagtcactagtcgaggccctcggcctggaagcagaaggcgcagtccctgaaacacagactctgactgggtggtcaaaagggttcatcgggatgcaccgagagatgcaagtgaaccccatcagcaaacgaatgggccctatgactgtcgtccgcatggacgctagtgttcagccgggaccatttagaacgctgttgcagtttctgtacacaggccagctcgacgaaaaggagaaagatctggttgggttagcccagattgcagaagttttagagatgtttgacctccgaatgatggtggaaaacatcatgaacaaggaggcattcatgaaccaggagattacaaaggcatttcatgtgaggaaagccaacaggattaaagagtgtttgtcgaaaggaacgttcagtgatgtgaccttcaaactggatgacggagcgatctctgcacacaagccactattgatttgtagttgtgaatggatggccgcaatgttcgggggttcattcgtcgaatccgcaaattctgaggtgtaccttcccaatatcaacaagatctctatgcaggcagtccttgattatctgtacactaagcagctttccccaaatctggatctggatcctctcgagctgatcgcacttgcgaatagattttgcctgcctcacctagttgctctcgccgaacagcatgccgtgcaagagctcacgaaagccgcaacgagcggcgtcggcatcgatggcgaagtgctgtcctacctcgagttggcccaatttcataacgcccaccagctcgccgcttggtgcttacaccacatctgcaccaactacaactcagtgtgtagtaagtttcgtaaagaaattaaatcgaagtccgcagataaccaggaatactttgaacggcaccgctggccacctgtgtggtacctaaaagaggaggatcactatcaacgggtcaaaagggagagggagaaagaagatattgccctgaataaacacaggtcccgtagaaaatggtgtttttggaacagtagcccagctgtggcatag

SEQ ID NO: 238839 - DNA, 300 bp, synthetic construct
  misc_feature 1..300: note = Description of Artificial Sequence: Synthetic coding sequence
  source 1..300: mol_type = other DNA
atggacgccgatatggattacgagcggccaaacgtcgaaacaatcaagtgcgttgtcgtgggcgacaatgccgttggaaaaacgcgcctgatctgtgcccgtgcatgtaatactactttgactcagtaccaattgctggcgacccatgtgcccaccgtgtgggcaattgatcagtatagggtgtgccaggaggttctggagaggtcacgagatgtggtagatgaggtgtctgtgtccctgagactctgggacacctttggcgatcaccacaaagaccgccgattcgcctacgggaggtag

SEQ ID NO: 238840 - DNA, 2184 bp, synthetic construct
  misc_feature 1..2184: note = Description of Artificial Sequence: Synthetic coding sequence
  source 1..2184: mol_type = other DNA
atggactctgatatggattatgagcggccaaatgtggaaaccatcaagtgcgtagtcgtgggtgacaatgcagtaggcaaaactcgcctcatttgcgctagagcttgtaatgctacacttacccaataccagctgctcgctacgcacgttccgacagtctgggccattgaccagtatcgggtgtgccaagaagtgctggaaagaagtcgtgatgttgttgacgacgtgtccgtatcacttcgactgtgggacacttttggtgatcaccacaaggacagaaggttcgcttacggcagaagcgacgtggtagtgctgtgtttcagtattgctaaccccaactcattgcatcacgtgaagactatgtggtaccccgaaattaagcacttctgccctagagcccctgtcatactcgtcgggtgccagcttgatctcaggtatgctgatctggaggccgtcaatcgggcaaggagacccctggctcgtcctattaagcctaatgagatcctcccaccagaaaaggggagagaggtggcgaaggagctggggatcccatattacgaaacctccgtcgtggctcagttcggaatcaaggacgtcttcgacaatgcaatccgagctgcccttatatcccgcagacacctgcagttctggaagtcccatttgaggaacgtgcaaaggcctcttctgcaggctcccttcttacccccaaaacctcctcctccgatcatcgttgtccccgacccaccatcctcttcggaggaatgcccagctcacctgctggaagatcccctctgcgccgacgttatactggtgctgcaagagcgcgtcagaatcttcgcccataaaatttacctgagcacttcgtccagtaaattctacgacctctttctgatggatctcagcgagggagagctaggcggaccttccgagcctggcggtacgcatccggaagatcaccagggccacagtgatcaacaccaccatcatcaccaccaccatcacggcagagacttcctgttgagagccgcttcattcgacgtatgtgaatctgtcgacgaggccggagggagcggacccgcaggcctccgagcaagcacctctgacggtattctgcgagggaatgggaccgggtaccttcctggacggggtcgagtattatcttcatggagccgcgctttcgtgagcatccaggaggaaatggctgaagatccgcttacctataagagccgcctcatggtcgtggtgaagatggactcatccatacaacctggacccttccgcgcagtcctgaagtacttgtacactggagaactggatgaaaatgaacgggacttgatgcacattgctcacatagccgagcttcttgaagtgttcgacctgcgcatgatggttgcgaatattctcaacaacgaggcatttatgaaccaggagatcacgaaggcatttcatgtgcgtagaacgaaccgggtcaaagaatgtctcgccaagggtacattcagcgacgtcacctttatacttgatgatgggaccatatccgcccataagccactgttgatctcatcttgcgactggatggccgctatgttcgggggaccgttcgtcgagtcatccacccgcgaggtggtgttcccatacacctctaaatcctgcatgcgggctgttctcgagtacctgtacaccggcatgtttacgtccagtcctgacttggacgatatgaaacttattatattagccaaccgcctgtgtctcccccacttagtggctcttactgagcagtacacggtgaccggcctaatggaagccactcagatgatggtcgatatagatggcgatgtgttggtttttttggagctggcgcaatttcactgtgcataccagctcgccgactggtgtctgcaccacatctgtaccaactacaataatgtatgtcggaaattccctcgtgacatgaaagccatgtcgccagagaatcaggagtatttcgaaaagcacagatggccacccgtctggtacctgaaagaggaagaccactatcagcgcgctagaaaggagcgcgaaaaagaggattacctgcacttgaagaggcagcctaagcggagatggttgttttggaacagccccagtagccctagcagctcggcagcgtctagcagcagccccagttcatccagtgcggttgtgtag

SEQ ID NO: 238841 - DNA, 2250 bp, synthetic construct
  misc_feature 1..2250: note = Description of Artificial Sequence: Synthetic coding sequence
  source 1..2250: mol_type = other DNA
atgcaggcttggcggaaagggcctgacggaccacagaagacttcatcagactctatgagtcgcctgatggattcggatatggattatgaacgacctaatgttgagaccattaaatgtgtggtggtcggggacaacgccgtgggaaagacccgactgatctgtgcgagagcttgcaatgccacactgacccaataccaactgctcgccacccacgttcctacggtgtgggccatagatcaataccgggtctgtcaagaagtcttggaaaggagcagggacgtcgtggacgacgtcagcgtgtcactgagactgtgggataccttcggggaccatcataaagacagacgttttgcctatggcagatcggacgtggtggtgttgtgtttcagcatagctaacccaaattctctgcatcatgtaaagaccatgtggtatccagaaattaaacacttttgccccagggcaccagtcattctcgtcggctgccaactagatctgagatacgcagatctggaggccgtgaatcgggcacgcaggcccctcgcaaggcctataaagcctaatgagatactgcctccagagaagggtcgcgaagtcgctaaagagttgggtatcccttattacgagactagtgtagtggctcagtttggaataaaagatgtcttcgacaacgctataagggccgctctgatttcccggaggcacctgcagttctggaaatcacacctgcggaatgtccaacgtccattgctccaggcaccatttctacctcccaaacctccccctccaatcattgttgtgcccgatcctccaagctcatccgaggaatgcccagcgcatcttttagaagatccgttgtgcgccgatgtgattctggtgctgcaggaacgtgtgagaatcttcgcccacaaaatctacctgtccacatcaagtagcaagttctacgaccttttccttatggatttgtctgagggcgaactggggggtccgtccgaacccggtgggacacatcccgaagatcatcagggacacagtgaccagcatcaccaccatcatcaccatcatcatgggagagatttcctcctacgtgcggctagtttcgatgtctgcgaaagcgttgatgaggcaggcggaagcggcccagccggattgcgtgcatctacttctgacggcatcctgaggggcaacggaaccggatacctgccgggtcgcggaagagtgttatcctcttggtctcgcgcttttgtctccatccaggaagagatggccgaagacccactgacatacaaatccagactgatggtcgtcgtcaagatggatagtagtatccagcctgggccttttcgggcagttcttaaatacctgtacacgggagagctcgacgaaaatgagagggaccttatgcatatagcccacatcgcagaactcttggaggtctttgacctcaggatgatggtggcaaacatacttaataatgaagcttttatgaatcaggagattactaaagcctttcatgtgcggaggaccaatagggtgaaggagtgcctggctaaggggaccttctccgacgtaacctttattctggacgacgggacaataagcgcccacaaacctctgcttatcagcagctgcgattggatggcagccatgttcggaggacccttcgtggagagtagtacacgcgaggtggttttcccctatacgagcaaaagttgtatgcgggcagtcctggagtatctgtacaccggaatgtttaccagtagcccagatctggatgatatgaaattgattatcctcgccaataggttatgtttgcctcacctcgtggcactgacagaacaatatacagtgacagggctcatggaagcaacccagatgatggtagacattgatggtgatgtcctggtgtttctagaactggcccagtttcactgcgcctaccagctcgccgactggtgtctgcatcatatttgcacaaactataacaacgtgtgtcggaaatttccgcgagacatgaaggcaatgagtccagaaaatcaggagtattttgaaaaacacagatggccccctgtgtggtacctgaaagaggaagaccactaccagcgcgctaggaaggaaagagagaaggaagattatttgcaccttaagcgacagcccaagcggcgttggctgttttggaattcaccctcttccccgtccagcagcgctgcaagctcctcttctccgagttccagcagcgcagtcgtttag

SEQ ID NO: 238842 - DNA, 2205 bp, synthetic construct
  misc_feature 1..2205: note = Description of Artificial Sequence: Synthetic coding sequence
  source 1..2205: mol_type = other DNA
atgaaggccaggagcaggctaatggattcagacatggactacgagaggccaaacgtggagacaatcaaatgcgtggtagtcggtgacaatgccgttggcaaaacaagactgatctgtgcccgagcatgtaatgctacacttacccaatatcagctccttgccacccatgtgcctacagtgtgggccatagatcagtaccgagtgtgccaggaagttcttgagcggagcagggatgtcgtcgatgacgtgtctgtcagtcttagactgtgggataccttcggagatcatcacaaagacaggagattcgcatacggtcggagtgacgttgtggtcctctgctttagcatagccaatcccaactccctgcaccacgttaaaactatgtggtaccctgagatcaagcatttttgcccaagagcacctgtgatcctcgtgggctgccaactcgacctgagatatgcagatctggaggccgttaaccgcgctcggaggccgctggcaaggcccataaaaccaaacgaaattctgcctcctgagaaggggagagaggtggccaaagaactcggcatcccctactacgagacaagcgtggtcgcccagttcggcatcaaggacgtgtttgacaacgcaatccgcgcagcattgattagtcgccgacatctgcaattctggaagtctcacctcagaaatgtgcagcggcctttactccaagcgccttttcttcccccaaagcccccaccgccaattatagtggtgcccgacccaccgagttcctcggaggagtgccctgcacacttactcgaagaccctctttgtgcagatgtgatcctggtacttcaagaaagagtaaggattttcgctcataaaatatacctctctacctcgagcagcaagttttacgacctgttcctcatggacctctctgagggcgaactcggcggacccagtgagccaggcggtactcaccccgaggaccaccagggccatagtgaccagcatcatcaccaccaccatcaccatcacggcagggactttctgctccgagccgcatcatttgacgtctgcgagagcgtggatgaggccggaggatctggccctgctggactgagagcatcgacaagtgatggaatcctgcgcggaaacggcaccggatatctccccggtagagggagagtactctccagctggtcacgcgctttcgtaagcattcaggaggagatggctgaggatcctctgacctataagtcacggctcatggtagtagtgaagatggactcatccatccaaccaggcccattccgcgcagtgctcaaatatttgtataccggtgaactggatgagaacgagagggaccttatgcacattgctcacatcgccgagctgctcgaggttttcgatttgcgaatgatggtggctaacattctgaataacgaggcctttatgaatcaggaaataaccaaggcatttcatgttagacggacgaatagggtgaaagagtgcctggctaagggaaccttctccgatgttacatttatactcgatgacggcacaatttcagcgcataagccgcttctgatctctagctgtgattggatggctgcaatgtttggaggcccatttgttgaatcctccacacgcgaggtcgtgttcccctacacctctaaaagctgcatgcgagccgtgctggagtatctgtatacaggcatgttcaccagctcaccagatctcgacgacatgaagctcatcatactggcgaatcggctatgccttccgcacttggtggccctgacggagcagtacactgtgacgggtctgatggaggcaacccagatgatggtggatattgatggggacgtcctcgtttttctggaacttgcgcagttccattgtgcctatcagctcgctgactggtgcctccatcatatctgtacaaactacaataacgtgtgccgcaagttcccccgagacatgaaagccatgtcacctgagaatcaagaatatttcgagaagcacaggtggcccccagtatggtacctaaaagaggaggatcattaccagcgcgcacggaaagagagggagaaggaggattacttacaccttaagcgccagcccaaacggcgatggctgttctggaactctccctcttcacctagctcctctgccgctagcagcagttctccaagtagtagctctgcagtagtgtag

SEQ ID NO: 238843 - DNA, 1836 bp, synthetic construct
  misc_feature 1..1836: note = Description of Artificial Sequence: Synthetic coding sequence
  source 1..1836: mol_type = other DNA
atgtccatccatatagtcgccctgggtaatgagggcgacaccttccaccaggacaacaggcctagtggccttattcgtacttacttggggcgttcaccactggtgtctggggatgagagctctctcctactgaatgccgctagcacagtggccaggcccgtttttactgagtaccaagcaagcgcctttggaaacgtcaaactggttgtacacgattgccctgtgtgggatatttttgattcagactggtacactagcaggaacctcataggcggagccgatataatcgtgatcaaatataacgttaacgacaaattcagtttccacgaagtgaaagataactacattcctgtgatcaagagggcactcaacagcgttcccgtcatcattgccgcagtagggacaagacagaacgaggaactgccctgtacttgtccgctgtgtacctctgacagagggagctgcgtgtccaccacagaggggattcagttggcgaaggagttgggggctacctatctggagttgcactcgctggacgacttttatataggtaaatacttcgggggtgtgctggaatattttatgattcaggctctgaatcagaagacatcagaaaagatgaagaagcgtaagatgagcaacagttttcacggcattcggccacctcagctggaacaacctgagaagatgcccgtcctgaaagcagaggccagccattacaactccgatctgaacaacctcttgttctgctgccagtgcgttgacgtcgtcttctacaatcccaacctcaaaaaagtagtggaggcacataagattgtgctgtgcgccgtcagtcatgtcttcatgctcctgttcaatgtgaaatccccaactgacatccaggacagcagcattattcgcaccacacaggacttgtttgccattaaccgtgatactgctttccctggagcatcacacgagtcgtccggcaatccaccattgagggtcattgtaaaggatgctctgttctgttcatgtctctccgacatactgagattcatttacagcggtgcctttcagtgggaggaactggaagaagatatccgtaagaagctaaaggatagcggtgacgtctccaatgtgatagaaaaagtaaaatgcattctcaagactccgggtaagattaattgtctgaggaattgcaaaacctaccaagccaggaagccattgtggttctataacacttccctcaaatttttcctaaacaaacctatgctggccgatgtggtgtttgagattcaaggaacaaccgttcccgcacatcgggctatcctcgtggcgagatgcgaggtgatggctgccatgtttaacggcaactacatggaggctaagtctgtattgatcccggtctacggggtgagtaaagaaactttccttagctttttagaatatttgtataccgacagctgctgtcctgccggtatcttccaggctatgtgcctgttgatctgtgccgagatgtatcaagtctcccgactgcagcacatctgcgagttgtttattattacacagctacagtcgatgccgtctagggagctagcctcaatgaacctcgatattgtggatctactcaaaaaggccaagttccatcattcagactgtctttctacttggttactacattttattgccaccaattatctgattttttcccagaagcctgagttccaggacctgtctgtagaagaacgcagcttcgtggaaaaacacaggtggccaagtaacatgtacctcaagcaactagccgagtaccggaagtacattcactcccgcaagtgtcgatgcctggtgatgtag

SEQ ID NO: 238844 - DNA, 354 bp, synthetic construct
  misc_feature 1..354: note = Description of Artificial Sequence: Synthetic coding sequence
  source 1..354: mol_type = other DNA
taggagatgtatcaggtgagccgtcttcagcacatttgtgagctattcatcatcacacaactccagtcaatgccttctcgggagctcgctagcatgaacctcgatatcgtagaccttcttaagaaggctaagtttcaccattcagactgcctctccacctggcttctccattttatcgccactaactacctgatcttttcacagaagcctgaatttcaagatctcagtgtcgaggaaagatcttttgtggagaaacaccgttggccatctaacatgtatctgaaacagctagccgaatatcgcaaatatatacacagccgcaaatgtcgttgtcttgtgatcaaaagacactag

SEQ ID NO: 238845 - DNA, 1692 bp, synthetic construct
  misc_feature 1..1692: note = Description of Artificial Sequence: Synthetic coding sequence
  source 1..1692: mol_type = other DNA
atgttcagtaggaaccatagatccagagtgaccgtggctcgaggaagcgctctggagatggaatttaagcgcggaaggttcagactgtctttattctcagatctgcccgaagacactgagcttcaaaggaagctggaccatgagatcaggatgcgggagggcgcttgcaaacttctggctgcatgcagccagagagagcaggcccttgaagccacaaaaagtctgctcgtgtgcaactctaggatcctgtcctacatgggagaattgcaacgcagaaaggaagcacaagtcctggggaagaccagccgccgaccaagcgattccggcccacccgcagaacgcagcccatgcagggggagagtgtgcatcagcgaccttcgcatccccctcatgtggaaggacaccgaatatttcaagaacaagggggaccttcataggtgggccgtattcttgctgctccagcttggcgagcacatccaggatacagagatgatcctggtcgatcgtaccctgacagatatctccttccagtctaacgtgctgttcgctgaagcgggtcccgactttgagctgaggcttgaattatatggcgcatgcgtagaggaggagggggctctgaccggcggacctaaacgactggcgactaaactctcaagtagtctcggcagatcctcagggagacgggtgcgcgcttcccttgatagcgctgggggatctggcagtagtcctattctattgcccactccagttgtgggaggacctcggtatcaccttctcgcccatacaaccctaactctggccgcagttcaggatgggtttcggacccacgatttgacactcgcttctcacgaagaaaaccccgcttggctccctctgtacgggagcgtgtgttgtcgcctggccgctcagcctctgtgcatgacacagcctacagcctcaggaacccttagggtacagcaggccggtgaaatgcaaaattgggctcaagtgcatggggttcttaaagggaccaaccttttctgctatagacagcccgaagacgccgacactggagaggaacccctactgacaatcgcggtgaacaaggaaacacgcgtgcgtgccggtgaactggatcaggccttggggagaccctttaccctgtcgatctcaaaccagtatggcgatgatgaagtaactcataccctccagactgaatcgcgcgaagctctccagtcatggatggaggccctctggcagttgttctttgacatgtcccagtggaagcagtgctgtgatgagatcatgaaaatcgagacacctgcccctcgaaaaccgccacaggcccttgcgaaacagggatccttatatcatgagatggccatcgagcccctcgatgacatcgcggcagtgactgacatcttaactcagcgggaaggggctagactcgaaacaccacctccctggttggccatgttcactgatcagcctgccctcccgaacccttgctctcccgcaagtgtcgctccggctcctgactggacccacccactgccctggggccgacctcgcacattcagtctcgacgctgttccacctgaccattccccaagagcgaggagcgtggcccctctcccccctcagagatcccccagaactaggggtctctgttctaagggacagccgaggacctggttacagtctccagtatag

SEQ ID NO: 238846 - DNA, 1653 bp, synthetic construct
  misc_feature 1..1653: note = Description of Artificial Sequence: Synthetic coding sequence
  source 1..1653: mol_type = other DNA
atgcaggacaggttgcacattcttgaggacttgaacatgttgtatattcggcagatggctctgtccttagaagatacagagcttcagcgtaaactggaccacgagatcaggatgagagagggcgcatgcaagctcctggctgcctgttcacaacgggagcaagcactcgaggcaacgaaatctctacttgtgtgcaactctcgcattctgtcttacatgggggaactgcagcgtcgtaaggaggcccaggtccttggcaaaacatctcgtagaccatcagactccggtccgccagctgagcggagtccatgcagaggtcgtgtctgcatctccgacttacgcatccccctgatgtggaaagacaccgaatacttcaaaaataagggagaccttcacaggtgggccgtgttcctgctcctgcagcttggggagcacatccaagacacagagatgatcctggttgaccgaacacttaccgacatcagctttcagtccaacgtgctgttcgctgaagccggtcctgatttcgaactcagactggagctttatggcgcttgcgtcgaggaggagggcgctctaactggaggcccaaagaggctcgctacgaagctgagctcttcgctggggagaagcagtggcaggcgcgtcagagcaagcctggatagcgctggaggcagcggctcctctccgatcttgttgcccacgcctgttgtcggcggacctaggtaccatctgctcgcacatactactctcacccttgccgcagtccaagacggattccgtacacatgacctgaccctcgcaagccacgaagaaaaccccgcttggctcccgctgtatgggagcgtctgttgtaggttggcagctcaaccactgtgtatgactcaacctacagcatccgggaccctgcgagtacaacaggccggtgaaatgcagaattgggcacaggtgcacggcgtcctgaaggggacgaacctgttctgctaccggcaaccggaggatgctgacaccggggaggagcctctcctcacaatagccgtaaacaaagagacacgcgttagagcaggagagttggatcaggctctgggccgtccctttaccctatcgatctcgaaccagtatggagatgacgaagtgacacacaccctgcaaacagaaagtcgggaggcattgcagagctggatggaggctctgtggcagctcttttttgacatgtcccaatggaagcagtgttgcgatgagatcatgaaaattgagacacccgctccgcgaaaacccccacaggcgctggccaaacagggctctttgtatcatgagatggccatcgaacctctggatgatattgccgctgtgacagatattctgacccagagagaaggagctcgtcttgagacccctcctccttggcttgcaatgttcacagatcagccggctcttcctaacccttgctcacctgcatcggtggctcctgcacccgattggacccaccccttgccatggggcagaccgaggaccttcagccttgacgctgtcccacctgaccacagccctagagccaggtcagtggctccgcttccaccccaacggagcccccgaacgcggggactttgcagcaaggggcaaccacgtacctggctacagtctccagtgtag

SEQ ID NO: 238847 - DNA, 4635 bp, synthetic construct
  misc_feature 1..4635: note = Description of Artificial Sequence: Synthetic coding sequence
  source 1..4635: mol_type = other DNA
atggatagcggacctgtgtatcatggagactccagacagttatctgcctccggggtgcccgtcaatggtgcacgtgagcctgccggaccctcactgttgggaacaggagggccttggagagtggatcagaaaccagattgggaagcagcgcctggcccagctcacacggctcgtttggaggatgcccatgatttagtggccttttcagctgtggctgaggctgtgtctagctacggagcattgtcaacgcgcctgtatgagactttcaatagagagatgtctagagaagcagggaacaacagcaggggccctcggccagggccagagggatgtagcgcgggaagtgaggatctcgataccctccagacagccctcgccttggcaaggcacggcatgaaacccccaaattgtaattgtgatggacccgagtgccccgattacctggagtggctggaaggcaagatcaaaagtgtagtgatggaggggggtgaagagaggccaaggctgcccggacctctgcctccaggagaagctggcctgcctgctcctagcaccagaccccttctatcaagtgaggtaccccagattagcccacaggagggcttacccctgagccagtccgctctctctatagcaaaagagaaaaatatctctctgcagaccgctatcgctattgaggctctgacccagctgagcagcgctctaccccagccaagtcattccactccacaggctagctgccctctccccgaggctctgagccctccagctccattccgctctccccaaagttacttgagagccccatcttggccagtggtgccgccagaggagcacagtagttttgcgccagactcttctgcctttcctcccgctacgccccgaacagagtttccagaggcatggggtaccgatactcctcccgctaccccacgcagtagctggccgatgcctcgcccttctcccgaccccatggccgagttggagcaactccttgggtctgcctctgattacatccaaagcgtatttaaacgccctgaagccctgccaacgaagccaaaagtaaaggtggaagctccaagctcatccccagccccagccccatcccccgtactgcaaagggaagcccctaccccaagctccgagccagatacccaccagaaagcgcaaaccgccctgcagcagcatttacaccacaagcggagcttgttcttagaacaggttcatgatacgtccttccccgcaccctccgaacccagcgcacctggctggtggccccctcctagctctcccgtgcctcgacttccagaccggccacctaaggaaaagaagaagaaactcccaactccggctggcggacctgtcggaacagagaaggcagccccaggaatcaaacccagcgtgcgcaaacccatccagatcaagaagtctaggccccgagaggctcagcccctttttcccccagtgaggcaaatcgtgctcgaaggcctgcggagtcctgcgtctcaggaagttcaagcccaccccccagcccctctgcccgcatctcagggatcagccgtgcccctccccccagagccctctcttgctctgtttgcccctagcccatcccgggactcacttctcccacctactcaagaaatgaggagccctagccctatgacggcattacagcccggatcaaccggaccgttacccccagccgatgacaagctcgaagagctgattagacagtttgaggcagaattcggggattccttcggcctcccaggacctccaagtgttccgatacaggatcccgaaaatcagcagacctgtctgcctgcacccgaaagcccattcgctacgaggtccccaaaacaaatcaagattgaatcatctggcgctgttactgtgctgtcaactacatgctttcactccgaagaaggcggacaggaggctactccgaccaaggccgaaaatcctctgacgcctaccttatctgggtttctcgaatccccattgaagtacctggatactcctaccaagagcctgctggatacaccagcaaaaagggcacaagctgaattccccacatgtgactgtgttgagcagatagtcgaaaaggacgagggcccttactacacccacctcggatccggtcccaccgtggcatctatacgggaactgatggaggagcgatacggtgaaaagggcaaggctattcggattgaaaaggttatatacacagggaaggaagggaaatcttcccgcggttgtcccattgctaagtgggtgatccgcagacacaccctggaggaaaaactcctgtgcctggtgcgccacagagctgggcaccattgtcagaatgcagtgatcgtcatcctgattttggcctgggaaggaatacctcggtccttgggcgacacactgtatcaggaattaacagacactctgcgaaagtatgggaatccgacatcacggagatgcggcctcaatgatgaccggacatgcgcctgtcaagggaaagatcctaatacctgcggagccagtttttcctttgggtgtagttggtcgatgtactttaatggctgcaaatacgcgcgtagcaagacaccccgaaaattccgacttgcaggtgacaacccaaaagaagaggaggtgctccggaagtcttttcaagacctggctaccgaagtagctccgctgtacaaacgcttggccccacaggcatatcagaaccaggttactaacgaagagatagccatagactgtcggcttggcttaaaagagggccgtcccttcgccggagttacagcgtgtatggacttttgcgcccacgcccacaaggaccagcacaacctatataacggttgcacagtcgtatgtactcttaccaaggaggacaacagatgcgtgggaaaaattccagaggatgagcaactacacgttctgcccctgtacaagatggcaaacaccgacgaattcggcagcgaggaaaaccaaaatgcaaaggttggctccggggcaattcaagtcctgactgcgtttcccagggaagtacgaagactcccggagcccgctaaatcatgtaggcagcgccagttggaggccaggaaggccgctgctgagaaaaaaaaaatccagaaggaaaaattgtctacaccagagaaaatcaaacaggaggctctcgagttggctgggattacctcggatcctgggctgtccctcaaggggggtttgagtcaacagggtctcaagccatccctgaaggttgagcctcagaatcattttagctcgttcaaatattcgggaaacgccgttgtggagagttacagtgttttaggaaactgtagaccttccgacccttacagcatgaattcagtgtattcctaccattcttattatgctcagcctagcctgacttcagtaaatggttttcactctaagtacgccctgcctagctttagctactacgggttccctagcagcaatcccgttttcccctctcaatttctcgggcctggggcatgggggcacagcggctccagcggcagctttgaaaagaagcccgatctccacgccctgcataatagtttgtctcctgcttacgggggtgccgaattcgctgagctaccttcccaggcagtgcccacggatgctcatcaccccacaccccaccaccaacagcccgcttaccccggaccaaaggaatatcttctgccgaaggcacccctgttgcactctgttagccgggaccctagcccattcgcgcaaagctctaactgctataaccggtcaatcaagcaggagcctgttgatccactgacgcaggccgagcccgtgccacgtgacgccggaaaaatggggaagacaccactatctgaagtttcacagaacgggggaccctcacacctctggggccagtactccggaggaccaagcatgagcccaaagcggaccaacggggtaggagggtcctggggagtgttttcatcaggagaatcacctgctatcgtgcccgacaaactcagtagctttggtgctagctgcctggcccctagccatttcaccgacggacaatggggactctttcccggagaaggacagcaggctgcctcacattcaggcggaagactccggggaaagccctggagcccttgcaaatttggtaattctacatctgctctggctggccctagcctgacagagaaaccctgggccctcggcgcaggagatttcaacagcgctcttaagggcagccccggtttccaggacaaattgtggaatcccatgaagggggaagagggccgtattccggcagccggagcatcacagctggtattttatcagcataaaaacctgaaccaacctaatcacggacttgccttgtgggaggctaagatgaagcagctggccgagagggctagagcacggcaggaagaggccgcacgcttgggccttggccagcaggaggctaagctgtatggaaaaaagcgtaaatggggtggtaccgtggtggccgaaccacagcaaaaggaaaagaagggggtggtgccaaccagacaagccctggccgtgccaacagattcagccgtaacggtgtcctcttatgcttatacaaaggtcactggcccatattcacggtggatatag

SEQ ID NO: 238848 - DNA, 468 bp, synthetic construct
  misc_feature 1..468: note = Description of Artificial Sequence: Synthetic coding sequence
  source 1..468: mol_type = other DNA
atgcgacacctgccctatttctgcaggggtcaggtggtcagagggtttggtagggggagcaagcagctgggaatccctacagctaattttccggaacaggtcgtcgacaacttacccgctgacatttccaccggcatatactacggctgggcgtccgtgggctccggcgatgtgcacaaaatggttgtttctattggatggaacccatattacaaaaataccaagaagagcatggaaacacatattatgcacacattcaaggaggatttttacggggagatcctcaacgtagctatagtggggtacttgcggcctgaaaagaattttgactccctcgaatctctgatatctgccatacagggtgacatcgaggaagccaagaaacgcctcgagctgccagagcatttgaaaataaaagaggataatttcttccaggtgagcaaaagtaagatcatgaatggccactag

SEQ ID NO: 238849 - DNA, 969 bp, synthetic construct
  misc_feature 1..969: note = Description of Artificial Sequence: Synthetic coding sequence
  source 1..969: mol_type = other DNA
atggctgctagcggggaaccacagcgacagtggcaagaagaggtggccgcagtggttgtggtgggaagctgcatgacagatctcgttagcctaacatcccgcttgcccaagacaggtgaaacaatccacggtcacaagttttttattggtttcggagggaagggggcaaaccagtgtgttcaggccgcacgcctcggggctatgactagtatggtgtgtaaagtcggcaaagactccttcggaaatgactacatcgagaaccttaagcagaatgacatcagcactgaattcacgtaccagaccaaggacgctgccaccggcaccgcgtctatcattgtgaataatgagggccagaacatcatcgtcatcgtggccggtgccaacctccttctgaataccgaggacctgcgtgccgcagctaacgtgatcagcagggcaaaggtgatggtctgtcagctggagatcacacctgcaacatctctggaggccttaactatggctcggaggagtggcgtaaagaccttattcaaccctgcccctgcaatagccgatctcgacccacaattttatactttatccgatgtgttttgctgtaacgagtcagaggcagagattttgacagggctgaccgttggaagcgctgcagacgccggtgaggcggctcttgtactgttgaagagagggtgccaagtggtgatcattactctgggagctgaaggttgcgtcgtgttaagccagacggaaccagaaccgaagcatatccctacggaaaaagttaaagctgtcgatacaacgggggctggagactcttttgtgggggctctggctttttacctagcatactatccaaatctgtcactggaggatatgctgaacagatccaattttatcgcggctgtgtccgtccaggccgcaggtacacaatcctcctatccatataagaaggacctgccactcacactcttttag

SEQ ID NO: 238850 - DNA, 861 bp, synthetic construct
  misc_feature 1..861: note = Description of Artificial Sequence: Synthetic coding sequence
  source 1..861: mol_type = other DNA
atggccgcttcgggcgaacctcaacgacagtggcaggaggaggtggccgcagtggttgtggtgggttcctgcatgacggatctggtttccctgactagccggctgccaaaaaccggcgaaactatccatgggcacaagttctttatagggtttggaggcaaaggggctaatcagtgcgtgcaggccgctcgattgggagccatgactagtatggtgtgtaaggtgggtaaggattcctttggaaacgactacatcgagaatcttaaacagaacgatatcagcacagaattcacttatcagaccaaggacgcagccacgggaaccgcctcgatcattgttaataacgagggacagaacataatagtcattgttgctggggctaatctgctcctcaacaccgaggacttgagggccgcagccaacgtcatctccagagctaaggtcatggtctgccagctggaaatcacgcccgctacgtctctggaggcactgacaatggcaaggagatccggagtcaagactctattcaatccagctccggctatcgctgacctggatccccaattctacactttaagtgatgtgttctgttgcaatgaatctgaggcagagatccttacagggcttaccgtcgggtctgctgccgatgccggtgaggcggctctggttcttctgaagagagggtgtcaggttgtcatcatcaccctcggcgcagagggctgtgtggtgctatctcaaaccgagcccgagcctaagcatatcccgactgaaaaagtgaaggctgtggatactacctgccgcccaggaagtaggccaaaaagcgaggcagctagtgtcaaaaagcagaagcactataagtag

SEQ ID NO: 238851 - DNA, 861 bp, synthetic construct
  misc_feature 1..861: note = Description of Artificial Sequence: Synthetic coding sequence
  source 1..861: mol_type = other DNA
atgagctggctcttatttcttgctcatagggtggccctggcggctttgccttgccgacgcggtagccgcggatttgggatgttttacgctgtccggcgaggacggaagacaggggtttttcttacctggaacgaatgtagggcacaggtagaccgctttcccgcagcacgctttaagaagttcgcaaccgaagacgaagcctgggccttcgtacgcaagtctgcctccccagaggtgagcgagggacatgagaaccagcacggccaggagtccgaggccaaagcatctaaacgcctccgtgagccactggacggagatgggcacgagtctgcagagccatacgctaagcacatgaagccgtcggtggaacctgcgccacctgtgtcgcgggacacatttagttacatgggcgacttcgttgtggtctatactgatggatgttgctcctcgaacggaaggcgtaggcctagggccggaattggtgtgtactggggacccggacaccctttgaatgtggggatccgactgcctggaagacagaccaatcagagagccgagatccacgccgcttgcaaggcaattgaacaggcgaagacacaaaatattaacaaactggtactgtacacagactcgatgttcactatcaacggaatcacgaattgggtccaaggctggaaaaaaaatggttggaaaaccagcgccggtaaggaggtcattaacaaggaagactttgtggcactggagagactgacccaggggatggacatccagtggatgcatgtgccaggccattccgggttcattggcaatgaggaggctgaccgactcgcgagagaaggcgctaaacagtctgaagattag

SEQ ID NO: 238852 - DNA, 1683 bp, synthetic construct
  misc_feature 1..1683: note = Description of Artificial Sequence: Synthetic coding sequence
  source 1..1683: mol_type = other DNA
atggagtttcggcaggaagagttccgcaagcttgctggtcgagccctgggtaagttacaccgcctactcgaaaaacgtcaagagggggctgaaactctggagttgtctgcggacggtagaccagtaaccacacagacaagagacccacccgtggtggactgtacatgcttcggccttccaaggcgctacattatcgcaatcatgagtgggctcggattctgcataagcttcggcatcaggtgcaatctgggagtggccattgtatctatggtcaacaattccactacccatagggggggacacgtcgtagtgcagaaagctcaatttagttgggatcctgagactgtgggactcattcacggctcctttttctgggggtacatagtgactcagatccctggaggatttatttgccagaaattcgcagccaaccgcgtatttggatttgcaatcgtggccacctctaccttgaacatgctcataccttcagcagccagggtgcattatgggtgtgtaatcttcgtacgcatattgcaaggcctagttgagggagtcacctatcctgcttgccacgggatttggagcaaatgggctcctcccctggagcgcagtcggttggccaccacggcattttgtggaagttacgccggtgccgtggtcgctatgccccttgccggtgtccttgtgcagtattccggctggtcctcggtgttttacgtatatggctcgtttgggatcttttggtatttgttctggctgctggttagctacgaatcacctgcgcttcatccatccatctccgaggaggaaagaaagtatatcgaggatgccattggtgaatcggccaaactgatgaatccgctgacaaaattctctacaccttggaggaggtttttcacatctatgcctgtttatgcaataattgtggccaatttctgccgctcgtggacgttctacctcttattgatttcccagcctgcctactttgaggaggtgtttggcttcgagatctccaaggtcgggctggtaagcgccctgcctcacttagttatgactatcatcgtgccgattgggggtcagattgcggattttcttaggtctcggagaattatgtctacaactaacgtcagaaaactgatgaattgcggcggttttgggatggaagctactcttctgctggtggtagggtattctcattctaaaggtgtggcgatttcctttctagtgctggccgtcggtttttctgggttcgccatctctggcttcaacgtaaatcatcttgacatcgcaccccgttatgcaagtatactgatgggtatctctaatggtgtgggaactcttagcggaatggtctgccccatcattgttggggctatgactaagcacaaaacacgggaagagtggcagtatgtcttcctcatcgcctctttagtacactatggcggagtaattttttacggtgtattcgcgagcggtgagaaacagccctgggcggaacctgaggaaatgtccgaggagaagtgtgggtttgtcggacacgaccaactcgctggaagcgatgatagtgagatggaggacgaagccgagccacctggcgcacctccagcaccaccaccatcctacggtgccactcattcaaccttccagccccctaggccaccaccgccagtacgagactattag

SEQ ID NO: 238853 - DNA, 939 bp, synthetic construct
  misc_feature 1..939: note = Description of Artificial Sequence: Synthetic coding sequence
  source 1..939: mol_type = other DNA
atggcggctggcgttgattgcggcgacggtgttggcgctcgccaacacgtgtttctggtttcagagtacctgaaagacgcttccaaaaaaatgaagaacgggctaatgtttgtaaaactggtgaatccttgttctggcgagggggcaatctacctctttaacatgtgtctgcagcagttgtttgaggtcaaagttttcaaagaaaagcaccacagttggttcatcaatcagagcgtccagtcaggcggactcctgcattttgctactccagtcgatccactgtttcttcttctgcattacctcatcaaagccgacaaggaaggaaaattccagccacttgatcaagtggttgttgacaatgtgtttcctaattgtatcctgcttctcaagctgccgggtttggagaaactgctacaccatgtgaccgaagagaaggggaatccggaaatcgacaataagaaatattacaagtacagcaaagagaagacgttgaagtggttagaaaaaaaagtcaatcaaacagtggcggctcttaagactaacaatgtcaatgtgagtagccgtgtgcagtccaccgccttttttagtggcgaccaggccagcaccgacaaagaagaagactatatccgctacgcccacgggctgatctccgactacatccccaaagagctatccgacgatctatccaagtatctgaaattacctgagcccagcgcctctttacctaaccccccttccaagaaaatcaagctgagtgatgagccggttgaggccaaagaggattacaccaagttcaatactaaggacttgaagactgagaaaaaaaactctaaaatgactgccgcacagaaagccttggcaaaagtggataagagtggaatgaagtctatcgatacattcttcggggtgaagaataagaaaaaaattggtaaggtgtag

SEQ ID NO: 238854 - DNA, 774 bp, synthetic construct
  misc_feature 1..774: note = Description of Artificial Sequence: Synthetic coding sequence
  source 1..774: mol_type = other DNA
atggcggctggcgtagactgcggcgatggcgtgggagcgagacagcatgtctttctcgtgtcggagtatctgaaggatgcctctaagaaaatgaaaaacgggctcatgtttgtcaagctcgtcaatccttgtagcggggagggtgcgatctaccttttcaacatgtgcctccaacagttatttgaagtcaaggtctttaaggagaagcatcactcctggttcattaaccagtcagttcagtccggcggtttgctccactttgctacaccagttgacccactgtttctcctcctacactaccttatcaaggcagataaggaaggcaagtttcagccactggatcaggtggtcgtggataacgtcttccccaactgcattctgctgctcaagctcccgggactcgaaaaacttctccaccacgtcacagaggagaaggggaaccccgagattgacaataagaagtactataaatattcaaaggaaaagacactcaagtggcttgagaagaaggtgaaccagactgtcgctgcattaaaaacaaacaatgtgaatgtcagctccagggttcagtctaccgctttcttcagcggggatcaggcaagtaccgataaggaggaggactatatccggtatgcccacggactcatttctgactatatccccaaggagttgtctgacgacttgtcaaagtacctcaaactcccagaaccctcagcctcacttcctaaccctcctagcaagatggcagcccagagacagaaaagggggaaatag

SEQ ID NO: 238855 - DNA, 996 bp, synthetic construct
  misc_feature 1..996: note = Description of Artificial Sequence: Synthetic coding sequence
  source 1..996: mol_type = other DNA
atggcagcaggcgtggattgcggggatggggtgggcgctcggcagcatgtatttttggtcagcgagtacctgaaagacgcatctaaaaagatgaagaacggtttgatgtttgtcaagctggtgaacccctgctccggcgagggcgctatctatcttttcaatatgtgcctgcaacagctgttcgaagttaaggtgttcaaggaaaaacatcatagctggtttatcaatcaaagtgtacaatctggcggtctgctgcactttgccaccccagtagatcccctctttcttctgttacattacctaataaaggcagacaaagagggcaaatttcagcctcttgaccaggtggtggtggacaacgtgttccctaactgtatcctattgctgaaactgcctggcttagagaagctactgcaccatgtgacagaagaaaaggggaatcccgagatcgacaacaagaaatattacaaatattcaaaggagaaaacattgaagtggctggaaaaaaaagtgaatcagactgtggccgctttgaaaacaaataatgtaaatgtctcatctcgggtgcagagcaccgcatttttctcaggggatcaggcctctactgataaggaggaagattacatccggtatgcacatgggttaatcagtgactacattccgaaggagttatccgacgacttgtctaagtacctaaagttgcctgaacccagcgcatctctgcctaaccctccgagcaaaaaaattaagctgtccgacgagcccgtcgaagcaaaagaagactatacgaaatttaacacaaaggacctaaagacagagaagaagaactccaagatgactgctgctcagaaggctctcgctaaagtggataagagcggcatgaaaagcatcgacacatttttcggcgtcaaaaagaagctggagagatttgagactctgaaaatcaagtctagtaaaaacatatgctttctgcacgttagtgtgtgcccttcctag

SEQ ID NO: 238856 - DNA, 495 bp, synthetic construct
  misc_feature 1..495: note = Description of Artificial Sequence: Synthetic coding sequence
  source 1..495: mol_type = other DNA
atggagtctggtgatgaggccgcaattgagaggcaccgcgttcatctgaggtctgctactcttagggacgccgtgcctgccacacttcacttgctgccatgtgaagtggccgttgacggtcccgcaccggtgggtcgcttctttacccccgctatcaggcaaggacccgagggcttagaagtatcatttcgcggtagatgtctgcgcggtgaagaggttgccgtcccaccagggctggtcggttacgtgatggtaacagaggagaagaaggtcagcatgggaaagcccgatcctcttcgagacagtgggactgacgaccaggaagaagagccgctggaacgcgatttcgatagatttattggggctacagccaattttagtcgctttaccctgtggggcctcgagacgattcctggcccagacgctaaggtccgcggagcactgacctggcctagcctcgccgcagctatacacgctcaagtaccagaagactag

SEQ ID NO: 238857 - DNA, 2226 bp, synthetic construct
  misc_feature 1..2226: note = Description of Artificial Sequence: Synthetic coding sequence
  source 1..2226: mol_type = other DNA
atggaatcgcgagaccataacaacccccaggaaggcccaacctccagttcgggacggcgagccgctgtggaggataaccatctccttataaaagccgtacaaaacgaagatgtggacctcgtccagcaactcttagaggggggagccaacgtgaacttccaggaagaggaaggagggtggactccattgcacaacgcagtgcaaatgagccgcgaggacattgtagagctgcttttgcgccacggtgctgatcctgtgctccggaaaaaaaacggcgctacaccctttatccttgctgccattgcaggctctgttaaactcctgaaactcttcctgtccaaaggagctgacgtcaacgagtgtgatttctacggattcacagccttcatggaagctgccgtttatgggaaagttaaggccctcaaattcctctacaagcgaggagcaaatgttaacttgaggcgtaagaccaaagaggaccaagagaggctgaggaaggggggtgcaaccgctctcatggatgccgctgaaaaaggacacgttgaggtgttgaaaatccttctagacgagatgggggcagacgtcaatgcatgtgataatatgggcagaaatgcgctgatacatgcactcctgtctagcgatgacagcgatgttgaagcaatcacccatctgctcctggaccatggtgcagatgtaaacgtgagaggggaacgtggcaagacccccctcatcctggcagtggagaagaagcatctgggactcgtccagagactattggagcaagagcacatcgaaatcaatgacaccgacagtgacggaaagactgcactgttactagccgtggagctaaaactcaaaaaaattgcggaactgctatgtaagcggggtgcatcaaccgactgcggggacctggtaatgaccgctagacgaaattacgatcatagtctcgtaaaggtactgctgagtcacggagccaaggaagattttcatcctccggcagaagactggaaaccacagagctctcactggggggctgccctgaaagacctgcatcgtatctatcgccctatgataggtaagttaaagttttttatcgatgaaaaatacaaaattgccgacactagcgaaggcggtatctatttggggttctatgaaaagcaggaagtcgcagttaagactttttgtgagggcagcccacgggcacagcgagaagttagctgtctgcagtcatctcgcgaaaattcccatttggtcactttttacggcagcgagagccatagggggcacctgtttgtttgcgtcaccctttgcgagcaaactctggaagcttgcctcgacgtgcacaggggcgaggacgttgagaacgaggaggacgagtttgccagaaacgtgctgagcagtatattcaaggcagtccaggaattgcatctatcatgcggatacacccaccaagacttacagccccaaaacattctgattgattccaagaaggcagcacacttggccgatttcgacaagtccataaagtgggcaggcgatcctcaagaggtgaaaagggaccttgaagaccttgggcgactggtcctctacgtggtaaagaaaggatctatttcgttcgaagacctcaaagcccagagtaatgaggaagttgtgcagctgagccctgatgaggagaccaaagatctgatacaccgcctcttccatcccggagagcacgtgcgagattgcctgtcagacctgctggggcaccccttcttttggacttgggaatccagatacagaacccttcggaatgtaggcaacgaatctgatatcaagacccgcaagtcagaaagcgaaatactgagactgctccaacccggacccagcgagcacagcaagtcattcgacaagtggactacaaagatcaatgagtgcgtgatgaagaagatgaacaagttctatgaaaaaagaggcaatttctaccagaatacggttggggacctgctcaagttcatccgtaacctcggagagcacatcgacgaagaaaaacacaaaaagatgaaattgaaaatcggtgacccctccctgtacttccagaagacctttcccgacctggtgatctacgtgtacacaaagttgcagaatacggaatatcggaaacacttcccccagactcactctccgaataaaccacagtgtgacggggctggcggagcttctggcctcgccagccctggatgctag

SEQ ID NO: 238858 - DNA, 2226 bp, synthetic construct
  misc_feature 1..2226: note = Description of Artificial Sequence: Synthetic coding sequence
  source 1..2226: mol_type = other DNA
atggagtcacgggatcacaacaaccctcaggagggcccaacgagctcttccggcagacgcgcagccgtcgaggataaccacctcctgattaaagcagttcagaatgaggacgtagatttggtgcaacaactcctagagggaggggcaaatgttaactttcaggaggaagaaggaggatggactcccctccacaacgctgtccagatgagtagagaggatatagttgagctgctgctgcgccacggtgcagatccagtgctacggaaaaagaatggtgccacccctttcatcctggcggctattgccggttcagttaaactcctgaagctcttcctcagcaaaggggcagacgtaaacgaatgcgatttctacggctttaccgccttcatggaagcagccgtatacggtaaagttaaagccctaaagttcttgtataagcggggagcgaatgtgaacctgcgacggaagactaaagaggaccaggagagacttcgcaagggaggcgctacggccctgatggatgccgctgagaaagggcatgtggaggtgcttaagattctgctggatgagatgggtgctgacgtcaacgcctgtgataacatgggtcggaacgcattaatccacgcgcttctttccagcgacgacagtgacgtggaagccattacacacctgctgctggaccacggagccgacgtcaatgtgcgtggagaacgaggaaagacccccctgattttggctgttgagaagaagcatttgggcttggtacaacgcctgctggaacaggagcacattgaaatcaatgacacagatagcgacggaaagactgccctccttctggccgtggaattgaagctcaaaaagatcgctgagttgctgtgtaagcgcggagcttctacagattgcggagacctcgtgatgacggctaggcgcaactatgaccattccctggtcaaagtgctgctttctcatggcgctaaggaagattttcatcccccagcagaagactggaaaccacaaagtagccattggggcgctgccctgaaggacctgcatcggatttacaggcccatgatcggcaagctcaagttttttatcgacgagaagtataagatagccgacactagcgagggtggtatctacctggggttctatgaaaaacaggaggtcgcagtgaagacattctgtgagggttcaccaagggcccagagggaggtgagctgtttgcagtcctcccgcgaaaattctcacctggtcaccttttatgggtccgagagccatagggggcatcttttcgtttgcgtaaccttatgtgaacagaccctggaggcctgcctggacgtccacagaggggaggacgtagagaacgaggaggacgagttcgctcgcaacgtcctcagcagcatttttaaggccgtgcaagaactgcacctgtcatgcggatacactcaccaggacctgcagccgcagaatatcttgatcgatagtaaaaaggcggctcacctggccgatttcgacaagagcatcaaatgggcgggagatccccaagaggtgaagagagacctggaagacctgggcaggctggttctgtatgtggtaaaaaaaggatccatttcgttcgaggaccttaaggcccaaagcaatgaggaagtcgtacaactgtcacccgacgaggaaactaaggacctgatccaccggctttttcacccaggagaacacgtacgggactgcttatcagatttgttggggcatccattcttttggacatgggaatctaggtatcggacactacggaacgtcggaaatgagagtgatatcaaaaccagaaaatcagaatcagagatcttgcggctccttcagcccggaccctccgagcatagtaaaagcttcgataaatggacaactaagataaacgagtgcgtcatgaagaagatgaataagttctatgagaagcgaggaaacttctatcagaatactgttggagacctgcttaaattcattagaaatctcggcgagcatatagacgaggaaaagcacaaaaagatgaagctgaagattggtgaccccagcctttattttcaaaagacattccccgaccttgtgatctacgtttataccaagttacagaacactgagtaccgaaagcatttcccccagactcatagcccaaacaagccacagtgtgatggggcaggaggagcatccgggctggcttcgccgggatgctag

SEQ ID NO: 238859 - DNA, 1959 bp, synthetic construct
  misc_feature 1..1959: note = Description of Artificial Sequence: Synthetic coding sequence
  source 1..1959: mol_type = other DNA
atggaatctagggatcataacaatcctcaggaggggcctacgagttctagcggacgcagggcagctgtcgaagataatcatctcctgatcaaggcggtccagaatgaggatgtggatttggtgcaacaactgctggagggcggagctaacgttaacttccaggaagaagagggaggctggacgcctttacataatgctgtgcagatgtccagggaggacattgtggagctattgctgaggcacggcgcagaccctgtgctgcgcaagaaaaatggggctacccccttcattcttgctgcaattgcaggctctgtgaagctgcttaagttattcctgtccaagggagccgatgtcaacgaatgcgacttctacggatttaccgcatttatggaagcggctgtttatggtaaggtgaaagcattgaaatttctttacaaaagaggggctaacgtcaatcttagacggaaaaccaaagaggatcaggagagactgcgaaaaggaggagctacggctttaatggatgccgcagagaaggggcacgtggaagtgcttaaaattctgcttgacgaaatgggcgcagacgtgaatgcttgcgataatatgggcagaaacgcattaatccacgccctgttgtcctcagatgactctgacgtggaggcgattacacatctgctcctcgaccatggtgctgatgtgaacgtgcgaggcgaaagaggaaagacccctctaatacttgctgttgagaagaaacatttaggtcttgttcaaagactccttgaacaagagcatattgagatcaacgatacggatagtgacggaaaaaccgcgctgctgctcgctgtggagttgaaactgaagaaaatcgccgagcttctttgtaagcgtggggcatctaccgactgcggcgatcttgtcatgaccgcccgtagaaattacgatcatagtttggtcaaagtgctgttatcccatggagctaaagaagactttcatccccctgccgaggattggaaaccgcagagctcacactggggggcagctctaaaggacctacaccggatttatcggccaatgatcggtaagctgaaattttttatagatgagaaatacaaaattgcagacacaagcgaaggcggaatctatctggggttctatgagaaacaagaggttgcagtgaaaactttctgtgagggaagtccccgtgcccagagggaggtgtcctgcctccaatcctctagagagaatagtcatttggtgacgttctacggctccgaatctcaccgcggtcatctattcgtctgcgtcactctatgcgagcagaccctcgaagcctgtcttgacgtacatagaggtgaagatgtggagaatgaggaggacgaatttgcacggaatgtgctctcttcaatatttaaggcagtgcaagagttacacttgagctgcggctacacccatcaggacctgcagcctcagaacattcttatagacagcaaaaaggccgctcacttggccgacttcgacaagtccatcaagtgggccggtgacccgcaagaagtgaagcgggacttggaagaccttgggcgtcttgtattgtatgtggtgaagaagggttcaatctcctttgaggatctgaaagctcagagtaacgaagaagtcgtgcagctgtctcccgatgaggaaactaaggatctgattcacagactgttccatcccggtgaacatgtccgagattgcctctccgaccttttgggacatcccttcttttggacatgggagtctagatatcgaacactgcgaaacgtcggaaatgagtctgacatcaagacacgcaagtcagagagcgaaatcctccgcctcttgcagccaggcccttccgaacacagtaagtcctttgacaaatggacaacaaaaatgtccaaactcaggcacagacagatcatatttcccacgacccagaaccagtag

SEQ ID NO: 238860 - DNA, 465 bp, synthetic construct
  misc_feature 1..465: note = Description of Artificial Sequence: Synthetic coding sequence
  source 1..465: mol_type = other DNA
atgattggaaaacttaagtttttcatcgacgagaagtacaaaatcgccgacacatcagagggaggtatctatctgggcttttatgagaaacaggaggtggcggtgaaaacattttgtgaaggaagccctcgagcccagcgcgaggtgtcctgtcttcagtcttctcgtgagaacagtcatcttgtaaccttttacgggtccgagagtcaccgcggacatttgttcgtgtgtgtgactctgtgcgagcagacgctggaagcgtgcttagacgttcaccgaggagaggacgtggagaatgaagaagatgagttcgcccgtaatgtgctttccagtatcttcaaggctgtgcaggagttacacctttcttgtggctacacacatcaggatcttcaaccgcagaacattctcatcggcccttggaccgccggtcctctctgcggaaaggaaggcaagcatctgatttag

SEQ ID NO: 238861 - DNA, 465 bp, synthetic construct
  misc_feature 1..465: note = Description of Artificial Sequence: Synthetic coding sequence
  source 1..465: mol_type = other DNA
atggctggtcctgttaaggaccgggaggcttttcagcggttaaacttcttgtaccaggccgcacactgtgtgctagctcaggatccggagaaccaggctctggctcgattttattgctacacagaaagaaccatcgccaaaaggctcgttctccgaagggacccgagcgtgaagcgtactctatgtaggggctgctcttcactcttagtgccgggattaacatgtacccagcgtcagaggcgctgtcgtgggcaacggtggactgtgcagacctgccttacgtgccagaggagtcagcgattcctgaatgatcccggacaccttctgtggggagatcgcccagaggcgcaactgggatcacaggctgatagtaagcctcttcagcccttgcccaataccgctcattccatttcagatcgcttacccgaggagaaaatgcaaacacagggctcgtccaaccagtag

SEQ ID NO: 238862 - DNA, 489 bp, synthetic construct
  misc_feature 1..489: note = Description of Artificial Sequence: Synthetic coding sequence
  source 1..489: mol_type = other DNA
atggctggacccgtgaaggatcgggaggcattccagaggctgaacttcctatatcaggctgctcactgcgtgctggcacaggatccagagaatcaggccctggctcgtttctactgctacaccgagagaacaatcgccaaaagactcgttcttcgtcggcctctctcgtccagtgccccacgggacccatcagtcaaacggaccttgtgccgaggatgttccagccttctggttccaggattaacgtgcacccagcgccagcgcagatgccgaggacagaggtggacagtccagacctgccttacttgtcaacggtcacaaaggtttttgaatgacccaggccacctgctatggggggatcgtccagaagcccagctgggaagtcaagcagattctaagccactgcaacctctgcctaataccgctcattccatctcggataggttacccgaggagaaaatgcaaacgaaaggaagctcgaatcaatag

SEQ ID NO: 238863 - DNA, 534 bp, synthetic construct
  misc_feature 1..534: note = Description of Artificial Sequence: Synthetic coding sequence
  source 1..534: mol_type = other DNA
atggctgggcctgtgaaagacagagaagcgttccagcgcttgaatttcctttaccaggtgtcgttgaggcaaggcccacatggcgacggggctaggcgacctagagtcaccgcccctctgcctcaggccgctcactgtgtgctggctcaagatcccgaaaaccaggcattggccagattctattgctatactgagaggacaatcgcaaagcgcctggtgttgcgtcgagatccatcggtgaagcgcacgctgtgccgaggctgctcttccttactggttccaggcttaacgtgcacccagcgtcagcgtaggtgcagaggccagcgctggaccgtgcagacttgcctgacgtgtcaacggagtcagcggttcctgaacgatccaggccaccttctgtggggtgaccgacccgaggctcagttgggatctcaggccgattccaaaccgctgcagcccctacctaacacagctcattctatttcggatagattgcctgaagagaagatgcaaactcaggggtcctctaaccaatag

SEQ ID NO: 238864 - DNA, 489 bp, synthetic construct
  misc_feature 1..489: note = Description of Artificial Sequence: Synthetic coding sequence
  source 1..489: mol_type = other DNA
atggcgggaccagtgaaggaccgagaagcgttccagcgccttaacttcctctatcaggctgctcactgcgttcttgcacaggaccctgaaaatcaggcactggcccgattctactgttatactgaacgtacaatcgccaaacgattggtgctgaggagaccactcagtagctcagcccctagagatccctcagtgaagagaactctgtgcagaggctgcagctcactgcttgtgccaggattgacttgtactcatcgacagcgcaggtgtcgcggtcagcggtggacagtacagacttgcctaacttgccagcggtcacaacgtttcctgaacgatcccggacatttgctgtggggtgacaggcccgaggcgcagctgggatcacaggctgactcaaaacccctgcagcctttgcctaacaccgcgcactccatcagtgataggttacctgaagagaagatgcagacccagggcagctctaaccagtag

SEQ ID NO: 238865 - DNA, 534 bp, synthetic construct
  misc_feature 1..534: note = Description of Artificial Sequence: Synthetic coding sequence
  source 1..534: mol_type = other DNA
atggctggccctgtgaaggaccgtgaggcatttcaacgactgaacttcttgtatcaagtgtctcttaggcaggggccacacggtgatggcgctcggcgacctcgggtgacggcccctctcccccaggccgcacattgtgtgctggcacaggacccagagaaccaggcgttagctcggttctactgttatactgaaaggaccatagctaagcgcctggtcttaaggcgggaccccagcgtgaagcgcaccctttgtaggggctgttcaagcttgctcgtgccaggcctaacttgcacccagcggcaaaggagatgccgagggcagaggtggacggtgcagacctgtctgacctgccagaggtcgcaacgtttcctgaatgatccgggacatctcctgtggggcgacaggcctgaggctcagctcggatcccaggctgactcaaaaccactgcaacctttgcctaacacagcccattcaatcagcgatcgccttccagaggagaagatgcagactaaagggtcctctaaccaatag

SEQ ID NO: 238866 - DNA, 465 bp, synthetic construct
  misc_feature 1..465: note = Description of Artificial Sequence: Synthetic coding sequence
  source 1..465: mol_type = other DNA
atggctggacccgtgaaagaccgggaggcttttcagcgtctcaattttttataccaagcagcccactgtgtcctggctcaggatccggagaaccaggccctggccagattctattgttatacagagagaacaatcgcaaagagactggtgcttagacgtgacccatctgtcaaaaggacgctgtgtcggggttgctcatcccttctggttcccggattgacttgtacccacagacagcgcaggtgtcggggtcagaggtggaccgttcagacctgcctaacttgccagcggagccagcggttccttaacgatcctggccacctcctctggggggacaggcccgaagctcaacttggcagccaagcggattccaaaccgttgcagcccctgcccaatacagctcactcgattagcgaccggctgccggaggaaaagatgcagacacagggcagcagtaaccagtag

SEQ ID NO: 238867 - DNA, 435 bp, synthetic construct
  misc_feature 1..435: note = Description of Artificial Sequence: Synthetic coding sequence
  source 1..435: mol_type = other DNA
atggctggccctgtgaaagaccgggaagcgtttcagcggctgaattttctatatcaggcagctcattgcgttctggctcaagatccagagaaccaggccctggcaaggttttactgttataccgaaaggaccattgcaaagagactggtgttgaggcgcgatccctctgttaagaggaccctctgccgaggctgtagctccctcttggtgcccggactgacctgtactcagcgccagcggagatgcagaggtcagcgctggaccgtgcaaacctgtctaacctgtcaaagatcacagagatttctgaacgacccaggccatctactgtggggcgaccggccagaagcccagcttgggagccaggctggcgagcggtttcagactaccaccacactggctaagcactcccctttacacttcagaccgccttcctag

SEQ ID NO: 238868 - DNA, 465 bp, synthetic construct
  misc_feature 1..465: note = Description of Artificial Sequence: Synthetic coding sequence
  source 1..465: mol_type = other DNA
atggcaggtcctgtcaaagacagagaggcatttcagaggctgaactttctgtatcaggcggcacactgcgtcctggctcaggacccggaaaaccaggcactagcacgcttctattgctatacagaacgtaccatagccaagcgcctcgtgctacgcagagacccatctgtaaaaaggaccctgtgcagaggctgttccagcctgctggtccccggattgacctgtactcaccgacagcgaaggtgtagagggcagcgatggacggtccagacttgcttgacctgtcagagatcacagcgattccttaacgatccaggccatctgctgtggggcgataggcctgaggctcagcttggaagccaggctgatagcaaacccttacagcccttacctaacacggcccactccatctccgacagactgccagaggaaaaaatgcagacacaggggtcttcaaatcagtag

SEQ ID NO: 238869 - DNA, 465 bp, synthetic construct
  misc_feature 1..465: note = Description of Artificial Sequence: Synthetic coding sequence
  source 1..465: mol_type = other DNA
atggcaggtccagtgaaagaccgggaggcctttcagcgcttgaattttctgtatcaagccgcacactgcgttcttgcccaggatcctgagaatcaggctctcgccaggttttactgttatactgagcggaccatcgccaaaagattagttctccgcagagatccatcagtgaagcgcactctgtgcaggggctgttcctctctccttgttccaggcctgacttgcactcagcgccagagaaggtgtaggggacagcgctggaccgtgcagacatgtttgacttgtcaacggagccaaagatttctcaacgacccaggtcacctcctgtggggcgatcgtcctgaggctcaactgggcagccaagcagattctaaaccgctgcagcctctgccaaataccgcccattccattagcgacaggctgccagaggagaagatgcagacaaaaggctcatctaatcagtag

SEQ ID NO: 238870 - DNA, 534 bp, synthetic construct
  misc_feature 1..534: note = Description of Artificial Sequence: Synthetic coding sequence
  source 1..534: mol_type = other DNA
atggctggtccggtcaaggatcgcgaagcctttcagcgcctcaattttctgtaccaagtgagtttaagacagggaccacacggagacggagctcgaagaccgagggtaaccgcccctctcccacaggccgctcattgcgtcctcgctcaggaccctgaaaatcaagccctggcacgcttttactgttacaccgagcgtacaattgcaaagagattagtgcttaggagagatccttctgtcaagcgtaccctctgtcgaggctgctcatccctgctggttcccggactcacgtgtactcaccgtcagcgcagatgtagaggccagaggtggaccgtgcagacttgcttgacatgtcagcgttctcaacgattcctcaacgatcccggacatctgctctggggggatcgcccagaagcacagttggggagccaggcggactccaaacccctgcaacctttgccaaatacagcacacagtatatccgatcggctgccagaggaaaaaatgcagactcagggtagctcaaatcagtag

SEQ ID NO: 238871 - DNA, 435 bp, synthetic construct
  misc_feature 1..435: note = Description of Artificial Sequence: Synthetic coding sequence
  source 1..435: mol_type = other DNA
atggcaggcccagtcaaagatagggaggcctttcagcgattgaatttcctttaccaggccgcacattgtgtattggcccaagatcccgaaaatcaggcgctggccagattttactgttatacagaacgaaccatcgccaagagattggtgctaaggagagacccgtctgttaaaaggactctgtgcagaggctgctccagcttgctggtccccggattgacttgcacccaccggcagagacggtgccggggacagcgttggaccgtgcagacgtgcctgacgtgtcagaggagtcaaaggtttcttaacgacccagggcatcttctctggggtgatcgacctgaggcgcagctgggcagtcaagccggagagagatttcagacgacaaccacacttgccaagcactcacctcttcatttccgacccccaagctag

SEQ ID NO: 238872 - DNA, 465 bp, synthetic construct
  misc_feature 1..465: note = Description of Artificial Sequence: Synthetic coding sequence
  source 1..465: mol_type = other DNA
atggcaggccctgtcaaagaccgcgaggccttccagcgcctgaatttcctataccaggccgctcattgtgtgctggctcaggaccccgaaaaccaggcactggccagattctattgctatactgagcgtacgattgctaaacgtcttgtgctacggagagacccaagcgtaaagcgcacactttgtcggggatgtagttctctactggtgcctggcctgacatgcacacaacgccagcgtcgctgtaggggccaaaggtggaccgtgcaaacttgtctgacttgccagcggagtcagcggttcctcaacgatcccggtcatctgctgtggggcgaccgccctgaagctcagctcggaagtcaagcagattcaaagccacttcagccattaccgaacaccgctcactcaatcagcgaccgccttcccgaggagaagatgcaaactcagggtagttccaaccagtag

SEQ ID NO: 238873 - DNA, 489 bp, synthetic construct
  misc_feature 1..489: note = Description of Artificial Sequence: Synthetic coding sequence
  source 1..489: mol_type = other DNA
atggctggacccgtaaaggatagagaagccttccagagattgaacttcctgtatcaagctgcacactgtgtcttggcccaggaccccgagaatcaagccttggccagattttactgctacaccgagcggaccattgcgaagcggcttgtgctcaggaggccactgtcaagttccgcccctcgcgatccgagcgtgaagcgcaccctctgccggggatgcagcagcctgctcgtgcccggactgacttgcacacagcgacagaggcgatgccgaggacagaggtggactgtacagacctgcctgacatgtcaaaggtcacagcgcttcctgaatgatcccggtcacctcctgtggggcgatagaccagaagcacagttggggagtcaagccgactccaagccactgcagccacttcctaacaccgcacattctatcagtgaccggttgccagaggagaagatgcagacccagggcagctctaaccagtag

SEQ ID NO: 238874 - DNA, 435 bp, synthetic construct
  misc_feature 1..435: note = Description of Artificial Sequence: Synthetic coding sequence
  source 1..435: mol_type = other DNA
atggccggacccgtaaaggatagagaagcattccagcgcttgaactttctctatcaggctgcccattgtgtcctggcccaagatcccgagaatcaggccctggcccgattctattgttacacagaaaggaccatcgcaaagcgcctcgtgctgcggagggatccctccgtcaagcgcacgttatgccggggttgcagtagcctcttagtgcctggcctgacctgcactcacaggcaaagacgctgtcgcggacagagatggacggtccagacttgtctgacatgccagcgttcccagcggtttctgaacgatccagggcacttgctttggggggatcggcctgaagctcagttgggctcacaagctggagaaaggtttcagaccaccaccacgcttgccaaacactctcccttgcatttcagacccccatcctag

SEQ ID NO: 238875 - DNA, 534 bp, synthetic construct
  misc_feature 1..534: note = Description of Artificial Sequence: Synthetic coding sequence
  source 1..534: mol_type = other DNA
atggccggtccggtcaaggacagagaggcattccagaggctcaacttcctttatcaagtatctttaagacaggggccacacggagatggcgcacggaggcctagggtcaccgcgccactccctcaggccgcacactgtgtcctggctcaggatccagagaatcaggccttggcccgtttttactgctacacggaacgcacaattgccaaaaggcttgtcctgcggcgagatccttccgtcaaacgcactctgtgtcgagggtgctcatctttgcttgtgccaggactgacatgtactcagcgccagcggcgatgccgtggtcagcggtggaccgttcagacctgcctcacatgtcagagaagtcaacggttcttgaatgatcctggacatctgctgtggggtgacagaccagaggctcaactaggatcacaggcagactcaaaaccactccagccgctacctaatacggctcactccatctccgatagactccccgaagagaagatgcagacccagggctcgagcaatcagtag

SEQ ID NO: 238876 - DNA, 489 bp, synthetic construct
  misc_feature 1..489: note = Description of Artificial Sequence: Synthetic coding sequence
  source 1..489: mol_type = other DNA
atggccggtccagtcaaagacagggaggcattccaaaggcttaacttcctttatcaggccgcacactgtgtgctcgcccaggacccagaaaaccaggccctggcccgattttactgctacactgagaggactatcgccaaaagactcgtgctccggcgtcccctatcaagtagtgccccacgagaccctagcgtgaagcggacactctgtaggggctgctcgagtctgctggtgccaggccttacttgcactcatcggcagcgcagatgtcgcggtcagagatggacagtccagacttgcctcacttgccaaagaagtcagagatttctgaatgacccaggccatctattgtggggcgatcgacccgaagcgcaactggggagccaagcagacagtaagcccctgcagcctctgccaaatactgcccactccatcagtgaccggctccccgaggagaagatgcaaacacagggttcctctaaccagtag

SEQ ID NO: 238877 - DNA, 534 bp, synthetic construct
  misc_feature 1..534: note = Description of Artificial Sequence: Synthetic coding sequence
  source 1..534: mol_type = other DNA
atggcagggccagtgaaagatcgggaagcctttcaacgcctaaattttctgtaccaagtcagtctacgccaaggccctcatggtgatggcgcaagacggccacgcgtcaccgccccactcccccaggccgcacattgcgttctggcgcaggaccctgagaatcaagcactggcaagattttactgctacaccgaaagaacgattgcaaaaagactggtgctccggagagatccatctgttaagcgcactctctgtagagggtgctccagtctgctggtccccggtctcacctgcacccaaagacagcggcgatgtcgcggacagcgctggaccgtgcaaacatgtttgacctgccagagatcccagaggtttttgaatgacccgggtcacctgctctggggagacaggccagaagcacagctggggagccaggcggattctaaaccactgcagccactcccaaacaccgcacactccatctctgaccggctccctgaagagaagatgcagacacaggggtcgtccaaccagtag

SEQ ID NO: 238878 - DNA, 489 bp, synthetic construct
  misc_feature 1..489: note = Description of Artificial Sequence: Synthetic coding sequence
  source 1..489: mol_type = other DNA
atggcgggtccagtgaaagatcgggaggctttccagcggctgaacttcctctaccaggccgcacactgtgtcctcgctcaggaccctgagaatcaagccctggccaggttctactgttacacagaacgcactatcgctaaacgtttagtgctaagaaggccactttcttcatctgccccacgggatcccagcgttaaacgtaccctatgtcggggatgctcttcactcctcgtccctggactgacatgcacccaaagacaaagacgatgccgcggacagcgctggacggtgcaaacctgcctgacgtgccagcgaagtcagcgctttctcaatgatcccggtcacctcctctggggcgaccgacctgaggcccagctgggatcccaggccgactctaagcccctacagcctttacccaacactgcgcattctatctccgaccgtctcccagaagagaagatgcagacccagggaagttctaatcagtag

SEQ ID NO: 238879 - DNA, 465 bp, synthetic construct
  misc_feature 1..465: note = Description of Artificial Sequence: Synthetic coding sequence
  source 1..465: mol_type = other DNA
atggcaggacccgtgaaagatcgggaggccttccagaggctcaacttcctctaccaggcagctcattgcgtcctggcacaggacccggagaatcaagctttggctcgattctactgctacaccgaaagaactatagcgaaacggttggtcttaagaagagatccatccgtgaaacggacactgtgtagggggtgcagctctttgctggtgcccggtcttacctgcacgcatcgccagagacgctgccgcggacagcggtggacagtccagacctgcctgacatgtcagcgctcccagcggttcctcaacgacccaggtcacttgctttggggagatcgtccagaagctcagctgggcagccaggcagacagcaagccattacagccactgcctaacacggcccattctatttcagatagactccctgaggagaagatgcagactcagggaagcagtaaccagtag

SEQ ID NO: 238880 - DNA, 435 bp, synthetic construct
  misc_feature 1..435: note = Description of Artificial Sequence: Synthetic coding sequence
  source 1..435: mol_type = other DNA
atggccggaccggtgaaggatagagaggcttttcagcgactaaatttcctttaccaggccgctcactgcgtcctcgctcaggatcccgagaaccaggcactggcacgcttttattgttataccgagcgcaccatagcgaagaggctggtcttgaggcgagatccctctgtgaagcggaccctgtgtcgtggctgctcatctctgctggtgcccggactgacctgcacgcagagacagagacggtgccgcggacagagatggaccgttcaaacgtgcctgacttgccagaggagccaaaggttcttgaatgaccctggccatctgctgtggggtgatcgcccagaggcccaactcggatcccaagctggcgagcgctttcagacaaccacaaccctcgccaaacactctcctctgcacttcaggccaccatcatag

SEQ ID NO: 238881 - DNA, 435 bp, synthetic construct
  misc_feature 1..435: note = Description of Artificial Sequence: Synthetic coding sequence
  source 1..435: mol_type = other DNA
atggcaggaccagttaaagaccgggaggcgttccagcggctcaacttcctgtaccaagccgcacactgtgtgttagcccaggaccctgagaaccaggccctggccaggttctactgctatacagaaaggacgatcgcgaagcgcctggtattaaggcgggacccctcagtcaaacggacactctgccggggatgttcttcacttcttgtcccaggactaacttgtacgcaacgtcagcgcagatgccgcggacagagatggacggttcaaacatgcctgacttgtcaacgatctcaacggtttctcaacgacccaggacacttactgtggggagatcgaccagaggcccaattgggaagccaggctggggagcggttccagactacaacgaccctggctaaacattcccccttgcatttcagaccaccctcctag

SEQ ID NO: 238882 - DNA, 435 bp, synthetic construct
  misc_feature 1..435: note = Description of Artificial Sequence: Synthetic coding sequence
  source 1..435: mol_type = other DNA
atggccggtcccgtaaaagacagagaagcctttcaacgactgaattttctctaccaggctgcacattgtgtgctggcccaggaccccgagaaccaagcgctggccaggttctactgttatacagaaaggactatcgccaagagactcgtactccggcgtgatccctccgtgaagagaactctgtgccggggatgctcatccctcctggtccctggccttacgtgcacccagaggcagcggagatgccggggacagcgctggacggtgcaaacttgtctaacctgtcagaggagtcaaaggtttttaaacgatcctggtcacttactctggggggatagaccggaggctcaactgggctcacaggccggtgaacggtttcagaccactaccacactcgcaaagcatagcccacttcattttaggcctccctcttag

SEQ ID NO: 238883 - DNA, 534 bp, synthetic construct
  misc_feature 1..534: note = Description of Artificial Sequence: Synthetic coding sequence
  source 1..534: mol_type = other DNA
atggcagggccagttaaagacagggaggcattccaacggctgaatttcctgtaccaagtaagcctgcgtcagggcccacacggcgatggagcaaggcgtccacgagtgaccgccccactgcctcaggctgcccactgtgtgctggcccaggaccctgagaaccaagcactggctcggttttattgctacacagaaaggacgattgccaaacggctcgtcctgcggcgtgatccctcggtcaagagaactctgtgcagggggtgttcttccctgttggtcccaggactgacctgcactcaccgccagcgccgatgtcgtggccagaggtggaccgtgcaaacctgcttgacctgccaaagatcgcagaggtttcttaacgacccaggccatctgctgtggggcgaccggcctgaggcccagcttgggagccaggccgattcgaagcctctccaaccactaccaaatacagctcacagcatcagcgataggttgcccgaggagaagatgcagacacaaggctcatcaaaccagtag

SEQ ID NO: 238884 - DNA, 435 bp, synthetic construct
  misc_feature 1..435: note = Description of Artificial Sequence: Synthetic coding sequence
  source 1..435: mol_type = other DNA
atggcaggaccagttaaggaccgcgaagcatttcagcgcttgaattttctgtaccaagctgcccactgtgtcctcgcgcaagatcctgaaaaccaagcacttgccaggttctattgctataccgagcgcaccatcgccaagcgtctggtgcttcggagggacccgagcgtcaaacgtacattgtgcagaggatgttcctcactgctggtccctggactgacttgtacacataggcaacgaagatgccgcggacagaggtggaccgtccaaacttgtctgacttgccagaggtcacagagattcctcaatgaccctgggcacctcctgtggggtgaccgcccagaggcacagctaggatcccaggcgggtgagcgatttcagactaccactacattagctaagcatagcccactccacttccgcccaccctcttag

SEQ ID NO: 238885 - DNA, 465 bp, synthetic construct
  misc_feature 1..465: note = Description of Artificial Sequence: Synthetic coding sequence
  source 1..465: mol_type = other DNA
atggccggacccgttaaggatagggaggcttttcaacggttaaatttcctgtatcaagcggctcactgtgtcctggctcaagatcctgaaaatcaggctctggcccgtttctactgctatacagaacgaaccattgccaagagactcgttctgcgtcgcgatccttcagtgaagaggaccctatgtcggggttgcagcagtcttctggtaccaggtctgacatgtactcagagacagcgccgttgcaggggacagcggtggactgtgcaaacttgtctgacatgccagcggagccaaaggttcctgaatgatcctgggcacctgctttggggcgataggcctgaagcgcagctcgggagccaggctgacagtaagcccttgcagccgctaccgaataccgcacattctatttccgataggttgcccgaagagaaaatgcagacccaggggtcttccaaccagtag

SEQ ID NO: 238886 - DNA, 534 bp, synthetic construct
  misc_feature 1..534: note = Description of Artificial Sequence: Synthetic coding sequence
  source 1..534: mol_type = other DNA
atggcgggacccgttaaagatcgggaggctttccagagactgaatttcttataccaggtttctctaagacaggggcctcatggagatggggctcggaggccgagagtcactgcccctctcccgcaggccgctcactgtgtgctcgcacaggatccagagaatcaggcattagccagattctactgctacaccgaacggacgatcgcaaaaaggctggttctgcgacgggaccctagtgttaaacgcaccctatgtcgaggctgcagttccttgttggtcccaggcctgacatgtacccacagacagcggagatgtcgaggccagcgctggacggtgcagacatgtttaacttgtcagcgctctcagcgcttccttaatgatccgggacacttgctgtggggcgaccgcccagaggcccagctggggagccaggctgattccaaaccactgcagcccctccccaatactgcccattccattagtgaccggctgcccgaggaaaagatgcagacccaggggagtagcaaccaatag

SEQ ID NO: 238887 - DNA, 489 bp, synthetic construct
  misc_feature 1..489: note = Description of Artificial Sequence: Synthetic coding sequence
  source 1..489: mol_type = other DNA
atggccggaccagtgaaggacagggaggctttccagagattgaacttcctttatcaagccgctcactgcgtgctggctcaagatccagagaatcaggctctcgcgaggttttactgttacaccgaacggaccatagctaaacggttagtcctgcggagaccactgagttcttccgcccctagagacccttccgtaaaacgcactctgtgccggggatgctctagtctcctcgtaccagggctcacatgcacccagaggcagcggcgatgcagaggtcagcgctggactgtgcagacctgcctaacttgtcaaaggagccagcgcttccttaatgatccgggacacctactgtggggagataggcctgaggcccaattggggtctcaggccgatagtaaaccgctgcaacctttgcccaatacggcgcatagtatttccgatagactgcctgaggaaaagatgcagacccaggggtcctccaatcaatag

SEQ ID NO: 238888 - DNA, 489 bp, synthetic construct
  misc_feature 1..489: note = Description of Artificial Sequence: Synthetic coding sequence
  source 1..489: mol_type = other DNA
atggccggacctgtgaaagatcgggaggcctttcagaggcttaattttctgtatcaagctgcccactgtgtgctcgctcaagatcccgagaatcaggctttggctaggttctactgctacacggagcggaccatagcaaaacgtcttgttctacgcaggcccctgagtagctctgcccctagagatccgtcagtgaagcggaccctgtgtagaggatgttcttctctactggtgcctggcctcacttgcacgcaccgccaacgtaggtgtcggggacagaggtggacagtccagacctgcctaacttgtcagcgatcccagaggttcctcaatgatcctggtcacctcctgtggggcgatcggcctgaagcacaactggggtcccaagcagactctaagccattacagccattgcctaacacagcccactcaatttcagatcgtcttcctgaggagaaaatgcagacacaggggtcctctaatcagtag

SEQ ID NO: 238889 - DNA, 765 bp, synthetic construct
  misc_feature 1..765: note = Description of Artificial Sequence: Synthetic coding sequence
  source 1..765: mol_type = other DNA
atggctgtgtttgccgacctagacttacgggctggcagcgatcttaaagcattgaggggcctggttgagaccgctgcccaccgagagctccccagactaagagcctggcccaccagttgtcacccagatcatcgagccaccttacggatcggctactcggttgtggccatcaatcacatcgtggatttcaaggaaaaaaagcaggagatcgaaaagccagtcgctgtgtcggaactcttcacaacactgccgatcgtccagggaaagtcacgacccataaagatactaacccgcctcaccatcattgtgagcgatccgtctcactgcaacgtcctgagagccaccagtagtcgggctcggttgtatgacgtcgttgctgtatttcccaagactgaaaagctgtttcacattgcttgtactcatctggacgtcgatttggtgtgcatcacagttacagagaagctaccattttacttcaagaggccccctattaatgtcgccatcgaccggggactcgccttcgagttagtttactccccagcgattaaggacagtaccatgcggagatacactatctcatctgcactgaaccttatgcaaatttgcaagggaaagaacgtgatcatctcttcggccgcagagcggcctttagaaattcgaggtccctatgacgtcgcaaatctgggactcctgtttggcctcagtgaaagtgatgccaaagccgcagtgagcaccaactgccgcgctgcactcctacatggatag

SEQ ID NO: 238890 - DNA, 807 bp, synthetic construct
  misc_feature 1..807: note = Description of Artificial Sequence: Synthetic coding sequence
  source 1..807: mol_type = other DNA
atggcagtgttcgcagacctcgatctgcgagctggctctgatttgaaagcactgcgaggtctggtagaaaccgcagctcacctggggtattctgttgttgctatcaaccatatcgtggattttaaagaaaagaaacaggagatcgagaagcctgttgccgtgtctgagctgtttactactctgccgatagtccaggggaagagccgccctataaagatcctcacaagactcacaatcattgtgtctgacccatcccactgcaacgtgctgcgagccaccagctctagagctagactgtatgacgtggtggccgtatttccaaagactgagaagttgtttcacatcgcatgtacccatctcgacgtcgacctagtctgtataacagtgacggagaaattgccattctacttcaaaaggccacccataaacgtggccattgatagggggctggctttcgagctggtgtatagcccagcaatcaaggactccaccatgaggcgttataccattagctctgccctgaatttgatgcagatctgtaagggcaaaaacgtcataatcagcagcgccgcagagaggccgctcgagataagaggcccatacgacgtggctaacctgggcttgctgtttggtctgagcgagagcgacgctaaggccgcagtctccacgaattgccgggcagcgctcctccatggcgagactcggaaaaccgccttcggcattatttccaccgtgaaaaaaccacggccaagtgaaggtgacgaggactgccttccggctagtaagaaggccaaatgcgaaggctag

SEQ ID NO: 238891 - DNA, 768 bp, synthetic construct
  misc_feature 1..768: note = Description of Artificial Sequence: Synthetic coding sequence
  source 1..768: mol_type = other DNA
atggccgtgtttgccgacctcgatcttagggcgggtagcgatctaaaagcactcagaggtcttgttgagacagccgcacacttaggatatagcgtagtggccatcaatcatatcgtcgacttcaaggaaaagaaacaggaaatcgagaagccggtggctgtgtccgaattattcaccacactgcctattgttcaaggcaaaagcagaccaattaagattctcaccaggttgaccatcatagtcagcgacccaagtcattgcaacgtactgcgcgctacttcctcccgcgcacgcctgtacgacgtcgtggctgtgtttcctaaaaccgagaagctatttcacatagcttgcactcatctcgacgtcgacttggtctgtatcacagtgaccgagaagctgccgttttactttaagcgaccacccatcaatgtggctattgataggggcctggcatttgagctcgtgtactcacccgctattaaggacagcactatgcgaagatataccatatcctcagctttaaatttaatgcagatttgcaaggggaagccgctcgagattcgtgggccttatgatgtggcaaatctcggattgttgtttgggttatctgagtctgacgctaaagcggctgtctccaccaattgtagagccgcactcttgcacggggagacccgcaaaaccgctttcggcatcatttctaccgtgaagaagcctagaccaagcgaaggagacgaagattgtttgccagcctctaagaaagccaaatag

SEQ ID NO: 238892 - DNA, 969 bp, synthetic construct
  misc_feature 1..969: note = Description of Artificial Sequence: Synthetic coding sequence
  source 1..969: mol_type = other DNA
atggctgtgtttgcagatttggacttaagagccggttccgacttaaaagctctaagggggctcgtcgagactgctgcacatttgggctactctgtggtcgccatcaaccatatcgtggacttcaaggaaaagaagcaggaaatcgaaaagccagtcgccgtttcagagctctttaccactttgcctatcgtccaaggcaaaagccgcccaattaagatcctgactcggttgaccatcatcgtttctgaccctagccactgcaacgtcttaagggctacatcctccagggctaggctgtacgacgtcgtagcagtcttccctaagacagaaaaactgtttcatatcgcttgtacacacctggatgtcgacctggtctgtattacagtgactgagaaactacccttttattttaagcggcctccaataaatgtcgctattgacagaggcctggctttcgagctcgtgtactcaccggctatcaaagactctacaatgcgtcggtatacaatcagctctgccttaaacctcatgcagatatgcaaaggcaagaacgtgattataagctctgctgctgaaagacctctggagatccgaggcccttacgatgtcgcaaacctagggttattgttcggcctgtcagagagtgatgccaaagccgctgtctctaccaattgccgcgctgccttgttgcacggcgaaaccaggaaaaccgccttcgggataattagcacggttaagaagcctcggcctagcgagggagatgaagattgcttacccgctagcaaaaaagctaaatggtcccatagcgtgacacaggccggagtgcagtggcacaatttgggatctcttcagccacttcccttgggactgaagccctctagtcacctgagcctccccagaacaaggattcaacagcgccagcttctgatctcacatcagagagatcatacacctaagaataggctatag

SEQ ID NO: 238893 - DNA, 639 bp, synthetic construct
  misc_feature 1..639: note = Description of Artificial Sequence: Synthetic coding sequence
  source 1..639: mol_type = other DNA
gagatcgagaaacccgtcgcagtgtcggagttgttcactaccctccctattgtgcagggcaaatctcgcccaatcaagatcctaactcgcttgacaataattgttagcgacccttcacactgcaatgtcctgcgtgctactagttctcgggcaagactgtacgatgtagttgccgtgttccccaagaccgagaaattattccatattgcctgtacacacctcgacgttgacctcgtttgtatcactgtcactgagaaactccccttctactttaaacggccacccattaatgtggcaatcgataggggtctcgcattcgaattggtgtattccccagccattaaagactctaccatgagacggtatacgatttcaagcgctctcaaccttatgcaaatctgcaaaggaaaacccctggagattaggggcccatacgacgtggccaaccttggtttgttatttggactgagcgagtcagacgccaaggccgctgttagcacaaactgcagagcggcactcctgcatggggagactcggaagacagctttcggtatcatatccaccgtcaaaaagcccagacccagcgaaggagacgaagactgtttgcctgcatccaagaaagcaaaatgcgagggttag

SEQ ID NO: 238894 - DNA, 852 bp, synthetic construct
  misc_feature 1..852: note = Description of Artificial Sequence: Synthetic coding sequence
  source 1..852: mol_type = other DNA
atggccgctgctccccaggcccctggcagaggatccttgcgcaaaactcggcctcttgttgttaaaacttcgcttaacaatccatatatcatacggtggtcggcactggaaagtgaggacatgcacttcattttgcagaccctcgaagaccgcctaaaggccatagggttacagaaaatagaggacaaaaagaaaaagaataagactccttttctgaagaaggagtctagggaaaagtgttcaattgccgtggacatctcggagaacttgaaggagaagaagactgacgcaaagcagcaggtgagtggctggacccccgctcatgtgaggaaacagttggctataggcgtgaatgaagttacacgggcattggaaagaagagagctcctattggtgctggtgtgtaaatctgtgaagccggcaatgattacttctcacttgatccaactatccctctcccgctccgtgccagcctgccaggttcctaggctgagtgagcgaatcgctcccgttatcggcctgaagtgcgtgctggctctggccttcaaaaagaacacgaccgactttgtggatgaagtgcgggctattattcctcgggttccgtccctttccgtgccgtggttgcaggaccggatcgaggattcaggggagaacctggagacagagcctcttgagtcccaagaccgcgagcttctggatacttcatttgaggatttatccaagcctaaacggaagctggctgatggccgtcaggcatccgtgacgcttcaacctctgaaaatcaaaaaactgattcccaacccaaataaaatcagaaaacccccaaagagcaaaaaagccactccaaagtag

SEQ ID NO: 238895 - DNA, 504 bp, synthetic construct
  misc_feature 1..504: note = Description of Artificial Sequence: Synthetic coding sequence
  source 1..504: mol_type = other DNA
atggcagccgctccccaggcccctggcaggggcagcctcagaaagacaagacctctcgtggtaaaaactagtttaaacaacccctatatcattaggtggagcgctctggaatccgaggatatgcatttcatcctccagaccctcgaggatcgcctgaaggctattggcctacagaagatcgaggacaagaaaaagaagaacaaaacaccttttttgaaaaaagagtcaagggagaagtgctctattgcggttgacatatccgagaacctcaaggaaaagaagaccgatgccaaacagcaggtgtcaggttggacccccgcacatgttagaaaacagttagccattggtgtcaacgaggtgacccgtgcactggaacggcgagaacttttgctcgtgctggttcttaccctgctgccaagactcgagtgttcaggggtcatccccgcacactgcaaccctgcctcatgggtgcaagccatcctattgccacagccgccagagtag

SEQ ID NO: 238896 - DNA, 852 bp, synthetic construct
  misc_feature 1..852: note = Description of Artificial Sequence: Synthetic coding sequence
  source 1..852: mol_type = other DNA
atggccgcagccccacaggcccctgggcgtggaagcctgcgcaagacgcgccctctagtggtcaagacctcactgaataatccatacataatcaggtggagcgcactcgaatctgaagacatgcactttattctccaaacactggaggatcgactgaaggcaattggcctccagaaaatcgaagacaagaagaagaaaaacaaaaccccctttttaaaaaaagagtcccgagagaaatgttctatagcggtggacatatccgagaacctaaaagagaaaaagaccgatgctaaacaacaggtgtcaggctggactcccgcacatgttcgcaaacagctcgccatcggggtaaatgaggttacccgggctctggaacgccgagagttactcctcgtgctggtttgcaagtcagtgaagccggcaatgatcacctcccatctgatccagctatctttatccagatctgtacctgcctgccaggtgcccaggctgtcagaaagaatcgctcctgtgatcggactcaaatgtgtcttagcacttgcgtttaagaagaacactacggactttgttgacgaggttagggccattataccccgtgttcctagtctgagcgttccatggctgcaggacagaatagaagactcaggggagaatctcgagacagagcccctagaatctcaggatcgcgaactcctcgatacctcctttgaagatctttctaagccgaaacgcaaacttgcagacgggaggcaagcttctgtgacattacagccactgaaaattaagaagctgattcctaatcctaataaaattcgcaagcctcctaaatccaagaaggccaccccgaagtag

SEQ ID NO: 238897 - DNA, 852 bp, synthetic construct
  misc_feature 1..852: note = Description of Artificial Sequence: Synthetic coding sequence
  source 1..852: mol_type = other DNA
atggccgctgctccccaggcgcctggccgaggctccctgcgcaagaccagacccctcgtggtgaagaccagcttgaacaatccttacattattagatggtccgcattggagagcgaggacatgcactttatcctacagacccttgaagacagacttaaggctattggcctgcaaaaaattgaggataaaaagaaaaagaataaaactccattcttaaaaaaggagagtcgggagaagtgtagcatcgcagtggatatcagcgaaaacttaaaggaaaagaagaccgatgccaaacagcaggtgtctggatggactcctgcccacgtaaggaagcagttagctataggagtaaatgaggtgacccgggctctggagcggcgtgagctactgctggtcctcgtgtgtaaatccgtcaagccagctatgattaccagccacctgattcagcttagcttgagtcgttctgtcccggcatgtcaggttccacgcttgagcgaaagaatagccccagttatcggactgaagtgtgtgcttgctctggctttcaagaagaacactactgattttgtggatgaggttagggccataatcccccgtgtgccctctttatccgtaccatggctccaggatcggatcgaggactcaggcgaaaacctcgagaccgaacccttggagagccaggaccgcgaattactcgataccagcttcgaagacctgagcaagccgaagcgcaagctcgccgacggacgccaggcaagcgtcacgctccagccgcttaaaattaagaaactgattccgaatcctaacaaaattaggaagcctcctaagagcaagaaggcaactccgaaatag

SEQ ID NO: 238898 - DNA, 510 bp, synthetic construct
  misc_feature 1..510: note = Description of Artificial Sequence: Synthetic coding sequence
  source 1..510: mol_type = other DNA
atggcggcagcccctcaggccccaggacggggttctctgaggaagacccgacccctcgtggttaaaacgagcctcaataacccctatataatacggtggtccgccctcgagagtgaagatatgcacttcatcttgcagacccttgaggatcggctcaaagccattgggctgcaaaagatcgaggacaaaaagaagaagaacaaaaccccatttctaaagaaggaatcacgtgagaagtgcagcattgctgtggacatcagcgagaatctgaaggagaagaagacggatgcaaagcagcaagtctccggatggacccccgcacatgtgcgtaaacaacttgccattggagtgaacgaagtaacaagggccttggagcggcgagagttgctcttagtgttagtctgtaaatctgttaagcccgcaatgattacatcccacctgatccagctgtccttaagcaggtcagttcctgcctgtcaggtgccccgactcagcgagcggattgcatag

SEQ ID NO: 238899 - DNA, 1092 bp, synthetic construct
  misc_feature 1..1092: note = Description of Artificial Sequence: Synthetic coding sequence
  source 1..1092: mol_type = other DNA
atggcgacactcagacgccttcgcgaagccccaaggcatcttcttgtttgtgagaagtctaatttcggcaaccacaaatcgagacaccggcacctggtgcagacccattattacaactacagagtgagtttcctgattcctgaatgtggcatactttccgaggaactgaaaaacctcgttatgaacaccggaccatattactttgtgaagaacctcccactgcacgaattgatcacccctgagttcatcagtaccttcattaaaaagggatcatgttatgcgcttacgtataacacccacatagacgaggataatacggtggccttgcttcccaatggtaaactcatccttagcctggataaagatacttacgaagagaccggcttgcaggggcacccctcccagttttccggcaggaagatcatgaagttcattgtgagcatcgatctcatggaactgtctctcaacctcgattccaagaaatacgaacgaatcagttggtcatttaaagagaaaaagcctctgaagttcgacttcctcctggcttggcacaaaacagggagcgaagaaagcactatgatgtcttacttctccaagtatcagatccaggagcaccaacctaaagttgccctctccacgctccgagacctccagtgccctgtgctccagagctctgagctcgaaggcaccccggaggtttcttgtagggcgttggagctgttcgactggctcggcgcagtgttttccaacgttgacttgaataatgaaccaaataatttcattagtacatattgctgcccggagccctcaacagtagtggccaaggcttacctgtgtacaatcaccggtttcatcttgcccgaaaagatctgtctacttctagaacacttatgccactatttcgacgagcctaagctggcaccatgggtcacactttcagtgcaggggttcgctgatagtcccgtatcctgggaaaagaacgagcacggatttagaaaggggggagaacacctgtataattttgtaatcttcaacaaccaggactattggctgcagatggcggtcggcgctaatgatcactgccccccttag

SEQ ID NO: 238900 - DNA, 912 bp, synthetic construct
  misc_feature 1..912: note = Description of Artificial Sequence: Synthetic coding sequence
  source 1..912: mol_type = other DNA
atgaatacaggcccttattacttcgtcaaaaacctgccactgcacgaactgattacccccgagttcattagcaccttcatcaaaaaagggtcgtgctatgccctcacgtacaatacccatatcgacgaagacaacacagtcgccctgttgccaaatgggaaattaatcctgagtctggacaaggacacatacgaagaaacaggcctgcagggacacccctcacagttctcagggagaaagattatgaaatttatagtgagcattgatctcatggagctttcattgaacctggattctaagaagtacgagcgtatctcgtggtccttcaaggagaagaagccccttaaattcgactttttgctcgcctggcataagacaggcagcgaagagtctaccatgatgtcatatttttcaaaataccagatccaagagcaccagccaaaagtggcccttagcaccctgagggacctgcagtgccccgtgttgcaaagcagtgagcttgagggaacgcccgaggtttcgtgcagggcactggagctgtttgactggctcggcgcagtgttttctaacgtggacctaaacaatgaacctaacaatttcatttcgacatactgttgtcccgagccctctaccgtggtggcaaaagcatacctttgtactatcacaggctttatactaccggagaagatctgcttgctgctcgagcacctgtgccactacttcgatgaaccaaaactcgcaccttgggttacattaagtgtccagggattcgccgacagcccagtctcatgggagaagaatgagcacggcttccgcaagggcggagagcatttatacaacttcgtgatcttcaacaatcaagactactggttacagatggcagtcggagctaatgatcattgtcctccctag

SEQ ID NO: 238901 - DNA, 717 bp, synthetic construct
  misc_feature 1..717: note = Description of Artificial Sequence: Synthetic coding sequence
  source 1..717: mol_type = other DNA
atgcgcccagccgcactcaggggcgcattgctcggctgtctgtgcctggcactgctgtgtttaggtggtgccgacaagagactccgcgataaccacgaatggaagaaactgattatggttcaacactggccagagaccgtctgcgaaaagattcagaacgattgtcgggacccccctgattattggaccattcatgggctatggcctgataaaagcgagggatgtaaccgcagctggccctttaatctggaagaaatcaagaagaattggatggaaataaccgactcatccttgcccagtccgtctatgggtccggcacctcccagatggatgcgttccacacccaggcgcagcacactggccgaagcctggaacagcactgggagctggacttccacaggtggatgtgccctgccacctgcagcattgcctagcggggacctgtgctgtagaccatccctaacagccggatccaggggggtgggcgtagatttgactgcgcttcagcaactgctgcatgtccattactcagctacggggattattccagaagaatgttcagagccaaccaaacccttccagatcattctgcatcacgaccacacagaatgggtgcagagtatcggtatgcccatttggacaatcagctctagtgagtctgcgatcggcaaaacacggacacaaccagcctgtgctgtgctgtcccatgattcctag

SEQ ID NO: 238902 - DNA, 624 bp, synthetic construct
  misc_feature 1..624: note = Description of Artificial Sequence: Synthetic coding sequence
  source 1..624: mol_type = other DNA
atgagacccgcagcactaaggggagctctgctcggctgtttatgcctcgctctgctctgcctgggcggagctgataagcgcctaagagataatcacgagtggaagaaacttatcatggtgcaacattggcccgagacagtttgcgagaagatccagaatgattgtagagacccccctgattactggactatccacgggttgtggccagataaatccgaaggctgtaacagatcctggccatttaatctggaggagataaagaagaattggatggagataacagactcttccctgccaagcccgagcacagatctgctgccggaaatgcgggcttactggcccgacgtgattcattctttccccaaccgctctcgtttctgtggcacttgtgccgcacaggttgatgccctcaatagccagaaaaaatactttgggaggagtctggaactctaccgggaattggatttaaacaggtgggtccgcccttcacctggttgcacatctcagtgggggtccctgctgtccccaaagcccgactcttggatacagggatccggttgccgaccgcactgtccgcctgccgcatctgcgtgcgctctattcgggtactgggaccactcctag

SEQ ID NO: 238903 - DNA, 921 bp, synthetic construct
  misc_feature 1..921: note = Description of Artificial Sequence: Synthetic coding sequence
  source 1..921: mol_type = other DNA
atgcggcctgccgcactgagaggcgcattgctgggatgcttgtgccttgcactgctatgcctggggggagccgacaaacgtctgagagataaccatgaatggaagaagctcattatggtgcagcactggcccgaaactgtctgcgagaaaatccagaatgactgcagggacccaccagattactggacaattcacggcctttggcaggtgtcgcacacttccaggaggggtctgctctttctcttcaagaacattttctcgctgtctagcagaaatttttccttttattcccttcaaacgagcatgaagaagccaccgcagccatccctgatttttctaatctttagcttcaaaccggacaagtccgagggctgtaatcggtcctggccattcaaccttgaagagatcaaagatctccttccagaaatgcgggcttactggccagacgtaatccactccttccctaacagaagccgcttctggaaacatgagtgggaaaagcatggtacgtgtgcggcacaggtcgacgccctgaactcacaaaagaaatattttggccgttcactggaactgtaccgcgaacttgacttgaactccgttctcctgaaacttggaataaagccttccattaactattatcaggtcgcagacttcaaagatgcgctggctagagtgtatggggtgattcctaaaatccaatgcctcccaccttctcaggatgaagaagtgcaaacaatcggccagatcgagctgtgtctgacgaagcaggatcagcaactgcagaattgtacagagccaggagagcagccctcacctaagcaggaagtgtggctcgccaatggcgctgctgagtctcgcggactccgtgtatgtgaagatggccctgtcttttaccctccaccaaaaaagacgaagcattag

SEQ ID NO: 238904 - DNA, 771 bp, synthetic construct
  misc_feature 1..771: note = Description of Artificial Sequence: Synthetic coding sequence
  source 1..771: mol_type = other DNA
atgaggcctgccgctctaagaggcgctttgttaggctgtctctgcctagcactgttatgtctaggcggtgcagacaagagattgagagataatcacgagtggaaaaaacttataatggtgcagcactggccagagacagtgtgcgagaaaatacagaacgactgtcgggatccccctgattattggaccattcatggcttatggccggacaagagcgaaggttgcaacaggagttggccattcaaccttgaggagatcaaagacctactgccagaaatgcgggcttattggcccgatgtgatccatagctttcctaatcgctctaggttctggaaacacgagtgggaaaagcatggaacatgcgccgctcaggttgatgcgcttaactcacagaaaaaatattttggcagatccctcgaactgtaccgcgagctggatctcaactcggtgttgctgaaactggggatcaaaccgagcattaattattatcaggtggccgactttaaagacgcactcgcccgagtttacggagttattcccaagatacaatgcctgcctccttcacaggacgaggaagtgcagaccatcggacaaatcgaactctgccttaccaaacaggatcaacagctgcaaaactgcacagaacctggcgaacagccttcccccaaacaggaagtctggttggcaaatggggctgccgagagtcgtggactgcgcgtgtgtgaagatggacccgtgttttacccccctcccaaaaaaactaaacactag

SEQ ID NO: 238905 - DNA, 765 bp, synthetic construct
  misc_feature 1..765: note = Description of Artificial Sequence: Synthetic coding sequence
  source 1..765: mol_type = other DNA
atgcgccctgccgcactgcgcggagccctcctggggtgcctgtgcctggctttattgtgtctgggaggcgcagacaaacggttacgcgacaatcacgagtggaagaagctgatcatggtgcagcactggccagaaactgtgtgcgaaaagattcagaatgactgcagagaccccccagattactggacaatccacggcctttggccagacaagtctgaggggtgtaatcgtagctggcctttcaacctggaggaaataaaagacctcctgcctgagatgagagcgtactggcccgacgtaatccattcgttcccgaaccggagccgattctggaagcacgaatgggaaaagcatggcacgtgcgcagcccaggtggatgcgttaaatagtcagaagaagtacttcggtcggtccctcgagttatatagggagctggacctcaacagcgtgctgctaaagctcggcattaagcccagtatcaactattatcaggtggcagattttaaggacgcacttgccagggtttatggcgtaattccaaaaattcagtgtctgcccccatcacaagatgaggaggtccagaccattggtcagattgaactctgcctaacgaaacaagatcagcagttacagaactgtacagagcccggagagcaaccctcacccaagcaggaggtctggttggccaacggagctgccgagtcacggggtcttagggtgtgcgaggacggacccgtattttatccgcctcctaaaaagacatag

SEQ ID NO: 238906 - DNA, 771 bp, synthetic construct
  misc_feature 1..771: note = Description of Artificial Sequence: Synthetic coding sequence
  source 1..771: mol_type = other DNA
atgagaccagccgctctacgaggggctctcttaggctgtctttgcctggcgttactgtgtctagggggagccgacaaacgtcttcgagacaatcatgaatggaaaaaactcataatggttcagcattggccagagacagtttgtgagaagattcaaaatgattgtcgagatcccccagattactggacaattcacggcctttggcctgacaagtccgaaggctgtaaccggtcatggccattcaatctcgaggagattaaagaccttctgcccgagatgcgggcatattggccagacgtgattcattctttccctaatcggtcaagattctggaagcacgagtgggagaagcacggcacgtgcgccgcacaggtcgatgctctgaactcccagaagaagtatttcggcaggtctcttgagctctacagggagctagacttgaactcagtgttgttgaagctgggcatcaagccctccatcaattactaccaggttgctgatttcaaagatgctctggcccgagtgtacggggtaattcccaaaatccagtgcctgccaccatcacaggatgaagaggtccagacaatcggccagattgaactgtgcctgactaagcaagaccagcagctccagaattgtactgaacctggagagcagcctagccctaaacaagaggtatggttggccaacggggcagctgagtcccgtggtcttcgcgtgtgcgaagacgggcctgtattttatccacctcctaaaaagactaagcattag

SEQ ID NO: 238907 - DNA, 471 bp, synthetic construct
  misc_feature 1..471: note = Description of Artificial Sequence: Synthetic coding sequence
  source 1..471: mol_type = other DNA
atggccttggagaaatccctggttcgcttgctcttgctggtgctcatcctacttgtgcttgggtgggtccagcccagcctgggaaaggagtcccgcgctaaaaagttccagagacagcacatggattccgactcaagtccatcctccagctctacctactgtaaccagatgatgcggcgtcgcaacatgactcagggtaggtgtaagccagttaatactttcgtccacgagcctttggttgacgttcagaacgtctgctttcaagaaaaagtgacctgcaagaacggccaaggtaactgctacaaatctaacagttccatgcacatcactgattgtcggctgaccaacggaagcaggtatccgaactgcgcgtatcgcacgtcaccaaaagaacggcacatcatcgtcgcatgtgagggaagcccgtacgtgcctgtgcattttgacgcgagtgtcgaagatagtacctag

SEQ ID NO: 238908 - DNA, 471 bp, synthetic construct
  misc_feature 1..471: note = Description of Artificial Sequence: Synthetic coding sequence
  source 1..471: mol_type = other DNA
atggccttagaaaaatcactcgtcagactattgctcctggttcttatactcctggttctgggttgggttcagccctccctcggcaaggaaagccgggcaaagaaattccagagacagcacatggatagcgactccagcccctcttctagctcaacatattgcaatcaaatgatgcggaggagaaatatgacccaggggaggtgcaaacccgtaaacacattcgtccacgagcctcttgtggacgtccagaatgtatgtttccaggaaaaagtgacttgcaagaacggtcaaggaaattgttacaagtctaattcttctatgcatatcacggattgtaggctcactaatggcagcaggtatcccaattgcgcctatcgaacttctccgaaagaacggcatattatcgtcgcctgtgaagggagcccatatgtgcccgtgcatttcgacgcgtccgtggaagactctacttag

SEQ ID NO: 238909 - DNA, 471 bp, synthetic construct
  misc_feature 1..471: note = Description of Artificial Sequence: Synthetic coding sequence
  source 1..471: mol_type = other DNA
atggctctcgaaaagtccctagttagattgcttcttctggttcttatcttgctcgtgctagggtgggtgcagcccagcctcggaaaggaatctcgcgctaagaaattccaaagacagcatatggattcagattcgtctcctagcagctccagcacttactgcaatcaaatgatgagaagaagaaatatgactcaagggagatgcaagccagttaatacttttgtacacgagccactcgtcgacgtgcagaatgtgtgttttcaggagaaagtcacatgtaagaacggtcagggtaattgttataagagcaactcttccatgcacattacggactgccgcttgactaatgggtctcgatatccaaattgcgcctacaggacttctcccaaggagcggcatattattgtagcatgtgagggctccccctacgtgcccgtgcacttcgacgcaagcgtcgaggacagcacttag

SEQ ID NO: 238910 - DNA, 471 bp, synthetic construct
  misc_feature 1..471: note = Description of Artificial Sequence: Synthetic coding sequence
  source 1..471: mol_type = other DNA
atggccctcgagaagagcttagtaaggttgctgctgttggtcttgatcttattggtacttggctgggttcagccaagcctcggcaaagaatcacgcgcaaaaaagtttcagcggcagcacatggactcagatagcagcccgagctctagtagcacttactgcaaccagatgatgcgtcggaggaacatgacacagggaagatgcaagccagtcaatacgttcgttcatgaacccctggtggacgtgcaaaacgtatgcttccaggaaaaggtgacttgcaagaatggtcagggcaactgctacaagagcaactcttctatgcacatcaccgattgccgattgaccaacgggtcacgataccccaattgcgcctacagaacaagtcctaaggagcgccacattatcgtggcatgtgagggctctccatacgtgcccgtgcactttgacgccagcgtggaggattctacgtag

SEQ ID NO: 238911 - DNA, 486 bp, synthetic construct
  misc_feature 1..486: note = Description of Artificial Sequence: Synthetic coding sequence
  source 1..486: mol_type = other DNA
atggtgcctaagctatttacgtcccagatttgtttattgttactgctggggctactcgcagttgaagggtcactgcacgtgaaacctccccagtttacttgggcccagtggtttgaaacacagcacattaatatgacttcccagcagtgtacgaacgcgatgcaggtgattaacaactaccagcggagatgtaaaaaccaaaacacctttctgctgactacgtttgcaaatgttgtcaacgtgtgcgggaatcccaacatgacctgcccttcgaacaagacacggaaaaactgccatcattcggggtcccaggtgcctctcattcactgtaatttgaccacccccagtccacagaatatctctaactgtaggtacgcacagacccccgctaatatgttttacattgtagcttgcgacaacagggatcagaggagggatcctccccaatatcctgtggtgccagtccatctcgatcgcattatctag

SEQ ID NO: 238912 - DNA, 483 bp, synthetic construct
  misc_feature 1..483: note = Description of Artificial Sequence: Synthetic coding sequence
  source 1..483: mol_type = other DNA
atggttccaaagttattcacaagtcagatctgtttgctgctcctcctcggcctgatgggagtcgaggggtctctgcacgcacgacccccacagttcacccgagcgcagtggtttgccatccagcacattagcttgaaccccccaagatgcaccatcgcaatgagagccatcaacaattataggtggaggtgtaagaatcagaacacattcttacggactacattcgctaatgtcgttaacgtatgtggtaaccaatcaatcaggtgcccacacaatcgcactctgaataactgccatcggagtcggttccgggtacccctacttcactgcgacctgatcaatccgggagcccagaatatttcaaactgtacctacgcggacagacccggacggagattttacgtagtcgcctgtgacaaccgagaccctcgagatagtcctcgttatcccgtcgtcccggtccatctagacacaaccatttag

SEQ ID NO: 238913 - DNA, 444 bp, synthetic construct
  misc_feature 1..444: note = Description of Artificial Sequence: Synthetic coding sequence
  source 1..444: mol_type = other DNA
atggccctgcagcggacacatagtctactgcttcttctgctcctcaccctgcttggcctggggctggtccagccttcctacggacaagacggcatgtaccagaggtttctgcgccagcatgtacatcccgaagagaccggtgggtcggataggtactgcaatctaatgatgcagcgtagaaagatgactctctatcactgcaagcggttcaatacctttatccacgaagatatctggaatattagatcaatatgttctacaactaatatccaatgcaaaaacggtaagatgaactgtcatgaaggagtggtgaaggtcaccgattgccgagataccggttcatctcgtgctccaaactgccgctaccgggcaatcgcctcgacgagaagggtggtgattgcttgtgagggcaatccacaagtcccagtgcatttcgacgggtag

SEQ ID NO: 238914 - DNA, 444 bp, synthetic construct
  misc_feature 1..444: note = Description of Artificial Sequence: Synthetic coding sequence
  source 1..444: mol_type = other DNA
atggccttgcagaggacccacagcttgttgctattacttctgttgactctactgggtctcgggcttgtgcagccttcatatggccaagacgggatgtaccagaggtttcttcgtcagcacgtgcaccccgaggaaactggaggaagcgacagatactgtaacctgatgatgcagcgtcggaaaatgactctctaccactgtaaaaggtttaacacattcatccacgaggatatttggaatattcggagcatctgtagtacaaccaatattcaatgcaaaaatgggaagatgaactgtcacgagggtgtcgtgaaggtaactgattgtcgtgatacaggatcctcccgtgccccaaattgcaggtacagggccatcgcatctacacggagagtagtcatcgcatgtgaaggtaacccacaggttcccgtccacttcgacggttag

SEQ ID NO: 238915 - DNA, 444 bp, synthetic construct
  misc_feature 1..444: note = Description of Artificial Sequence: Synthetic coding sequence
  source 1..444: mol_type = other DNA
atggctctacaaaggactcatagtctgttgctccttttgctcctcacattgctgggcctgggactggtgcaaccgtcatacggacaggacggaatgtatcaaagattccttaggcagcacgttcatcccgaggaaacaggcggtagtgaccggtattgtaacctgatgatgcagcgacgtaagatgaccttgtaccactgcaagcggtttaacacttttatccatgaggatatttggaatattcggtccatttgttctactactaatatccagtgcaaaaacgggaaaatgaactgtcacgagggagtcgtgaaggttaccgattgcagggacaccgggtcctcccgcgcaccaaattgccgctaccgagccatcgcctccactaggagggtggtcattgcatgcgaggggaacccacaagtgcctgtgcattttgatggatag

SEQ ID NO: 238916 - DNA, 465 bp, synthetic construct
  misc_feature 1..465: note = Description of Artificial Sequence: Synthetic coding sequence
  source 1..465: mol_type = other DNA
atggctcctgccagagccggttgctgcccgctgttgcttctcctgttgggattgtgggttgcagaggtgctcgttcgcgcaaagccaaaggacatgaccagtagccagtggttcaagacccagcatgttcaacctagccctcaggcctgtaactctgccatgagtatcattaacaagtataccgagagatgtaaggatctgaacacattcctgcatgagcctttttcttcggtggccatcacctgtcagactcccaacatcgcatgtaaaaacagttgcaaaaactgtcatcagagccatggccctatgagcttaactatgggtgaactcacatccgggaaatacccaaactgtaggtacaaggaaaagcacctgaatacaccttacatcgttgcatgtgacccgccacaacagggtgaccctgggtatcctctggtgcctgtacacctggataaggttgtgtag

SEQ ID NO: 238917 - DNA, 453 bp, synthetic construct
  misc_feature 1..453: note = Description of Artificial Sequence: Synthetic coding sequence
  source 1..453: mol_type = other DNA
atggttctctgcttccccctcctgttgcttctgctcgtgctctggggaccagtgtgtcctctgcacgcctggcctaaacgcctaacaaaggcccattggtttgaaattcagcacatccagccttcccccctccaatgtaaccgcgcaatgtccggaatcaataactatacccagcactgcaagcaccagaataccttcctccacgacagtttccagaacgttgccgcagtatgcgacctcctctctatcgtgtgtaagaatcggcgacacaattgtcaccaaagttccaaacctgtaaatatgactgactgtagattaacaagtggtaaataccctcagtgtcggtattccgccgcagctcagtacaagtttttcattgttgcttgcgatccgccacagaaaagtgaccccccatataagctggttccagtacacctagactctattctatag

SEQ ID NO: 238918 - DNA, 2271 bp, synthetic construct
  misc_feature 1..2271: note = Description of Artificial Sequence: Synthetic coding sequence
  source 1..2271: mol_type = other DNA
atgcctttgcgacccggaagcttggtaccagagggggcaggatttcctaaaatggccgcagacgtgagcgtcacacacaggcccccattgtcaccaaagagtggggcagaagtggaggcaggcgatgccgctgagagacgggctcccgaggaggagctgcctcccttggaccctgaagagatccgtaagaggctcgagcacaccgagagacagttccggaacaggcgcaaaattctaatccggggtctacccggagatgttaccaatcaggaagtgcacgatctgctgtcggattacgagcttaaatattgtttcgtggacaagtataagggaactgcgttcgtgactttgttgaacggagagcaggccgaagcagcaatcaatgccttccatcagtcacgccttagagagcgcgagctgtctgtgcagctgcagccaactgacgctctgctgtgcgtagccaatctccccccaagcctgacacagcagcagtttgaggaattagtgcgaccctttggctcgctcgaaaggtgctttctggtttattcagaaaggaccggtcagagtaagggctacggattcgcagagtatatgaaaaaagattctgcggctagagccaagtctgatctgctggggaagcctctcggcccacgcactctgtacgtgcactggactgatgctggccagcttacacctgctctcctgcactctcggtgtctttgcgtggatcgactgccgccagggtttaacgacgtggacgccttgtgccgggctcttagcgctgtgcattcgcctacgttttgccagctggcttgcggacaggacggacagctgaaagggtttgcagtgctagaatatgaaacggcagagatggccgaagaagctcagcagcaagctgatggcctgtctctcggtgggtctcatctccgggtatctttttgcgctcctggcccaccgggacgtagtatgctagcggcactcatcgcagctcaggcaacggctctgaatagaggtaaaggattgctgcctgaacccaacatcctgcaattgctcaataacctgggaccttctgcctcactccagctgttgctgaaccctctcttgcacggctccgccggtggcaagcaagggctgctgggcgctcctccggctatgcctttgctgaatggcccagcactctctactgctttattgcagctcgccctgcaaacccaaggccagaaaaaaccgggaatcttgggcgatagcccacttggtgctctccaaccaggagctcaacctgccaaccctttacttggggagctacccgcaggcggagggctacccccagaattgcctcccaggcgaggtaagccccctcctctattgcccagcgtcctcgggcctgcagggggagatcgagaagccttaggccttggacctcccgcagctcagttaacgccacctccagcccctgtggggttgagagggtccgggcttagaggcctgcagaaggatagcggaccgctgcccaccccgcctggggtttcactgctgggcgagcccccaaaagattatagaattcccctgaatccctacctgaatcttcacagcctgttgccagcttccaatttggcagggaaggaggcccgtggatggggcggagcaggtagatcccgaagacccgctgaaggtcctccgaccaatccaccggcacctggcggtggtagttcatcctcaaaggcctttcagctgaagtctaggctgctaagtcccctgtcttcagcaagactgccaccggagcccggactctcggacagttactcgttcgactatcccagtgacatgggcccacgcaggcttttctcccaccccagggaacctgctctcggaccacacggtccctctcggcataagatgtcaccacctccctcaggctttggagagagatccagtgggggatctggaggcggtcccctcagtcacttttatagtggatctcctacatcttactttactagtggtctgcaagcagggctcaaacagtcgcacctgtccaaagcgatagggtcctccccactgggaagcggcgagggtttgctcggcctgagtcctggacctaatggccatagccatttgctgaaaacacccttgggaggccagaaaaggtcatttgctcacctgctgccttctccagagccttctccagagggcagttatgtagggcagcacagccagggtctgggaggacattatgctgacagctatctgaaacgaaagcggatattttag

SEQ ID NO: 238919 - DNA, 1821 bp, synthetic construct
  misc_feature 1..1821: note = Description of Artificial Sequence: Synthetic coding sequence
  source 1..1821: mol_type = other DNA
atggcagccgacgtgtctgtgacgcataggccccctttgtccccaaagagcggggcagaagtagaggcaggagacgctgccgagcgacgagcccctgaggaggaattgccaccactcgaccccgaagaaatacggaagcgactggagcatacagaacgccagttccgcaaccggaggaagatacttattcgtggactgcccggtgacgtgacaaatcaagaggtccatgacttgttgtcagattacgaactgaaatactgcttcgtggacaagtataagggcacagctttcgtgaccttgctgaatggcgagcaggcggaggcagccataaatgcattccaccagagcagactgcgcgaaagagagctcagcgttcagctgcagccaaccgacgcattgctatgtgtggccaacctgccaccatcactgacccagcagcaatttgaggagctcgtccggccattcgggtcccttgagaggtgttttctggtgtatagcgagagaaccgggcagagcaaaggatacgggttcgctgagtatatgaagaaagactctgccgcacgcgcaaaatctgacctgctaggcaagcctttgggaccacggaccctatacgttcattggaccgacgctgggcagttgactcccgcactgctccattctcgctgcctgtgcgtagaccgcctgcccccaggctttaatgacgtcgatgcactctgcagagccctgtccgccgtgcactcacccacattctgccaactcgcttgtgggcaagatggccagcttaagggttttgccgtgctagagtacgaaactgctgaaatggctgaagaggcccagcagcaagccgacgggctgtcacttggcggaagccatctgcgcgtcagcttttgtgctcccggtccgcctggcaggtctatgctggccgcactaatagcggctcaagcaaccgccctgaacagaggtaagggtctcctaccggaaccgaatatcctgcaactgctgaataatctgggaccttcggcgagtctacaactgttgctgaaccccctgctccatggcagcgcgggtgggaaacagggcctcctcggggcacctcctgccatgccattactgaatggccctgccctttcaaccgctctgctgcagctcgcattacagactcaaggccaaaaaaagccagggattctcggagattccccacttggggctctccagccaggagcccaaccagcaaatccactccttggagaacttcctgccggagggggactgcctccagagctgccccctcgtcgagggaagccacctcccctcttacccagtgtgctcggccctgctgggggagatcgcgaagctctcggcctggggcctccggctgcccaattgacacccccacccgctccagtaggcttacgcggtagcggtctgcgaggtcccctcagccatttttattccggttctccaacctcatactttacctccgggctgcaggccggactgaaacaaagccatctctccaaggcgatcgggtcttcgccactgggatccggggagggactactaggactctccccaggccctaatgggcatagccacctgttgaaggttagggccggaggcggagatatgcagggctgggaggctcctgccccacagcggcctctgacaagacccgcactcccatcagtgagcaggcctcactgggcggcacgcaatgccgctttgcccacttgctgccccaggccaagccccgcacagaaagccgctatgtgggcatcaacaccgagggcttcagctgccaccactcggactcctacctag

SEQ ID NO: 238920 - DNA, 2076 bp, synthetic construct
  misc_feature 1..2076: note = Description of Artificial Sequence: Synthetic coding sequence
  source 1..2076: mol_type = other DNA
atggccgctgctgctggcgatggtgggggagagggtggtgctgggttgggcagtgccgctggcctgggccctgggccagggcttagaggtcaaggccctagcgctgaggcccatgagggagctccagatcccatgcctgcagcccttcacccagaggaagtggccgcacgcctgcaacggatgcagagggagctgagtaataggcgtaagatccttgttaaaaacctcccacaggacagcaattgtcaggaagtgcatgatctgctcaaagattatgaccttaaatactgctatgtcgacaggaacaaaaggaccgcttttgtgacactccttaacggcgagcaggcccagaacgctattcaaatgttccaccagtatagttttcggggtaaagacctcatcgttcagttgcagcccacggatgctctgttatgtatcactaacgtgcccatttcctttaccagtgaggaattcgaggagctggtgcgggcatacggtaatatcgagcgctgttttttagtgtacagcgaagtcaccggtcacagtaaagggtacgggttcgtggaatatatgaaaaaggatttcgcggcaaaagccaggctagagttactcggacggcagctaggtgcaagcgcattgttcgcacagtggatggacgtaaaccttttggcttctgagctgattcatagcaaatgtctgtgcattgataaactcccaagcgactatcgggacagcgaggagttgctccagatcttcagttctgttcataagccagttttctgtcagctggcacaggacgaaggaagctatgtggggggattcgctgtggtcgagtactcaacggctgagcaagccgaggaggtccagcaggcagccgacggaatgacaattaaaggatccaaggttcaggtgtctttctgcgcgcctggtgcccctggcaggtccacccttgccgcactgatcgccgctcagagggtaatgcactctaatcaaaaagggctcctgccagaacccaatcccgtgcagataatgaagtcattgaataatcctgctatgttgcaggtgctgctgcaaccccagctgtgcggtcgagccgtgaaacccgcagtgctcggcacaccacactccctcccccatctgatgaaccccagcatttcacccgcattcctgcacctaaacaaggcacatcaaagttcagtcatggggaacaccagcaacttgttcctgcaaaacttgagccatattccccttgcacagcaacagttgatgaaattcgagaatatccatacaaacaacaagcctgggttgctgggagaaccgcctgctgtggttctccagacagcgctggggattggctccgtgctgcccctgaagaaggagctcggacaccaccacggcgaggcccacaaaacatcctctttgatacccacgcagactacaatcactgcagggatgggaatgttaccatttttcccaaaccagcacatcgccggtcaggcagggcctggacactccaacacccaggagaaacagccagctaccgtaggcatggccgaaggaaattttagcggaagccagccctatctccagtctttcccaaacctggcagccggaagtctgttggtcggtcaccacaagcagcaacagtcccagcctaaaggtacggaaatttctagtggcgcagcaagtaagaatcagacatctctgctcggtgagcctccaaaggaaatcaggctgagcaagaacccatacctcaacctcgcttccgttctgcccagcgtttgcctctcttctcctgcgtctaaaacaaccctgcacaagaccgggatagcctctagcatcctggatgcgatttctcagggcagtgagagccagcacgctctcgagaaatgcatagcgtacagtccccctttcggggactatgctcaggtgtcctcccttaggaatgaaaagaggggatcgtcatacctgatcagtgcgcctgaggggggaagcgtagaatgtgtcgaccagcacagccagggaacaggagcctactacatggaaacctatctgaagaagaaacgcgtttattag

SEQ ID NO: 238921 - DNA, 2037 bp, synthetic construct
  misc_feature 1..2037: note = Description of Artificial Sequence: Synthetic coding sequence
  source 1..2037: mol_type = other DNA
atggccgcagcagccggtgatggcggaggagagggcggagccggactgggatcggcagccggactcggcccaggcccaggcctgagggggcagggcccatctgctgaagcccatgaaggagcgccagaccccatgccggcagccctgcacccggaggaagtggctgctaggctccaacgcatgcagagagagctgagcaaccggcgaaagatccttgtcaagaacctgccacaggactccaactgccaggaggttcacgatctacttaaagattatgacttgaaatattgctatgtcgataggaataagcgcaccgcctttgttactctgttaaatggagaacaggcccaaaacgcaatccagatgttccatcagtatagctttcgcggaaaagacctgatcgtgcagcttcagcctactgatgccctcctgtgcattaccaacgttccaattagttttacatctgaggaatttgaggagctcgttcgggcatatggaaacatcgagaggtgcttcctggtgtattccgaggtaacaggccactccaaaggatatggatttgtcgagtatatgaaaaaggactttgcggcaaaggctcgattggagctgctgggtcgccagcttggggcatctgcgctgttcgcgcagtggatggatgtcaacctgcttgcttctgagctgatccatagcaaatgcctttgcatcgataaattgccatccgattatcgggacagcgaggagctcctccagatcttcagctccgtgcacaagccagtcttttgccagctagcccaggatgaaggatcatacgtgggagggtttgctgtcgtggagtattccaccgcagaacaagctgaggaggttcaacaggcggctgacgggatgactatcaagggctcaaaagtccaggtgtccttctgtgcgccaggcgctcccggaagatctacccttgcagcactgattgcggctcaacgcgtcatgcattcaaaccaaaagggcctcctgcccgagccaaatccagtccaaataatgaaatctctaaacaacccagccatgttgcaggtgctgcttcagccacagctatgtggacgagccgtcaaaccagctgtgctggggaccccccatagccttccacacttgatgaaccccagcatctctccagcttttttacaccttaataaagcgcatcagaatctttctcacatccccctcgcacagcagcagcttatgaaattcgaaaatattcatactaataataagcctggtctgctcggcgagccacctgccgtcgtcttgcagaccgccctggggatcgggtcggtgcttcccctgaagaaagaactgggtcatcaccatggagaggctcataagacatcttctctgattcctactcagaccacaatcaccgctggcatgggcatgctgcctttttttccgaatcagcatattgccggacaggccggaccagggcacagcaacacccaggaaaagcagcccgcaactgtcgggatggctgaaggaaacttcagcgggagtcagccgtatctgcagtctttcccaaatctggctgccggaagtcttctggttggacatcataagcagcagcaaagccagcccaaaggaacagagatttcttctggggctgcctcaaagaaccagaccagcctcctaggcgaaccgccaaaagaaatcagactcagcaagaacccatatctgaatcttgcaagtgtcctgccgagtgtgtgtctgtcctccccagctagtaagactaccctgcacaagactggcatagccagctccatcttggacgccatttcacagggatccgagtcccagcacgcactggagaagtgtatcgcgtactcgcccccatttggcgactacgctcaggtgtcttcccttagaaacgagaaaagaggatcgtcttacctcattagcgcgcctgaggggggaagtgttgagtgtgttgatcagcactcgcagggtacgggggcttattacatggagacatacttgaagaagaaacgggtttattag

SEQ ID NO: 238922 - DNA, 693 bp, synthetic construct
  misc_feature 1..693: note = Description of Artificial Sequence: Synthetic coding sequence
  source 1..693: mol_type = other DNA
atgacaatcaaggggtccaaagttcaggtatccttctgcgctcccggtgcgccaggcagatcaacactcgccgctctgatcgccgcacagagggtgatgcatagcaaccagaaggggctgttacccgagccaaatcccgtgcaaattatgaagagtctcaataatccagccatgttgcaggttctgctgcagcctcaattgtgcggaagagcagtgaagccagccgtcttaggtacaccccactcactgccccatttgatgaatccttccattagcccagcttttttgcatctcaataaggcccaccagaaccagacaagcctcttgggggagcctcctaaagaaatccgcctgagcaagaatccatacttgaatctcgcctctgtcctccctagcgtgtgtttgtctagccccgcttcaaagactaccctgcataaaaccgggattgcatcgagcatacttgacgccatcagccaagggagcgagagccagcatgcccttgagaaatgtattgcgtacagtcctccgttcggggactacgcacaggttagctctctgcgcaatgagaagcgaggcagcagttatctgatcagtgcaccggagggcggaagcgtggaatgcgttgatcagcattcgcagggaacaggcgcatactacatggagacgtacttaaaaaagaagcgggtgtactag

SEQ ID NO: 238923 - DNA, 2379 bp, synthetic construct
  misc_feature 1..2379: note = Description of Artificial Sequence: Synthetic coding sequence
  source 1..2379: mol_type = other DNA
atgcatgtgattaagagggacggaagacaggagcgagttatgtttgacaaaatcacaagtaggattcaaaagttatgctatggtctcaatatggacttcgtcgacccagcccagatcacaatgaaagtgatccagggcctgtattctggagtgacaacagtggaactggacacactggcagctgaaacagccgcaactcttaccactaagcaccctgactatgccatcctggctgcgagaatcgctgtttccaatttacataaggagaccaaaaaagttttttccgacgtaatggaggatctgtataattacataaacccccacaacggcaaacacagcccgatggtagcaaaaagcaccctcgatatcgtcctcgccaacaaagataggttaaactctgccatcatctacgacagggacttttcctataactattttggatttaagactctcgaaagaagttatctactcaagatcaacgggaaagtcgcggagcgtccgcagcatatgctcatgagggtctccgttggaatccacaaggaagatatcgatgcagcaatcgaaacctacaatcttctctcagaacgatggtttactcacgcttcaccgactttatttaacgctggaaccaatcggccacaactgtcctcttgctttttgctatcaatgaaagatgacagcattgaggggatctatgacactctcaaacagtgcgctctgatctcaaagtccgccggtggaattggcgttgccgtgtcgtgtataagagctactggatcttatattgctggtacaaacggaaactccaacggacttgtccccatgctgagagtgtataataacacagctcgttacgtggaccagggagggaataagcgtcccggtgcatttgccatctatcttgagccttggcacctggatatctttgagttcctcgacctcaagaagaacaccgggaaggaagaacagcgcgcaagagatctgttcttcgctttgtggatccctgaccttttcatgaagcgggtggagacaaaccaggattggtcccttatgtgccccaatgagtgccctgggcttgatgaggtctggggcgaagagttcgaaaaactttacgcgtcctatgaaaaacagggccgagtccggaaggtggtgaaagcgcagcagctgtggtatgccatcatagaatctcagaccgaaacaggaacaccgtacatgctatataaggatagttgcaaccggaagtccaaccagcagaatcttggtaccataaaatgtagcaacttatgtacagagatcgtagagtacacaagtaaggatgaggtcgcggtctgcaatctagcctctctcgcgcttaacatgtacgtaacaagcgagcacacatatgatttcaagaagttagctgaagtgactaaggtagtggttaggaaccttaataagatcatcgatatcaactactatcctgttcccgaggcctgtttgtctaataagcggcatcggccaatcggcatcggcgtgcaggggctggcagacgcttttattctgatgcgctacccttttgagtccgcagaggctcaactccttaataagcaaatcttcgaaaccatatactatggcgcactggaggcatcctgcgacctggctaaggaacaggggccttacgagacatacgaggggtcacccgtatcgaaaggaattctgcagtatgatatgtggaatgtaactcccacagatctctgggattggaaagtgctgaaggaaaaaatcgcgaaatacggtatccgtaactccttgctgattgctccaatgccaacggcatctaccgcccagattctgggcaataacgagtccatcgagccttacacgagtaacatctatacgcgaagggtattgagcggcgagtttcaaatcgttaatccccacctgttgaaagacctgacagaaaggggcctgtggcatgaggaaatgaagaaccagatcatagcttgcaacggatcgattcagagtattcccgagatccctgacgatctaaaacagctatacaagaccgtctgggagatctctcagaaaacggtcctgaagatggcagccgaacgcggagcttttattgaccagtcccagtccctgaacatccacatcgccgagcccaactatgggaaactcacttccatgcacttctatgggtggaagcaaggcctgaagactggaatgtattacctccgaacccgtcccgctgcaaacccaattcagtttactctcaacaaagaaaagctgaaggataaagagaaggtatcaaaagaagaagaggagaaggaaaggaacacagccgcaatggtgtgcagccttgaaaatcgtgacgaatgccttatgtgtgggagttag

SEQ ID NO: 238924 - DNA, 2088 bp, synthetic construct
  misc_feature 1..2088: note = Description of Artificial Sequence: Synthetic coding sequence
  source 1..2088: mol_type = other DNA
atggaggatctatataactatatcaacccgcacaatggaaaacacagccctatggtcgctaagagtactctcgacattgtgctagcaaacaaggatcgcctgaattccgccattatctacgatcgtgacttctcttacaactactttggtttcaagacacttgaacgctcctacttgctcaagataaacgggaaggtcgccgaacggccacaacatatgctgatgcgtgtgtctgtgggcatccacaaggaggatattgatgccgctatcgagacatataacctgctgtctgaacgatggtttacgcatgcttcgccgacactctttaacgccggaactaaccgcccacagttgagtagctgtttccttctgtctatgaaagacgattcaattgaggggatttacgatacgctgaagcaatgcgccttaatttccaaatccgcaggagggatcggtgtggccgtgtcctgcatccgagccactggatcctacattgcgggaacaaacggcaactccaatgggctggtccctatgctgcgggtgtacaacaacacggcccgatacgtggatcagggcggtaataaacgccctggcgctttcgcaatatacctggaaccttggcatctcgatattttcgaattcctcgatcttaaaaaaaataccggcaaggaagagcagcgggctcgggatctgttctttgccctgtggatccctgacctgttcatgaaaagagtggagactaatcaagattggtcacttatgtgtcctaacgaatgtcccggactggatgaggtctggggggaggagtttgaaaaactctatgcctcctacgagaaacagggtagggttaggaaggtcgtaaaagcccaacagctatggtatgcaataatcgagtctcagacagagacaggcacgccctatatgctatacaaagactcgtgtaaccgtaagtcaaatcagcagaacctgggtaccatcaaatgctctaatctgtgcacggagatcgtcgaatacacatctaaggatgaagttgccgtctgcaacctcgcatcccttgccttaaacatgtacgttacatcggagcacacttacgactttaaaaagcttgctgaggttaccaaagtggttgtcagaaacctaaacaagatcatcgacatcaactattacccagttccagaagcgtgtctcagtaacaagaggcatcggccaatagggatcggcgtccaaggactggctgacgcttttatcctgatgcggtacccattcgagagcgctgaggctcagctgcttaataagcaaattttcgagactatatattacggagctctagaggcatcctgcgatttagccaaagagcaggggccttatgaaacatatgaaggatcacccgtcagcaagggaatcttgcagtacgatatgtggaacgtcacccctacggacctctgggattggaaggttctcaaggaaaagatcgctaaatatgggatccgtaacagcctattaattgccccaatgccaactgcctccactgcgcagattctgggcaacaacgaaagtatcgagccctacaccagcaatatttatacaaggagggtccttagtggggagttccagattgtgaacccccacttgttaaaggacctcacggagagggggctctggcacgaggaaatgaagaatcagataatcgcctgtaacggctccatccaaagcataccggagataccagacgacctgaaacagctgtataagacagtctgggagatctcacagaaaacagtcctcaagatggccgctgaaaggggcgctttcatcgaccaatcccagtctcttaatatccacattgcggaacctaattatggtaagctcacatccatgcacttttacggctggaaacagggcctgaagaccggcatgtactacctgcgcacacggcctgcagctaatcccatccagttcacactgaataaagaaaaactcaaggacaaggaaaaagttagcaaagaagaagaagagaaggaacgaaataccgcagcgatggtttgcagtttggagaaccgggatgagtgtcttatgtgcggctcctag

SEQ ID NO: 238925 - DNA, 2118 bp, synthetic construct
  misc_feature 1..2118: note = Description of Artificial Sequence: Synthetic coding sequence
  source 1..2118: mol_type = other DNA
gatgggcgacaggagagagtcatgttcgataaaataacaagccgaatccagaagctgtgctacggcctgaatatggatttcgtcgatcccgcacagatcaccatgaaagtgattcagggcttgtattccggagtcaccacagtggaactagataccctggccgcagagacagcagctaccctgaagacgctcgagcgctcatatctgctgaagattaatggaaaggtggccgaaaggcctcaacacatgctgatgagggtcagcgttggaatacacaaagaggacatcgatgccgctattgagacttacaaccttctgtccgaaaggtggttcacccatgctagtcctaccctgttcaacgccggaaccaatcggcctcagctgagtagctgcttcctgctgagtatgaaggacgattccattgaaggcatttatgacaccttaaagcaatgcgcacttattagtaagagcgccggtggcatcggtgtggccgtcagctgcattcgggcaaccggctcatatattgcaggcactaacggaaactccaacgggctggtacccatgctgcgggtgtacaacaacaccgcaaggtacgtcgatcagggaggcaataaacgacccggagcgttcgctatctatctggaaccctggcatttggatatctttgagtttttggacctgaagaagaatactgggaaagaggaacaaagagccagggatctgttttttgcactgtggatccccgacctgtttatgaaaagagtcgaaaccaaccaggactggtccttaatgtgtcccaacgaatgccccggactggacgaggtgtggggtgaggaatttgagaagctgtatgcttcttatgagaagcaggggagagtgcgaaaggtagtgaaagcccagcagctgtggtacgccattattgaatcccagacagagaccggcactccatatatgctgtacaaagattcttgtaatcgcaagtctaaccagcagaacctgggcaccatcaaatgtagtaacctgtgtacggagatcgtggaatatacaagtaaagacgaggtcgcagtttgtaacctggcaagcctcgctcttaatatgtatgtgacctccgaacacacctacgacttcaaaaagctggctgaggtcaccaaggtcgtggtgcgcaatctaaacaaaatcatagacattaactactaccccgttccagaggcctgtctctctaataagcggcaccgtcctatcggtatcggcgtgcagggcctggcagatgcctttatcttgatgaggtaccctttcgagtcagccgaggcacagctcctgaataagcaaattttcgagaccatctattacggcgctctagaggcctcctgcgacctggccaaggagcagggaccttacgaaacttacgaaggctctccagtgtctaagggaatcttgcagtatgatatgtggaacgttacgcccaccgatctttgggattggaaggttttgaaagagaagatcgccaaatatggcattaggaacagcctgctgattgcacccatgcccactgcgagtacagctcaaattcttggcaataacgagtccatcgaaccatatacatctaacatttacacccggagggtcctgagcggggagtttcaaatcgttaacccacatctgctgaaggatctgactgaacggggtctttggcacgaggagatgaagaaccagatcatcgcatgcaacgggtccatccagtcaatcccagaaatccccgacgacttaaagcagctctacaaaacggtctgggaaatctcccagaagaccgtgttgaaaatggcggctgagcgcggagctttcatagaccagagccagtcattgaatatacatattgcagaacctaactacggcaagttgacttcaatgcatttctacgggtggaagcagggccttaaaaccgggatgtattatctgaggacccgacctgctgccaacccaatccagtttacgctcaataaggagaaactgaaggacaaggaaaaggtcagtaaggaggaggaggagaaagagaggaatactgctgctatggtgtgctcgctggagaaccgtgacgagtgcttgatgtgtggcagctag

SEQ ID NO: 238926 - DNA, 1365 bp, synthetic construct
  misc_feature 1..1365: note = Description of Artificial Sequence: Synthetic coding sequence
  source 1..1365: mol_type = other DNA
atgaagcgtgtcgagaccaaccaggactggtcccttatgtgccccaatgaatgccctggtttggacgaggtctggggagaggagttcgagaaactgtacgcctcttatgaaaaacaggggcgagtccgcaaggtcgtaaaggcacaacagctatggtatgccatcattgagtcacagactgagaccggcacaccgtatatgctatacaaagactcatgtaacagaaaaagcaatcagcagaatctcggaacaatcaaatgcagcaacctgtgcaccgagatcgtggagtataccagtaaagatgaggtggccgtgtgcaacctggcttccttagctctgaacatgtacgtaaccagtgagcatacttatgactttaagaagcttgctgaagtgacaaaggttgtggtcaggaaccttaacaagatcatcgacatcaattactaccccgtcccagaagcgtgtctgtctaataaacggcaccgccctatcggaattggagttcagggccttgcagacgcttttatccttatgcgatacccgtttgagtcagcagaagctcaacttttgaataaacagatctttgaaactatttactatggcgctctggaggcatcttgcgacctggctaaggagcagggaccttacgaaacctatgagggcagccccgtttccaaaggcattctgcagtatgacatgtggaatgtgacacccactgacctctgggactggaaggtgcttaaggagaagatagccaaatacggcatacgaaacagcctgcttatagcgcctatgcctactgcatctactgcacagattctcgggaataacgaaagcattgaaccttacacatccaatatctatactcgcagggtgctgagtggcgagtttcagattgtgaaccctcatctgctgaaagacctgaccgaacggggactgtggcatgaagaaatgaagaaccaaattattgcttgcaatgggagcatccagagcatccccgaaatcccagacgatttaaagcagctttacaagactgtgtgggagatcagtcaaaaaaccgtgctgaagatggccgctgagcggggagcttttatcgatcagtctcagtccttaaatatccacatcgctgaaccaaattatgggaaacttacctccatgcacttttacggttggaagcaagggctgaagacaggaatgtattacctgcggacccgaccagccgcaaacccaatccagttcacactcaacaaggaaaagctgaaagacaaggaaaaggtgtccaaggaggaggaagagaaagagagaaacacggctgccatggtgtgcagcctcgagaatcgcgatgaatgtctgatgtgtggcagctag

SEQ ID NO: 238927 - DNA, 1170 bp, synthetic construct
  misc_feature 1..1170: note = Description of Artificial Sequence: Synthetic coding sequence
  source 1..1170: mol_type = other DNA
atgttgtcactgagggtccccttggccccaatcaccgatcctcagcagttacaactctccccactgaagggcctgtcactggtggataaagagaacaccccaccagctctgtctggtacacgggtcctcgcctctaaaaccgctcggaggatctttcaagagcctacggagcccaagacgaaagctgccgcacctggggtcgaagacgaaccactgctgcgggagaacccgagacgctttgtcattttcccaatcgaataccacgacatctggcagatgtataagaaggcggaagcatccttctggacagcagaggaagtggacctgtcaaaggacattcagcattgggagagtttgaagcccgaagagagatattttatctcccatgtgttggcatttttcgccgcatcagatggtatcgtgaacgagaaccttgtcgaaagattctctcaggaagtgcaaatcaccgaagctagatgcttttatggattccagatcgcgatggagaatatccattctgagatgtatagcctcctgattgatacctacattaaggatcccaaagaacgagaattcctgttcaatgcgatcgaaactatgccttgtgtcaaaaaaaaggccgattgggccctccggtggattggtgacaaggaggccacatacggtgaaagggtggtggcgttcgccgcagtggaaggaatattttttagcgggagctttgcatccatcttctggttaaaaaaaagaggtttaatgcccggacttactttctccaatgaactcataagtagagatgaaggtctgcattgcgactttgcttgcctgatgtttaagcacctcgtccataagcctagtgaagagcgtgtgagggaaataatcattaatgccgtgcggatcgaacaagaatttctgaccgaggccctccccgtgaagctgattggaatgaactgtacgttaatgaagcaatatattgaatttgtggctgataggctgatgcttgagctgggattttcaaaagtgttccgcgttgaaaacccttttgacttcatggaaaatatctctctggagggaaaaactaacttcttcgaaaaacgggtgggggaatatcaacggatgggagttatgagcagtccgacggagaacagttttacactagacgccgatttttag

SEQ ID NO: 238928 - DNA, 1350 bp, synthetic construct
  misc_feature 1..1350: note = Description of Artificial Sequence: Synthetic coding sequence
  source 1..1350: mol_type = other DNA
atgggcagagtgggcggtatggcccagcccatgggacgcgctggagcgccaaaaccaatgggtcgcgctgggtcagccagacgtggccgtttcaaaggctgctggtcagagggcagccccgttcaccctgtacccgctgttttgagctggcttctggccctgctacggtgcgccagtaccatgctcagtctgcgggtgcctctggcccctatcaccgacccccaacaactgcaactctcacctctgaagggtctctccctcgttgataaggagaatacaccgcctgccctgagcggaacaagagtgttggcctctaagaccgcccgaaggatctttcaggagccaaccgaacctaagacaaaggccgcagcacccggagttgaagatgaacccctgttgcgcgaaaaccctagacgcttcgttatctttcctatcgagtaccatgatatatggcagatgtataaaaaggctgaagcatcattttggacagcagaagaagtggatctgagcaaagacatccagcattgggaatcactaaaaccagaagagaggtacttcatcagtcacgtactcgcattcttcgccgcttcggacggtattgtgaatgagaatctggttgaacgctttagccaggaggttcaaataactgaagctagatgtttctatggtttccagatcgccatggagaacattcacagcgagatgtatagcctcctcatcgacacttatatcaaggatccaaaggaacgcgagttcctattcaatgcgatagagactatgccttgcgttaaaaaaaaagctgactgggcattgcggtggatcggagataaggaggccacttatggagaaagggtggtcgcattcgcagccgtcgagggcatcttcttctctggcagcttcgccagtatattttggctgaaaaagagaggtctcatgcccggtctgacatttagcaatgaactcattagtagggacgagggattgcactgcgattttgcctgtctgatgtttaagcatctcgttcacaaaccctcagaagagcgggttagagaaatcattatcaatgcagtgagaatagagcaggaattcctcaccgaggccctcccagttaaattgatcggaatgaactgcaccctcatgaagcagtatattgagttcgtggcagaccgcctgatgctggaactaggcttttccaaggtttttcgagtcgagaacccgttcgatttcatggaaaacatcagcctcgagggaaagaccaacttctttgaaaaacgcgtcggggagtatcagcgcatgggagtcatgtctagcccgactgagaactcatttacgctggacgctgacttttag

SEQ ID NO: 238929 - DNA, 1056 bp, synthetic construct
  misc_feature 1..1056: note = Description of Artificial Sequence: Synthetic coding sequence
  source 1..1056: mol_type = other DNA
atgggtgatcctgagcggccagaggctgccggactggatcaggatgaacggtcatcctccgatactaacgaaagtgaaattaagtcgaacgaggaacctctcttgcgaaaatcctccagaaggtttgtgatcttccccatacaatatcctgatatatggaaaatgtacaaacaagcccaggctagtttctggaccgccgaggaggtggacctgtcgaaagatctcccccactggaataaactaaaagcagatgaaaagtattttatctcccacattctcgccttcttcgctgcatcagacgggatcgtgaatgagaatcttgtcgaacggttctcacaggaggttcaggtccctgaggcacgatgcttttatggtttccagattctgatcgagaacgtgcattctgaaatgtactcattgctaattgatacatacattcgggatccaaagaagcgggaatttctgtttaatgctatagagacaatgccatacgtcaagaagaaagcagactgggcgctgaggtggatagccgacagaaagagcacatttggtgagcgcgttgttgcattcgccgcagtggaaggcgtcttcttctcaggatcttttgccgctatattctggctgaaaaagcgcggactaatgcctggccttacattctccaatgagttaatatctcgggatgaaggactgcattgtgactttgcatgcctgatgtttcagtatcttgttaacaagccttccgaggaacgggtccgcgagattatcgtggacgcagtaaagatcgagcaggagttcctcaccgaggccctgccggtgggactcatcggtatgaattgtatcttaatgaagcagtacatcgaatttgtcgcagaccgacttctcgtagagctgggtttctctaaggtcttccaggcagaaaatcctttcgacttcatggagaatatctcactggagggtaaaacaaacttcttcgagaagcgggtgtctgaataccagaggtttgccgtgatggccgagaccacagacaatgtattcactctcgatgccgacttttag

SEQ ID NO: 238930 - DNA, 900 bp, synthetic construct
  misc_feature 1..900: note = Description of Artificial Sequence: Synthetic coding sequence
  source 1..900: mol_type = other DNA
atgggggatccggaacgcccagaagccgctggactggatcaagacgaggtggatttgtctaaggatctcccccattggaacaaacttaaagcggatgaaaaatatttcatttctcacattctggctttcttcgctgcttctgatggcattgtcaacgagaatttggtggaaagatttagccaggaagtgcaagtccctgaggcccgatgcttctatggcttccagatcctgatcgagaatgttcacagcgagatgtattccttactgatcgacacctacatcagagaccctaaaaagcgggagttcctcttcaacgccatcgagaccatgccatatgttaagaaaaaggccgactgggcactgagatggatcgcggatcgtaaatctaccttcggagaaagagtggtcgcattcgccgctgttgagggagtgtttttcagtggttcattcgctgccattttttggctcaaaaagcggggactcatgccaggactgacatttagcaatgagctgatctcccgggacgaaggattgcattgcgacttcgcttgtttgatgtttcagtatctcgtgaacaaaccttccgaggaaagggtccgggaaattattgtcgacgctgttaaaattgagcaggaattcctgactgaagccctgcccgtgggactgatcggaatgaattgcatcttgatgaaacagtacatcgagtttgttgctgatcggctgctggtggagctcggtttctctaaggtcttccaagctgagaacccgttcgacttcatggaaaatatctcattagagggcaagactaatttcttcgagaagcgagtctccgaataccagagattcgcagtgatggctgagaccaccgataatgtgttcacgctcgatgcagacttctag

SEQ ID NO: 238931 - DNA, 420 bp, synthetic construct
  misc_feature 1..420: note = Description of Artificial Sequence: Synthetic coding sequence
  source 1..420: mol_type = other DNA
atgggtgacccagaacggcctgaggcagctggattggaccaggacgaaggtctgcattgcgatttcgcatgcctgatgttccagtacctcgtcaacaagccatctgaggagcgcgtcagagaaataattgtcgacgctgttaaaatagagcaggaatttcttacagaagcgctgccggtgggtctcatcggcatgaactgtatcctgatgaagcagtatatcgaatttgtcgcggaccggctgttagtggagctgggctttagcaaagtgttccaggccgagaatccgttcgatttcatggaaaacatctctctcgaaggtaaaaccaatttcttcgagaaaagggtatccgagtaccaacggtttgcggtgatggctgaaacaaccgacaatgtctttacccttgatgctgatttctag

SEQ ID NO: 238932 - DNA, 201 bp, synthetic construct
  misc_feature 1..201: note = Description of Artificial Sequence: Synthetic coding sequence
  source 1..201: mol_type = other DNA
atgggagacccagaaagacctgaggcagcagggttggaccaggatgaagtgtttcaggcagagaaccctttcgacttcatggaaaacatctcactcgaaggcaagacgaactttttcgagaagcgtgttagtgagtatcagagattcgcagtgatggctgagaccacagacaatgtgttcacattggacgccgatttctag

SEQ ID NO: 238933 - DNA, 132 bp, synthetic construct
  misc_feature 1..132: note = Description of Artificial Sequence: Synthetic coding sequence
  source 1..132: mol_type = other DNA
atgggcgatccagagcgacctgaagcagcaggactggatcaagatgaacgcagtagcagcgacacaaacgagtccgagatcaagtccaatgaagaaccattgctccggaagagctctcgcagatcattttag

SEQ ID NO: 238934 - DNA, 894 bp, synthetic construct
  misc_feature 1..894: note = Description of Artificial Sequence: Synthetic coding sequence
  source 1..894: mol_type = other DNA
atgtacaagcaggcgcaagccagcttttggacagccgaggaagtggacctgtccaaggatctgcctcattggaacaagttgaaagccgacgaaaaatacttcatcagccacattctcgcgttctttgctgccagtgatggaatcgtgaacgagaatctcgtggagagattttctcaagaggtccaagtgcccgaggcacgttgcttttacggttttcagatccttatcgagaatgtccattcagagatgtacagtttgctcatcgacacgtatattcgtgaccccaagaagagggagtttctgtttaatgctatcgaaactatgccctatgtcaagaagaaagcagactgggcgctcaggtggatcgccgatcgcaagagcacatttggcgaacgagtcgtggcttttgccgctgtggaaggagtgttttttagcggatcctttgccgcaattttttggctcaaaaaaaggggtttgatgcccggtctgaccttcagcaacgaattgatctccagggacgaaggtctccactgtgactttgcttgcttgatgtttcagtacctggtcaataaaccctctgaggagcgtgtcagagagattatagttgatgcagtaaaaatagagcaggaatttctgactgaggctctgcctgttggcctcatcggaatgaactgtattttgatgaagcagtacatcgagttcgtggccgataggctactggttgagctcggtttttctaaagtcttccaggcagaaaatccattcgactttatggaaaatatcagcctggaaggcaagactaacttcttcgaaaaaagggtgagcgagtatcagaggttcgcagtgatggctgagacgacagacaacgtgtttacactggacgccgatttttag

SEQ ID NO: 238935 - DNA, 1824 bp, synthetic construct
  misc_feature 1..1824: note = Description of Artificial Sequence: Synthetic coding sequence
  source 1..1824: mol_type = other DNA
atggaggcacctgcggcaggactgtttcttttgttactcctgggtacttgggccccagcacctggcagtgccagttctgaggcccctcctctcattaatgaggatgtgaagcgtacagtcgatttatccagccatctcgctaaggtgaccgcggaagtcgtgctggctcacctaggcggaggctctacaagccgtgccacatcttttctcctcgctcttgaacccgagctcgaagcgcgactggctcacctgggcgtgcaagtgaagggtgaagatgaggaagagaataatctggaagtcagggagactaagattaaaggaaaatctggaagattcttcactgttaagctgcctgtcgctttggaccctggcgcaaagatctcggtaattgtcgaaacggtgtatacgcacgtgctccatccttatccgactcagatcacccagagcgaaaagcaattcgtggtgtttgaaggaaaccactatttttattcgccttatcctaccaaaactcagaccatgcgggtcaaactggcttcccggaatgtagagtcatatactaagctcggcaatccaacgcggtccgaagacctcttggactatggtcctttcagggatgtgcccgcttatagccaggacacgttcaaggtccattacgagaacaactcccccttcctcaccatcacaagtatgacaagagtgattgaggtttcccattggggcaatatcgccgtggaggaaaacgtggatttgaaacacaccggggcagtgcttaagggcccatttagtcggtacgactatcagagacaaccagactccgggatctcttccattcgtagcttcaaaacgattttaccggcagctgctcaggacgtatattaccgggacgaaatcgggaatgtgtctacatcacacctcctgattctggacgactctgttgaaatggaaatccgcccacggtttcccttgtttgggggatggaaaacgcactatattgtgggatataacctgccctcctacgaatacctctacaacttaggcgaccagtatgccctcaagatgcgattcgttgaccatgtgttcgatgagcaagtcatagatagtctgaccgtgaaaatcatcctacctgagggagccaaaaacattgaaatcgatagcccctacgagatctcccgggcacccgacgagttgcattacacgtatctggacacattcggtcgcccagtgatcgtcgcttataaaaagaaccttgttgaacagcacattcaggacatagttgtccactacacatttaataaggtcctgatgctgcaggaacccctcctcgtggtagctgccttttacatcctgtttttcacagttatcatttacgtgaggctggatttttctattaccaaggacccggctgcagaagcgaggatgaaagtggcttgtattacggaacaggttttaactcttgtgaacaaaaggattggcctttacagacacttcgacgagaccgtcaataggtacaagcaatctagagatataagcacattgaactccggaaaaaaaagcttggaaacagaacataaagccctgacctcagagattgcactgctccagtctagacttaagacagaaggttccgatctgtgcgacagggtgtcagaaatgcaaaagctggatgctcaggttaaggagctggtgctcaaatccgccgtagaagctgaaagactggtagcaggcaagctcaagaaggacacctatatcgaaaacgaaaagctgatttcaggcaagaggcaggagctggtgaccaagatagaccacatcttggatgccttatag

SEQ ID NO: 238936 - DNA, 1308 bp, synthetic construct
  misc_feature 1..1308: note = Description of Artificial Sequence: Synthetic coding sequence
  source 1..1308: mol_type = other DNA
atgcgggtcaaacttgctagcagaaacgtggaaagctacacgaagctgggcaaccctacccggagtgaggacctgctggattacggtccgttccgcgatgtgccagcttatagtcaggatacttttaaggtgcactatgagaacaactccccctttttgaccatcaccagtatgactagagtgatcgaagtctctcactggggaaacatcgcagttgaggagaacgtggatcttaagcacacgggcgcagtgctcaaagggccttttagtcgatatgactaccagcgtcagcctgactctgggatctctagtattcggagctttaaaacaatcctgccggcagcagctcaggatgtgtactacagggatgaaataggcaatgtgtccactagtcacctactcatcctggatgacagcgtcgaaatggagattcggccaagatttccactctttggcggttggaaaacccactatattgtagggtacaatctaccctcgtacgaatacctgtataacctgggcgatcagtacgcattgaagatgcgcttcgttgatcatgtttttgatgagcaggtgattgatagtcttacagtcaaaataatattgccagagggagcaaaaaatattgagatagactccccttatgaaatctcccgggcacccgatgaacttcactatacgtacctggatacttttggtcggccagtaatcgtggcctacaagaaaaacttggtagaacagcatatccaggatattgtcgtgcattatacttttaataaggtgttaatgttgcaggaacctttactcgtagtagcagcattctacatcctgttcttcacggtgatcatctatgtgagattggatttttctatcacaaaagatcctgccgctgaagcgagaatgaaagtggcatgcatcacagagcaggtgctgactctggttaacaagcgtatagggctgtatcggcactttgatgaaactgtgaatcgatataaacagtctagagacatctcgactctcaacagtggtaagaaatccctggagactgagcacaaggccctcaccagtgagatcgctctccttcaatctcgcttgaagacagagggtagcgacctgtgcgaccgcgtgagcgaaatgcaaaagctggatgctcaagtaaaggaacttgtattgaagtctgccgtcgaggctgaacgactcgtggcgggaaagttaaagaaggatacatatatcgaaaacgagaagctgatcagcggtaagcggcaggagctggtgactaagattgatcacatcctggacgctctctag

SEQ ID NO: 238937 - DNA, 1137 bp, synthetic construct
  misc_feature 1..1137: note = Description of Artificial Sequence: Synthetic coding sequence
  source 1..1137: mol_type = other DNA
atgaccagggtgattgaggtttcccattggggaaatattgcagtggaagaaaacgtggatctcaagcatactggcgctgtcttgaaggggccattcagtagatacgactatcagaggcagcctgattctggtatcagtagtatcaggtcatttaaaacaatcctgcccgctgctgcgcaggacgtatactacagggatgagataggtaacgtctccaccagtcatctgctgattcttgacgactctgtagaaatggagatcaggcctcgctttcctcttttcgggggttggaaaacgcactacatcgtggggtacaacttgccgtcttacgaatatctgtataacctcggtgatcagtatgcgctgaagatgcgattcgtcgaccatgtttttgatgaacaggttatagacagcctgactgttaagatcattcttcccgagggtgccaaaaacatagaaatcgattccccatatgaaatttcaagagcccctgacgagctgcactatacgtatttagacactttcgggaggccagtcatcgtggcctacaagaaaaatctcgtcgaacagcacattcaggatatcgtggtccattataccttcaacaaggtgctcatgctgcaggagccattgttggttgttgctgccttctacatcttgttctttacagttatcatttatgttaggttagacttcagcattaccaaggaccccgcagcggaggctcgaatgaaggtggcatgtattacagaacaggtcctgactctggttaacaaacggatcggcctgtatcgacatttcgatgagaccgtgaatcgctacaagcagagcagggacatctcaaccctcaactctggcaaaaagagtctggaaactgaacacaaagccttgacctcagagatcgcactgctgcagagccggctcaagacagagggatccgacctctgcgatagggtgtccgaaatgcagaagctcgatgcccaggtgaaagaactagttctgaaaagcgccgttgaggccgaaagactcgtcgccggaaagcttaaaaaggacacttacatcgaaaatgaaaaactgattagtggaaagcgacaggaactggtcaccaagatcgatcatatactggacgctctctag

SEQ ID NO: 238938 - DNA, 1746 bp, synthetic construct
  misc_feature 1..1746: note = Description of Artificial Sequence: Synthetic coding sequence
  source 1..1746: mol_type = other DNA
atggaggcccctgctgcaggtctgtttctccttcttctactagggacctgggcccctgcaccgggaagcgcctctagcgaggctcccccacttatcaacgaagacgtaaagcggacagtagacctgtcttcgcatcttgctaaagtcacggccgaggtggtgttagcccacctgggcgtgcaagtgaaaggagaggacgaggaggaaaataatctggaggtgagagaaactaagatcaaaggtaagagtggccgatttttcacagtgaaactcccagtagctcttgaccctggcgctaagatctctgttattgtggaaacggtctacactcacgtcctgcatccataccctacgcaaattacccagagtgagaaacagtttgtggtgtttgaggggaatcactacttctattccccttaccctacaaaaacgcaaactatgcgggtgaaactggccagtcgaaacgtagagtcctataccaaactgggaaatcccacaaggtcagaggaccttctggactatggcccatttcgagacgttcccgcatattctcaggatacgtttaaagtacactatgaaaataacagtcctttcctcacaatcacttcaatgaccagagtaatcgaggtgagccactggggcaacatcgcggtggaggagaacgttgatctaaagcacactggtgcggtgctgaagggtcccttctcccggtatgattatcagcgccagcccgatagcggtatatcatccatcaggtcttttaaaacaatacttccagcggcagctcaggacgtctactaccgtgatgagatcgggaacgtaagtacatcccacttgctgatattagacgacagtgtggagatggagattaggcccaggttcccacttttcggtggctggaagactcattacattgtcggatacaacttacccagctacgagtacctgtataatctgggggatcaatacgctctgaaaatgcggtttgtggatcatgttttcgatgaacaggtcattgactccctgacggtaaaaatcatactgcctgagggggcaaaaaatattgagatcgatagtccctacgagattagtagagcccctgatgagttgcattacacatacctcgatacttttggtcgccctgttatcgttgcctacaagaaaaatctggtggaacagcatatccaggatatcgtcgtgcactatacttttaataaagtgttgatgttgcaagagccgctgctggtcgtcgccgcattctatattttgttctttacagtcattatatacgtaagactggatttctccattacaaaagatccagccgcagaagccaggatgaaggtggcatgtataacagagcaggtgctgacccttgtcaacaaacggattggcctgtatcggcactttgacgagactgttaaccgttacaagcagtctcgggatatctcaacgctcaacagcgggaaaaaaagcctggaaaccgaacataaggctttgaccagtgagatcgcgcttcttcagtctcgattgaagactgaaggatcagatttgtgcgacagggtaagtgagatgcagaagttggacgctcaggtcaaggagctcgtgctgaagtccgctgtggaggcagagaggctagtagcaggcaaattgaagaaggacacgtatatagagaatgaaaagctcatcagcggaaaacgtcaggaacttgtcaccaaaatagatcatatcctggacgcattgtag

SEQ ID NO: 238939 - DNA, 1896 bp, synthetic construct
  misc_feature 1..1896: note = Description of Artificial Sequence: Synthetic coding sequence
  source 1..1896: mol_type = other DNA
atggcacctccaggctcttctacagtgtttctgcttgctttgactattattgcatccacatgggcgttgacccctacacattatctcactaagcatgacgtggagaggctgaaagcttctctagataggccattcactaacctcgagagtgccttctatagtatagttggcctgtcttctctcggcgctcaggtgccagatgccaagaaggcctgcacgtatatccgttccaacctggacccttcaaacgttgactccttattctacgcagcccaggcttcccaggcgctctccggctgcgaaatcagcatcagcaatgagacgaaagaccttctcctggccgcagtgtccgaggactccagcgtgacgcagatttaccatgcggtggctgccctcagcgggtttggccttccgctcgctagtcaggaggccctgtccgcgttgacagcccgacttagcaaagaggaaacagtgctcgcaacagtgcaggcgctccaaaccgccagtcatctgagccagcaggccgatctgcgctcaatcgtcgaggaaatcgaggacctggtagccaggctcgacgaactggggggtgtttatttgcagtttgaagagggactggaaaccacggccttgttcgtcgccgctacttacaaactcatggatcacgtgggaacagagccaagtattaaagaagatcaagtgatccaactgatgaatgcaatttttagcaagaaaaattttgagtctttgtcagaggcatttagcgtcgcgtctgccgctgctgtactctcccacaataggtatcacgtgcctgtcgtcgtcgtgccagagggatcagcatcagatacccacgaacaagccatactgcgcctgcaggtaacaaatgtgttgtcccagcctctcacacaagcaacagttaagctcgagcacgcaaagagtgttgcttcacgtgccactgtgctgcagaagaccagcttcaccccagtgggggatgtgttcgagctcaatttcatgaatgtgaagttcagtagcgggtattacgactttcttgtggaggtagaaggcgataatagatatatcgccaatacagttgaacttagggtcaagatctctactgaagtgggcatcactaacgtcgacctcagcactgttgataaggatcagtctatcgcccctaaaacgaccagagtcacttaccctgctaaagcaaagggaacatttatcgccgattcccaccaaaatttcgccttgttttttcagctagtggacgttaataccggggctgagctgacaccccatcagacgttcgtaagattgcataatcagaagacggggcaggaagtggtattcgtggctgagcccgataacaagaacgtgtacaagtttgagttggacacgtccgaaagaaaaatcgagttcgactctgcctcgggcacatataccctgtacttaatcataggcgacgccaccttgaaaaaccctatcctgtggaacgttgctgatgttgtcataaagtttcctgaagaggaagctcccagcacggtcttgtcccagaacttatttacacctaagcaggaaattcagcacctattccgcgaacctgaaaaaaggccgccaactgtggtgagcaacacgtttaccgcactcatcttaagtccccttctgttgctctttgctctttggattcgcatcggagctaacgtgtccaatttcactttcgcaccaagtaccatcatcttccatttagggcatgctgcaatgttgggactgatgtatgtgtactggacccagttaaacatgttccaaacactgaagtacctggcgatcctgggctctgtcacttttctagctggcaataggatgctggcccagcaagccgtgaagagaacggcccactag

SEQ ID NO: 238940 - DNA, 1038 bp, synthetic construct
  misc_feature 1..1038: note = Description of Artificial Sequence: Synthetic coding sequence
  source 1..1038: mol_type = other DNA
gtttccccccagggcagtagtactgtgtttctcctggcgctgaccattatcgcctcgacatgggccttgactcctacccattacctaactaagcatgatgtggagaggctcaaggctagcctagacaggccttttaccaatctcgagagtgccttttattcgattgttggcctgtcctccctgggggctcaggttccagatgcaaagaaggcctgtacgtatatcagaagtaacttagatcccagtaacgtcgacagcctgttttacgccgctcaggcctcgcaggcccttagtggctgcgaaatatcaattagtaacgaaaccaaggacctcctcttagcggctgtatccgaagactcaagcgtaactcagatttaccacgcggtagccgcactctctgggttcgggctgcccttggcctctcaggaagccctctcagccctcacagcccgtctctcaaaggaggaaactgtgctggccagagtttggagtactgttcttgaaagtaggtccttgttttctaaaaggactgtacaagctcttcagaccgcttctcacctgtcccaacaggccgacttacgcagcatcgttgaggagatcgaggacctcgtggcgagactcgatgagctggggggagtctatttgcagtttgaggaaggcctggagaccactgcgttgtttgtggccgcaacgtataagcttatggatcatgtcgggactgagcctagtatcaaggaggatcaggtgatacagctcatgaacgcgatcttctctaaaaaaaacttcgagtcactcagtgaggcgttctcggtggcctctgctgctgccgtgctaagccacaataggtaccacgtgcccgttgttgtggtgccagagggatcggccagcgatacccacgagcaggcgatcctgaggttgcaggtgaccaacgtcttatcacagccgctgacacaggccacggtgaagctggaacatgcaaaaagcgttgcaagcagagctaccgtgcttcaaaagacaagtttcactcctgttgggtag

SEQ ID NO: 238941 - DNA, 1848 bp, synthetic construct
  misc_feature 1..1848: note = Description of Artificial Sequence: Synthetic coding sequence
  source 1..1848: mol_type = other DNA
atggccccacccggttcctccaccgtttttctcttggcactgaccatcatcgcctctacctgggctctgactccaactcattatctcactaagcatgatgtggagcgcttgaaagcttccctggataggcctttcacaaatctggagtccgccttttactcgattgtgggcctgtcctcccttggcgctcaggtgccagacgcaaaaatctcaataagcaatgaaaccaaggacctcttgctcgctgctgtgtcagaagattcatcggtgactcagatctatcacgccgtggcggcactctcgggattcggattgcccttagcaagccaggaggccctgtccgcccttacagccaggctcagcaaagaagagaccgttctggctacagtgcaggctctccagactgcaagtcacctctcccagcaagctgatttgaggagcatagtggaagagatcgaagaccttgtcgcacgattggatgaacttggcggtgtttacctgcagtttgaggaaggtctcgagactacagctctgttcgtggccgctacctataagctgatggaccatgtgggcacagagccttcaattaaagaggaccaagtcattcagcttatgaacgccattttttcaaagaagaacttcgagtcattatcagaggcctttagcgtggccagcgccgcagctgtgctctcacataaccgctatcatgtacccgtcgtagtcgttccagagggatctgccagcgacacccacgagcaggcaatcttgagactccaggtgacgaatgtcctgtctcaaccattgacacaggcaacggtgaagcttgaacacgcaaaaagtgtagcgtcacgcgctaccgtgctccaaaaaacaagttttacgcccgtgggagacgtgtttgagctcaatttcatgaacgtgaaattttcttctgggtattatgattttttggtggaggtcgaaggtgataatcgatacatagctaataccgtcgaactgcgagtaaaaatctccacggaagtcggcatcaccaatgtggacctctctaccgttgataaagaccagagcattgccccaaagacgacacgagtgacctaccccgcaaaagccaagggcacctttattgcggattctcaccagaactttgcgctcttcttccagctggtggacgttaacaccggcgcagaactgaccccccaccagacattcgtcagactgcacaatcagaaaacgggtcaggaggtggtgttcgtagctgaacctgacaataaaaacgtatataaattcgaattagatacttctgagcgaaaaattgagtttgatagtgcttctggcacgtacacactatatctgatcatcggagatgccaccctgaagaatcccattctttggaatgtcgccgatgttgtgataaagttcccggaagaggaggcccctagcacagttttgtcccagaacctctttactcccaaacaggagattcagcatctgtttagagaacccgagaagcgaccacctaccgtagtgagtaacacatttacagccttgatcttgagtcctttgctactcttatttgcactttggattagaataggcgctaatgtgtccaatttcacattcgccccaagcacaatcatcttccaccttggtcacgcggctatgctagggcttatgtatgtttactggacccagttgaatatgttccagacacttaaatacctcgccatcctgggttcagtgacctttctggccggaaaccgcatgctggctcagcaggcggtaaagcggattgcagccgagcagtcttctaggttggccaagtacaggacactgcggacagcccactag

SEQ ID NO: 238942 - DNA, 441 bp, synthetic construct
  misc_feature 1..441: note = Description of Artificial Sequence: Synthetic coding sequence
  source 1..441: mol_type = other DNA
ggcacttatacactgtatctgattatcggagacgccaccctgaagaacccaatactctggaatgtggcagatgtggtaattaagttcccggaagaggaagccccaagcaccgtactatcacagaacttattcactccaaagcaggagattcagcacctcttcagagaacctgaaaaacgaccgcctactgtcgtgtctaacactttcactgcactaattttgtctcctcttctactcctgttcgcgctgtggataaggatcggcgcaaacgttagcaatttcacctttgcccctagtactattatattccacctggggcatgccgaacaacacatcagcagtcgacgaaagatggagattctcaaaaccgaatgccaggaaaaggaaagccgtacaatccacagcatgagacggaagatggagaaaaagaactttatctag

SEQ ID NO: 238943 - DNA, 1038 bp, synthetic construct
  misc_feature 1..1038: note = Description of Artificial Sequence: Synthetic coding sequence
  source 1..1038: mol_type = other DNA
atggcaccaccgggtagctcgaccgtgttcctgctggcacttaccattattgcatccacctgggcacttaccccaacccattacctaaccaaacacgacgtagagcgactgaaagcttccctggaccggccattcacgaatcttgagtccgcattctactccatcgtaggactgtcttcactgggtgcgcaggttccagatgcgaaaaaggcatgcacctatattcgaagtaacctggatcctagtaatgtggactcactgttctacgccgctcaagcttcccaggctctctctggatgtgagatatccatcagcaacgaaacaaaggacttgctcctggccgcagtcagcgaggatagcagcgtgacgcagatttaccatgcggtggccgctctgtcaggctttggattgcctctggcaagtcaggaagctttgtccgccctcactgccaggttgagcaaggaggagactgtgctggctcgcgtctggtcaaccgtgttagagagccgatcgttattctctaaacggaccgtccaggccctacaaaccgcgagtcacttgagtcagcaagcagacctgagatcgatcgtcgaggagattgaagatctcgtcgctcgcttggatgaacttggcggtgtctatctgcaatttgaagaaggcctcgaaacgaccgctctatttgtggctgccacatacaaacttatggatcacgtggggaccgagcctagtatcaaggaagaccaggtcatacagctcatgaatgccatttttagcaagaaaaacttcgagagtctatccgaggcttttagtgttgccagtgctgcagccgtcctgtctcataacaggtatcacgttcccgttgtcgttgtccctgaggggagcgcatccgacacccacgagcaggctattttgaggctccaggtgaccaatgtgctttctcagcccttgacgcaagctaccgttaagctggagcacgctaagtcagtcgcaagcagggctactgtcctgcagaaaaccagcttcacccccgttggttag

SEQ ID NO: 238944 - DNA, 417 bp, synthetic construct
  misc_feature 1..417: note = Description of Artificial Sequence: Synthetic coding sequence
  source 1..417: mol_type = other DNA
gagctggatactagcgagcggaagattgagtttgattctgccagcggtacctacactctctacttgatcatcggtgatgccaccctgaagaacccaatcctctggaacgtggccgacgtggtgataaaattcccagaagaagaggctccgagcacagttctcagccaaaatctgttcacaccaaaacaggagatacagtggattaggattggagccaacgtgtctaatttcacttttgccccatccaccatcatcttccatctgggacacgcagcaatgctcggcctgatgtacgtttattggacacagctcaatatgtttcagaccttgaagtacctggcgattctggggtccgtgacatttcttgctggaaatcgaatgttggcccagcaagcggtaaagaggactgctgagtag

SEQ ID NO: 238945 - DNA, 417 bp, synthetic construct
  misc_feature 1..417: note = Description of Artificial Sequence: Synthetic coding sequence
  source 1..417: mol_type = other DNA
gaactagatacttctgaaagaaaaattgaatttgactccgcctcagggacatacaccttgtatctgatcattggcgacgctacgctgaaaaaccccattttgtggaacgtcgccgatgttgtgataaaatttcccgaggaggaggcgccatctacagttctgtcccaaaacctctttacccccaagcaggaaattcagtggattaggatcggtgcgaacgtttccaacttcacattcgcaccttccaccattatattccacctgggacatgctgccatgctggggctgatgtatgtctactggacccagctgaatatgtttcagacactgaagtatctagccatccttgggagcgtgacgttcctcgctggcaacagaatgcttgcgcagcaggccgtaaagcgcaccgctcactag

SEQ ID NO: 238946 - DNA, 504 bp, synthetic construct
  misc_feature 1..504: note = Description of Artificial Sequence: Synthetic coding sequence
  source 1..504: mol_type = other DNA
atgcagcgcaccgtccaggctcttcagacagcttctcatctttcccaacaggccgacctgcgctctatcgtcgaggagattgaagatttggtcgccaggctggacgaattaggaggcgtctacctgcagttcgaagagggactcgaaacaaccgcgttgttcgtcgccgcaacatacaagcttatggaccacgttgggacagaacctagcatcaaggaggatcaggtcatacagttaatgaacgccatattttccaaaaagaactttgagagtttaagtgaggcattctcagtggctagcgcagctgctgtcctgtcgcataacagataccatgtgccagtcgtggttgtgcccgaaggctcagccagtgacacccacgagcaggccattctgcggttgcaggtaacaaatgttctatcccagccactgacccaggccacagtgaaactagaacatgcgaaatcagtggcttctcgcgctacggttttgcagaaaacctcttag

SEQ ID NO: 238947 - DNA, 444 bp, synthetic construct
  misc_feature 1..444: note = Description of Artificial Sequence: Synthetic coding sequence
  source 1..444: mol_type = other DNA
taggggacatacaccttgtatctaattattggggacgcaactcttaaaaaccctatcctgtggaatgttgccgatgtcgtcattaagttcccagaagaagaagccccttctaccgtcctgtcgcagaatctcttcacacctaagcaggaaatacagcatctctttcgagagccggagaaacggcctcccaccgtggtgagtaataccttcaccgcactgatactgtctcctctacttctgttgtttgccctgtggatccggataggagctaacgtgtctaacttcacatttgctccatctacgatcatctttcacctgggtcacgccgagcaacatatttcaagccggcgtaaaatggagatcctcaagacggagtgtcaggaaaaagaatcccgcactatccacagcatgcgcaggaaaatggagaagaaaaattttatttag

SEQ ID NO: 238948 - DNA, 936 bp, synthetic construct
  misc_feature 1..936: note = Description of Artificial Sequence: Synthetic coding sequence
  source 1..936: mol_type = other DNA
atgcaacggccaggtcctttctccactctttacggcagagtcctggctccccttccaggcagagccggtggggcagcttccgggggaggcggtaactcctgggatctgcctggaagccatgtgagactgcccggacgcgctcaaagcgggactagggggggtgctgggaatacaagcacatcatgcggcgacagcaacagcatttgtcccgctcctagcactatgtctaaggcggaagaggcgaagaagctggctggcagggccgcagtagaaaaccatgttcgaaataatcaggtgttgggaattggttctggttcgaccatcgtccacgccgttcagcgaattgccgaaagggtgaagcaggaaaacctgaacctcgtgtgcataccaacatctttccaagccagacaactaatcctacagtacgggcttaccctgtccgatctggataggcatccagagatcgatcttgccatagatggggcagatgaggtcgacgccgatctgaatttgattaagggcggagggggttgcctgacacaggagaagatagtagcaggatacgcgagccgatttattgtaatcgcagattttaggaaagatagtaagaacctcggcgatcagtggcataagggcatcccaatcgaggtcatccccatggcctatgttcccgtctcacgcgctgtaagtcaaaagttcggaggagtggtggagctcagaatggccgtgaacaaggccggacccgtggttacggataatggcaattttatcttagactggaaattcgaccgcgtgcataagtggtccgaggtcaacacggccattaagatgatcccgggagttgtggacaccgggctgttcataaatatggccgagagggtgtattttggcatgcaggacggcagcgtgaacatgcgggaaaagccattctgctag

SEQ ID NO: 238949 - DNA, 534 bp, synthetic construct
  misc_feature 1..534: note = Description of Artificial Sequence: Synthetic coding sequence
  source 1..534: mol_type = other DNA
gcacgacagttgattctccagtacgggctcactctatctgacttggaccggcaccccgaaatcgacctggccattgacggcgcagatgaggtggatgccgatctaaatctgatcaagggcggtggcggatgtcttacacaggagaaaattgtggctggctatgcatcaaggttcattgtcatcgccgacttccgcaaagactcaaaaaatttgggcgatcaatggcataaaggcatacccatcgaggtaatcccaatggcctacgtacctgtgagtcgggcagtttcccaaaaatttggcggagtggtggagctgaggatggcagttaacaaggctggacccgtggtgacagacaatggcaattttattttggattggaagtttgatagggtgcacaaatggagtgaggtcaataccgccatcaaaatgatccctggagtggtagatactggacttttcatcaatatggcggagagggtatatttcgggatgcaggacgggtctgtgaatatgcgggaaaagcccttttgttag

SEQ ID NO: 238950 - DNA, 492 bp, synthetic construct
  misc_feature 1..492: note = Description of Artificial Sequence: Synthetic coding sequence
  source 1..492: mol_type = other DNA
atgcggatcgagaagtgctacttctgtagcggccctatatacccaggacacggtatgatgttcgtaaggaacgattgtaaggtatttcgcttctgcaaaagtaagtgccacaagaacttcaaaaagaaacggaaccctcgaaaagtgcgctggactaaagctttccgcaaagcagccggtaaagagctaacagtagataactcgtttgagtttgaaaagcggagaaacgaaccaatcaagtaccagagagagttgtggaacaagactatcgacgcaatgaagagagtggaagagatcaagcaaaaacgacaagccaaatttatcatgaaccggttgaagaagaataaggagctgcagaaggttcaggatatcaaagaagtgaaacagaacatacacctcattagggctcctctggctggaaaggggaagcagctagaggaaaaaatggtccaacaactgcaggaggacgtggatatggaggacgccccatag

SEQ ID NO: 238951 - DNA, 1161 bp, synthetic construct
  misc_feature 1..1161: note = Description of Artificial Sequence: Synthetic coding sequence
  source 1..1161: mol_type = other DNA
atgtgtagtagcgtggctgcaaagctgtggtttctcaccgatcgtcggatcagagaggactaccctcaaaaggaaattctgagagctctaaaagctaagtgttgcgaggaggaattagattttcgtgccgttgtgatggacgaagtggttctcaccatcgaacagggtaacttgggcctaaggattaacggggaacttatcactgcataccctcaggtggttgtcgtgcgggtgccaactccgtgggtacagtctgactctgacataactgtcctacgccacctggagaagatgggttgccgcctcatgaatcgaccccaggcaatcctgaattgcgtgaataaattttggacatttcaggagcttgcagggcacggagtacctctgccagatacattttcttacggaggtcatgagaacttcgcaaagatgatcgacgaggcagaggtcctagagttccctatggttgtgaagaacacccggggtcatcggggtaaggccgtgtttcttgcccgagataaacatcacctggcggatctttcccacctaatacggcacgaggccccatacttgtttcagaagtacgttaaagagtcccatgggcgtgatgttagggtgatcgtcgttgggggtcgagtggtcggtacaatgctgagatgttccaccgatggaagaatgcagagcaattgcagcttgggtggcgtcgggatgatgtgttcattatctgagcagggcaagcagctagctattcaggtgtcaaacattttgggcatggacgtctgcggtattgatctgctgatgaaggacgatggatcattttgcgtctgcgaagccaacgcaaatgtcggcttcattgccttcgataaggcttgtaacctggacgttgcgggaatcattgccgactacgcggcttccttactacccagtggacgtctcacacggaggatgagtttgctgtccgtcgtaagcaccgcctcagagaccagcgagcccgagttaggccctcccgcaagcacggctgtggataacatgagtgctagcagctcctcagtcgactcagaccctgaatccaccgaaagggagctcttgactaagctgccgggaggattatttaatatgaaccaactgctggcgaacgaaataaaactgctggtggactag

SEQ ID NO: 238952 - DNA, 1161 bp, synthetic construct
  misc_feature 1..1161: note = Description of Artificial Sequence: Synthetic coding sequence
  source 1..1161: mol_type = other DNA
atgtgttcatccgtcgctgccaaactgtggttcctgaccgataggagaattcgggaggactatccacagaaggaaatcctcagagccctgaaggccaaatgttgcgaagaagagttagattttcgagccgttgtaatggatgaggtggttctgaccatcgagcaaggaaacttagggctgcgaattaacggcgagctcatcactgcctatccccaggttgtcgtcgtccgagtgccaacaccttgggtgcagtcagattctgatatcacagtcttgcgacatctagagaagatgggatgcaggctgatgaaccgccctcaagcaatactcaactgcgttaataaattctggacctttcaggagcttgccggacatggcgtgccactccccgatacctttagttacgggggacacgaaaacttcgccaagatgattgacgaggctgaggtgctggaattcccaatggtggtgaagaacacacggggacacagaggcaaggccgtgtttctcgccagggataaacatcatcttgccgacttgtcccatttgattcgccatgaggcgccatatctcttccaaaagtatgtgaaagaaagccatggtagggacgtccgagtgatcgtagtggggggtcgggtggtgggcactatgctccggtgttcaaccgatggacggatgcaatctaactgctctctggggggtgtggggatgatgtgctccctttccgaacaggggaagcagttggctatccaggtgagcaatattttagggatggatgtctgcggaattgaccttctgatgaaagacgatggctcgttctgcgtttgtgaagccaatgctaatgtcggcttcattgccttcgataaggcctgtaatttagacgtcgctgggatcatcgcggattatgcagccagtctgttgccctctggtcgactgacacgcagaatgtccttgttatctgtggtgtccaccgcgtccgaaacctcagagcctgagcttggacccccagccagcacagctgtggataacatgtcagcctccagcagctctgtggatagcgaccctgaatcaacagagcgggaattgctcaccaaattgcctggcggactgtttaatatgaaccaattgttggctaatgagatcaaacttctggttgactag

SEQ ID NO: 238953 - DNA, 1161 bp, synthetic construct
  misc_feature 1..1161: note = Description of Artificial Sequence: Synthetic coding sequence
  source 1..1161: mol_type = other DNA
atgtgcagcagtgtggctgctaagctgtggtttctaaccgatagaaggatcagagaggattatcctcagaaagaaatcctccgggctctgaaggctaaatgttgcgaagaggagctggacttccgcgcagtcgtgatggatgaagtagtgctcacaatcgaacaggggaatctggggctcagaattaacggagagctcatcacagcctatcctcaggtggtggtcgtcagagtcccaacaccctgggttcagtccgactctgatatcaccgttctgagacatctggagaagatgggttgccggctcatgaataggcctcaagccatactgaattgtgtgaataaattttggaccttccaggaattagccggacatggagttccactcccagacaccttcagttacggcggacatgaaaacttcgctaaaatgatcgacgaggctgaggttctcgaatttcctatggttgtgaagaacactcgcggacacaggggaaaagccgtgtttctggccagagacaaacaccacctcgccgatttgagccacttgatccgtcacgaggcaccttacctgttccagaagtatgtcaaagagtcccatggccgagatgtacgcgtgattgtcgtgggcggacgggtggtgggcaccatgctgcggtgtagcaccgacgggcgtatgcagtccaactgtagcctcggtggcgtaggaatgatgtgcagtctgtccgagcaagggaagcagctggcaatccaagtgagcaatatcctcggcatggatgtgtgcggcatagacctgctcatgaaagacgacggctcattctgtgtatgcgaggcgaacgctaatgtagggtttatcgcgttcgataaggcttgtaacctggatgtggccggtattattgccgactatgcagcaagccttctgccctccggacgcttgactcgtagaatgtcactcctgagtgtggtttccacagccagcgaaacatcagagccagagcttggcccacctgcttccacagctgtggacaacatgagcgcgtctagttcttctgtggactcagatcctgagagcactgagcgggaactacttaccaaactgcctgggggactgttcaacatgaatcaactgctcgctaatgagattaaacttctggtcgattag

SEQ ID NO: 238954 - DNA, 288 bp, synthetic construct
  misc_feature 1..288: note = Description of Artificial Sequence: Synthetic coding sequence
  source 1..288: mol_type = other DNA
atgtgtagttctgtggctgccaagctctggtttctcaccgatcggaggattcgtgaggattacccgcagaaggagatcctgcgggctttaaaggctaaatgctgtgaagaggagctggactttcgcgctgtcgtcatggacgaggtggtgctcaccattgagcaaggaaatcttggcctgaggatcaatggggagcttataaccgcctacccacaggttgtcgtagtgagagtgccgactccctgggtgcagtctgattccgacatcacggtccttagacacctgtag

SEQ ID NO: 238955 - DNA, 345 bp, synthetic construct
  misc_feature 1..345: note = Description of Artificial Sequence: Synthetic coding sequence
  source 1..345: mol_type = other DNA
atgtgctcatctgtcgccgctaagctgtggttcctgaccgataggagaataagggaggactatccgcagaaggagatcctgcgggctctgaaggccaagtgttgtgaagaagagctcgactttcgagccgttgtcatggatgaagttgtccttactatcgagcaggggaacctgggcctgagaattaacggtgaactgatcactgcttacccacaagtggtcgtggtccgggttcccactccatgggtgcaatctgattcagacattacagtgcttcgtcatctggaaaaaatggggtgtcgtttaatgaacaggcctcaggctatactgaattgtgtgaactag

SEQ ID NO: 238956 - DNA, 645 bp, synthetic construct
  misc_feature 1..645: note = Description of Artificial Sequence: Synthetic coding sequence
  source 1..645: mol_type = other DNA
atgggcaggcggcctgcacggtgctaccggtattgtaagaataagccttaccccaagtcaagattctgccgcggagtgcccgacgcaaagatacgtatatttgatctgggccgaaagaaagctaaagtcgatgagtttcccctgtgcgggcatatggtcagcgatgagtacgagcagctatcaagcgaggctcttgaagctgcacggatctgtgcaaacaaatatatggtgaagtcatgtgggaaagacggctttcatatacgggtacgcctgcaccccttccacgtgatccggattaacaagatgctatcctgtgccggagctgatcggctgcagactggcatgcgcggtgcctttggtaagcctcagggcaccgttgctagggtgcatatcggacaggtcattatgtcaatccggacaaaactgcagaataaggagcatgtgatcgaggctctgaggcgtgcaaagttcaagtttcctggacgacagaagattcatatctccaagaaatggggtttcaccaagtttaatgccgatgaatttgaggacatggtggctgagaagaggctgattccagacggatgtggtgtgaaatacattcccaaccgaggacctctcgataagtggcgcgctttacactcctag

SEQ ID NO: 238957 - DNA, 645 bp, synthetic construct
  misc_feature 1..645: note = Description of Artificial Sequence: Synthetic coding sequence
  source 1..645: mol_type = other DNA
atggggagaaggcccgctcggtgctaccgttattgcaaaaataagccctaccctaaaagtcgtttctgccggggtgtaccagatgcgaagatccgtatttttgacctggggagaaagaaggccaaggtcgacgagtttccgctctgtggtcacatggtctccgatgaatacgagcagctgagctctgaggctctggaggccgctcgcatctgcgccaataaatacatggttaagtcttgcggcaaagatggcttccacatccgggtgagattacatccctttcacgtcatacgaatcaataagatgctctcttgcgctggcgctgatagattgcagactggtatgcgcggagctttcgggaagccacagggaactgttgccagggtacacattgggcaggtcattatgtccatacggaccaagctccagaataaggaacacgtgatagaggccttgagaagagcaaagttcaagtttccgggtagacaaaagatacacatatcaaagaaatgggggtttacaaaattcaatgccgacgaattcgaagatatggtggctgagaagcggctgatccccgatgggtgtggcgtgaaatacattccaaatcgtggccctttggacaagtggcgtgcgctgcattcatag

SEQ ID NO: 238958 - DNA, 645 bp, synthetic construct
  misc_feature 1..645: note = Description of Artificial Sequence: Synthetic coding sequence
  source 1..645: mol_type = other DNA
atgggacgcagacccgcaagatgctacaggtattgcaagaataaaccctaccctaagagcaggttctgtaggggggtacctgacgctaaaattcggattttcgatctgggtaggaagaaagccaaggtcgacgagtttcctctgtgcggccacatggtctctgacgaatacgagcagcttagttccgaggcgcttgaggctgcacggatttgcgctaataaatatatggtaaagagctgcgggaaagacggatttcatataagagtgcgccttcacccatttcatgtaattcgaatcaataaaatgctcagctgtgcaggggctgaccggctgcaaacgggcatgcggggagccttcggcaagccgcagggtacagtcgccagggtgcacattggccaggttatcatgtctatacggactaagctccagaataaggagcatgtcatcgaggcactaaggcgagcaaaattcaagttcccaggccgtcagaagatccatatcagtaaaaagtgggggttcacgaagttcaatgctgatgaattcgaggacatggtagctgagaaacgcctgattcccgatggatgcggggtaaaatacatccccaacaggggacccttggataagtggcgcgctctacattcttag

SEQ ID NO: 238959 - DNA, 606 bp, synthetic construct
  misc_feature 1..606: note = Description of Artificial Sequence: Synthetic coding sequence
  source 1..606: mol_type = other DNA
atgggacgacggcctgcgcgttgctatcgttactgtaagaataaaccataccctaaatccagattctgcaggggtgttccagatgccaagatccggattttcgatcttggacgaaaaaaagctaaagttgacgagtttcctctgtgcgggcacatggtgtctgacgagtacgaacaattgagctctgaggcgctggaggctgcccgtatttgcgctaacaagtacatggttaagtcctgcggtaaggacggctttcacatcagagtgagattacacccctttcacgtgatccgtatcaataagatgcttagctgcgccggtgccgataggcttcaaacagggatgagaggggctttcggtaagccacaggggacagtcgcacgcgtccacatcggtcaggtaattatgtcaattaggaccaagctgcagaataaggaacacgtgatcgaagctctccggagggctaagtttaagttccccggaagacagaaaattcacatatccaagaagtggggattcactaaatttaacgccgacgaattcgaggacatggtggcggagaagagattaatccccgatgggtgcggtgttaaatacatcccctag

SEQ ID NO: 238960 - DNA, 327 bp, synthetic construct
  misc_feature 1..327: note = Description of Artificial Sequence: Synthetic coding sequence
  source 1..327: mol_type = other DNA
cctaagtctcggttctgcagaggagtccccgatgcaaagatccgaattttcgacttaggacggaagaaagctaaagtggatgaatttccgctgtgtggccacatggtcagcgatgaatatgagcaactgagcagcgaagcccttgaggccgctcgcatttgtgcaaataaatatatggttaaatcgtgcggaaaagatggcttccacatccgagtgaggctgcatccatttcatgtcatccgaataaacaagatgttatcttgcgcaggggcagaccgccctacacttttatgccaatgttgggaaacctccaggaacacttcatag

SEQ ID NO: 238961 - DNA, 546 bp, synthetic construct
  misc_feature 1..546: note = Description of Artificial Sequence: Synthetic coding sequence
  source 1..546: mol_type = other DNA
atgggtcgcaggccagcgcgttgttaccgctactgtaagaacaagccataccctaagagcagattttgtcgtggcgtgcccgacgctaagatcagaattttcgatctgggcaggaaaaaggccaaggtagacgaattccctctgtgtggccatatggtgtctgacgagtatgaacagcttagtagcgaagcgctggaggcagccagaatctgtgctaataagtacatggtgaagtcctgtggaaaggatggctttcacataagagtgcgcctccatccatttcatgtcatcagaattaataagatgctcagctgcgcaggggctgatcggtccacatcgcagaggtcaggcgctagtccatcatcgatgctcatgaatctcaagacctggtggctgaagtccggctcaagccagatggcagtcggctcgagcaccagtcctatcgtggcactatggacgtcgggaggaccatgcacccatgaggggtttcagtgcgccgcaccgctactaattctgacaaacaagttttactttctgagcacatag

SEQ ID NO: 238962 - DNA, 537 bp, synthetic construct
  misc_feature 1..537: note = Description of Artificial Sequence: Synthetic coding sequence
  source 1..537: mol_type = other DNA
atggcacaggatcagggagaaaaggagaacccaatgcgagaactgagaattagaaagctgtgcctgaatatctgcgttggtgagagtggagacaggctcacgagagccgcaaaggtgctcgaacagcttactggacagacccccgtattctccaaagccagatatacggtgaggtcatttggcattcggaggaacgagaaaatagcggttcactgcactgtgcgcggagcaaaagcagaagagattttggagaaggggttgaaagtcagggaatacgaactgcgtaagaataacttctctgataccggaaattttggcttcgggatacaagaacacattgatcttggaataaagtatgaccctagcatcgggatttacgggttagacttctatgttgttctgggccgaccgggatttagtattgctgataaaaaaagacggacaggatgcatcggcgcaaagcataggatttcaaaggaggaggccatgagatggttccagcagaagtacgatgggattatactgcctggtaaatag

SEQ ID NO: 238963 - DNA, 396 bp, synthetic construct
  misc_feature 1..396: note = Description of Artificial Sequence: Synthetic coding sequence
  source 1..396: mol_type = other DNA
caggatcaaggcgaaaaagagaaccccatgcgggaactgaggattcgtaaattgtgcctgaatatctgcgtgggcgaatccggagatcgcttgaccagagccgctaaggtgctggaacaattaacaggtcagacaccagtcttctctaaggccaggtacaccgtgcgcagttttggcatcagaagaaatgagaagatagccgtccattgtacggtgagaggagcgaaggctgaggaaatacttgaaaaaggcctgaaggtcagggaatacgaactgcggaaaaacaatttcagcgacacaggcaactttggcttcgggattcaggagcatattgacttgggaatcaagtatgacccttcaattggcatctatggcttagatttctatgttgtttag

SEQ ID NO: 238964 - DNA, 525 bp, synthetic construct
  misc_feature 1..525: note = Description of Artificial Sequence: Synthetic coding sequence
  source 1..525: mol_type = other DNA
caagatcaaggagagaaggagaatccaatgagagagcttcgcattcgaaagctttgcttgaacatctgcgttggcgaaagtggagaccgactgactcgcgctgcaaaagtgctggaacagttgactggccaaactcctgtctttagcaaagctaggtacacagttagatcctttgggattcgcagaaacgaaaaaattgcggtgcactgcactgtcagaggcgctaaggcggaagaaatcctggaaaaggggctaaaagtcagggaatacgaactgaggaaaaacaattttagtgacaccggtaattttgggttcggcatccaggaacacattgaccttggcattaagtacgacccgtcaatcggcatttatgggctggatttctacgtggtgctgggcagacctggcttttcgattgccgacaagaagcgcaggacggggtgtatcggagccaaacatcggatttccaaggaggaagctatgagatggtttcagcaaaaagtcaagctgatctacctgaaatag

SEQ ID NO: 238965 - DNA, 498 bp, synthetic construct
  misc_feature 1..498: note = Description of Artificial Sequence: Synthetic coding sequence
  source 1..498: mol_type = other DNA
atgccacctaagttcgatcccaatgagattaaggtcgtgtatctgagatgtacggggggagaagttggagccactagtgcattagcgccaaaaattgggccactcgggctgtctcctaaaaaagtgggtgacgatattgctaaagcaactggggactggaaaggactgcgaatcactgtgaaactgactattcagaatcggcaggcccagattgaagtcgtaccatcggcaagtgccttaattatcaaggcactgaaagaaccacccagggataggaaaaagcagaaaaatattaagcacagcggaaatatcaccttcgacgagatcgttaatatagcaagacagatgaggcaccgcagcctggccagggaacttagcggcactataaaagaaattttgggtaccgcacagtccgtggggtgtaacgtggacggtcgacatccccatgacatcatagatgatattaattcaggcgcagtagaatgccccgcaagttag

SEQ ID NO: 238966 - DNA, 399 bp, synthetic construct
  misc_feature 1..399: note = Description of Artificial Sequence: Synthetic coding sequence
  source 1..399: mol_type = other DNA
atgccacctaagttcgaccctaatgaaatcaaagtggtctatttacgctgtaccggaggcgaagtcggggcaaccagcgcactcgctccaaagattggaccactaggcctcatcgaggtcgtgccgtcggcctctgctcttattattaaagcattaaaagagcctcccagagacaggaaaaaacagaaaaatatcaaacactccgggaatattacctttgatgaaatagtgaacatcgctcgtcaaatgcgccaccgaagcctggcgagggaattaagcggcactataaaggagatccttggaacagctcagagtgtaggatgtaacgttgacggcagacacccccacgacattattgatgacattaactccggcgcagtagaatgtccagcaagttag

SEQ ID NO: 238967 - DNA, 636 bp, synthetic construct
  misc_feature 1..636: note = Description of Artificial Sequence: Synthetic coding sequence
  source 1..636: mol_type = other DNA
atggcaccctctcggaacgggatggttctaaaaccccacttccacaaggactggcaacggagagtggccacctggttcaaccagccggctcggaagattagaagaagaaaggcaaggcaggcgaaagccaggagaatcgccccacggccagcatctgggcctataaggccaattgtgcgatgccctaccgtgcgctaccacactaaggtgcgcgctggacggggattttccctggaggagctgagagtggctggtattcacaagaaggttgcacgtaccatagggatctcagtggatccaagaagacgcaacaagagcactgagagcttgcaagccaacgtgcagaggttaaaggagtatagatccaaattaatcttgttcccacgtaaacccagtgccccaaagaagggggacagctcagccgaagaactcaaactggctactcagttaactggtccggttatgcctgtcaggaacgtgtacaagaaggagaaagcacgggtaatcaccgaggaggaaaaaaacttcaaggcctttgcttccctgcgtatggcacgggcaaacgcgcgtctgttcggcatcagggcaaagagggctaaagaagcggctgaacaggatgtggaaaagaaaaaatag

SEQ ID NO: 238968 - DNA, 636 bp, synthetic construct
  misc_feature 1..636: note = Description of Artificial Sequence: Synthetic coding sequence
  source 1..636: mol_type = other DNA
atggccccttctagaaatggtatggtgctgaagcctcatttccataaagactggcagcgcagggtagccacatggttcaatcagcctgcacgtaagataaggagacgtaaagccagacaggcaaaagcacgcaggatagcccctcggcctgccagtggacctatccgaccgattgtgcgctgtccaaccgttaggtaccacactaaggtccgggcaggcagagggttctcgcttgaagagttgcgcgtcgctggtattcacaagaaagtggcacgcacaattggcatctccgtggatccacggagacggaataagtctaccgagtctctacaggccaacgtgcaaaggctaaaagaatacagaagtaagctgatcttgttccctcgcaaaccatcggccccaaagaagggggattccagtgccgaggagctcaaactcgctacccaactgactggacctgtgatgcccgtgcgcaacgtgtataaaaaggagaaagcgagagtaatcaccgaagaagaaaaaaacttcaaagcttttgcctcccttagaatggccagggccaacgcccgtctctttggcataagggcaaagcgcgctaaggaggcagcagagcaggatgtggagaagaaaaaatag

SEQ ID NO: 238969 - DNA, 495 bp, synthetic construct
  misc_feature 1..495: note = Description of Artificial Sequence: Synthetic coding sequence
  source 1..495: mol_type = other DNA
atggccccatctagaaatggcatggtgctgaaaccgcacttccataaagattggcagcgcagggtcgcaacctggttcaatcaacccgctaggaagatccgccgacggaaggctcgacaagcgaaggcccgtagaattgcccctagacctgctagtgggccaatacgccctattgttagatgtcccactgttaggtaccatactaaagtgcgggcaggacggggattctcgctggaagagcttcgtgttgctgggatccacaaaaagggcgattcctctgccgaggaattgaagctggcaacacagctgacggggccagtgatgcccgtacgaaacgtctataagaaagagaaagcccgagtaataaccgaagaagagaagaatttcaaggcttttgcttcactgcggatggcacgggctaatgccaggctttttggcatacgagccaagcgggcaaaggaagccgcagaacaggatgtggaaaagaaaaaatag

SEQ ID NO: 238970 - DNA, 615 bp, synthetic construct
  misc_feature 1..615: note = Description of Artificial Sequence: Synthetic coding sequence
  source 1..615: mol_type = other DNA
atgggtgcctataaatacatacaagaactgtggaggaagaagcagtccgacgttatgaggttcctcctgcgggttagatgctggcagtacagacagctgtcagctctacaccgggctccccgacccactcgccctgataaagccaggcggctcgggtacaaagcaaagcaaggatatgtcatctatcgaatccgagttcgtcgaggtggccgaaagcgtcctgttcccaagggagccacctatgggaaacccgttcaccatggggtaaatcaattaaaattcgcaagatcccttcagagcgtggccgaagagagggcagggaggcattgcggagcacttagagtcctgaacagctactgggtgggagaggattcaacttacaaatttttcgaagttattctgatcgatccattccataaggccattagacgcaatcccgatacacagtggatcaccaaacccgtgcacaaacaccgcgagatgagggggctgacaagtgctgggagaaagagcaggggcctcgggaagggccacaagttccaccatacaattgggggttcgaggagagctgcctggaggaggcggaacaccctccagctccatcggtataggtag

SEQ ID NO: 238971 - DNA, 615 bp, synthetic construct
  misc_feature 1..615: note = Description of Artificial Sequence: Synthetic coding sequence
  source 1..615: mol_type = other DNA
atgggtgcctacaaatacattcaagagctgtggaggaagaaacagtctgacgtgatgaggtttctactcagagtcagatgttggcagtacaggcagctctctgccctgcatcgcgcacctaggcctaccagaccagataaggccagacgattggggtacaaggccaagcaggggtacgtcatttaccgcatcagggtcagaaggggtggtcggaagagaccagtgcctaagggcgctacatacggcaagccagtacatcacggcgtgaatcaactcaagttcgctcggagccttcaatcagtagctgaggagcgtgctggtcggcattgtggcgctctgcgagtgttgaactcatattgggtcggcgaagattcaacttacaaatttttcgaggtgatcctgatcgatccttttcataaggccattcgacgcaacccagacactcaatggatcacgaagcctgttcataaacatagagagatgagaggattgacaagtgccggaagaaagtcacgcggtctgggtaaaggccacaagttccatcatacaattggtgggtctagacgagcagcgtggcgcaggcgcaacacattacaactccaccgataccgatag

SEQ ID NO: 238972 - DNA, 528 bp, synthetic construct
  misc_feature 1..528: note = Description of Artificial Sequence: Synthetic coding sequence
  source 1..528: mol_type = other DNA
atgggtgcatataagtatattcaggagctgtggcggaagaagcagtccgatgtgatgagatttctcctgcgagttagatgttggcagtacagacagctaagtgctctgcatcgggcaccaaggccaactcggcctgataaggcaagaagactgggttataaggccaaacagggatacgtgatctaccgcatcagagttaggaggggcggacggaaacgccctgtacccaagggtgctacatacgggaagcccgtccaccatggcgtgaatcagctgaaattcgcccgttcccttcagagtgtggcagaggtcaatgccggacgccactgcggtgccctacgagttctgaattcttactgggttggtgaagattccacctacaagttcttcgaagtcattctgatcgacccgttccacaaagctatcagacggaatcccgacactcagtggattacaaagcccgtgcacaaacaccgcgagatgcggggtctgacctcagccggacgcaagagccgtggtctcgggtag

SEQ ID NO: 238973 - DNA, 615 bp, synthetic construct
  misc_feature 1..615: note = Description of Artificial Sequence: Synthetic coding sequence
  source 1..615: mol_type = other DNA
atgggggcatataaatatatacaggaactctggaggaagaaacagagcgatgtcatgcggttcttactacgcgttaggtgttggcagtacagacagctgtctgctctgcacagagctcccagacctaccagacccgataaggcccgtagattgggctataaggccaagcaggggtacgtaatctaccgcattagggtgcgcaggggcggacgtaagcgcccagtcccgaagggagcaacttacgggaagcctgtgcatcacggcgtgaatcagctgaagtttgcccgatcactgcagtccgtagcagaagaaagggctggtcggcactgtggagccttgagagttctgaattcctactgggtcggagaggattctacctacaagttttttgaagtgatcctcattgaccccttccacaaagccataagacgcaaccctgatactcagtggatcacaaagcccgtacataagcacagagagatgcgagggttgacttccgccggacgtaagagtagaggcctcgggaagggacacaagttccatcacaccatcggagggagcaggagagcagcctggagacggaggaataccctgcaactgcacagatacaggtag

SEQ ID NO: 238974 - DNA, 615 bp, synthetic construct
  misc_feature 1..615: note = Description of Artificial Sequence: Synthetic coding sequence
  source 1..615: mol_type = other DNA
atgggggcttataagtatatccaggaattgtggagaaagaagcagtccgacgtgatgcgtttcctgcttcgggtacgttgctggcagtatcggcagctgtcagcgctgcacagggcaccgagacccacccggcctgacaaagccagaagactgggatacaaggcaaagcaaggatacgtcatatatcggatcagagtccggagaggaggcaggaagaggcctgtgcctaaaggcgcaacctacggcaagcccgtacaccacggggtgaaccagcttaaattcgctcggagtcttcaatccgtcgccgaagagcgtgccggacgccattgcggcgcactgagggtgctgaacagctactgggtgggcgaagactctacctataagttcttcgaggtcatcctaatcgacccctttcacaaagctatacgccgtaacccggacacacagtggattacaaagcccgtgcacaaacacagagagatgcggggattaacaagcgctggacggaagtcacgtggtctcggtaagggccataaattccaccacacaatcggagggagcagacgcgcagcctggagaaggcggaacactctacagttgcatcgatatagatag

SEQ ID NO: 238975 - DNA, 402 bp, synthetic construct
  misc_feature 1..402: note = Description of Artificial Sequence: Synthetic coding sequence
  source 1..402: mol_type = other DNA
atgggggcttacaaatacatccaagagttatggcgcaaaaaacagtccgatgttatgcgatttttactaagggttcgatgctggcagtatcggcaactgagcgcccttcaccgcgcaccaaggcccacaagacctgataaggcaagaaggttggggtataaagccaagcaaggatatgtgatctatcggatccgcgtccggagaggtgggagaaaacggcctgtccccaaaggggctacatatggaaaacccgtgcatcacggtgtgaatcaacttaagttcgccaggagcctgcagagcgtggccgaggagcgggcaggaagacactgcggggctttgcgtgtgctcaattcctattgggtcggcgaagacagcacatataaattcttcgaggtcatctag

SEQ ID NO: 238976 - DNA, 525 bp, synthetic construct
  misc_feature 1..525: note = Description of Artificial Sequence: Synthetic coding sequence
  source 1..525: mol_type = other DNA
atgggtgcttacaagtatatccaggaactttggagaaaaaaacaaagcgacgtgatgcgatttttgctgagggtgaggtgttggcagtatcggcagctaagtgccttgcaccgggctccgcgtcccactagacccgataaagcccgtcggttagggtacaaggcgaagcagggctatgtaatctatcgcatccgggtgcggaggggcggaaggaagaggcccgtgcccaagggggctacctacggaaaacctgtgcatcacggagttaaccaacttaagttcgcacgttccttacagtcggtcgcagaggaacgagctggaagacattgcggggcactgcgggtgctgaattcttactgggtgggcgaggattccacctataaattcttcgaggtcattctgattgacccatttcataaggccatccggaggaatcctgacacccagtggattaccaaaccagtgcataagcacagagaaatgagaggcctgacatctgccggacgaaagtccagaggattatag

SEQ ID NO: 238977 - DNA, 615 bp, synthetic construct
  misc_feature 1..615: note = Description of Artificial Sequence: Synthetic coding sequence
  source 1..615: mol_type = other DNA
atgggtgcctacaagtacattcaagagctatggcgcaaaaaacagtccgatgtaatgagattcctgctcagggtgcgctgctggcagtatcggcagttgtcggctttgcatagggcacccaggcctacgaggccagacaaggcccgtcgcctgggatacaaggctaagcaggggtatgtgatttatcgcattagggtgagacgcggaggcaggaaacggccagtccccaaaggcgcaacttatgggaagcccgtgcaccatggtgtcaaccaactgaaatttgcccgatctcttcagtcagtcgcagaggaacgcgcagggagacactgtggagcattgcgggtgctaaattcttactgggtgggcgaggatagcacatataagttctttgaagtaatacttatcgatccatttcataaggcaataaggagaaaccccgatactcagtggatcacgaagcccgtgcataagcatcgggagatgcgtggtttgacctctgctggtcggaagtcccggggtttgggaaagggccacaaatttcatcacactatcggaggatcccgtagggccgcatggcggagacggaacacgctccagctgcaccgatacaggtag

SEQ ID NO: 238978 - DNA, 180 bp, synthetic construct
  misc_feature 1..180: note = Description of Artificial Sequence: Synthetic coding sequence
  source 1..180: mol_type = other DNA
atgggcgcatacaagtatattcaggagctgtggcgaaagaagcaaagtgacgtaatgagattcctactgagggtacgatgttggcagtataggcagctgagcgcactccaccgcgctcctagaccaacaagacctgataaagccaggaggcttggatacaaagcaaaacaaggaacctag

SEQ ID NO: 238979 - DNA, 438 bp, synthetic construct
  misc_feature 1..438: note = Description of Artificial Sequence: Synthetic coding sequence
  source 1..438: mol_type = other DNA
atgggcgcttataaatacatccaggagttgtggcgcaagaagcagtccgacgtaatgcgtttcctgctgcgagtccgatgctggcagtatcgccaacttagcgccctccatagggccccaaggccaactcgccctgacaaggcaaggcgtctggggtataaggctaaacaggggtacgtgatttatcgaattcgagttaggcgaggtggcagaaagagacccgtgcccaaaggagccacttatggcaaacctgttcaccacggcgtgaaccaactgaagtttgcgagatcgcttcagtctgtagctgaggagagggccggaaggcattgtggcgctctaagagttctgaactcttactggatggagtcgcattctcactccggaggatccgcagtgggccagtcccgccttacagccacctcagtcagccgggtgtag

SEQ ID NO: 238980 - DNA, 495 bp, synthetic construct
  misc_feature 1..495: note = Description of Artificial Sequence: Synthetic coding sequence
  source 1..495: mol_type = other DNA
atgggcgcttataagtatatccaagaactctggaggaagaagcaaagtgacgtgatgcggtttctgctgcgagttagatgctggcagtaccgtcagctgagtgccctacatcgagcaccaaggcccacaagacccgataaggccaggaggctgggatataaggccaaacagggttacgtgatctacaggatcagagtgaggcgaggtgggagaaaacgcccagtacctaagggcgctacttacggtaaacctgtgcaccacggcgtcaatcagttgaaattcgcaagatccctgcagtccgttgccgaggagcgtgccggaaggcattgtggtgctcttagagtgcacaaacacagggaaatgagggggctcacatcagccggaaggaaatctagaggcttaggaaaaggccacaagttccatcacacaatcgggggttcacggagagctgcgtggcgccgacgtaacactcttcagctgcacaggtaccggtag

SEQ ID NO: 238981 - DNA, 441 bp, synthetic construct
  misc_feature 1..441: note = Description of Artificial Sequence: Synthetic coding sequence
  source 1..441: mol_type = other DNA
atgcacattcgcaaggcaactaagtacctgaaggatgtgacattgcagaaacagtgtgtgccatttcgcaggtacaatgggggtgtgggtcggtgtgcccaggccaagcagtggggatggacacaggggaggtggccgaagaagtccgccgaatttttacttcatatgctcaaaaacgccgaatcaaacgcagaactgaaaggattggacgtggatagtctggttatcgagcacatccaggtcaacaaggcaccgaagatgcgcagacgaacctatcgcgcacatggcagaattaacccctacatgagtagtccttgtcacatcgaaatgattctgactgagaaagagcaaatcgtgcctaaaccagaagaggaagtggcccagaaaaagaaaatttcccaaaaaaaactgaaaaaacaaaagcttatggccagggaatag

SEQ ID NO: 238982 - DNA, 555 bp, synthetic construct
  misc_feature 1..555: note = Description of Artificial Sequence: Synthetic coding sequence
  source 1..555: mol_type = other DNA
atggtccggtatagtctagatcctgaaaaccctaccaagtcatgcaagagtagagggagtaatctgagggtacactttaaaaacacccgtgagaccgcccaggctatcaaggggatgcatataaggaaagccaccaagtatctcaaagacgtgacgttacagaaacagtgcgtaccctttcggcgttataatggcggagtgggcaggtgtgcccaagcaaagcagtggggctggactcaagggaggtggccaaagaagagcgcagaatttttgctccatatgctcaagaatgcggaatcaaatgctgagttgaaaggactcgacgtagactctctggtgatcgagcatatacaggtcaataaagctcccaagatgcgcagacggacgtatcgggctcatggaagaattaacccctacatgtctagcccttgccacatcgaaatgatattgacagaaaaggagcagatagtaccgaaaccagaagaagaagtagctcagaaaaagaaaatttctcagaagaagctgaagaagcaaaagctgatggctagggaatag

SEQ ID NO: 238983 - DNA, 555 bp, synthetic construct
  misc_feature 1..555: note = Description of Artificial Sequence: Synthetic coding sequence
  source 1..555: mol_type = other DNA
atggttagatactctctcgaccctgagaatccaacgaagtcgtgtaaaagccgaggctcaaaccttagagtgcactttaaaaatactagggaaaccgcgcaggccatcaaaggcatgcatatacggaaggcaacaaagtacctcaaagacgtgaccttacagaaacagtgcgtacccttcagaaggtataatggtggtgtcggaagatgtgcccaagctaaacagtggggctggacacagggacgctggccaaagaagtcagccgaattcttgctgcatatgctgaaaaacgccgaatccaatgccgagctgaaaggtctggatgttgactccttagtaatagaacacatacaggtcaacaaagctccaaagatgcggcgacgaacttatagggcccatggcagaatcaacccctacatgtctagtccttgtcacattgaaatgattttgaccgaaaaggagcagatcgttcctaagccggaagaggaggtcgcccaaaagaaaaaaatctctcagaaaaagttgaaaaaacagaagctgatggccagggagtag

SEQ ID NO: 238984 - DNA, 573 bp, synthetic construct
  misc_feature 1..573: note = Description of Artificial Sequence: Synthetic coding sequence
  source 1..573: mol_type = other DNA
tgaccccagggagtcgatattaggcacaataaagatcgcaaagtcagaaggaaggaaccaaaatcccaggatatctacctgcgactactggtgaagctgtaccgcttcttagcacgaagaaccaacagcacctttaaccaggtggtcttgaagcgattgtttatgtctcggaccaaccgtcccccactcagtttgagccgcatgatccgaaaaatgaagctacctgggagggagaacaaaaccgctgtcgtggtgggtactataaccgatgatgttcgagtccaggaggtcccgaaattgaaagtgtgcgctctgcgagtgaccagtcgagctaggtcccggattctccgcgcagggggaaagattcttacctttgaccagctcgctctagactctccaaaaggatgcggaactgtgttactgtcaggaccccgaaagggacgcgaagtttacaggcattttggcaaagcgcctggtaccccgcacagccacacaaaaccttacgtgaggagcaagggcaggaagttcgaaagggctcgcggtcgtcgggcttctaggggatacaagaactag

SEQ ID NO: 238985 - DNA, 408 bp, synthetic construct
  misc_feature 1..408: note = Description of Artificial Sequence: Synthetic coding sequence
  source 1..408: mol_type = other DNA
atgggtgtcgatatcagacacaataaggaccgcaaggtgcgccgaaaggagcctaaatcccaagacatctaccttcgtttactggtgaagctgtatcgctttttagctagacgcacaaattcaacgtttaaccaagttgtgctgaagagactctttatgtctaggactaacaggcccccactgtcactctcaagaatgatacgtaaaatgaaactccctggtcgggagaataagactgccgtggtggtaggcacaattaccgatgacgttagggtgcaagaggtcccgaagttgaaggtgagctggcgaggtcttggcaggcccatcaggcccctcctgtattgtgccgtgctgtgttgtgctgtgttgtgttgtttggtgcacccgcagagttgccataggtggtag

SEQ ID NO: 238986 - DNA, 567 bp, synthetic construct
  misc_feature 1..567: note = Description of Artificial Sequence: Synthetic coding sequence
  source 1..567: mol_type = other DNA
atgggcgtggatataagacacaacaaagaccggaaggtgaggcggaaggagcctaaatcccaggatatctacttgcggttgctggtgaaactctacaggttcttggcaaggagaactaattctactttcaaccaggtggtgctgaaacggttatttatgagcaggaccaacaggcccccactctctttgtccaggatgatcagaaagatgaaactccctgggagagagaacaagacagccgtcgtggttggaactatcactgatgacgtgcgtgtgcaggaggtgcccaaactgaaggtgtgtgcgctgagagttactagtcgcgcacgcagccgcatacttcgcgcaggagggaagatcctcaccttcgatcaactcgcccttgactctccaaagggttgtggaacagtgctgctgtctggccctagaaaaggacgtgaggtgtaccggcactttgggaaagcccctgggacgccccacagtcacacgaaaccctatgtcaggtcaaaaggaaggaagttcgaacgcgcacggggtagaagagcaagccgagggtacaaaaactag

SEQ ID NO: 238987 - DNA, 480 bp, synthetic construct
  misc_feature 1..480: note = Description of Artificial Sequence: Synthetic coding sequence
  source 1..480: mol_type = other DNA
atgctctatagatttctggccaggcgtaccaactccacctttaatcaagtcgtgttgaaacggttatttatgagtagaactaatcgaccacctctgtccctatcacggatgattcgtaaaatgaagctgccgggtagggagaacaagactgcagtggtggtcgggaccatcacggatgacgtcagggtgcaggaggttccgaaactgaaggtgtgtgcgcttagagttaccagccgggcacgttcaagaatcttacgggcagggggaaaaatcctcacattcgatcagctggctttagacagccccaagggatgcgggactgtactcctgtctggccctcgaaaagggagggaggtgtatcggcacttcggcaaggctcctggcaccccacactcccacacgaagccctatgtgcggtctaaggggaggaaatttgagcgagcaagaggtcggagggcgtcacgtggctacaaaaactag

SEQ ID NO: 238988 - DNA, 795 bp, synthetic construct
  misc_feature 1..795: note = Description of Artificial Sequence: Synthetic coding sequence
  source 1..795: mol_type = other DNA
atgaatatcttgccaaagaagtcgtggcacgttaggaacaaggataacgtggctcgcgtgcgacgtgatgaggcccaggcccgtgaagaagaaaaggagagggaaaggcgtgttctgctggcgcagcaggaagccagaactgagtttcttcgaaagaaagccaggcatcagaactctctgcctgagctggaggctgcggaggccggtgccccagggtccggaccggtggatctgttccgggaactgctcgaggaaggcaagggcgttataagggggaataaggagtatgaagaggagaaaagacaagaaaaagagaggcaggaaaaggcccttggaatcctgacctacttgggccagtccgcagcagaagcgcaaactcagcctccctggtaccagcttccccctggtcgcggaggacccccacccggaccagcacccgatgagaagatcaaaagccggcttgaccccctccgagagatgcagaaacacctgggcaaaaaacgccagcacggaggggacgagggatccagatctcggaaggaaaaggaagggagcgaaaagcaaagacccaaggaacctccctccctcgatcaactgcgggcagagagattgagacgggaggccgctgagagatcaagagccgaagcactgctggccagggtccaggggagggccctccaggagggccaacccgaggaggatgagacggacgaccgtaggcgcagatataattctcagttcaatccccagctggctcgcagacctcggcagcaggacccccacctgacccattag

SEQ ID NO: 238989 - DNA, 465 bp, synthetic construct
  misc_feature 1..465: note = Description of Artificial Sequence: Synthetic coding sequence
  source 1..465: mol_type = other DNA
atgaaggcatccgggacacttcgtgaatacaaggtggtcggtcgatgcttgcccacacctaagtgtcacactccaccactttaccgcatgagaatttttgctcctaatcacgtcgtcgcaaagtcaaggttttggtacttcgtgtcccaactcaaaaagatgaaaaagtcttccggagaaattgtctactgcggccaggtcttcgagaaaagtccgctgagggtaaaaaattttggaatatggcttagatatgactccaggtctgggacccacaacatgtatcgggagtaccgcgacctgacaacggcaggggcagtgacacagtgttaccgcgatatgggggctcgccaccgcgctagggcacattctattcagattatgaaagtggaggaaattgccgcttccaagtgtcgacggcagcacaaacccaggttcacaaccaagcggcctaacaccttcttttag

SEQ ID NO: 238990 - DNA, 1278 bp, synthetic construct
  misc_feature 1..1278: note = Description of Artificial Sequence: Synthetic coding sequence
  source 1..1278: mol_type = other DNA
atgggaggtggggatctcaacctgaagaagtcttggcaccctcagacgctgcgaaatgtggaaaaagtgtggaaagctgaacagaagcacgaggcagaacgaaagaaaattgaggaattacagagagaactaagggaggagcgtgctagagaagagatgcagcgctacgctgaggatgtgggtgctgttaagaagaaggaagagaagctcgactggatgtaccagggccctggcggaatggtaaatagagacgagtatctgctgggcagacctattgacaaatatgtatttgagaagatggaggagaaagaggccggatgcagttctgaaacagggctcttgcctggtagcattttcgcaccctctggggctaacagcctgctcgatatggcctccaaaattcgggaagatcccctgtttatcattcgcaagaaggaagaagaaaagaagagggaggtgctgaacaaccccgtcaagatgaaaaagatcaaagagctgcttcagatgagcctcgagaagaaggaaaagaaaaaaaagaaagagaaaaagaaaaagcacaagaaacacaaacaccggagttcgagctccgatagaagttcctcagaagatgagcactcagctggcagaagccagaaaaagatggccaactcctctcccgtcctgagcaaagtcccgggatacggactccaggtacggaatagtgatagaaatcagggcctgcaggggccactgaccgctgagcagaagcgaggccatggcatgaaaaatcacagtagaagtcgatctagttcccattctcctccacgacacgcaagcaaaaaaagtacccgcgaggccggatcccgcgatcgtcgatctcgctcactcggtcggcgttcaaggtcccccaggccctctaaacttcataattctaaggtgaaccgaagggaaaccggtcaaacgaggagtccgagcccgaagaaagaagtgtatcagcgccgacacgcacctggttacactcgtaagctgtctgcggaggagctggagaggaaaagacaggagatgatggagaacgcaaagtggcgggaggaggaacgtctcaacatccttaagcgacacgccaaggatgaagaacgcgaacagaggctggaaaaacttgattcaagggacggcaagtttattcaccgtatgaaactagaaagcgctagcacaagctctctggaggatagggtgaagagaaacatctactccttacagagaaccagtgtcgctcttgagaaaaactttatgaaaaggtag

SEQ ID NO: 238991 - DNA, 483 bp, synthetic construct
  misc_feature 1..483: note = Description of Artificial Sequence: Synthetic coding sequence
  source 1..483: mol_type = other DNA
atgaccaacacaaagggaaagcgtcgtggcactagatatatgttcagtcgaccattccgcaagcatggcgtagtgcccctcgctacctacatgcggatttataagaaaggggatatcgtggatatcaaaggtatgggcacggttcagaaggggatgccccacaagtgctatcacgggaaaacagggagagtgtacaacgtaactcaacacgcggtcggaattgtggtcaacaagcaggtgaaagggaaaattctcgccaaacgcattaacgtgcggattgaacacatcaagcacagcaagagccgggattcttttctgaagagagtgaaggaaaacgaccaaaaaaagaaagaggccaaggagaagggtacttgggtgcagctcaaacggcaacccgcacctccgagagaggcacattttgtccgcacaaatgggaaggagcccgagctcctggaacctatcccctatgagttcatggcctag

SEQ ID NO: 238992 - DNA, 483 bp, synthetic construct
  misc_feature 1..483: note = Description of Artificial Sequence: Synthetic coding sequence
  source 1..483: mol_type = other DNA
atgacgaataccaagggtaagagacgaggcactcggtacatgttttcaagaccttttcgaaagcacggggtggttccacttgccacatacatgaggatatacaagaagggagatatagtcgatatcaagggaatgggcacagtccaaaaaggcatgccgcacaaatgctaccatggaaagactggaagggtgtataatgtcacgcagcatgccgtcggaatcgtcgtgaataagcaagtcaaaggcaagattctcgctaagcgtatcaatgttagaatcgagcatatcaaacactctaagtcacgggactccttcttaaagagggttaaggaaaatgaccaaaaaaagaaagaggctaaagaaaaaggcacctgggttcaattgaaaaggcagccagcgcctccacgcgaagctcacttcgtgaggacgaacggcaaggagcccgagcttctcgagcctatcccttatgaatttatggcctag

SEQ ID NO: 238993 - DNA, 483 bp, synthetic construct
  misc_feature 1..483: note = Description of Artificial Sequence: Synthetic coding sequence
  source 1..483: mol_type = other DNA
atgactaacaccaaggggaagcgccgagggacacgctacatgttcagccggccatttagaaaacacggggtcgtccccctagctacatacatgaggatctacaaaaagggcgacatagttgacattaaggggatgggcactgttcagaagggcatgccccataagtgttaccatggaaaaactggtcgggtgtacaatgtgactcagcacgccgtcggcattgttgttaataagcaagtgaaaggcaagatcctagccaaaaggattaatgtgcgtatcgagcacattaaacacagcaaatcccgtgactcctttctgaagagggtcaaggaaaatgaccaaaaaaagaaggaggccaaggaaaaggggacttgggtccagttgaagcgtcagcccgcacctcccagagaggctcacttcgtaaggaccaacggtaaagagccagagctgctggaacctattccatatgagtttatggcatag

SEQ ID NO: 238994 - DNA, 483 bp, synthetic construct
  misc_feature 1..483: note = Description of Artificial Sequence: Synthetic coding sequence
  source 1..483: mol_type = other DNA
atgacaaatacgaaaggtaagcggaggggcacgcgttacatgttttcaaggccttttagaaagcacggagtcgtgcccctggccacctacatgagaatctacaaaaagggagacatcgtcgatattaagggcatgggcactgtccagaaaggcatgccgcataagtgctaccacggtaaaactgggcgagtgtacaatgtcactcagcacgccgtaggaatcgttgtcaataaacaagtcaagggaaagatactcgccaaacgtattaacgtgcgcatagagcacattaaacactccaaatcacgtgactccttcctcaaaagagtgaaggagaacgatcagaagaaaaaagaggctaaagaaaagggcacctgggtccagctgaagagacagccagcacctccgcgagaggcccactttgtgagaactaatggcaaggaaccggagcttttggagcctattccttacgaattcatggcctag

SEQ ID NO: 238995 - DNA, 972 bp, synthetic construct
  misc_feature 1..972: note = Description of Artificial Sequence: Synthetic coding sequence
  source 1..972: mol_type = other DNA
atggctgcgcctaaaggatcgctatgggtccgcacccagttagggctgcctcccctactcctgctgaccatggccctagccggtggatcaggaacagctagcgccgaggcctttgacagcgtactgggcgacactgccagctgtcaccgagcttgccagctcacataccctctgcacacttatccaaaggaggaagagctctatgcctgtcaacggggatgtcggctcttcagcatttgtcagtttgtcgatgatggaattgatctgaatcgaacaaaactagaatgcgagtccgcgtgcacagaggcatactcccaatccgatgagcagtatgcctgccacttgggttgtcagaaccagttgccctttgcagagctcaggcaagagcagctgatgtccctcatgcctaagatgcacctgctatttcccttaacactagtccgaagcttctggtcggatatgatggactcagctcagtcctttattacatcctcatggaccttttatctgcaggctgacgatggtaaaatcgtgatctttcagagtaagccagaaatacaatatgccccacatctggagcaggagcctacaaatttacgcgaatcgagtctgagtaaaatgtcctacctacagatgagaaatagccaggcacaccgaaatttcctagaggacggggagtctgacggattcctcaggtgtttaagcttgaattcaggatggattctaaccaccacactggtcctgagcgttatggtcttgttgtggatttgttgcgctacagtagccacagctgtggaacagtacgtgccatcagagaaattgtccatctacggcgaccttgagttcatgaatgaacagaagctgaaccgatacccggcatcttcgttagtggtggtgaggtctaaaactgaagaccatgaagaagcaggccctttgccaactaaagttaatttggcccacagcgaaatctag

SEQ ID NO: 238996 - DNA, 276 bp, synthetic construct
  misc_feature 1..276: note = Description of Artificial Sequence: Synthetic coding sequence
  source 1..276: mol_type = other DNA
atggccggttctaggcgcgaatgccgaaggggcggaagctccggtgccaaatttagaatttcactggggttgccggtcggcgcagtgatcaactgtgccgacaatactggggcaaaaaatctgtatatcatatcagtgaagggtatcaagggtagactgaatcggctcccagccgcaggtgttggcgatatggtaatggccaccgtaaaaaagggaaaacccgaattacgtaagaaggtgcaccccgctgtcgtcattcgtcagcgaaaaagttag

SEQ ID NO: 238997 - DNA, 423 bp, synthetic construct
  misc_feature 1..423: note = Description of Artificial Sequence: Synthetic coding sequence
  source 1..423: mol_type = other DNA
atgtctaaaagggggaggggcggatcctccggagctaagtttcgcatatctctaggccttcctgtgggagccgtgattaattgtgctgacaacacgggagccaaaaatttgtacatcataagtgtgaaggggataaagggtagactcaaccgcctacctgccgctggagtgggtgacatggtgatggccacagtgaaaaaaggcaagccagagctcaggaagaaggtccacccagccgttgtgatccggcagcggaagtcctatcggcgtaaggatggcgtcttcttatactttgaggataatgcgggagtaattgtcaataacaagggagaaatgaagggaagcgctatcacaggcccagtagcaaaggagtgtgccgacctctggccccgtattgccagtaacgcagggtccattgcctag

SEQ ID NO: 238998 - DNA, 345 bp, synthetic construct
  misc_feature 1..345: note = Description of Artificial Sequence: Synthetic coding sequence
  source 1..345: mol_type = other DNA
atgtccaagcgcggacgtggtggaagttccggagccaaattccggattagcctggggttacccgtgggtgcagtcataaactgtgctgacaacaccggagctaaaaacctctacattatctcagtgaagggtattaaagggagactcaatagactgcccgctgcgggagtcggggacatggttatggccacagtcaaaaaagggaagccagaactgcgaaaaaaagtgctactctgccacactggctggtcagctgttacccccctgaaacttactgtcaccctcaactgctggacctggaacccaccagccgtcgcctttaaaggcctccagctgcaggtgtag

SEQ ID NO: 238999 - DNA, 423 bp, synthetic construct
  misc_feature 1..423: note = Description of Artificial Sequence: Synthetic coding sequence
  source 1..423: mol_type = other DNA
atgtcaaagcggggtcgagggggatcttcaggggctaagttcaggatctcacttggattaccagtgggtgcagtgatcaactgtgcggacaacacaggtgcaaagaacctgtacatcatctccgtgaagggcatcaaaggtaggctcaatcgtctccctgccgcaggagttggtgacatggttatggccacggtgaagaaaggtaagccggagttgaggaagaaggtccaccccgcagtggtcattcgacagaggaaatcgtaccgccgaaaggacggggtgttcttgtacttcgaggataatgccggtgtaattgtcaacaacaagggagagatgaaaggcagcgccatcacgggcccagttgctaaagagtgtgccgacctgtggcctaggatcgcatcaaatgcaggttcgatcgcctag

SEQ ID NO: 239000 - DNA, 477 bp, synthetic construct
  misc_feature 1..477: note = Description of Artificial Sequence: Synthetic coding sequence
  source 1..477: mol_type = other DNA
tagctagtcggagctccttgtcctagagcatctcctgccccacccaaggcggaagctaaggctaaggccctgaaggctaagaaggctgtgcttaagggggtgcacagccataagaagaagaagataaggacctcaccaactttcagacggccaaagactctgagattacgaagacagcccaaatatcccaggaagagcgcacctcgacgtaacaagctcgatcactatgccatcatcaaatttccgctgaccaccgagagcgctatgaaaaagatcgaggacaacaatacattggtgttcatcgtcgacgtgaaggcgaacaaacaccagatcaagcaagcggtgaagaagctgtatgatattgatgtggccaaggtgaatacccttatcaggcctgatggggaaaaaaaggcttatgtgcgccttgcaccagactatgacgctttagacgtagcaaataagatcgggatcatctag

SEQ ID NO: 239001 - DNA, 477 bp, synthetic construct
  misc_feature 1..477: note = Description of Artificial Sequence: Synthetic coding sequence
  source 1..477: mol_type = other DNA
atgagccctgggttggtggtgcttagatgggcgccagccccaccgaaggccgaggccaaagcaaaagcgcttaaggcaaagaaggccgtattgaagggggtccatagccataagaagaaaaagatacgtactagtccaacattcaggcgccctaagacattacggctgcgcaggcagcccaagtaccctcggaaaagcgcccctcgcagaaacaaactcgaccactacgcaatcatcaagttcccgctgaccactgaaagcgcaatgaagaaaattgaggacaacaataccttggtcttcatcgtggatgtgaaggccaacaaacaccaaatcaagcaggccgtaaagaagttgtatgacatcgacgttgctaaggtgaacacactgattcgaccagacggggaaaaaaaggcctacgtgcggcttgcgcctgactacgacgctctggacgtggcgaataagatcggcatcatttag

SEQ ID NO: 239002 - DNA, 585 bp, synthetic construct
  misc_feature 1..585: note = Description of Artificial Sequence: Synthetic coding sequence
  source 1..585: mol_type = other DNA
atgcaccccctggttggcgctccatgtccacgcgcatgcaaagaattagtgccgagtgccctgacaatctttctactcgtgcatgtgcagcccggatatataactcgaccttcccttagaagtgtggtgctaagatgggctccagcacctcccaaggcagaggcaaaggccaaggccctgaaagcaaagaaggccgttctcaagggtgtccacagtcacaagaaaaaaaaaattagaacaagtcctacctttagaaggcccaaaaccttaaggctcagacgtcagccaaagtatccgagaaagagcgcgccacgcagaaataagctggaccattatgccatcattaagttccctctgactaccgagagcgctatgaagaagattgaggataataatacattagtcttcatcgtggatgtgaaggctaataagcaccagattaaacaggccgttaaaaaattgtatgacattgatgtcgcaaaggtaaatactttaattcgacccgatggagagaaaaaagcttatgtgcgcctggcccctgactatgacgccctcgatgtagccaacaagatcgggatcatatag

SEQ ID NO: 239003 - DNA, 471 bp, synthetic construct
  misc_feature 1..471: note = Description of Artificial Sequence: Synthetic coding sequence
  source 1..471: mol_type = other DNA
atggcaccaaaagccaagaaggaggccccagctcctccaaaggccgaggcaaaagccaaggccctgaaagctaaaaaagctgttctgaagggcgtgcacagccacaagaagaagaaaatccgtacctccccaacattccggaggcccaaaactttacgcttacgacgccagcccaagtacccaagaaagagtgccccaagacggaataaattggatcactacgccataatcaagtttccccttaccacggaatcagccatgaagaaaatcgaggataataatacactagtctttatcgtggacgtgaaggcaaacaagcatcagatcaagcaggctgtcaaaaaattgtatgacatcgatgtcgccaaagtcaatactctgattcggccagatggagaaaagaaagcttacgttcgtctggctcccgactacgatgctttagacgtggctaacaaaattggcatcatttag

SEQ ID NO: 239004 - DNA, 474 bp, synthetic construct
  misc_feature 1..474: note = Description of Artificial Sequence: Synthetic coding sequence
  source 1..474: mol_type = other DNA
atgaaggtcgaactatgctcattttctggctacaaaatttaccccggacatgggagacgatatgctagaaccgatggcaaagtgtttcaatttcttaatgctaaatgtgagtccgcattcttgtccaagagaaatcccagacaaatcaactggacggtactctatcggcgtaagcacaagaaaggacagtctgaagagattcagaagaagcggacgagaagagccgttaagttccagcgtgctattacaggagcgagcctagcggatataatggccaagcggaaccagaaacccgaggtgcggaaggcacagagagagcaagcaatcagggccgctaaggaagccaagaaggccaaacaagccagcaagaagacggctatggcggctgccaaagctccaaccaaagcagcgccaaagcagaagatcgtcaaacccgtgaaggtaagtgcccctcgagttggaggcaagcggtag

SEQ ID NO: 239005 - DNA, 453 bp, synthetic construct
  misc_feature 1..453: note = Description of Artificial Sequence: Synthetic coding sequence
  source 1..453: mol_type = other DNA
atgaaggtggaactgtgttcgttttccggatataagatttatcccggacatgggagacgctatgcccgaaccgacgggaaagtgtttcagttcttgaacgctaagtgcgagtccgcattcctaagtaaacggaacccaagacaaattaattggaccgtactgtacaggaggaagcacaaaaagggccaatcagaggaaatacagaaaaaacgtaccaggcgggcagtgaaatttcagagagccatcaccggggctagcctcgcggacattatggctaaacgcaaccaaaaacccgaggtgagaaaagcccagcgcgaacaagccatcagagctgcaaaggaggcaaaaaaagcaaaacaggcttcaaaaaagactgcaatggctgcggctaaagtaatcatgggctttctgtatttcctggaacagtacaacaggaaaatctttttcttctag

SEQ ID NO: 239006 - DNA, 438 bp, synthetic construct
  misc_feature 1..438: note = Description of Artificial Sequence: Synthetic coding sequence
  source 1..438: mol_type = other DNA
atgaagttcaaccccttcgtaaccagtgatcgctcaaaaaatcgaaaaagacattttaatgcaccctctcatattaggcggaagattatgagcagccccttatccaaggaattgcgacagaagtataacgtgaggtcaatgccgatcaggaaggacgatgaagtgcaggtagtccggggtcattataagggtcagcagatcggcaaggtggtccaggtctaccgcaagaaatatgtaatttacatcgagcgcgtgcagagggagaaggcaaacggcaccacagttcacgtcggaattcaccctagtaaggttgtgatcacaagacttaaactggataaagaccgaaaaaagatcttggaaagaaaagcgaaatcccgccaggtcggaaaggaaaagggcaaatataaggaagaaactatcgaaaaaatgcaggagtag

SEQ ID NO: 239007 - DNA, 411 bp, synthetic construct
  misc_feature 1..411: note = Description of Artificial Sequence: Synthetic coding sequence
  source 1..411: mol_type = other DNA
atggggaagtttatgaagcccggaaaagtagtgcttgtgcttgcagggaggtattcgggcagaaaggccgtgatcgttaaaaatatcgacgatgggacctcagacagaccatattcccatgctctggtggctggaatcgatagataccctcggaaggtcacagcggcaatgggaaaaaagaagatcgctaaacgctcgaaaatcaagagttttgtgaaagtgtataactataaccacctgatgcccacccgatactcggtggacattcctctggacaagacagtggttaacaaagatgtgtttcgagaccctgctcttaagaggaaggcacgacgagaagccaaggtaaagttcgaggagcgctataagacaggtaagaataaatggttcttccagaaactgcgcttttag

SEQ ID NO: 239008 - DNA, 447 bp, synthetic construct
  misc_feature 1..447: note = Description of Artificial Sequence: Synthetic coding sequence
  source 1..447: mol_type = other DNA
atgcctagccggctcaggaagacacggaagctgagagggcacgtatctcacggccacggcaggattgggaaacaccgaaagcacccaggcggtcggggaaacgctggaggtcttcaccatcatagaatcaattttgacaagtatcaccctggttacttcggaaaggtgggcatgaagcattatcacctcaagcgtaaccagtccttctgccccactgtgaacctcgacaagctgtggacattagtgtcagaacagactagagtcaatgctgctaaaaataaaaccggcgctgctcccatcatagatgtcgtgaggtctggctactacaaggtactgggcaaagggaaactacctaagcagcccgttattgtgaaggccaagttctttagccggcgagcggaagagaaaattaagtccgtgggcggagcatgtgtcctcgtggcctag

SEQ ID NO: 239009 - DNA, 327 bp, synthetic construct
  misc_feature 1..327: note = Description of Artificial Sequence: Synthetic coding sequence
  source 1..327: mol_type = other DNA
atgccttctagactgaggaagacccgaaagctacgaggtcacgtgtcgcacggccatgggcgaatcggaaagcatcgcaagcaccctggtggcagaggcaacgctggcggtcttcatcaccatcgcattaactttgataagtaccaccctggctatttcggaaaggtggggatgaaacattaccacttaaaacgtaaccagtcattttgtccgaccgtaaacctggataaactatggacactggtttcagagcagacccgcgtaaacgcagcaaagaacaagaccggcgctgcccctatcattgacgtcgtgagatccgttagctag

SEQ ID NO: 239010 - DNA, 414 bp, synthetic construct
  misc_feature 1..414: note = Description of Artificial Sequence: Synthetic coding sequence
  source 1..414: mol_type = other DNA
atgagcgcccatctccaatggatggtggtacgaaactgttcctcattcttgataaaaaggaacaagcagacgtactcgaccgagcccaacaatctgaaggccagaaatagttttagatacaacgggctgattcaccgaaagacagtaggggttgagcccgctgctgatggaaagggcgtagtggtggtgatcaagagaaggagcggtcaacgcaagcctgctaccagttacgttagaacaaccattaacaagaacgctcgcgcaaccctgtcctccattcgacacatgataaggaagaacaagtatcgacctgacctgcgaatggcagctattcgtagagcaagtgccattctaaggtcccagaaacccgttatggtgaagcgtaagcggacccggcctaccaagtcctcttag

SEQ ID NO: 239011 - DNA, 210 bp, synthetic construct
  misc_feature 1..210: note = Description of Artificial Sequence: Synthetic coding sequence
  source 1..210: mol_type = other DNA
atgagcgcccatttgcagtggatggtggtacgcaactgttcgagcttcctgatcaaacggaacaagcagacttattctaccgagcccaataacctaaaggctaggaacagttttcgttacaatggcttgatccatcgcaagaccgtgggggtagaaccggctgctgatgggaaaggggttgtcgtcgtgattaaacgtagatcggagtag

SEQ ID NO: 239012 - DNA, 264 bp, synthetic construct
  misc_feature 1..264: note = Description of Artificial Sequence: Synthetic coding sequence
  source 1..264: mol_type = other DNA
atgagcgcacatctacagtggatggtggtgcggaattgttcttcattcctgataaagagaaacaaacaaacctattccacagagcccaacaatctcaaagcgaggaactcttttcgctacaatggcctgatccatcgtaaaaccgtaggcgtggagcctgccgctgatgggaaaggtgtcgtggtcgtgatcaaaagacgttctggagagttttgtctcgtgtgggcccgtgaacgcccactgtcccgggtgtgggagctgtag

SEQ ID NO: 239013 - DNA, 510 bp, synthetic construct
  misc_feature 1..510: note = Description of Artificial Sequence: Synthetic coding sequence
  source 1..510: mol_type = other DNA
atgtctgcacatcttcagtggatggtggtgcgaaattgctcttcttttctcattaaaaggaacaagcagacctatagcacagaacctaataatcttaaagcaaggaactcttttagatacaatggtctgatacaccggaagactgtcggcgtggagcctgccgctgacggcaagggcgtcgtcgtcgtgatcaaaaggcggtccgggcaaagaaagccggcaacctcctacgtccggaccactatcaataagaatgctagggctactttaagtagcatacgccatatgattcgtaagaacaaatataggcctgatctccggatggacatgttggccagcacaggtagcggtttgtgctgcagtgtggccgttcagccttgggctagttccagtacctcactctgcctacgcactctgatctgtaatatgagagtggatcgtccttattactctgggttgatgagaagactgaatgtccagaaccttctggattgcgcccacaaaagttag

SEQ ID NO: 239014 - DNA, 510 bp, synthetic construct
  misc_feature 1..510: note = Description of Artificial Sequence: Synthetic coding sequence
  source 1..510: mol_type = other DNA
atgtccgcacatctgcaatggatggtggttcgaaattgctcatcctttcttatcaagagaaacaagcagacctatagtaccgagcctaataacctgaaggctagaaatagcttccggtacaacggcctgatccaccggaagacagtaggggtagagccagccgctgacggcaagggagtcgtcgtagttatcaaacgcagatcaggccaacggaagcccgcaaccagctatgtccgaacaacaattaacaagaatgcaagggccacgttatcatctatcaggcacatgatcagaaagaacaaatataggcccgatctgagaatggatatgctggctagtacaggctccggcctgtgctgctcagtggccgtgcagccgtgggcctccagcagcacttcattgtgcttgcgcacactcatctgcaacatgcgggtggatcgcccatactactcaggtctgatgcgccgtctcaacgtccaaaatctgctagactgcgctcacaagagctag

SEQ ID NO: 239015 - DNA, 414 bp, synthetic construct
  misc_feature 1..414: note = Description of Artificial Sequence: Synthetic coding sequence
  source 1..414: mol_type = other DNA
atgagtgctcatctgcagtggatggtggtgagaaactgtagctcttttcttataaagagaaataagcaaacttacagcacggaacctaacaacttaaaagcacggaattcctttcgatacaacggccttattcacaggaagacagtgggcgtggagcctgccgcagatggaaagggtgtcgtcgttgtgattaagcgaagatctggccagagaaagccggcaacttcctatgtgagaaccacaattaataagaatgccagggccactctctcttccattagacacatgatcagaaagaacaaatatcgcccagatctgcggatggctgccattcggcgagcttccgccattttacgatcacaaaagccagtgatggttaaacgtaagcggaccagaccaactaagtcttcttag

SEQ ID NO: 239016 - DNA, 492 bp, synthetic construct
  misc_feature 1..492: note = Description of Artificial Sequence: Synthetic coding sequence
  source 1..492: mol_type = other DNA
atgtcagcacacttacaatggatggtggtacggaactgttcctcttttttgattaagcgcaataagcagacttatagcaccgaacctaataatcttaaggccaggaattccttccgctacaacggcctcattcatcgcaagacagtgggagtggagcctgcagcagacggaaagggagtcgtagtggtgatcaaacgcaggtcagggcagcgcaaacctgcaaccagttacgtccggacaaccataaataagaatgcccgagccaccctaagcagtatcagacacatgataagaaagaataagtacagacccgacctgcgcatggtgagttggggattgggtattagattgggcgaaaccggccaatgctgcggagaaggaccccctactacgggatgcaatatggggtggcgtggcatggactcctgttttcaaccaactccccacacccaacattggcctcgagggagacttgtggagtgtatgggctag

SEQ ID NO: 239017 - DNA, 480 bp, synthetic construct
  misc_feature 1..480: note = Description of Artificial Sequence: Synthetic coding sequence
  source 1..480: mol_type = other DNA
atggcaaagtccaaaaaccatacaacacataatcagagccggaagtggcacagaaatggaattaaaaagccccgttcccagcgctatgagtccctcaagggagtggatccaaagttcctgcgcaacatgcgctttgcaaaaaaacacaacaagaaaggcttaaagaaaatgcaggcgaacaatgcaaaagctatgtccgccagagcggaagccatcaaagcactcgttaaacccaaagaagtcaagcctaaaatccctaaaggggtttctcgaaagctagaccgcctggcatatatagctcacccaaagctgggcaagagagctcgcgctcggattgcaaaggggctgaggttgtgcagaccgaaggcaaaggccaaggccaaggctaaggatcagacaaaggcacaagccgctgctccggcttctgtgccagcacaggcccctaagcgtacccaggccccaactaaagcatccgagtag

SEQ ID NO: 239018 - DNA, 480 bp, synthetic construct
  misc_feature 1..480: note = Description of Artificial Sequence: Synthetic coding sequence
  source 1..480: mol_type = other DNA
atggctaaatctaagaatcataccactcacaatcagtctcgtaagtggcatcgaaatggcatcaaaaagcctagatctcagcgatatgagtctttgaaaggagtggaccccaagttcctcaggaatatgaggttcgccaaaaaacacaacaagaaaggcctgaagaaaatgcaggccaataatgcaaaggcgatgtctgccagggcggaggctatcaaggcgctggtgaagcctaaagaagtaaagcctaaaatccctaagggagtctctcgaaagctggacagactggcctacatagcccacccaaagctgggcaaacgagccagggccagaatcgcaaaggggctgcgtctgtgcagacctaaggccaaggcgaaggcaaaggctaaggaccagacaaaggcccaggcagcagcacctgccagtgtccctgctcaggccccaaagaggacccaggccccaacaaaggcttctgagtag

SEQ ID NO: 239019 - DNA, 480 bp, synthetic construct
  misc_feature 1..480: note = Description of Artificial Sequence: Synthetic coding sequence
  source 1..480: mol_type = other DNA
atggctaagtcgaaaaatcatactacccacaaccagtcccgcaagtggcacaggaacggtatcaagaaacccagatcccaacggtacgagtctctcaaaggcgtagatcccaaatttcttcgtaatatgagatttgctaaaaagcataacaagaagggcttgaaaaagatgcaggctaataatgccaaagctatgtccgctagggcagaggccatcaaggctctggtgaaaccaaaggaggtgaagcccaagatccctaaaggggtttcccggaagctggatcgcttagcttatattgctcacccaaagctggggaagagggcgagagcccgaatcgccaaagggctgagactctgtagaccaaaggccaaggctaaggctaaagcaaaggaccagacaaaagcccaggctgctgcaccagcgtccgtgcctgcccaggctcccaagcggacccaggcacctaccaaagcctcggaatag

SEQ ID NO: 239020 - DNA, 480 bp, synthetic construct
  misc_feature 1..480: note = Description of Artificial Sequence: Synthetic coding sequence
  source 1..480: mol_type = other DNA
atggctaaatccaagaaccacaccacgcacaaccaaagtaggaaatggcaccgcaatggtataaagaagccaagatcccagcgatatgaatctctgaaaggtgtggacccgaaatttttacgaaacatgcgtttcgctaaaaaacacaacaaaaaagggctgaagaaaatgcaagcaaacaacgcgaaagcaatgtcggcaagggccgaagccattaaggccctggtcaagcctaaagaggtaaaaccgaagataccgaagggggtctccagaaaacttgataggttggcttacatcgcacatcctaaactgggcaaaagagctcgtgctcgaattgcaaaggggctgcgcctttgtcgccctaaggctaaggccaaagccaaggccaaagatcagaccaaagctcaggcagcggctccagccagcgttccagcccaggctccaaagaggacacaggctccgaccaaggctagcgagtag

SEQ ID NO: 239021 - DNA, 480 bp, synthetic construct
  misc_feature 1..480: note = Description of Artificial Sequence: Synthetic coding sequence
  source 1..480: mol_type = other DNA
atggccaaaagcaagaaccatacgacccacaaccagagtcggaagtggcataggaatggtataaagaaacccaggagccaacggtatgagtcactgaagggcgtcgacccaaaatttctgagaaacatgaggtttgccaagaaacataataaaaaggggctgaaaaagatgcaagcaaataatgctaaggctatgagtgccagggccgaagcaatcaaagccttggttaagcccaaggaagtgaagcctaagatcccaaaaggggtgtctaggaaactggacaggctggcctacatagctcaccctaagctgggcaaacgcgcacgcgctcgcatcgcaaaaggccttaggttgtgccgacccaaagccaaagctaaagctaaagccaaagaccagaccaaggcgcaggcagccgcaccagcctctgtacctgcccaggcaccgaagcgcacacaggcacccacgaaggcgtccgaatag

SEQ ID NO: 239022 - DNA, 480 bp, synthetic construct
  misc_feature 1..480: note = Description of Artificial Sequence: Synthetic coding sequence
  source 1..480: mol_type = other DNA
atggctaagagcaagaatcacacaacacacaatcaatcacgtaagtggcacagaaatggcattaaaaagcctcgaagccagcggtacgagtcacttaagggggttgatccgaaatttctgcgaaacatgcgtttcgctaagaaacacaataagaaggggctcaagaagatgcaagcgaacaacgccaaggcaatgtcagccagggctgaggccataaaagcactcgttaagcctaaggaggtgaagcccaagattcccaaaggggtgtcaagaaagctcgataggctggcatacatcgctcaccccaagctaggtaaacgggcaagagcacgcattgcaaaagggctgcgactgtgtagaccgaaagctaaagcaaaggcaaaagccaaagaccagaccaaagcccaggccgcagccccagctagcgtccccgcacaagctcccaaacggacccaggctcccactaaagcctctgaatag

SEQ ID NO: 239023 - DNA, 648 bp, synthetic construct
  misc_feature 1..648: note = Description of Artificial Sequence: Synthetic coding sequence
  source 1..648: mol_type = other DNA
atgcccttccaccccgttacagccgcactcatgtacaggggaatctatacagttcctaatctcctgagtgaacagagaccggtggatataccagaggatgaattggaagagataagggaagctttcaaggttttcgacagggacggcaatggattcatatcaaaacaggagcttggcacggctatgaggtccctgggctacatgcctaatgaagtcgaactggaagttataatacagcgcttggatatggatggggatggacaggttgattttgaggagttcgtgactctgctcggccctaaactgtcaacatcaggcattcccgagaaattccatggtactgatttcgatacagttttttggaagtgtgacatgcagaagctgaccgttgatgaactgaagcgccttttgtacgacaccttttgtgagcacctcagtatgaaggatattgagaacatcataatgactgaggaggagagccatctcggcacagctgaggaatgccccgttgacgtcgagacctgttccaaccagcagatcaggcagacatgtgtcagaaaaagcctcatttgcgcgttcgccattgcatttattattagtgtgatgctgattgcagcaaatcaggtcctgagatcagggatgaagtag

SEQ ID NO: 239024 - DNA, 1056 bp, synthetic construct
  misc_feature 1..1056: note = Description of Artificial Sequence: Synthetic coding sequence
  source 1..1056: mol_type = other DNA
atgacccacatagttcgcgaggtagatagaccaggaagcaaggtcaacaaaaaggaggtggtggaggcagtaacaatcgtggaaaccccgcctatggtggtagtcggaattgtaggttacgtggagacaccgcgaggcttgagaactttcaaaacggtgttcgcagagcatatcagtgacgagtgtaagaggcgcttttacaaaaactggcacaagagcaaaaaaaaagcatttacaaaatattgtaagaaatggcaagatgaagatggcaagaagcaactcgagaaagacttcagctctatgaaaaaatattgccaggtcattcgcgttatcgctcacacacagatgcggctcttacccctccggcagaagaaagcccacctaatggagatccaggtgaatgggggaacagtggccgagaagctggattgggccagagaaagactggaacaacaggtgcccgtgaaccaggtgtttggacaagatgaaatgattgatgttatcggggtaaccaaaggaaagggctacaagggggtgacttcccgctggcacactaagaagctgccccgaaaaacacaccggggtttgaggaaagtcgcctgcataggcgcatggcaccccgctcgcgtggcttttagtgtcgccagggccggtcaaaagggctatcatcatagaactgagattaacaagaagatttacaagattggacagggatatctgattaaggatggcaagctgataaagaataatgcctccacggactatgatctgagcgacaagagtatcaaccctttaggtgggtttgtgcattacggagaggtgactaacgacttcgtaatgctcaaagggtgcgtggtgggaactaagaagcgtgtgctgaccctgagaaaaagtttgctggtacagaccaaaaggcgggctctcgaaaaaattgatttaaagtttattgacacaacctcgaaattcgggcatggacggtttcagactatggaggaaaagaaggcttttatgggtccgcttaagaaagatcggatcgccaaggaggagggagcctag

SEQ ID NO: 239025 - DNA, 348 bp, synthetic construct
  misc_feature 1..348: note = Description of Artificial Sequence: Synthetic coding sequence
  source 1..348: mol_type = other DNA
atggtcgccgcaaagaagacaaagaagtccctcgagagcatcaatagtagactacaactggtcatgaaatccggcaaatacgtgctggggtacaagcagacgctcaagatgattcggcagggcaaagccaaacttgtcatacttgccaacaactgtccagcccttaggaaatctgagatcgagtactacgctatgctcgcgaagacaggcgtgcatcactactccggcaacaatatagaactgggcacggcttgcggcaaatactatcgtgtttgtacactggcaataattgacccaggcgactcagatattatcaggtcaatgcccgaacaaaccggcgagaagtag

SEQ ID NO: 239026 - DNA, 348 bp, synthetic construct
  misc_feature 1..348: note = Description of Artificial Sequence: Synthetic coding sequence
  source 1..348: mol_type = other DNA
atggtcgcggctaaaaaaactaaaaaatccttagagtccattaacagccggctgcagttggttatgaaaagtggaaagtacgtcctcggttataagcagacgcttaagatgattaggcagggcaaagcgaagctcgtgatactggcgaataattgccctgcactacgcaagtcagaaatcgagtattatgctatgctggccaaaacgggggttcaccactactctgggaacaacatcgagttgggaactgcttgcggcaagtactacagagtatgcacattggctatcattgatccaggagactcggacattataagaagtatgccggagcaaacgggtgagaagtag

SEQ ID NO: 239027 - DNA, 345 bp, synthetic construct
  misc_feature 1..345: note = Description of Artificial Sequence: Synthetic coding sequence
  source 1..345: mol_type = other DNA
atggtggccgctaagaaaacaaaaaagagtctcgaatccattaactcccgactccagctggtgatgaagagtgggaaatacgtgctggggtataaacagactctaaaaatgatacgccaggggaaggctaagcttgtcatactcgctaacaactgtccagccctcaggaaaagtgaaattgaatactacgcaatgcttgcgaagaccggagtacatcattattccgggaataacatcgaactggggaccgcttgcggcaaatattaccgagtatgtaccttggccatcattgacccaggagactctgacattattcgtagcatgccggagcagaccggcgagtag

SEQ ID NO: 239028 - DNA, 285 bp, synthetic construct
  misc_feature 1..285: note = Description of Artificial Sequence: Synthetic coding sequence
  source 1..285: mol_type = other DNA
atgtccgggaggttgtggtccaaggccatttttgctggctataagcgcggactccggaaccagcgtgaacacacggcccttctgaagatcgagggtgtgtacgcgagagacgagactgagttttatctaggaaagcgctgtgcttacgtgtacaaggccaaaaataatacggttactcccggaggcaagcccaacaagacaagagtgatttggggtaaagtgacccgcgctcatggaaatagcggcatggttcgggctaagttccggtctaacctccctgcttag

SEQ ID NO: 239029 - DNA, 333 bp, synthetic construct
  misc_feature 1..333: note = Description of Artificial Sequence: Synthetic coding sequence
  source 1..333: mol_type = other DNA
atgtctggacggctgtggtcaaaagcgatctttgccggatacaagagagggctgcggaatcagagagagcacacagccctgttaaaaatcgagggcgtgtacgccagagacgaaactgaattttacttgggaaagcgttgtgcctatgtgtacaaggcaaaaaataataccgtgacaccaggcggaaaaccaaataaaactcgggtcatctggggtaaggtcaccagagcccatggcaattcaggtatggtgcgcgctaagttccgctccaacctgcccgcaaaagccataggacaccggattcgggtgatgctgtatccttcccgcatctag

SEQ ID NO: 239030 - DNA, 333 bp, synthetic construct
  misc_feature 1..333: note = Description of Artificial Sequence: Synthetic coding sequence
  source 1..333: mol_type = other DNA
atgtccggcagactgtggtctaaagcaattttcgccggatacaagcggggtttacgcaatcaaagggagcataccgctctcctaaagatcgaaggtgtttacgccagggatgagactgaattttacctgggcaaacggtgcgcatatgtctataaggccaagaataatacagttacacccggaggaaagcctaataagactagagtgatttggggcaaggtaactcgcgcacacggcaactctggaatggtgagagctaagttcaggtctaatctgccagccaaagccataggccaccggatccgagtgatgctctacccttctcgaatctag

SEQ ID NO: 239031 - DNA, 396 bp, synthetic construct
  misc_feature 1..396: note = Description of Artificial Sequence: Synthetic coding sequence
  source 1..396: mol_type = other DNA
tgactgccttttgcatcaagatttctctctttcagagcagactcagcacacgcttccatggtgaatgtgcctaagactagaaggaccttctgcaaaaagtgcggcaagcaccaaccacataaagtgacccagtacaaaaaaggtaaagactcgttatacgcacaaggtaagaggagatacgaccgcaagcaaagtggctacggcggtcaaactaaacccatctttagaaagaaggccaagaccaccaaaaagatcgtgctgcgactcgagtgtgtagaacctaattgccgctcaaaaaggatgttggccataaagcgttgcaaacacttcgaacttgggggagacaaaaagcggaaagtgtacaattacggatggaaggtgcagagcttctcatag

SEQ ID NO: 239032 - DNA, 429 bp, synthetic construct
  misc_feature 1..429: note = Description of Artificial Sequence: Synthetic coding sequence
  source 1..429: mol_type = other DNA
atgatcgcaccaaccgactcccacgaggaggtcaggagtgggacttcatacatcctcccctttgcaagtagattcctgagctttagagccgactcggcccatgcaagcatggtgaacgttccaaagaccaggcggacattttgtaagaaatgcggtaaacatcaaccgcataaagtgacacagtacaaaaagggaaaggactctctatacgcacaagggaagcgcaggtacgatagaaagcagtccgggtacggagggcaaaccaagcctatatttcgcaaaaaggccaagacaacgaagaagatagtattgcgtctagaatgcgtggaacctaactgccgttcaaagcgtatgctggccattaagaggtgcaaacactttgagctcggcggagacaaaaagcgcaaaggacaagtcatacaattctag

SEQ ID NO: 239033 - DNA, 321 bp, synthetic construct
  misc_feature 1..321: note = Description of Artificial Sequence: Synthetic coding sequence
  source 1..321: mol_type = other DNA
atggtaaacgtgcctaagaccaggcgcacattttgcaagaaatgtggcaaacaccagccacataaagtgactcaatataagaaagggaaagactctctgtatgcccagggcaagcgcaggtacgaccggaagcagagcggctacggcggacaaaccaaacctattttccgcaaaaaggctaagacgactaaaaagattgttcttcgcttagagtgtgtcgaacccaactgtcggtctaagcggatgctggctattaagagatgcaagcactttgagctgggcggagacaagaagaggaaaggccaggtaatccagttttag

SEQ ID NO: 239034 - DNA, 321 bp, synthetic construct
  misc_feature 1..321: note = Description of Artificial Sequence: Synthetic coding sequence
  source 1..321: mol_type = other DNA
atggttaacgtgcccaagacgcgccgtaccttctgcaaaaagtgcggaaagcaccagccccacaaagtgacccagtataaaaaaggaaaagattctctttacgctcaggggagacgcagatatgatcgtaagcagtcgggctacggaggccagaccaagccaattttccggaaaaaagccaaaacgaccaagaagatcgttctgcgtttggagtgcgtcgaacccaattgtagatccaagcgcatgcttgccatcaaaagatgtaagcacttcgaactgggcggagacaagaaaagaaagggacaggtgatccagttctag

SEQ ID NO: 239035 - DNA, 294 bp, synthetic construct
  misc_feature 1..294: note = Description of Artificial Sequence: Synthetic coding sequence
  source 1..294: mol_type = other DNA
atgacgaaagggactagcagtttcggtaagcgcagaaacaagacccatacactgtgcagaaggtgtggcagtaaagcctatcatctccaaaagagcacgtgcgggaagtgtggttatccagccaaaagaaaacgaaagtataattggagcgcaaaagctaagagacggaatacaactgggaccgggcgaatgagacacttgaaaatcgtgtatcggaggttcagacacggctttcgggaagggacaactccgaaacctaaaagagctgctgtcgctgccagttccagcagttag

SEQ ID NO: 239036 - DNA, 207 bp, synthetic construct
  misc_feature 1..207: note = Description of Artificial Sequence: Synthetic coding sequence
  source 1..207: mol_type = other DNA
atggtgaagaagatcgagattagccagcacgccaagtatacatgctccttttgtggtaagacaaagatgaagaggagagctgtgggcatctggcattgcggctcatgtatgaagacggtggcgggtggcgcatggacttataatacaacgagcgcagtcaccgttaaatccgccatccgccgactcaaagagcttaaggatcagtag

SEQ ID NO: 239037 - DNA, 279 bp, synthetic construct
  misc_feature 1..279: note = Description of Artificial Sequence: Synthetic coding sequence
  source 1..279: mol_type = other DNA
atggctaagaggaccaagaaagtgggcatagtgggaaagtacggtacaaggtacggtgcttctctccggaaaatggtgaagaaaatcgaaatcagccagcatgctaagtacacctgcagcttttgtggtaagaccaagatgaagcgtagagcagtcgggatctggcattgtggcagctgcatgaagaccgtggctggtggcgcttggacatacaatacaaccagcgccgtgaccgtgaaaagcgccattcggaggctaaaggagctaaaggatcagtag

SEQ ID NO: 239038 - DNA, 213 bp, synthetic construct
  misc_feature 1..213: note = Description of Artificial Sequence: Synthetic coding sequence
  source 1..213: mol_type = other DNA
atgcccaggaagatagaagaaattaaggatttcctgctcaccgcccgacgaaaggacgcaaagagtgtaaagataaagaaaaataaggataatgtgaagttcaaagttcgctgtagccgctatctgtatacactggttatcaccgataaagaaaaagccgagaagttgaagcagagcctcccacctggtttggcggttaaggaactaaagtag

SEQ ID NO: 239039 - DNA, 213 bp, synthetic construct
  misc_feature 1..213: note = Description of Artificial Sequence: Synthetic coding sequence
  source 1..213: mol_type = other DNA
atgcctagaaagattgaagaaattaaggacttcttgctcaccgccaggcgaaaggatgccaaaagtgtgaagattaaaaaaaacaaggacaatgtgaagtttaaggttcgatgttcccgttacttgtatacactcgtcatcacggataaggagaaggctgaaaagcttaagcagtcgctgccccctggcttggccgtgaaggagcttaaatag

SEQ ID NO: 239040 - DNA, 213 bp, synthetic construct
  misc_feature 1..213: note = Description of Artificial Sequence: Synthetic coding sequence
  source 1..213: mol_type = other DNA
atgccccgaaaaatcgaagaaatcaaagatttcctgctaaccgccagacggaaagacgccaagtctgtgaagatcaagaagaacaaggacaatgttaagtttaaagtgagatgtagccgctacctatatacactggtcatcacagacaaggaaaaggccgaaaagctgaagcaatctttgccccctggcttagctgtgaaggaactcaaatag

SEQ ID NO: 239041 - DNA, 156 bp, synthetic construct
  misc_feature 1..156: note = Description of Artificial Sequence: Synthetic coding sequence
  source 1..156: mol_type = other DNA
atgtcctcccacaagacattcacaatcaaacgctttctcgccaagaagcagaaacagaatcggccaattccacagtggatccaaatgaagcccggatctaaaattagatataatagcaaacggcgtcactggaggcgtaccaaattgggcctttag

SEQ ID NO: 239042 - DNA, 156 bp, synthetic construct
  misc_feature 1..156: note = Description of Artificial Sequence: Synthetic coding sequence
  source 1..156: mol_type = other DNA
atgagttctcataagacgttcaccattaaaaggttcttggccaagaagcaaaaacaaaacaggccaatcccccaatggatccagatgaaaccaggcagcaaaatccgctataactccaagagaagacattggcgcaggacaaagctgggcctgtag

SEQ ID NO: 239043 - DNA, 156 bp, synthetic construct
  misc_feature 1..156: note = Description of Artificial Sequence: Synthetic coding sequence
  source 1..156: mol_type = other DNA
atgagcagccacaaaacttttactatcaagaggttcttagccaagaagcagaaacaaaacagacctatccctcagtggattcagatgaaacccggatctaaaattcgttacaacagcaagcgacggcactggaggaggacgaagctgggcttgtag

SEQ ID NO: 239044 - DNA, 1284 bp, synthetic construct
  misc_feature 1..1284: note = Description of Artificial Sequence: Synthetic coding sequence
  source 1..1284: mol_type = other DNA
atggcttgtgcacgccctcttatttccgtctacagtgaaaagggagagagtagcggtaagaacgtcacactgcccgctgtcttcaaggcccctattaggcccgatatcgttaacttcgtacacactaaccttcggaaaaacaacaggcagccatatgctgttagtgagctggctggccatcagaccagcgccgagtcctggggtacaggtagagctgttgcacgtatccctagagttagaggagggggaacccatagatctggccagggcgcattcggcaacatgtgccgcggtggacgcatgttcgcacctacaaagacttggagacggtggcatcgcagagtgaacaccacccaaaagcgttacgccatctgtagtgcattagctgcttccgctctacctgccctcgtgatgagcaaaggtcacaggattgaggaagtccccgagcttccgctcgtagttgaggacaaggtggaaggttacaagaaaacaaaagaggccgttctgctgctgaaaaagttaaaggcttggaacgacatcaaaaaagtctatgccagccagcgcatgcgagctggcaagggcaaaatgcgcaaccgcaggaggattcaaagaaggggaccctgtattatttacaacgaggacaatgggatcatcaaggcattcaggaacatcccgggtataaccctccttaatgttagtaagctaaatatcctgaagctggccccaggaggccacgtgggacgattctgcatttggactgagtccgcattccgcaaactggacgaattgtatggaacatggcgtaaggccgctagtctgaagtcaaattataacctgcccatgcacaaaatgatcaataccgatttaagccgtatcctgaagtcacccgagatccagcgcgctctgagagcccctcgcaagaaaatccaccggagggtcctgaaaaagaacccactaaagaacctgcggattatgttgaagcttaacccctacgcgaaaacgatgcgcaggaataccattctgaggcaagcccgtaaccataaactgagagtggataaggccgctgcagctgccgcagccctgcaggccaagagcgacgagaaagcagcagtcgccggaaagaagcctgtagttggaaagaaggggaagaaagccgctgtgggtgtcaagaaacaaaaaaagccactcgtcggtaagaaggctgccgcaactaaaaagcccgcacccgagaagaagcctgctgagaaaaagcccaccactgaagagaagaagccagcagcatag

SEQ ID NO: 239045 - DNA, 1221 bp, synthetic construct
  misc_feature 1..1221: note = Description of Artificial Sequence: Synthetic coding sequence
  source 1..1221: mol_type = other DNA
atggcctgcgccagaccattgatcagcgtgtacagcgaaaagggggaaagttctggcaagaacgtcactttgccagccgtgtttaaggccccaataaggcctgacatagtgaacttcgtccataccaatttacgtaagaacaaccgtcagccctatgcagtgagcgaactagccggacaccaaacatctgcagaatcctggggaacagggcgtgccgttgcccgtatcccccgtgtgaggggaggaggcacccatcggtctggccagggagccttcgggaacatgtgccgcggaggccgaatgttcgcacccactaaaacatggcggagatggcacagacgtgtgaacacaactcagaagcgttacgctatctgttccgctctggctgcctccgctctgccagcactggttatgtcgaagggacaccggatcgaggaggttcctgagctgccactggtcgtggaggacaaagtggaaggctacaaaaagaccaaggaggccgtgctgctgctaaagaagctaaaagcttggaacgatattaaaaaagtatacgcgagccaacggatgcgcgcaggcaaggggaaaatgcggaaccggagacggatccagagacggggtccctgcataatttataatgaggacaacggcatcatcaaggcattccgcaatattcccggaattaccttgttgaatgtgagtaaactgaacattctgaagctggccccaggcggacacgtggggcgtttttgtatctggaccgagagtgcatttaggaaactggatgagttgtacggtacgtggaggaaggctgcctcactgaagagtaactacaacttacccatgcacaagatgataaacacagacctgtcgcgcatactgaaatccccggaaatccagcgcgcattgcgcgctccacgcaaaaaaatccacagaagagtgttaaagaagaaccctctgaagaacctccggattatgctgaaactcaatccgtatgcgaagaccatgaggcggaatacaatccttaggcaggccaggaaccataagctccgggtcgacaaagccgctgcggctgcagccgctctgcaagctaaaagtgacgaaaaagccgctgtggccggaaagaagccggttgtaggtaagaagggcaagaaagccgctgtcggagagaagaagcccgctgagaagaaacctacaactgaagagaaaaagccagcggcatag

SEQ ID NO: 239046 - DNA, 456 bp, synthetic construct
  misc_feature 1..456: note = Description of Artificial Sequence: Synthetic coding sequence
  source 1..456: mol_type = other DNA
atggcctgtgccagacccttaattagcgtgtactcggaaaagggcgagagctccggaaagaacgtcacccttcccgctgtcttcaaagccccaatacgtcccgacatcgtcaacttcgtgcatactaacctcaggaagaataatcgccagccctacgctgtgagtgaactggcgggacaccagaccagcgcagagtcctggggaactggcagggcagtggctagaattccccgagttcgcggaggcggaacccatcgcagcggccaaggcgcatttgggaatatgtgcagaggcggtaggatgttcgcccctactaaaacctggaggagatggcaccgtcgtgttaatactactcaaaagctggagaatcatgtggaggccaaacccatttgcaaagatcacgcacccgagcaccactcaagcccgggacaggaaagccaagcccctggcggttag

SEQ ID NO: 239047 - DNA, 78 bp, synthetic construct
  misc_feature 1..78: note = Description of Artificial Sequence: Synthetic coding sequence
  source 1..78: mol_type = other DNA
atgcgcgctaagtggaggaagaagcgcatgcgtaggctgaaacggaaacgaagaaaaatgcggcaacggtctaagtag

SEQ ID NO: 239048 - DNA, 78 bp, synthetic construct
  misc_feature 1..78: note = Description of Artificial Sequence: Synthetic coding sequence
  source 1..78: mol_type = other DNA
atgcgggcaaagtggcggaagaagagaatgaggagactgaaaaggaagaggcggaagatgcgccagaggagtaagtag

SEQ ID NO: 239049 - DNA, 381 bp, synthetic construct
  misc_feature 1..381: note = Description of Artificial Sequence: Synthetic coding sequence
  source 1..381: mol_type = other DNA
atgattgtccgggtcacgaacagagacatcatttgccagattgcctatgctaggattgaaggagacatgattgtatgcgcagcttacgcccatgagttacctaagtacggggtcaaggtggggctaaccaattacgccgctgcgtactgcacaggacttctccttgccagaaggttgctcaaccggtttggcatggataaaatctacgagggccaagtcgaggttactggcgatgagtataacgtggagtccatcgacggtcagcctggagctttcacctgctacctggatgcaggcctggccaggactacaactgggaataaggtgtttggagctttgaagggggctgtggatggtggcctttcaatacctcacaggtag

SEQ ID NO: 239050 - DNA, 894 bp, synthetic construct
  misc_feature 1..894: note = Description of Artificial Sequence: Synthetic coding sequence
  source 1..894: mol_type = other DNA
atgggctttgtcaaggtggtcaagaacaaagcctacttcaagcggtatcaggtcaaattcaggagacggagagagggaaaaacagattattacgccagaaaacggctggttattcaggacaaaaataagtataacacccccaagtacaggatgatcgtccgcgtgactaaccgggatattatttgtcaaattgcgtacgccaggatcgaaggggatatgatagtgtgtgcagcttacgcccacgaactgccaaagtacggagtgaaggttggcctcactaattacgcagctgcctattgtaccggcctgctgctcgcaagacggctgttgaatcgcttcggtatggacaagatttatgaggggcaagtcgaggtgacgggtgatgagtacaatgtagagagcatcgacggccaacctggtgcattcacgtgttatctggatgctggtctcgccagaacgactaccggaaacaaggtattcggtgccttgaagggcgcagttgatggcggtctgagcattccccacagtacaaagcggttccctggctacgatagtgagagcaaagagttcaatgctgaagtccaccgtaagcatatcatgggacagaacgtagcagactatatgaggtacctgatggaggaggatgaggacgcatataagaagcaattctcccagtacatcaagaattctgtgacccccgatatgatggaggagatgtacaaaaaggcgcatgccgctattagggagaaccccgtgtatgaaaagaagcctaagaaagaggtgaagaagaagaggtggaaccggcctaagatgtctctggcccagaaaaaggacagagtggctcagaaaaaggcttcatttctgagagcccaagagagagccgctgagagctag

SEQ ID NO: 239051 - DNA, 744 bp, synthetic construct
  misc_feature 1..744: note = Description of Artificial Sequence: Synthetic coding sequence
  source 1..744: mol_type = other DNA
atgatcgtccgagtaactaatagggatatcatttgccaaatcgcttatgcaagaatcgagggagacatgatcgtctgtgctgcatatgcccatgagcttcccaaatatggcgtgaaagttggtttgactaattatgccgcagcgtattgtaccggtttgcttctggccaggcggttgctgaatagattcggaatggataaaatttatgagggccaggtcgaggttacgggcgacgagtataacgtcgagtctatcgatggccaaccgggtgcttttacctgttatctagatgccggtctcgccaggacgacaactggtaataaggtgtttggagccctgaaaggggcagtggatgggggactgagtatacctcattccactaaacggtttcctggctatgatagcgagtcaaaagaatttaacgccgaagtgcataggaagcacatcatgggacagaatgttgccgactacatgcgatacctgatggaagaggatgaagatgcctacaagaagcagttttctcagtacatcaaaaacagcgtgactcctgatatgatggaggagatgtataaaaaggcccatgctgccatccgtgaaaatcccgtttatgaaaaaaagccgaaaaaagaggtgaagaagaagagatggaacaggcctaagatgagtcttgcccaaaaaaaggatcgggtcgctcagaaaaaggccagctttttacgggcacaggaacgggctgcggagtcgtag

SEQ ID NO: 239052 - DNA, 867 bp, synthetic construct
  misc_feature 1..867: note = Description of Artificial Sequence: Synthetic coding sequence
  source 1..867: mol_type = other DNA
atggccggagaaaaagtcgagaaacctgataccaaagagaagaaaccagaggctaagaaggtggatgcaggaggaaaagtaaaaaagggaaatctgaaggccaaaaaaccaaagaaggggaaacctcattgctctcggaatccagttctggtgagagggattggaagatactcccgttccgccatgtattcccgcaaagctatgtacaaacgaaaatatagcgccgcaaagtctaaggtcgagaaaaagaaaaaggagaaggttctggctacagtaactaaacctgttggcggagataaaaacggcggaaccagagtagtcaaacttcgaaaaatgccacggtactatccaaccgaggacgtccctcgcaagctcctcagccacggaaaaaaaccattctctcagcacgtgaggaagttacgagcaagcattactcctgggaccattcttatcattctcacaggacgacataggggaaagcgtgtagtgtttctcaagcagctcgcttcgggcctgctgttagtaacgggaccccttgtgcttaaccgggtgccactgagaagaacccaccagaaatttgtgatcgccaccagcacgaagatagatatctcaaatgtgaagatccctaaacatctaactgacgcgtatttcaagaagaaaaagttgcggaaacctcgccatcaagagggcgaaattttcgacacagagaaagaaaaatatgagatcacagaacaaagaaaaatagaccagaaggcggttgactcccagatcctccctaagatcaaggcaattccccagcttcaggggtacctgaggtctgtctttgccctaacaaacggaatataccctcacaaactggtcttctag

SEQ ID NO: 239053 - DNA, 867 bp, synthetic construct
  misc_feature 1..867: note = Description of Artificial Sequence: Synthetic coding sequence
  source 1..867: mol_type = other DNA
atggctggggagaaggttgagaagcccgatacgaaagaaaagaagcctgaggctaaaaaggtagatgctggaggtaaagtgaaaaaaggaaatctcaaggctaaaaaacccaagaagggtaagcctcactgttctagaaatcccgtactcgtgcgcggaatcgggaggtattctcggtccgccatgtactccagaaaggctatgtataagaggaagtactcagctgctaagtcaaaggtggagaaaaaaaagaaagagaaagtcttggcaaccgtgaccaaacccgtgggcggtgataagaatggcggaacaagagttgtcaagttgcgaaagatgccacggtactacccaacagaggacgtgcccagaaaactgcttagccacggtaagaagcccttctcccaacatgtgcgtaagctgcgggcttctattacccccggaaccatcttaatcattctcacgggaaggcaccggggaaaacgtgtggtgttcctgaaacagttagcaagcgggttgcttttagtcaccggccctttggttctcaatcgggtaccattacgaaggactcatcaaaagtttgtgatcgcgacatcaaccaagattgacattagcaatgtcaaaatccccaagcacctcacagatgcttacttcaagaagaagaaactgagaaagcccaggcatcaggaaggcgagatatttgacactgaaaaagagaaatatgagataacggaacagcggaagatcgaccagaaggctgttgattcacagatactaccaaagattaaagcaatcccacagctgcaaggttatctccgatctgtttttgctctcaccaacgggatatacccacataaactcgtgttttag

SEQ ID NO: 239054 - DNA, 318 bp, synthetic construct
  misc_feature 1..318: note = Description of Artificial Sequence: Synthetic coding sequence
  source 1..318: mol_type = other DNA
atggcgggtgaaaaagtggagaagcccgacacgaaagagaaaaagcctgaagctaaaaaggtcgatgctggcggaaaggttaaaaaaggcaatcttaaggctaaaaagccgaagaagggcaagccccactgtagtcgcaaccccgtgctcgtcaggggaattggcagatattcacggtcagcaatgtactctagaaaggccatgtacaaaagaaagtacagcgctgccaagtcaaaggtggagaaaaagaagaaggaaaaagtcctggccaccgtaaccaagccagtgggcggagacaagaacggaggcacccggtag

SEQ ID NO: 239055 - DNA, 219 bp, synthetic construct
  misc_feature 1..219: note = Description of Artificial Sequence: Synthetic coding sequence
  source 1..219: mol_type = other DNA
atggctggggagaaggttgagaaacccgatacaaaagaaaagaagccagaggccaaaaaggtagatgctgggggaaaagtgaaaaaaggaaatcttaaggcaaagaaacctaagaaaggcaagccccactgctcccggaatcctgtcctggtgagaggcatcgggagatatagccggagcgcgatgtactccagaaaagccatgtataagcgtaagtag

SEQ ID NO: 239056 - DNA, 480 bp, synthetic construct
  misc_feature 1..480: note = Description of Artificial Sequence: Synthetic coding sequence
  source 1..480: mol_type = other DNA
atggctggagagaaggtcgagaagccagacacaaaggaaaaaaaaccagaggcaaaaaaagtcgacgctggtggtaaagtgaagaaggggaacctaaaggccaaaaagcccaaaaaaggcaagcctcactgcagtcggaatcctgtactcgtgcggggaataggacgctattcaaggagcgcaatgtatagccggaaggccatgtataaacggaagtatagcgctgccaagtccaaagtagagaagaagaaaaaagaaaaagtgttagccacagtgaccaaaccagtgggcggtgacaagaatggaggcacccgcgtcgttaagttaaggaagatgcctagatactaccccactgaggacgtgccacggaagctcctgagccacggcaagaaacccttcagccagcacgtcaggaagcttcgcgcaagtatcactcccggaaccatccttattatcctcacggggcgacataggggctag

SEQ ID NO: 239057 - DNA, 345 bp, synthetic construct
  misc_feature 1..345: note = Description of Artificial Sequence: Synthetic coding sequence
  source 1..345: mol_type = other DNA
atggccggtgagaaggtcgaaaagcccgacacgaaagaaaagaagcctgaggctaagaaagtggacgccggagggaaagtgaagaaaggcaacttaaaagccaagaaaccaaagaagggcaagccacattgctctcgcaaccccgtgctggttcgaggcatcggacgttactcccgctccgctatgtactcccgtaaagcgatgtataagcgtaaatactcggccgcaaaatcgaaagtggaaaagaagaaaaaggagaaggtactggccacagtgactaagccagtgggcggagataaaaacgggggaactagggtggttaagctcaggaagatggtgagatag

SEQ ID NO: 239058 - DNA, 345 bp, synthetic construct
  misc_feature 1..345: note = Description of Artificial Sequence: Synthetic coding sequence
  source 1..345: mol_type = other DNA
atggcgggtgagaaggtagaaaaacccgacacaaaagagaaaaagccagaggcaaaaaaggttgatgccggaggcaaggttaaaaaaggcaatctcaaagctaagaagcccaaaaaaggtaaaccgcattgtagcaggaatccagtcctcgtgcgtggtatagggaggtactcaaggagcgcaatgtacagccggaaggcgatgtataagcgaaaatatagcgccgctaagtcaaaggtcgaaaagaagaaaaaggaaaaggtgctcgcaaccgtaactaagcccgttggaggagataaaaacgggggtacacgcgtggtcaagctgcgcaaaatggttcgctag

SEQ ID NO: 239059 - DNA, 747 bp, synthetic construct
  misc_feature 1..747: note = Description of Artificial Sequence: Synthetic coding sequence
  source 1..747: mol_type = other DNA
atggagggggtggaggagaaaaagaaagaggtccccgcagtgccagagacgcttaaaaaaaagcggagaaattttgcagagctgaaaattaaacgcctgagaaagaagttcgctcagaagatgttgaggaaagcaagacgaaaactaatttatgagaaagctaaacactatcacaaggaataccggcagatgtacaggaccgagatcaggatggcccgtatggcaaggaaggctggaaacttctacgtgccagccgagcccaagcttgcttttgtgatcagaattcgaggcatcaacggggtgagcccaaaggttcggaaagtgctccagttacttcgactccggcagattttcaatggtacattcgtcaagctgaataaggcctcaataaatatgctgcggatcgtggagccgtacatcgcctggggctaccccaatttgaaaagcgttaacgagctaatctacaagcggggttatgggaagatcaacaagaaacgtatcgctctcacggacaatgctctcatcgcgagaagcctgggaaagtacgggatcatttgtatggaggatctgattcacgaaatctacaccgtaggcaagcgtttcaaggaagcaaataacttcctgtggcccttcaaactgtctagcccgagagggggaatgaaaaagaagaccacccatttcgtggaggggggagatgccggaaatcgggaggaccagatcaataggctgattcgcaggatgaactag

SEQ ID NO: 239060 - DNA, 456 bp, synthetic construct
  misc_feature 1..456: note = Description of Artificial Sequence: Synthetic coding sequence
  source 1..456: mol_type = other DNA
atggcacctctgtaccaggccgcaggaaaaggtgatgttcccacaaagaggccacctgtgcttcgtgcaggcgtcaatactgtgactactctggtggaaaacaaaaaagctcagctcgtggtgatcgctcacgacgttgaccccattgagcttgtggtctttttgccagcgctgtgcagaaaaatgggtgtaccctattgcataatcaaggggaaggccagattagggaggctcgttcatcgaaagacatgcacgaccgtcgcgtttacacaggtgaattcggaggacaagggcgcactagcaaaactagtagaggctattagaacgaattataatgaccgctacgatgaaatccggcgtcactggggcggtaatgtgctggggccaaaatcggtcgctcgcattgccaagttagagaaagcaaaagccaaggagttagcgacgaaattggggtag

SEQ ID NO: 239061 - DNA, 801 bp, synthetic construct
  misc_feature 1..801: note = Description of Artificial Sequence: Synthetic coding sequence
  source 1..801: mol_type = other DNA
atgcccaagggaaaaaaggctaaagggaaaaaggtggcgccagctcccgctgttgttaagaaacaggaagcgaagaaggtggtcaaccccctgtttgaaaagcgcccaaaaaatttcggcataggtcaggacatacaacccaagcgggatttgacaagattcgtgaaatggccaaggtatattagactacagagacagcgggcaattctgtataaacgcctgaaggtcccacctgccatcaaccagtttacccaggctctagacagacagacggccactcagctgctcaaactggctcacaaataccggcctgaaactaagcaagagaagaagcaaagattgttggcccgagccgaaaaaaaggccgcaggaaaaggggatgtgcccactaagagacccccagttctccgcgctggagtcaacacagtcaccaccctggtcgagaacaaaaaagcacagctagtcgtgatcgctcatgacgtggaccctattgaactagtggtgttcctgccagctttgtgcaggaagatgggagttccttattgtatcattaaaggtaaagcccgattggggaggctggttcatcgcaagacttgcacaaccgtggcgttcacgcaggtcaactccgaagacaaaggggctctggctaagctggtggaggcaattcggactaactacaacgaccgttatgatgaaattagacggcactggggtggcaacgttctcggacctaagtctgtggctcggatcgctaagctggagaaagccaaagccaaagagctcgcgacaaagctgggttag

SEQ ID NO: 239062 - DNA, 576 bp, synthetic construct
  misc_feature 1..576: note = Description of Artificial Sequence: Synthetic coding sequence
  source 1..576: mol_type = other DNA
atgctcgtgcgcctgaacgtgcgatgttcatgccgtggcgtggtgctgggcggatgtcggaaactactagccagccttgttcagcccaaaggcaagaaagccaagggcaagaaggtggcgcctgcccctgctgtcgtcaagaaacaggaggcaaagaaggtcgttaatccgctgttcgaaaagagaccaaagaacttcggtattggtcaagatatccagcccaaaagggatctcaccagattcgtcaagtggccgagatatattagattgcagcggcagcgggcaatcttgtacaaacgacttaaggtaccgcctgcaattaaccaattcacacaagccctagatcgtcaaacagccacccaactgttgaagctcgcgcacaaatacaggcctgagaccaaacaggaaaagaagcaacgactcttggcgcgtgccgaaaaaaaggcggctggtaaaggcgacgtgcctactaaacgccctcctgtcctgcgcgcaggggttaacaccgtgacgactctggtagagaataaaaaggcccagctagtagtgatcgcgcatgatgtggaccctatctag

SEQ ID NO: 239063 - DNA, 774 bp, synthetic construct
  misc_feature 1..774: note = Description of Artificial Sequence: Synthetic coding sequence
  source 1..774: mol_type = other DNA
atgggcagggtgatccgaggccagaggaaaggcgcaggttcagtattcagagcacacgtcaagcatagaaagggagcggctagactgcgagccgtcgattttgcagaacggcacggctatataaaaggcatcgtgaaagacattatacatgaccctggcaggggtgcacctcttgctaaagtggtcttcagggacccctacaggtttaagaagcggacagagctgttcatcgccgctgagggcattcatacaggccaatttgtctactgcggaaaaaaagctcaactgaacatcggaaacgttttgccagttggcacgatgcccgaaggcacgattgtttgttgtctggaggagaaacccggagatagagggaagctggccagagcctcagggaactacgctacagtcattagtcacaaccctgaaacgaaaaaaacacgagtgaagctcccttctggctcgaagaaggtaatcagctcagctaatagagctgtggtcggtgtcgtcgccggaggtgggagaattgacaaaccgatcctgaaagctggcagggcctaccacaaatacaaagcgaaacgaaactgctggccacgggtccgcggtgtggctatgaatcccgtggagcatcctttcggcggtggaaatcaccagcacataggaaagccaagcactatccgcagggacgcaccagccggacggaaagtcggtttaatcgctgctcggaggacaggccgactgcgcggaaccaaaacagtgcaggagaaggagaactag

SEQ ID NO: 239064 - DNA, 774 bp, synthetic construct
  misc_feature 1..774: note = Description of Artificial Sequence: Synthetic coding sequence
  source 1..774: mol_type = other DNA
atgggaagggtgattaggggtcagaggaaaggagccggatctgtcttccgtgcgcatgtcaaacacaggaagggtgcagcaaggcttcgggctgtcgactttgccgaaagacacggctacataaaggggatcgtgaaagatattatccacgatcctggacggggagcacccctggctaaggtggtctttcgcgatccctacaggttcaagaagcggacggagctgtttatcgctgcggagggaatacataccggccagtttgtttactgtggtaagaaggctcagttaaatatcggaaacgtgctgcccgtaggaactatgcctgagggcactattgtgtgttgcctggaagagaagcccggtgaccgcggaaagctagccagggcatccggaaattacgcaacagtcatcagtcacaatcccgagacgaagaaaacccgggttaaactgccaagcggatctaagaaggtcatctcttccgccaaccgagctgtggttggcgtagtggctgggggaggccgtatcgataagcctatcctcaaagctggacgagcatatcataaatacaaagctaaacgtaactgctggccccgtgtccgcggagttgcgatgaacccggttgaacatccgtttggaggtggcaatcaccaacacattggcaagcctagtactattagaagagacgcgccagccggacgaaaagtgggccttatcgcggcacgtagaacaggcagactgcgcggaacaaagactgtgcaggagaaggaaaactag

SEQ ID NO: 239065 - DNA, 579 bp, synthetic construct
  misc_feature 1..579: note = Description of Artificial Sequence: Synthetic coding sequence
  source 1..579: mol_type = other DNA
atgaaaacaattttatccaaccagactgtcgatatccccgaaaacgtcgacatcacgttaaaggggaggacagtgattgtgaaggggccacgaggaactttgagaagagactttaaccacatcaatgtggaactgtccttgctgggaaaaaagaagaaacgtctgagagtagacaaatggtgggggaatcggaaggagctcgccactgtgcgcacaatctgttcccatgtccagaacatgattaagggtgtgaccctggggttcagatataagatgaggtctgtctatgctcactttcccatcaacgtggtgatacaggaaaatgggtccttggtggaaattcgtaactttttaggtgaaaagtacatcagaagagtccgaatgaggcccggtgtcgcctgctccgtgagtcaggcgcaaaaggatgagttgatcctcgagggcaatgacatcgaacttgtgagtaactccgcagctttaattcaacaggccaccacagtgaaaaataaagatatcaggaagttcttggatggcatctatgtgagcgagaagggaacggttcagcaggcagatgagtag

SEQ ID NO: 239066 - DNA, 444 bp, synthetic construct
  misc_feature 1..444: note = Description of Artificial Sequence: Synthetic coding sequence
  source 1..444: mol_type = other DNA
atgaagaccatcctgtctaaccagacggtcgacatcccggaaaacgtggatattacactgaaaggcagaaccgtgattgtaaaagggcctagaggaaccctcagaagggatttcaatcacatcaatgtcgaactgtcccttcttggaaagaagaagaagcgtctgcgagtggataagtggtgggggaatagaaaagaactggccacggtccgaacaatatgcagccacgtgcagaacatgattaaaggggttacactcggtttcagatacaagatgaggtcagtatacgcccacttcccgatcaacgtagtgattcaggagaacggcagcctggttgaaattcgcaacttccttggcgagaagtatatcaggcgggtgcgcatgcggccaggagtggcctgcttcaagttctctggattcgatagcgcctcccataatagttag

SEQ ID NO: 239067 - DNA, 579 bp, synthetic construct
  misc_feature 1..579: note = Description of Artificial Sequence: Synthetic coding sequence
  source 1..579: mol_type = other DNA
atgaaaactattttgtcaaaccagaccgtcgatatcccagaaaacgtagatatcacacttaagggcagaactgtaatcgtcaagggaccccgtggcacgctaaggagggattttaaccatataaatgtggagttgtccctcttgggcaagaaaaagaaaagattgagggttgacaagtggtggggaaatagaaaggagcttgccacagtccgtactatatgcagccatgtgcagaacatgatcaagggagtgaccctgggattcaggtataaaatgagatcggtgtacgcccattttcctatcaacgtggtgatccaagagaacggctctctagtggaaattagaaattttctcggcgagaaatatatccgcagggtacgaatgcgtcctggcgtcgcatgctcagtctcacaggctcagaaagatgaattgattctggaaggcaacgatatcgaattggtgagcaacagtgcagccttgatccagcaagcgactactgtgaaaaacaaggatatcaggaagttcctggacggaatctatgtttctgagaagggcaccgttcaacaagctgatgaatag

SEQ ID NO: 239068 - DNA, 501 bp, synthetic construct
  misc_feature 1..501: note = Description of Artificial Sequence: Synthetic coding sequence
  source 1..501: mol_type = other DNA
atgaagacaatcctgtctaaccaaaccgttgacatccccgagaacgtcgatattaccctgaagggacgaacagttattgtgaaaggccctcgaggaacattgcgccgagactttaaccacattaacgttgaactcagtctgctcgggaaaaagaagaagagactgagggtggataagtggtgggggaaccggaaggagcttgctacagtccgcactatatgttctcacgttcagaacatgatcaagggagttacgctgggctttagatacaaaatgcgatctgtttacgcccatttccccatcaacgtggtgatccaggaaaatggctctctggtggagattagaaacttcctgggtgagaaatacatccgccgagtgcgcatgcggccaggtgtcgcttgtagcgtctctcaggcgcagaaagatgagctgatactggagggaaacgatatcgaactggtgtctaattcagcagccctaatccagcaggccacaacctag

SEQ ID NO: 239069 - DNA, 498 bp, synthetic construct
  misc_feature 1..498: note = Description of Artificial Sequence: Synthetic coding sequence
  source 1..498: mol_type = other DNA
atgctcatgcccaaaaaaaaccggatagccatttatgagcttctgttcaaggagggagtgatggtggctaaaaaggatgtacacatgcctaaacaccctgaattggccgataagaacgtgccgaatctgcatgtgatgaaggccatgcagtctctcaagagcagaggttatgtcaaagaacagttcgcgtggcgacacttctattggtacctgacaaatgaggggattcaatacctgcgcgactacttacatctgccacctgaaattgtgccagcaactctgaggaggagccggcctgagaccgggaggccacggccaaagggactcgaaggcgagcgcccagcccgtctgacacgtggcgaagccgacagggacacatatcgcagatcggctgtgcccccaggtgcagataaaaaggccgaagctggcgcaggcagcgccaccgagtttcaatttagagggggattcgggcgagggaggggccagccaccacagtag

SEQ ID NO: 239070 - DNA, 477 bp, synthetic construct
  misc_feature 1..477: note = Description of Artificial Sequence: Synthetic coding sequence
  source 1..477: mol_type = other DNA
atggcagatatccagactgagagggcctaccagaagcagcctaccatcttccagaacaaaaagcgggtccttctgggtgagacgggaaaggagaaactgccaagatactataagaacattggactgggattcaagaccccaaaggaagccatagaaggtacctacattgataagaagtgcccattcacaggaaatgtttcaatccgcggacgcatcctgtctggggttgtgaccaagatgaagatgcagaggaccattgtgatccggagagactatctacactatattcgtaagtataaccgtttcgaaaagcggcataaaaacatgagtgtgcatctgtctccatgttttagagatgtgcagatcggggacattgttacagttggagagtgtcgaccactctcaaagactgtgaggtttaatgttctgaaagtgactaaggcggctggcaccaagaaacaatttcagaaattttag

SEQ ID NO: 239071 - DNA, 423 bp, synthetic construct
  misc_feature 1..423: note = Description of Artificial Sequence: Synthetic coding sequence
  source 1..423: mol_type = other DNA
atgacgtctatgacacagtcgttgcgggaagtcataaaagctatgactaaggccagaaatttcgagcgagtgctagggaaaattactctcgtcagcgcagcgccaggcaaggtgatttgtgagatgaaggtcgaggaggagcacactaatgcaattggcactctgcacggagggctgacagctacgctggtggataatattagtacaatggcactgctgtgtactgaaagaggggcaccaggcgtgagcgtggatatgaacattacatacatgtcccctgccaaactgggcgaggacatagtaattacagcccatgtcctgaagcagggaaaaacactggccttcaccagtgtggatctaaccaataaggctacagggaagctcatagcccagggcagacatacaaaacacctcggtaactag

SEQ ID NO: 239072 - DNA, 456 bp, synthetic construct
  misc_feature 1..456: note = Description of Artificial Sequence: Synthetic coding sequence
  source 1..456: mol_type = other DNA
atggggagaatgcatgcccctggtaagggactcagccaatctgcccttccttacagaagatccgtcccaacatggctaaaactgacttcagatgatgtgaaagaacagatctataaattggcaaagaaggggttaacaccctcccaaatcggtgttatcctccgggacagtcacggagtggctcaagtcaggttcgtgaccggtaacaagattctgagaatactgaagagcaaggggttggcccctgaccttccagaagacctgtaccatcttattaagaaggcagtggcagttaggaagcatctcgagaggaacagaaaggacaaagatgcgaagttccgcttaattctgatcgagagtcggatacaccgccttgcaaggtactataaaactaagcgggtgctgcccccaaattggaagtacgaatcgagtacagcgagcgccctggtagcctag

SEQ ID NO: 239073 - DNA, 456 bp, synthetic construct
  misc_feature 1..456: note = Description of Artificial Sequence: Synthetic coding sequence
  source 1..456: mol_type = other DNA
atggcccctcgcaaaggcaaggaaaagaaggaagagcaggtgatctccctgggccctcaagtcgctgagggtgagaacgtgtttggggtgtgccatatcttcgcgtcgtttaacgacactttcgtacacgtgaccgatctgagcggaaaagagaccatatgtagggtgaccggcggaatgaaggttaaagcagatagggatgaatccagtccatatgctgccatgctagccgcacaggacgttgctcagcggtgtaaagaactgggaatcacagccctacatatcaaactccgggcaacaggaggtaaccgcaccaagactcccggacctggagcacagtctgcactgagggctctggctcggagcggcatgaaaataggtagaatagaggatgtcaccccgattccatctgattccactagacgtaagggcggaagaagaggaagaaggttgtag

SEQ ID NO: 239074 - DNA, 456 bp, synthetic construct
  misc_feature 1..456: note = Description of Artificial Sequence: Synthetic coding sequence
  source 1..456: mol_type = other DNA
atggcccctcgcaagggcaaggaaaaaaaagaggagcaggtcatatccttgggaccacaggtcgctgaaggagagaacgtgttcggagtgtgccacatattcgccagcttcaacgacacattcgtgcacgtcacagacctgtccggcaaggaaactatctgcagagtcactggaggaatgaaagtgaaggctgaccgtgacgagagctcgccgtacgctgctatgttggcagcacaggacgtggcgcagagatgtaaggaacttggaatcacggctctgcatattaagctaagagcgaccggaggaaaccgaacaaagaccccgggacctggagctcagagcgcgctgagggctctcgcgcgatctggcatgaaaattggaaggattgaagacgttactccgattccaagcgatagcacacgacggaaaggtggccgtcggggacggcgattgtag

SEQ ID NO: 239075 - DNA, 456 bp, synthetic construct
  misc_feature 1..456: note = Description of Artificial Sequence: Synthetic coding sequence
  source 1..456: mol_type = other DNA
atggctccgaggaagggcaaggagaagaaggaagagcaagttattagcctcgggccacaggtggccgagggagaaaacgtgtttggggtgtgccacatcttcgcgagcttcaacgatacgtttgtccacgtcacagatctgtcagggaaagagactatttgccgggtgactggaggcatgaaagtgaaagcagacagggacgagtcctctccctacgctgcaatgctagccgctcaggatgtcgcccagcgctgcaaggaattggggatcacggctctgcacataaagctgcgggcaaccggcggaaataggaccaaaacccctgggcctggcgcacagagcgcactgcgggctttagccaggagcggcatgaagattgggaggattgaggatgtgacgccaatcccctctgattccactagaagaaaaggagggcgtagaggtagacggttatag

SEQ ID NO: 239076 - DNA, 456 bp, synthetic construct
  misc_feature 1..456: note = Description of Artificial Sequence: Synthetic coding sequence
  source 1..456: mol_type = other DNA
atggcgccacgcaaagggaaggagaaaaaagaagagcaggttatctctctgggtcctcaggtggcggagggagaaaacgttttcggtgtctgtcatatttttgccagcttcaatgacacatttgtccatgttacggatctttccggtaaggaaacaatctgtagagtaactggaggtatgaaggtgaaagccgaccgggatgagtcatctccatacgcagctatgcttgctgctcaggacgtagctcagcggtgtaaggagctgggcatcacagcccttcacatcaagctgcgggcaactggtggcaaccgcaccaaaaccccaggaccaggggctcagagtgccctgagagctctggcacgttccggcatgaaaattggacggatagaagacgtcacccccatacccagcgactccacacgcagaaagggcggacgcagagggaggcgcttgtag

SEQ ID NO: 239077 - DNA, 6912 bp, synthetic construct
  misc_feature 1..6912: note = Description of Artificial Sequence: Synthetic coding sequence
  source 1..6912: mol_type = other DNA
atggcatcaagtgtcgccccttatgaacagctggtgcgacaagtcgaagccctgaaggcagaaaactcgcacttaaggcaggaattgcgggataacagttcccatttgtccaagctcgagacagagaccagcggcatgaaggaggtactgaaacacctgcagggcaaactggaacaggaggccagagtactcgtgtcaagcggacagacagaggtcttagaacagctgaaggcactccaaatggatatcacatccctgtataacctaaagttccagcctccaactctgggccctgagcctgccgctcgtactccagagggaagccccgtgcatggatccggcccatcaaaggatagttttggagaactgagtcgcgctactatacggctcctggaggagctggatagagaacgctgctttcttctgaatgagattgaaaaggaggaaaaagaaaagctttggtactactctcagcttcagggcctgagtaaaaggcttgatgagctgccccacgttgagacacagttctcaatgcagatggatctgatccggcagcagttggagtttgaggcgcagcatatcagaagtctcatggaggaacggtttggaacatctgatgagatggtgcagcgggctcagattcgggctagcaggctggaacagattgataaggaactcctagaagcccaggaccgtgtgcagcagaccgaaccccaggccctcctcgccgtgaagtccgttccagttgacgaggatccggagacggaagtgcctacccaccccgaagacggcacacctcagcctggcaatagtaaagttgaggtggtcttctggctgctttcaatgcttgcaaccagggaccaggaggatacagcacgcacactgcttgcgatgagttcctcacccgaatcctgcgtggctatgcgcagaagtggatgtctgccgcttctgctccagatattgcatgggaccgaagctgcagccggtggcagggccggagccccaggggctcccggagccaaagacgccaggatgagggcgaacgcagcccttcacaacatcgttttcagccaacctgatcagggcctggcgagaaaagaaatgagggtattgcatgtccttgagcaaattagagcttactgcgagacttgttgggactggctgcaggcaagggatgggggtcccgaggggggaggagctggaagcgcaccaatccctatagagccccaaatttgccaagccacttgcgctgtcatgaagttgagttttgatgaggaatatcgcagagcaatgaatgaactggggggacttcaggccgtggctgagttgttgcaggtcgactatgaaatgcataaaatgacccgagatcccttgaatctggcactaagacgctatgcagggatgacgctgacaaaccttacatttggcgacgtggcgaataaagctacactctgcgccaggagaggctgcatggaagctattgtggcgcagctggcatctgactcagaagagttgcaccaggtggtaagtagtattttgcgaaacttaagttggcgcgcagatatcaactctaagaaagtgctgcgggaggccggatccgtcaccgctctcgtccagtgcgtgcttcgtgccaccaaggaaagcaccctgaaatccgtgctcagcgctctgtggaatttgtctgcccactcaaccgaaaacaaagcagctatatgtcaggtggacggtgccttaggatttctggtgagcacactgacatacaaatgccagagtaattctctggcgatcatcgaatctggcggaggtatcctgcggaacgtctcttcgctcgtcgccactagggaagactaccggcaggtgctcagggatcacaactgtttgcagactcttcttcagcatctgacatctcatagcctgactatcgtgtctaatgcctgtggaaccctgtggaacctgagtgccaggtcggcacgagaccaagagctgctgtgggatctgggggctgtaggaatgttgagaaatctcgtgcactctaagcacaaaatgatcgcaatggggtccgctgcagcactgcggaatttgttggcacaccgacccgctaagcaccaggctgccgctactgctgtgtcaccagggtcttgtgtgccctccctgtacgtgcgtaaacagcgggcactggaggcggagttagacgcaaggcacttggcgcaggccttggagcacctggagaaacagggaccccctgcagcagaggccgcaaccaagaaacccctcccgcctttacggcatttagatgggctggcccaggactacgcttcagattctggatgcttcgatgatgatgatgcaccaagctctctcgcggcagccgcagcaacgggcgagcccgcttccccggcagctctgagtctgttcctgggatcacccttcctccagggtcaggccttggcacgtacccctcccacgagaagaggcggaaaagaggcagagaaagatacctctggcgaggccgcagtagcagcgaaagcgaaggcaaagctggctctggctgtcgccagaattgaccagttggtggaggatataagtgctctccatactagttctgatgattctttcagcctgtcctccggggatcccggtcaggaagcgccaagggagggacgtgcccagtcttgttccccatgcagaggccctgagggcggaaggcgagaagctggatcaagagcccacccgctcttacgcctgaaagccgcacacgcaagcctttctaatgacagtttgaacagtggatcggcttctgacggctactgtccacgggaacacatgctgccctgtcccctggcagcactcgcatcgcggagggaagacccccgatgtggccagccacgaccatccagactggacctagacttgccagggtgtcaggctgagccccctgcaagggaggccacaagcgccgatgctagagtgaggactatcaaacttagcccaacgtatcaacacgtgccgctcctagagggggcaagtagggctggcgcagaacccctggcaggccctgggattagtcctggggctaggaagcaggcatggcttcctgctgaccatctcagtaaggtcccagagaagcttgccgcagctccattgagtgtcgcgtcaaaggccctgcaaaagttggcagcccaggaaggtcctctctccctgtctagatgcagttctctttcatccctgagtagtgctggcaggcccggacccagtgaagggggagatctcgacgactctgattcttcccttgaaggcctggaagaggctggcccttcagaagctgagctcgactcaacttggcgcgctcccggagccaccagcctccctgttgccatccctgctcctcgaagaaaccggggaagaggactcggagtggaagacgcgactccttccagttcttcggagaattacgttcaggaaacacccctcgtgctttctagatgctctagcgtcagcagtttggggtcttttgaatctcctagtattgcaagctcgatccctagcgagccttgttctggacaaggctcgggaacaatcagtccttctgagctgcccgactcacctggccaaacaatgccaccaagcaggtccaaaactcccccactggcgcctgccccacaaggtcccccagaagcaacacagttcagcctccaatgggaatcatatgttaagcggttcttggacatcgctgactgcagggagaggtgtcgcctgcccagcgagcttgacgctgggtcagttagatttaccgtggaaaaaccagatgaaaacttctcgtgtgcctcaagcttgagtgcccttgccctgcatgagcactacgtccagcaggacgttgagctgaggctgctgccctccgcttgccccgagagaggcggaggtgccggaggggctggccttcacttcgccggtcaccgcaggagggaagagggcccagccccaaccggatcccgcccacgcggtgctgccgaccaggagctggagctactccgggagtgtctgggagccgctgtgccagcacggctgcgcaaagtggcctcagccttggtgccaggcagaagagcgctgcccgtacctgtttatatgcttgtgccagcccctgctcccgcacaggaggacgattcttgtacagattcagcagaggggaccccagtgaatttttcaagtgcagcttccctgtctgatgagactctgcagggaccacctagggatcagccagggggtccagcgggtaggcagcgacccacaggaaggcctacctctgcacggcaggccatgggccaccggcataaggccggaggagccggtagatccgccgaacaatccaggggcgcaggaaagaaccgagcaggactggagctgcccttagggagacctccatcagccccagccgacaaggacggcagcaagccaggtaggaccagaggcgacggagccctgcagtccctatgcttgacgacacccaccgaagaggccgtgtactgcttttacggaaacgacagcgatgaagaaccccctgccgcagctccaacacctacgcatagaaggacctccgccattccacgcgcatttacaagagagcgtccacagggtaggaaggaagcccctgcaccatccaaagctgcaccagccgcacctccacctgcccgtactcagccgtcacttatagctgatgaaactcccccatgttacagtctttccagcagcgcttccagcctgtccgaaccagagccctcggagcctcctgccgtccatccaaggggtcgggagcccgcagttaccaaagatcccggacctggcggagggagggacagctctccgagtcctcgtgcagctgaggaactgctgcagaggtgtattagtagcgctctgcctcggcgtagaccacccgtctccggcctcaggcggagaaagcctagagcaacaagactcgatgaaagacccgctgaggggtcacgagagagaggcgaggaggctgctggcagtgaccgagcctcagatctggacagcgtggaatggagggcaatacaggaaggcgctaacagcatcgtcacatggctgcatcaggcagccgctgccacacgcgaggcatcttccgaaagcgattccatcttgagctttgtcagtgggctgagtgttggctccacgctgcagcctccgaaacacagaaaaggcagacaggcagaaggtgagatgggctccgcgcgtcggcctgaaaagcggggagccgcttcagtgaaaacctctgggagccccaggagtcctgccggtcctgaaaagcccaggggcacccagaaaaccacacctggcgtgcctgctgtgctccgcggtcgcacagtgatctatgttccttcgcctgcacccagggcacagccgaaaggaactcctgggcctcgtgccaccccacgtaaggttgcccctccgtgtctggctcagcccgcagccccagctaaagtccctagcccaggccaacagcggtcccgatccctccatcggcctgcaaagacatcagagctggctaccttgtctcagccccctcgatccgcaaccccccctgccagactggctaaaacaccttcctcatccagctcccaaacatctcctgcctcacaacctctgccgcgaaaacgccctcccgtcacgcaggcggctggggctcttcctggaccaggggcttctcccgttcctaagacccctgccagaaccttgctagcaaaacagcacaagacccagcgcagtcccgtcaggataccatttatgcagcgtcccgcaaggagaggtccaccaccccttgcaagagccgtgcccgagccaggaccgagaggaagagccggtacagaggcaggaccaggagccaggggcggtcgcctagggcttgtgcgcgtggcaagtgctctgtcatccggtagcgagagttccgatcgtagtgggttccgcagacaactgacctttatcaaggagtcaccagggcttcggagacgacgcagcgaactgagttctgccgagagcgcagcctctgcgcctcagggagcctcccctcgaaggggtcgccctgccctacccgcagtcttcctgtgcagctccagatgcgaggagctgcgtgccgcaccccgtcaggggcctgccccagctcgccagaggcccccagcagcacgaccatcccctggggaaaggcctgcacgccgtaccacttccgaaagtcctagtagactcccagtcagagcacccgcagcaagaccagaaactgtaaagaggtatgcttcactgccccacatttccgttgcaagaaggcctgatggtgctgtgcccgctgctccggcttcggccgacgctgcacggaggagctcggatggcgaacctcgtcctctccctcgcgtagcggcaccagggaccacatggaggcggatccgcgacgaggatgtcccccatatcctccgtagtacacttcccgctacagcgctccccctgcgaggttccacaccagaggacgcacccgctggccctcccccaagaaagactagtgacgccgtcgtgcagaccgaggaagtggccgcacctaaaaccaatagctccacaagtccctcacttgaaacgcgggaacctccaggcgcacccgcagggggtcagcttagccttctcggtagcgacgtggacggccctagtctcgccaaggcccctatcagtgctccctttgtgcacgaaggcttaggtgtcgcagtgggtgggttccccgcttctcggcacggttcacctagtaggtccgctcgggtgccccctttcaattatgtgccatcacctatggtagtagcagctacgacagactccgccgcagaaaaggctccagcaacggcttccgccaccttgttggagtac

SEQ ID NO: 239078 - DNA, 438 bp, synthetic construct
  misc_feature 1..438: note = Description of Artificial Sequence: Synthetic coding sequence
  source 1..438: mol_type = other DNA
atggcagaggtagagcagaagaagaaacgcaccttccgcaaattcacctacaggggtgtggatctcgaccaattgctggatatgtcctatgagcagctgatgcaactctacagcgctcgccagagacggcgactcaatcggggacttaggaggaaacagcactcgttactgaaacgactgagaaaggccaaaaaagaggcccctcccatggagaagcctgaggttgttaaaacacacttgcgtgacatgatcatccttccggagatggtggggtctatggttggcgtgtataacggcaagacttttaatcaggtggagattaaacctgaaatgataggacattatctgggggaatttagcattacctacaaacccgttaagcatggccgacccggtataggagctactcattcaagcaggttcatccccctgaaatag

SEQ ID NO: 239079 - DNA, 393 bp, synthetic construct
  misc_feature 1..393: note = Description of Artificial Sequence: Synthetic coding sequence
  source 1..393: mol_type = other DNA
atggttcggatgaacgtgttggcagatgcactcaaaagtatcaacaatgctgagaaaagaggaaagcgccaggtattaatccgtccttgttccaaagtcatcgtcaggtttctgaccgtgatgatgaagcacgggtacatcggagagtttgagattattgacgaccatcgggcagggaagatcgtggtgaacctgactggccgtctgaacaagtgcggcgtgatcagtccccgttttgatgtgcagctgaaggacttagagaagtggcaaaataacctactgccatctcgccagttcgggtttattgtgctgactaccagcgcaggcatcatggaccacgaggaggccagacggaagcatacaggcggtaagatcctagggtttttcttctag

SEQ ID NO: 239080 - DNA, 393 bp, synthetic construct
  misc_feature 1..393: note = Description of Artificial Sequence: Synthetic coding sequence
  source 1..393: mol_type = other DNA
atggtccgtatgaatgtgttagccgacgccctgaaatccatcaataacgccgaaaaaagaggaaagaggcaggtactgattcgaccatgcagcaaggtcatcgtgcggttcctcactgtgatgatgaagcacggatacataggagaatttgagatcattgacgaccatagggcgggtaagattgtggtcaatctcacaggacggttgaacaagtgtggggtgatcagccccaggtttgacgtgcagctaaaggatctggagaagtggcagaataatctgctcccatctcggcaattcggattcatcgtgcttaccacgtccgccggaataatggaccacgaggaagctaggcgcaaacacacaggcggaaagatcctgggttttttcttctag

SEQ ID NO: 239081 - DNA, 441 bp, synthetic construct
  misc_feature 1..441: note = Description of Artificial Sequence: Synthetic coding sequence
  source 1..441: mol_type = other DNA
atgccatctaaaggcccactgcagagtgtgcaggtgtttggtcgaaaaaaaacggccacagctgtggctcactgcaaacgagggaacggtctgatcaaagtgaacggcaggccgctggaaatgatcgagcctaggacactgcagtacaagctactcgaaccagtcctgctgctaggaaaggagagatttgccggtgttgatattcgcgtgagagtgaagggcggtggacacgtggcacagatctacgccatcagacagtccatttctaaagccttagtcgcatattatcagaaatacgtggacgaggcatctaaaaaggagattaaggatattttaatccagtacgatagaaccctgctggtcgccgatccacggaggtgcgaaagcaagaaatttggcggaccaggggcaagggcacggtatcagaaaagctaccggtag

SEQ ID NO: 239082 - DNA, 459 bp, synthetic construct
  misc_feature 1..459: note = Description of Artificial Sequence: Synthetic coding sequence
  source 1..459: mol_type = other DNA
atgccatccaagggacccctgcagagcgtgcaggtttttggcaggaaaaaaaccgccacggccgttgctcattgtaagcgcggaaatggattgattaaggtaaatgggagaccattagagatgatcgaacccaggacactccaatacaagctcctggagcctgtgctgctactgggcaaggagcgctttgccggagtggacatacgggtaagggtgaagggtgggggacacgtcgcccagatctacggtgagtcccaagagctaggtgcctggaggcgatggttatgggaggggggactgcattccgctccagttccattcaactgtgtgtctttttctcaattatccgtgagcccaagccctaaaccatggtggccaattacccggaacatgtggatgcgcctgccacgccgacgcagtaagacctcttctagctccatgacaggcccttgttggtag

SEQ ID NO: 239083 - DNA, 408 bp, synthetic construct
  misc_feature 1..408: note = Description of Artificial Sequence: Synthetic coding sequence
  source 1..408: mol_type = other DNA
atgggcagagttagaacgaagaccgtcaaaaaagcagcacgagtgattattgaaaaatactatacgcgactcggtaacgacttccacacgaataaacgagtttgtgaggagatcgccatcattcccagcaagaaacttaggaataagatcgcgggatatgtcactcaccttatgaagcgcatacagagaggcccagtacgcggtatcagtattaaactgcaagaggaggagagagagagaagagacaactatgtgccggaggtgtcggcactcgatcaggagattatcgaggtggacccagataccaaggagatgttgaagctgttggacttcggctccctgtccaatctgcaagttacgcagcccacagtcgggatgaactttaaaacccccagagggcctgtgtag

SEQ ID NO: 239084 - DNA, 300 bp, synthetic construct
  misc_feature 1..300: note = Description of Artificial Sequence: Synthetic coding sequence
  source 1..300: mol_type = other DNA
atggacctgatagggttcggatacgcagctctggtgaccttcggatcgatcttcgggtacaaacggagaggcggagtgccctcccttatcgcgggactttttgtcggttgtctggccggatatggagcatatcgcgtcagtaacgataagagagacgtaaaagtttcgctgtttacagccttcttcctggctacaattatgggcgtacgcttcaaacggtctaaaaaaataatgcccgctggcttggttgctggtctgagcctgatgatgattctccgcctcgtgcttctccttttatag

SEQ ID NO: 239085 - DNA, 459 bp, synthetic construct
  misc_feature 1..459: note = Description of Artificial Sequence: Synthetic coding sequence
  source 1..459: mol_type = other DNA
atgagtctcgtaatccccgaaaaatttcaacatatattgagagttctcaatactaatatcgatggacggcgtaagattgctttcgctattacagcaatcaagggggtggggagaagatatgcacacgttgtgctaaggaaggcagatatagatttgacaaaaagagctggcgagctcacagaggatgaggtggaacgagtgatcaccatcatgcagaacccccgacaatataagattccggattggtttctcaacaggcaaaaggacgtgaaggatggaaagtacagtcaggtgttggcaaatggcctagataacaaacttagggaggacctggagaggttgaagaagattagagcacacaggggtctcagacatttctgggggctgcgggtgcgagggcaacatactaaaacaaccggcagaaggggccgaaccgttggggtaagcaaaaagaaatag

SEQ ID NO: 239086 - DNA, 459 bp, synthetic construct
  misc_feature 1..459: note = Description of Artificial Sequence: Synthetic coding sequence
  source 1..459: mol_type = other DNA
atgtctttggtaattcccgaaaaatttcagcatatactgcgagtgcttaacacgaacattgacggcagacgcaaaatcgcattcgccatcactgctatcaaaggtgtgggtcgaagatacgcccatgtggtgctccgaaaagccgacatagatctcactaaacgcgcaggagaactaaccgaagatgaagtggagcgagttatcaccattatgcagaatccgagacaatataaaattcctgactggttcctcaatagacaaaaagacgttaaggatggaaagtattcccaagtgcttgccaatggtttggataacaagctgcgcgaggacctggagaggcttaaaaagataagagcccaccgcggtctcaggcacttctggggtctgagggtccgcggacaacatacaaaaactaccggcaggcgaggacgtacagttggcgtgagtaagaagaaatag

SEQ ID NO: 239087 - DNA, 105 bp, synthetic construct
  misc_feature 1..105: note = Description of Artificial Sequence: Synthetic coding sequence
  source 1..105: mol_type = other DNA
atgtcgctggtgatccccgaaaagttccagcacatcttgagagtgcttaacaccaatattgatggcagaaggaagattgcctttgctataaccgctatcaaatag

SEQ ID NO: 239088 - DNA, 459 bp, synthetic construct
  misc_feature 1..459: note = Description of Artificial Sequence: Synthetic coding sequence
  source 1..459: mol_type = other DNA
atgtctctagtgattcctgagaaatttcagcacattctaagagtccttaacaccaacattgacggtagacggaaaatcgccttcgccattactgccattaaaggtgtgggcagacgttatgcacacgtagtgctcaggaaggcagatatcgatttaaccaagcgcgctggtgaattaacagaggatgaagttgagcgagtcattacaatcatgcagaatccgcgacagtataaaatcccggactggtttctgaaccggcagaaagacgtcaaggatggcaaatactcacaggtgctggccaacggactggacaataaactgagagaagatttggaacggctcaaaaagataagagcccaccgcggactccgccacttctggggactcagggtgagaggacagcatacgaagactacaggcaggagagggaggactgtgggagtgtcaaaaaaaaaatag

SEQ ID NO: 239089 - DNA, 459 bp, synthetic construct
  misc_feature 1..459: note = Description of Artificial Sequence: Synthetic coding sequence
  source 1..459: mol_type = other DNA
atgtcgctagtcatcccagagaaatttcagcacattctgcgggtgctgaataccaatattgacggtagacggaagattgcatttgccattaccgctataaaaggtgtcggaaggcgctacgcgcacgtggtattgagaaaggctgacattgacctcacaaagcgcgcaggagaactgacggaggatgaggtagagagggtgattacaattatgcagaatccacggcagtacaagatcccagactggttcttgaaccggcagaaggatgtcaaggacggaaaatatagccaggtgctggctaatggactcgataacaaactgagagaagatctggaacgcctgaagaaaatcagagcccataggggcctgcggcacttctggggtctaagagtcaggggccaacacaccaaaacaacaggacggagaggtcgaaccgtgggagtctccaagaaaaagtag

SEQ ID NO: 239090 - DNA, 249 bp, synthetic construct
  misc_feature 1..249: note = Description of Artificial Sequence: Synthetic coding sequence
  source 1..249: mol_type = other DNA
atgcagaatcccaggcaatacaagatcccagactggttcctcaatcgacagaaggacgtgaaggacggcaagtactcccaggtgcttgccaacggcttagataataagctgcgcgaggacctcgagcgtctgaaaaagattagggcacatcgtggtcttcgtcacttttggggcttgcgtgtcagaggacagcacactaaaacaactggcagacggggtcggacggtaggcgtgtcaaagaaaaaatag

SEQ ID NO: 239091 - DNA, 249 bp, synthetic construct
  misc_feature 1..249: note = Description of Artificial Sequence: Synthetic coding sequence
  source 1..249: mol_type = other DNA
atgcagaatccccgacagtataagatccctgattggttcttgaatcgtcagaaagacgttaaggacggaaaatattcccaggtactggccaacggcctggataataaattgcgagaggacctagagcgcctcaagaaaatccgtgcacaccggggtttacgtcacttctggggtttgcgggtgagaggacagcacacaaagacgacaggacggagaggccgaaccgtgggtgtttcaaagaaaaagtag

SEQ ID NO: 239092 - DNA, 249 bp, synthetic construct
  misc_feature 1..249: note = Description of Artificial Sequence: Synthetic coding sequence
  source 1..249: mol_type = other DNA
atgcagaatcccagacagtacaagatccccgattggttcctgaacagacagaaagacgtcaaggacggaaagtattctcaggttctggctaacggcttggacaacaaactgagagaggacttagagcgattgaagaagattagggcacatcgcggtctaaggcatttctgggggctgcgcgtccgtggacagcatacaaagaccaccggcaggagaggccgaaccgtaggggtgagcaagaaaaagtag

SEQ ID NO: 239093 - DNA, 249 bp, synthetic construct
  misc_feature 1..249: note = Description of Artificial Sequence: Synthetic coding sequence
  source 1..249: mol_type = other DNA
atgcagaatcctagacaatacaagatccccgactggttcctcaatagacagaaggacgtgaaggatggcaagtattcacaagtccttgctaacgggcttgataataaacttcgtgaggacctggagcggctgaaaaaaatacgggcacatcgtgggctgcggcacttttggggcctgagggttcgcggtcagcacaccaaaacaactggaagacggggaagaaccgtcggcgtgtccaagaaaaagtag

SEQ ID NO: 239094 - DNA, 249 bp, synthetic construct
  misc_feature 1..249: note = Description of Artificial Sequence: Synthetic coding sequence
  source 1..249: mol_type = other DNA
atgcagaacccccgacaatacaagattcccgattggttcctgaacagacagaaggacgtcaaagacggcaagtatagccaggtccttgctaacgggcttgataataagctgcgggaggacctcgagcggttaaagaagatccgggctcaccggggactgcgacacttttggggcttacgggtgagaggtcagcacaccaagaccacaggcagacgcggaagaactgtgggtgtgtccaagaaaaagtag

SEQ ID NO: 239095 - DNA, 648 bp, synthetic construct
  misc_feature 1..648: note = Description of Artificial Sequence: Synthetic coding sequence
  source 1..648: mol_type = other DNA
atgtactccttcatggggggtggtctgttttgtgcatgggtgggaacaatccttttagttgttgccatggctaccgatcactggatgcagtataggttgtcaggcagcttcgctcaccaggggctctggagatactgtcttggcaacaagtgctacctgcaaaccgacagtattggtgagcccccaggccaaggccctggacgagcgtggggcaagagcagagcagacttaggagcacaaggtcatctgtactccaggtggagaactctcagacttaaggaaggaaagggtgccacacaagcatactggaatgccacacgggcattcatgatcctctccgccctgtgtgccatttcaggcatcataatgggaattatggctttcgctcatcagccgacctttagccggatcagcaggccattttccgctggaatcatgttcttctcatctacgctgttcgttgtgctggcgctggcgatttataccggtgtgactgtgtcattcttgggccgacggtttggagattggcggtttagttggtcctacatactggggtgggtagcagtattgatgacattttttgcaggcattttctacatgtgtgcgtacagagtccatgagtgtaggagattgagcacaccaagatag

SEQ ID NO: 239096 - DNA, 438 bp, synthetic construct
  misc_feature 1..438: note = Description of Artificial Sequence: Synthetic coding sequence
  source 1..438: mol_type = other DNA
atgcctggtgtgaccgtcaaagatgtgaatcagcaggagtttgtacgcgcattggctgccttcctcaagaagagcggaaaactgaaagttcccgaatgggtggatacagtcaaactcgcaaagcataaagaactcgccccttatgatgagaactggttctacacacgggctgcatcaaccgcccgtcacctgtaccttaggggtggagccggagtcggctctatgactaaaatctatgggggacgccagcggaacggcgtaatgccttcccacttttctcggggatccaagagtgtggccaggagggttttgcaggctctggaagggctgaaaatggtcgaaaaggaccaggacgggggacggaagctgactcctcagggccaaagagatctggaccgtatcgccggtcaggttgcagccgctaacaaaaagcactag

SEQ ID NO: 239097 - DNA, 411 bp, synthetic construct
  misc_feature 1..411: note = Description of Artificial Sequence: Synthetic coding sequence
  source 1..411: mol_type = other DNA
atgagtgcagctctattacggcgtggcctggaattactggctgcatcagaggctcctcgcgacccacccggacaggcaaaacccagaggagcccctgtgaagcggccacgcaagactaaagcaattcaggcgcagaaactgcggaactccgcgaagggcaaagtccccaagtcggcccttgacgagtacaggaaacgcgagtgtagagatcacttgcgggtgaatctgaaatttctcacccgcactaggtctacagtggccgaaagcgtctctcagcagatcctccggcagaaccgcggtagaaaggcctgcgatcggccagttgccaagactaaaaaaaagaaagctgagggtaccgtgtttaccgaagaggacttccagaagtttcaacaagaatatttcggatcatag

SEQ ID NO: 239098 - DNA, 882 bp, synthetic construct
  misc_feature 1..882: note = Description of Artificial Sequence: Synthetic coding sequence
  source 1..882: mol_type = other DNA
atggcggatgacgctggagctgctggcggtcctggaggccctggcggacccggaatgggcaatagaggcggatttcgaggtggcttcgggtctggcattcggggacggggtcgcggaagggggcgaggccgagggcgtggacgcggagcgagggggggtaaggctgaggataaggaatggatgcctgtgaccaagctaggccgtctggtgaaagatatgaagatcaaaagcttggaggaaatttacctgttttctttgcctatcaaagaatccgagattatcgatttctttttaggagctagtctgaaagacgaggtgttgaaaatcatgccagtgcaaaagcaaactcgagccggacaacgcactcgcttcaaggcgttcgtggcaataggtgactacaacggacacgtggggctcggtgtgaagtgctctaaagaagttgcgactgccatacgaggggcaattattctcgcaaagctctccatcgtgcctgtccgcagagggtactgggggaacaagattggaaagccacatacagtgccctgcaaggtgacaggaagatgcgggagcgtgttagtccggctgattcctgcaccgagaggtaccgggatagtcagtgctcccgtgcccaagaaattgctgatgatggccggtatagacgattgttacacctccgccaggggatgcacagccacactcggcaacttcgccaaggccacatttgacgcgatttccaaaacgtatagttatttaacacctgacctgtggaaggaaacggtgttcactaaatctccataccaagagtttacagaccacctcgtgaagacgcacactagagtctccgtgcagcgtacacaggcacccgctgtggccacaacgtag

SEQ ID NO: 239099 - DNA, 708 bp, synthetic construct
  misc_feature 1..708: note = Description of Artificial Sequence: Synthetic coding sequence
  source 1..708: mol_type = other DNA
atggcagacgacgccggtgctgccggagggcctggtggacctggcggaccaggcatggggaatagggggggatttcgcggaggctttgggtcgggcattcggggtcggggacggggtagagggagaggcagaggacggggaagaggagctagggggggaaaagcagaagataaagaatggatgccagttacgaagctaggaaggctggttaaagatatgaaaatcaaatctttagaagagatttacctgttttcactgccaattaaggagtcagaaatcattgacttttttctcggagccagtctgaaggacgaagttctcaaaatcatgcctgtgcagaagcagacacgcgcaggccagagaaccaggttcaaggttactggccgatgcggatctgtgctggtacgattaattccggctccaagggggaccggaatcgtcagtgctcctgtcccaaaaaagctgctgatgatggctggcattgatgattgttatacctccgcccgtggctgcacagcaacgctgggcaattttgccaaagctacatttgacgccattagtaagacctatagctatctgaccccagatctttggaaagagacagtctttaccaagtcaccataccaagagttcaccgatcacctcgttaaaacacatactcgagtcagtgtgcagcggacgcaggctcccgctgtagccaccacctag

SEQ ID NO: 239100 - DNA, 537 bp, synthetic construct
  misc_feature 1..537: note = Description of Artificial Sequence: Synthetic coding sequence
  source 1..537: mol_type = other DNA
atggcagatgacgctggtgccgcaggtggcccagggggtccagggggtccgggaatgggaaatagggggggatttcggggaggctttggttcaggcatcagaggcaggggaaggggtcggggacgcggaaggggaaggggtagaggcgctagggggggaaaagccgaggacaaagaatggatgccggtaaccaaacttgggagattggtcaaggacatgaaaattaagtctctagaagagatttatctgttcagtctgcctattaaagaatcggaaattatcgatttctttctgggcgcttcattgaaagacgaggtgcttaagatcatgccagtgcagaagcagacccgggcaggccagcgaacccgttttaaggtgcccggatgccccggaggaggctgcgcaggcctagctggcacactgtctgcccttcattcttgtacttggctgcacccttgcgactttcgtaatggcgagagagaaaagcggagtcctcaggatctgggatgggctctcttgtggcctttattcccttag

SEQ ID NO: 239101 - DNA, 588 bp, synthetic construct
  misc_feature 1..588: note = Description of Artificial Sequence: Synthetic coding sequence
  source 1..588: mol_type = other DNA
gtgacaaagctgggcagattggtgaaggacatgaaaatcaagtccctcgaagaaatctatctttttagcctgcccataaaggctttcgtcgccatcggggactataacggtcatgtgggtcttggagtgaagtgctctaaggaggtggcaaccgccatccggggagctatcattctggccaaactgtcaatcgtcccagtcaggagggggtactgggggaataagattggaaaaccacacactgtgccatgcaaggttaccggtagatgtggtagtgttcttgtgaggctcatcccagcaccaaggggcactgggatcgtgtctgcccctgtgccaaaaaagctgctaatgatggccggtatcgatgactgctacacctctgctcgcggatgtacagccactttgggcaatttcgctaaagcgacttttgacgcaatctctaagacatatagctatctcacacctgatctgtggaaagagacagtattcactaagagcccataccaagagtttactgaccacctggttaagacacacacacgtgtatcagtgcaaaggactcaggcccctgcggtggccaccacttag

SEQ ID NO: 239102 - DNA, 360 bp, synthetic construct
  misc_feature 1..360: note = Description of Artificial Sequence: Synthetic coding sequence
  source 1..360: mol_type = other DNA
atggcattcaaagataccggcaaaactcctgtggagccagaagtggcaatccaccgcattcgtatcacgctcacctccaggaatgttaaaagcctggagaaagtctgtgccgatctaatccgtggtgccaaggagaaaaatctgaaagttaagggcccagttagaatgccaacaaagacccttcgtatcacaacgcgaaaaactccttgcggggaaggctcaaaaacctgggaccggttccagatgaggattcataagagactgattgaccttcattcacctagtgagatcgttaaacaaattaccagtatcagcattgagccgggtgttgaagtcgaggtgactatagccgatgcttag

SEQ ID NO: 239103 - DNA, 429 bp, synthetic construct
  misc_feature 1..429: note = Description of Artificial Sequence: Synthetic coding sequence
  source 1..429: mol_type = other DNA
atggccttcaaggacaccgggaagacgcctgttgagcccgaggtagccatccacagaatccgtataactctcacttcccgcaacgtgaaatcactcgagaaagtctgtgcagatctgattagaggggcaaaggagaaaaacctcaaggtgaagggaccagtgaggatgcctaccaagaccctgcgcatcaccacccggaaaacaccatgtggagagggctcaaagacgtgggatcggttccagatgcggatccataaaagattaatcgacttgcacagtccctccgaaattgtgaaacagataacttccatctccatagagccgggagtagagttgatagagagcactgatgccgaacccatggatacagagggacagcaatacactctgcggtctgtattcgaatcacccggaacgtgccccttttag

SEQ ID NO: 239104 - DNA, 360 bp, synthetic construct
  misc_feature 1..360: note = Description of Artificial Sequence: Synthetic coding sequence
  source 1..360: mol_type = other DNA
atggccttcaaggacaccggcaagacacctgtggagcccgaagtcgccatccatagaatcagaatcaccctcacctcccgaaacgtgaagagtctcgagaaggtgtgtgctgaccttatccgaggcgcaaaggagaagaacctcaaggtcaagggaccagtccgcatgccaaccaaaacccttagaattacaacgaggaaaaccccgtgcggcgaaggatccaaaacctgggatcgcttccagatgcgcattcataaacgtctgattgacctgcacagcccttctgagattgttaagcaaattacaagcattagcattgagccaggcgtggaagtggaggtgaccattgctgatgcttag

SEQ ID NO: 239105 - DNA, 252 bp, synthetic construct
  misc_feature 1..252: note = Description of Artificial Sequence: Synthetic coding sequence
  source 1..252: mol_type = other DNA
atgcagaacgacgccggagagttcgttgatttgtatgtcccaagaaagtgttctgcatccaacagaatcataggggcaaaggatcacgctagtatccaaatgaacgttgccgaagtggacaaagtgactggcaggttcaacggccaattcaagacgtatgctatctgcggagcgattaggcgcatgggggaatcagatgacagcatactgagattggcaaaggccgatggaattgtgagtaaaaatttttag

SEQ ID NO: 239106 - DNA, 294 bp, synthetic construct
  misc_feature 1..294: note = Description of Artificial Sequence: Synthetic coding sequence
  source 1..294: mol_type = other DNA
atgcaaaatgatgccggagagtttgtggatctgtacgtgcctaggaaatgcagcgccagcaaccgtatcattggcgctaaggaccacgctagcatacagatgaatgttgccaggctgacaaggtcccaggcgggacttatggcatcactgaagctgatgctctccgctggtccatttgtggggtgggtgagccagatgatccccttctccgattggccacggagatggcaccggctcaaagaactcctgaccggggaaaaccataggtgtgggatatttgtaatcaacaagtag

SEQ ID NO: 239107 - DNA, 252 bp, synthetic construct
  misc_feature 1..252: note = Description of Artificial Sequence: Synthetic coding sequence
  source 1..252: mol_type = other DNA
atgcagaacgacgccggtgaattcgtggacctatacgtgcccagaaagtgctccgcttctaaccggatcatcggtgccaaagatcacgcaagcattcagatgaacgtggctgaagtggataaggtcacaggacgcttcaatggacagtttaaaacctatgctatttgcggcgctatccgcagaatgggagagagcgacgacagcatcctacggctggcgaaagcagatggcattgtgtcgaagaatttctag

SEQ ID NO: 239108 - DNA, 201 bp, synthetic construct
  misc_feature 1..201: note = Description of Artificial Sequence: Synthetic coding sequence
  source 1..201: mol_type = other DNA
atgcagaacgacgcgggagagtttgttgacctctacgtaccacggaagtgctcagcttccaacaggatcatcggtgctaaagaccatgcaagcatccagatgaatgtagctgaggtttcatgggaacctggtaggagggaaggttgtgatatttgtgctgggaaggccggttgcccaatcgtcgaagagccgctgggttag

SEQ ID NO: 239109 - DNA, 273 bp, synthetic construct
  misc_feature 1..273: note = Description of Artificial Sequence: Synthetic coding sequence
  source 1..273: mol_type = other DNA
atgcagaacgatgctggcgagttcgtcgacttgtacgtaccgaggaagtgtagtgcctccaaccgcattattggcgcaaaggaccacgcaagtatccaaatgaatgtggctgaagtggacaaggtgactggcaggttcaacggacaattcaagacctacgccatttgtggagcaatcagaagaatggtgtcggttagtctgggctttgcacaccacttcggaacgtcctggaccctcccctgtgcactggagtgcgtaatggtgccagagtag

SEQ ID NO: 239110 - DNA, 246 bp, synthetic construct
  misc_feature 1..246: note = Description of Artificial Sequence: Synthetic coding sequence
  source 1..246: mol_type = other DNA
atgcagaatgatgccggagaatttgtagacctgtacgtgccgaggaaatgttctgcttcaaaccgcattattggagcgaaagaccatgccagcattcagatgaatgtagccgaggtggacaaggtgaccgggaggtttaacggccaattcaagacctacgcaatctgtggcgcaatcaggcggatgggggaatccgatgattccattctcagactggccaaggccgatggaatagtgtctaagtag

SEQ ID NO: 239111 - DNA, 432 bp, synthetic construct
  misc_feature 1..432: note = Description of Artificial Sequence: Synthetic coding sequence
  source 1..432: mol_type = other DNA
atggggaaatgtaggggcttaaggaccgccagaaaattaaggtctcacaggcgggatcagaagtggcatgataagcagtataaaaaagcccatctgggaacagctctcaaggcaaatccatttgggggtgcaagtcatgcaaaaggcatcgttttggagaaagtcggagtggaggcaaagcaacccaactcagccatacgcaagtgcgtgcgtgttcaacttataaaaaatggaaagaaaattaccgcttttgtgcccaatgacggttgtttgaacttcattgaggagaatgatgaggtcttagtcgccggttttggaagaaaggggcatgccgtcggagatatccctggagtgcgcttcaaagtggttaaagtcgcaaacgtgtctctgcttgctctgtacaagggcaaaaaagaacgcccaaggtcatag

SEQ ID NO: 239112 - DNA, 393 bp, synthetic construct
  misc_feature 1..393: note = Description of Artificial Sequence: Synthetic coding sequence
  source 1..393: mol_type = other DNA
atgaatgacactgtaacaattcgcacacggaagtttatgactaacagacttctgcagcggaagcaaatggtgatcgatgttcttcacccgggaaaagccaccgtcccaaagacagaaatcagggaaaaactggccaaaatgtataagacaacgccagatgtgatcttcgtgtttggctttcggacacacttcgggggaggcaagacaaccggattcggcatgatatacgactctctggactacgctaagaaaaacgagccgaaacatcgattggcacggcacggcttatacgagaaaaaaaagacctcccggaaacaacgcaaagaaagaaagaacagaatgaagaaggtgcggggaaccgcaaaggcaaatgtgggtgccggaaaaaagtag

SEQ ID NO: 239113 - DNA, 402 bp, synthetic construct
  misc_feature 1..402: note = Description of Artificial Sequence: Synthetic coding sequence
  source 1..402: mol_type = other DNA
atgaacgacactgtgaccattcgaacgcggaagtttatgactaaccgcctgttgcagcgcaagcagatggtcatcgatgttctgcaccccggaaaggccacagtaccgaagaccgaaatccgggagaagttggcaaaaatgtacaaaactacacctgacgtgatcttcgtattcggttttcgaactcacttcggaggaggcaaaacgaccggatttggcatgatttacgattctcttgactacgccaagaaaaacgaacctaaacacagactcgctcgccacggtttgtacgaaaaaaaaaaaaccagtaggaaacagcgaaaagagagaaagaatcgaatgaagaaagtcaggggcacggccaaggctaacgtgggggctggcaaaaaacccaaggaatag

SEQ ID NO: 239114 - DNA, 399 bp, synthetic construct
  misc_feature 1..399: note = Description of Artificial Sequence: Synthetic coding sequence
  source 1..399: mol_type = other DNA
atgaacgatactgtgactatcaggaccaggaagtttatgactaaccggctcttgcagagaaaacagatggtgatagacgtgttacatccaggtaaagcaacggtacctaaaaccgagattagagagaaactggccaagatgtacaaaactaccccagacgttatcttcgtgttcggattccgaacccactttggtggcggaaagactacagggtttggaatgatctacgattccctggactatgccaaaaagaatgaacccaagcacaggctagcgaggcatggactttacgaaaaaaaaaaaacctcccggaagcagcgcaaagagagaaagaatcgcatgaagaaggtgcgcggaacagcgaaggctaacgtgggggcaggaaagaagcagaagtag

SEQ ID NO: 239115 - DNA, 396 bp, synthetic construct
  misc_feature 1..396: note = Description of Artificial Sequence: Synthetic coding sequence
  source 1..396: mol_type = other DNA
atgaatgacaccgtgacaatccgtactaggaagtttatgacaaacaggctcctgcagcggaagcagatggtgatagacgtcctgcacccaggcaaagcgaccgtgcccaaaacagaaatacgggagaaactggccaagatgtataagacaactcctgacgtgatcttcgtcttcggatttagaacacactttggcggaggaaagaccaccgggttcggaatgatctatgactctcttgactacgcaaagaagaacgaaccaaaacacagacttgcacgccacgggctatatgaaaagaaaaagacctctcgcaagcagcgcaaggagagaaaaaatcgcatgaagaaggttaggggcactgccaaagcaaacgtgggcgcagggaagaagcagtag

SEQ ID NO: 239116 - DNA, 870 bp, synthetic construct
  misc_feature 1..870: note = Description of Artificial Sequence: Synthetic coding sequence
  source 1..870: mol_type = other DNA
atgaacgataccgtaacaattcggacgcggaaatttatgacaaatcggttgctgcagcggaagcagatggtgattgacgttctccatccaggcaaggcaacagtgcccaagacagagataagagagaagttggccaagatgtataaaacaacgcctgacgttatctttgtgtttgggtttcggactcacttcggtggaggaaagaccaccggtttcggaatgatttacgactctctggattatgctaagaaaaacgaaccaaagcacaggctcgctaggcatggcctgtacgaaaagaaaaaaaccagccggaagcagcggaaggaaaggaaaaaccgaatgaagaaggtgcgtgggaccgctaaggctaatgtcggtgcaggtaagaaaatgagagaactcggtctcggtgtgcaggcgctgggaaggattagtcaggaagagaggtgcacggacgtcaaaaacagcaaagccagggaaagcaggggggttgtgtggcaggtagaagtacctggtccttggagcgtgtggacctgcggcagattacggaggggttgcggcaagtatctccaagtggctgttacttggaggaagacggagaaccgagagcagtgttgtcaggcctgtttgcttgagcgcgcactagttcgcaacggcgcatttatgagcccagccagccctgcccctgccggaagcccccacccagttgatggcgacctcgttctgcacctccctgaagccctatcagcgacattgacgttgtctcctcacattcaggccattaataaaagctttggtccattcttcgagatccaccaggagtcaagctgcttttcacctccttcgtgcctgtccggattaggccactag

SEQ ID NO: 239117 - DNA, 378 bp, synthetic construct
  misc_feature 1..378: note = Description of Artificial Sequence: Synthetic coding sequence
  source 1..378: mol_type = other DNA
atgccccctaaggatgacaaaaaaaagaaggacgctggcaagtctgctaaaaaggataaggatcctgtgaacaaatccgggggaaaagccaagaaaaagaagtggagcaaaggaaaagtgcgagataaattgaacaatttagtgttatttgataaggccacatacgataaactctgcaaggaggttcccaactataagttgatcactcctgcagttgtgtccgaacgcctgaaaatcagggggagtctggccagggcagccttgcaggagctcctgtcgaaggggctgattaagctcgttagtaaacaccgcgcacaggtgatctacacaagaaacactaaaggcggagacgcacctgccgctggggaggatgcatag

SEQ ID NO: 239118 - DNA, 348 bp, synthetic construct
  misc_feature 1..348: note = Description of Artificial Sequence: Synthetic coding sequence
  source 1..348: mol_type = other DNA
atgacaaaaaagagaaggaataacggaagagcaaagaaggggcgtggccacgtgcaacctatcagatgtactaattgcgcacgctgtgttcctaaagacaaggcgatcaaaaaattcgtgatccgaaatattgtggaagccgcagccgttagggatatctcagaggcgagcgtgttcgacgcttacgtgctcccaaagctgtacgttaaactgcactactgcgtgagctgtgctatccacagcaaagtcgttcgtaacaggagcagagaagccagaaaagatcgcactcctccaccgcgattcaggcctgcaggcgcagccccacgaccccctcccaaacctatgtag

SEQ ID NO: 239119 - DNA, 348 bp, synthetic construct
  misc_feature 1..348: note = Description of Artificial Sequence: Synthetic coding sequence
  source 1..348: mol_type = other DNA
atgactaaaaagaggagaaataatggcagagcaaagaaaggtaggggtcacgtccagcccatccgttgcaccaattgtgcacggtgcgtgcccaaggataaggccataaaaaaatttgtcattcggaacattgtggaagccgcagcggtccgggatatctcagaggcatcagtctttgacgcatacgtgctcccaaaattgtatgttaaactgcactattgtgtttcttgcgccattcattcaaaggtcgtgcgaaacaggtctagagaggcaagaaaagataggactccacccccaagattccgacctgccggtgcggcacctaggcctcccccaaagcctatgtag

SEQ ID NO: 239120 - DNA, 255 bp, synthetic construct
  misc_feature 1..255: note = Description of Artificial Sequence: Synthetic coding sequence
  source 1..255: mol_type = other DNA
atgccacttgctaaggatctattgcatcccagcccagaagaggaaaagaggaagcacaaaaagaagcggttggttcagagccctaattcttatttcatggatgtgaaatgtccaggttgctacaaaatcactacagttttctctcatgcacagaccgtcgtgttatgtgtgggctgctcgactgtcctgtgccagccaacagggggaaaagcaaggttgacggagggatgctcttttcggagaaaacaacactag

SEQ ID NO: 239121 - DNA, 201 bp, synthetic construct
  misc_feature 1..201: note = Description of Artificial Sequence: Synthetic coding sequence
  source 1..201: mol_type = other DNA
atgccactggccaaagaccttttgcatccctctcccgaagaggaaaaacggaaacacaagaaaaagcggctcgtacaaagccctaattcttatttcatggacgtcaaatgccccggagaggaaactgcttgctgtagtggcgagtccaccgggccacagcagctggaaaatgtggtcgttttggctgtgagctacccctag

SEQ ID NO: 239122 - DNA, 255 bp, synthetic construct
  misc_feature 1..255: note = Description of Artificial Sequence: Synthetic coding sequence
  source 1..255: mol_type = other DNA
atgcctcttgcccgagacttattgcacccttcactggaggaagaaaaaaagaaacacaaaaaaaaacgactcgtgcagtctcctaactcttatttcatggacgtgaaatgccccggatgctacaagattacgactgttttctcacatgcccagaccgttgtgctctgtgtggggtgcagtacagtcctgtgtcagcccacaggaggaaaagcccgactcaccgaggggtgctcctttcggcgtaagcagcattag

SEQ ID NO: 239123 - DNA, 159 bp, synthetic construct
  misc_feature 1..159: note = Description of Artificial Sequence: Synthetic coding sequence
  source 1..159: mol_type = other DNA
atggatgtgaaatgccctggctgctacaagatcacaacagtttttagtcacgcccagacagtggtgctctgcgtgggctgctcaaccgtgctgtgccagcctactggcggaaaggctagactgactgagggatgctcatttcggaggaagcagcactag

SEQ ID NO: 239124 - DNA, 159 bp, synthetic construct
  misc_feature 1..159: note = Description of Artificial Sequence: Synthetic coding sequence
  source 1..159: mol_type = other DNA
atggacgtgaagtgccctggatgctataaaataactaccgtcttttcccacgcccagacggtcgtcctatgtgtcgggtgttccaccgtactgtgccagccaactggaggtaaggccaggctgactgaagggtgttcctttcggaggaagcagcactag

SEQ ID NO: 239125 - DNA, 303 bp, synthetic construct
  misc_feature 1..303: note = Description of Artificial Sequence: Synthetic coding sequence
  source 1..303: mol_type = other DNA
atgtgccagcgttgtggcctgaaactgatcgttatcatctgctttttcgtgcagctggccagagacctcctccacccctcactcgaggaagagaaaaaaaagcacaaaaagaagcgtctggtgcaaagcccaaattcttacttcatggatgtaaaatgcccaggctgctacaagattacaacagtattctcacatgcccagaccgttgtgctctgcgtcggttgttctactgtattatgtcaaccaacgggcggaaaagccagactcaccgaggggtgctccttccggaggaagcagcactag

SEQ ID NO: 239126 - DNA, 210 bp, synthetic construct
  misc_feature 1..210: note = Description of Artificial Sequence: Synthetic coding sequence
  source 1..210: mol_type = other DNA
atggacaccagccgagtgcaaccaattaagttggcccgagttactaaggtcctgggaagaacaggaagccaaggtcagtgtacacaagtgcgggttgaatttatggacgacaccagccgatctatcatccgcaacgtcaagggacccgtgcgggagggagacgtgttgacactgctggagtccgagagggaagctcggcgtctgaggtag

SEQ ID NO: 239127 - DNA, 366 bp, synthetic construct
  misc_feature 1..366: note = Description of Artificial Sequence: Synthetic coding sequence
  source 1..366: mol_type = other DNA
atggtgcctttcaatgacctctattccggcccagacacattcagtgagtttatctccgcatcgcactctgctgtaccctttaggggtcctcccctgctgctcccacctctcaggtgggggccagtgggggctagaggtatccacggacgccacgagcctatacatcacccacagtgtaaaagacccagggcccgtgggagacgcgcacatccatttggggttcgggcacgatctccggaggtcgctctttccctggctgctagatgggtgctcgatgtaggttttgatcacctggctgatggaaacggactctctcagtccgccccattcttctgccctcctcatgtgaccgagatgctcttgtag

SEQ ID NO: 239128 - DNA, 210 bp, synthetic construct
  misc_feature 1..210: note = Description of Artificial Sequence: Synthetic coding sequence
  source 1..210: mol_type = other DNA
atggatacctctcgcgtacagcctatcaaactcgccagggtgactaaagttctgggacggactggttctcaggggcagtgcactcaggtccgcgttgagttcatggatgacacctctagatcaattatccggaatgttaaaggccctgtccgggaaggtgatgttcttacactgttggaaagtgaaagagaggctcgcagactgaggtag

SEQ ID NO: 239129 - DNA, 171 bp, synthetic construct
  misc_feature 1..171: note = Description of Artificial Sequence: Synthetic coding sequence
  source 1..171: mol_type = other DNA
atgggccaccagcagctatactggagccaccctcggaaattcgggcagggatcccgctcttgtcgcgtgtgtagcaaccgacacgggctcatcaggaaatacggactgaatatgtgtaggcagtgtttcagacaatacgctaaggatatcggattcattaagctcgattag

SEQ ID NO: 239130 - DNA, 204 bp, synthetic construct
  misc_feature 1..204: note = Description of Artificial Sequence: Synthetic coding sequence
  source 1..204: mol_type = other DNA
atgggccatcaacagctgtactggtcccaccccagaaagttcggccaggggtcaagatcatgccgggtttgctcaaataggcacggtctgatacggaagtacggcttgaatatgtgccggcagtgttttcggcagtacgcaaaggacattggatttatcaaaaaggacctgtcttgcctgccttggcattgtctatggagatag

SEQ ID NO: 239131 - DNA, 780 bp, synthetic construct
  misc_feature 1..780: note = Description of Artificial Sequence: Synthetic coding sequence
  source 1..780: mol_type = other DNA
atggccgtacagatctcgaagaaacgcaagtttgtcgccgacggcatattcaaggccgaactgaatgagtttctgaccagagagttggccgaggacggctattctggcgtggaggtgcgtgtgacaccaaccaggacagagatcataatcctggccacacgaactcagaacgtccttggtgagaagggcaggagaatccgggaactgacagccgtggtgcagaagagatttggcttccccgaaggatcggttgagttaaagatcatggtgatggtgacaggataccctttactccctctgaaattatacgctgagaaagttgcgacccgcggtctgtgtgcgatagctcaggcggaaagcttgaggtataaattactgggaggcttagcagtgaggagagcatgctatggcgtgttgcggtttatcatggagtccggagcaaaagggtgcgaagtagtggtgtctggcaagctccgcggacaaagggctaagtctatgaaatttgtggatggcctaatgatccactccggcgaccccgtgaattactacgtcgacacggctgtgaggcatgtgcttctgaggcagggcgtgctgggcataaaagtgaaaattatgctcccttgggatcccacaggaaaaattggaccgaagaagccccttcccgaccacgtgagtatcgttgagccaaaagacgaaattctgcccacgactccaatttctgaacagaaagggggaaagccagagcctccggctatgccccagcctgtgcctacggcttag

SEQ ID NO: 239132 - DNA, 732 bp, synthetic construct
  misc_feature 1..732: note = Description of Artificial Sequence: Synthetic coding sequence
  source 1..732: mol_type = other DNA
atggctgtccaaatttctaagaaacgcaaattcgtagcagacgggatcttcaaagcagagttgaacgaattcctgacccgcgaactggcagaggacgggtattccggcgttgaggttagagtcaccccgaccagaaccgagattattattctggccactaggactcagaacgttctcggagagaagggcagacggatcagggaactgacagctgttgtccagaagaggttcggcttccctgaagggagcgtcgagttgtacgctgagaaggtcgcaaccaggggactgtgtgccatcgcacaagcggagtccctccgatacaaactgttgggtggcctggccgttagacgcgcttgttacggcgtgctccggttcataatggaatcgggagccaaggggtgtgaggtcgtggttagcggaaaattgagagggcaacgggctaagtcaatgaaatttgtagatggcctgatgatccatagcggtgatcccgtaaactactacgttgatactgccgttagacacgttttgttaaggcaaggggtacttgggatcaaagtcaaaattatgttgccttgggaccctactggcaagatcgggccaaaaaaaccgctacctgatcacgtgagcatcgtcgagccaaaggatgagatcttgccaactacacccatttccgagcaaaagggcggtaaacctgaaccccctgccatgccccagcccgtgcccaccgcttag

SEQ ID NO: 239133 - DNA, 732 bp, synthetic construct
  misc_feature 1..732: note = Description of Artificial Sequence: Synthetic coding sequence
  source 1..732: mol_type = other DNA
atggctgtgcagatctcgaagaaacgcaaatttgttgcagatgggatctttaaggctgaacttaacgagttcttgacccgggagcttgcggaggacgggtacagcggggttgaggtaagagtcaccccgacaaggacggagatcattattctcgctacacgcacacagaacgttctcggggagaagggccgaagaataagagagttgacagccgtcgtgcagaagagatttgggttcccagagggatctgtagagttgtatgcagagaaagttgccactaggggtctgtgcgcaatagcgcaagctgaatctctgagatacaaattgctgggcggattagcagtgcgcagggcttgctacggggtactcagattcattatggagagcggtgccaagggttgtgaagtggtggttagcggcaagttgcgcggacagcgtgcaaagtccatgaagtttgtggacggtctgatgatccactcaggagacccagtcaactactatgtagacactgccgtgcggcacgttcttcttagacagggagtactgggcataaaggttaagattatgttgccatgggacccgacaggaaagattggccctaaaaaaccgctccccgatcacgtgagtattgtggaacctaaagatgagatcctgcctacaacaccgatttcagagcagaagggtgggaagccagaaccccctgctatgccgcagccagtgccaacggcatag

SEQ ID NO: 239134 - DNA, 732 bp, synthetic construct
  misc_feature 1..732: note = Description of Artificial Sequence: Synthetic coding sequence
  source 1..732: mol_type = other DNA
atggccgttcagatctccaagaagcggaagttcgttgcagatggcatcttcaaggcggagttgaacgagttccttacccgtgaactggcagaggatgggtattctggtgtggaggtacgggtgaccccaactaggacagaaataatcattctggcaacgagaacacagaatgttctcggcgaaaaaggtcgccgtatcagggagctgacagctgtcgtgcagaagcggttcgggttccccgaaggttctgtggagctgtacgcagaaaaagtcgccactcggggactgtgcgctatagcccaagctgagtccttgcggtacaaattactgggaggtctggccgtccgcagagcgtgttatggcgttctacggtttatcatggagtctggagcaaaaggctgcgaagtggtggtttccggcaaactcaggggccaaagagccaagagtatgaagttcgttgatggactcatgatccattcaggagatccagttaactattatgtagacactgctgtgcgccacgtcctgctgcggcagggagtcctgggaatcaaggtgaagattatgctcccctgggatcccactggaaagataggacctaagaagcctctccctgaccacgtaagtatcgtggaacccaaagacgaaattctccctaccacaccaatttcagagcaaaaaggtggaaagcctgaacctcctgctatgccacaacccgtgccaactgcatag

SEQ ID NO: 239135 - DNA, 795 bp, synthetic construct
  misc_feature 1..795: note = Description of Artificial Sequence: Synthetic coding sequence
  source 1..795: mol_type = other DNA
atggcggtgggcaaaaacaagcgcctgaccaaaggcggtaaaaagggggctaagaaaaaggtggtcgacccattctctaaaaaggattggtatgatgtcaaagcccctgcgatgttcaacatccggaacattggaaaaacactagttacccggacgcagggaaccaagatcgccagcgacgggctaaaagggagggtattcgaagtcagcctcgctgacctccagaatgatgaagtcgcgttccggaaattcaaactcatcaccgaggacgttcagggaaagaactgtttgactaatttccatggtatggacctgacccgcgataaaatgtgcagcatggtgaaaaaatggcagacgatgatcgaggcccatgtagacgtaaagacaacggacggctacctcctgcgccttttctgcgtcgggttcacaaagaaacggaacaatcagatacggaaaacgagctacgcccaacatcagcaagtccggcagatccggaaaaaaatgatggagatcatgactcgggaggttcagacgaacgacctgaaggaagtagtcaacaaactgatcccagattcaatcggtaaggatatagagaaggcctgccaaagcatttacccactgcatgatgtgttcgtacgcaaggtcaaaatgctcaagaagcctaaattcgaactcggaaagctcatggagcttcacggggaaggctccagttctggaaaggccactggcgatgagactggcgctaaggtcgaaagagccgatggctatgagcctccagtacaggaatcagtttag

SEQ ID NO: 239136 - DNA, 528 bp, synthetic construct
  misc_feature 1..528: note = Description of Artificial Sequence: Synthetic coding sequence
  source 1..528: mol_type = other DNA
atggcggttgccaagaagaaagtcgtggacccttttagcaagaaggactggtacgatgtgaaggcccctgccatgtttaacatacggaatatcgggaaaactcttgttaccaggactcaggggacgaagatcgcaagtgatggcttaaaagggagggtgtttgaggtgtcactggccgatttgcaaaatgatgaagtggctttccgcaaatttaagctgatcacagaagacgtgcaaggcaaaaactgtctgactaactttcacggaatggacctaacacgggacaaaatgtgcagcatggttaaaaagtggcaaaccatgattgaggcgcatgtagatgtgaagaccactgacggataccttttaaggctgttttgcgtgggcttcaccaaaaaacggaacaatcagattcggaaaacatcctacgcccagcaccagcaggtccggcagatcaggaagaagatgatggagatcatgacgcgagaagtgcagacaaatgacctcaaagaagtggtgaacaagctgtag

SEQ ID NO: 239137 - DNA, 684 bp, synthetic construct
  misc_feature 1..684: note = Description of Artificial Sequence: Synthetic coding sequence
  source 1..684: mol_type = other DNA
atgtttaacattaggaacattggtaagaccctagtgaccaggactcagggcactaagattgcgtcagacgggcttaaaggccgtgttttcgaggtgtctcttgctgatcttcagaacgacgaggtggccttccgaaaatttaagctgattacagaagatgtgcaggggaaaaactgcctaactaacttccacggcatggacctcaccagggacaaaatgtgtagtatggtgaaaaagtggcagaccatgatagaagcccatgtggacgtgaaaaccaccgacggatacctcctgaggctcttttgtgtgggatttaccaagaagcgaaacaaccagatccgcaagacatcctatgcacaacatcaacaagtgcgtcagattcggaagaagatgatggagataatgactagagaagtgcagaccaacgacctgaaggaggtggttaacaaacttatacctgactcaattggtaaggacattgagaaggcctgtcagagcatttaccccctgcatgacgtgttcgtgcgtaaggtgaagatgctcaaaaagccaaagtttgaactcgggaaactcatggaactgcacggcgagggaagttcaagcggaaaggcaacaggggacgagacaggtgccaaagtcgagcgagctgatggatacgagcctccggtgcaggaatctgtgtag

SEQ ID NO: 239138 - DNA, 438 bp, synthetic construct
  misc_feature 1..438: note = Description of Artificial Sequence: Synthetic coding sequence
  source 1..438: mol_type = other DNA
atgatcgaagcacatgtggatgtgaagaccacggacggttatttactcaggctgttctgtgtgggttttaccaagaaacgcaacaatcagattcgcaaaacgtcctatgctcaacatcagcaggtgcggcagatcaggaagaaaatgatggaaatcatgacgcgggaggttcagacaaacgatctgaaagaagtagtgaataaattgatcccagattctatagggaaggatattgagaaggcttgccagtccatctatcccctgcatgatgtcttcgttagaaaggtcaagatgctcaaaaagcctaagttcgagttgggaaaactcatggagctccatggggaaggttcaagctcaggaaaagccactggggatgagaccggcgcaaaggtggagagagcggatgggtacgagcccccagtgcaggagtctgtgtag

SEQ ID NO: 239139 - DNA, 684 bp, synthetic construct
  misc_feature 1..684: note = Description of Artificial Sequence: Synthetic coding sequence
  source 1..684: mol_type = other DNA
atgttcaatatacgaaatatcggcaagacacttgtaacgagaacccaaggaaccaagattgcttctgacggactgaaaggtcgggtcttcgaagtcagtctagccgaccttcagaatgacgaggtcgccttcaggaaattcaagctgatcacagaagacgtgcagggcaaaaattgtctgaccaattttcacggaatggatctgacccgggataagatgtgcagtatggtcaagaaatggcagacaatgatcgaggctcacgtcgacgtgaaaacgaccgacggctatctgctgcgtctgttctgcgtcggctttaccaaaaagcggaacaaccagatcagaaagactagctatgcccaacaccaacaggtcaggcagatacgcaaaaagatgatggaaattatgactcgcgaagtgcagaccaacgacctgaaagaagtcgtcaacaagctgatccctgactcgattggcaaggatatcgagaaggcttgccagtctatttaccctttacacgatgtgttcgttaggaaagttaaaatgttgaaaaagcctaagttcgagttgggaaaactcatggaacttcacggggagggctccagcagtggcaaggcaaccggagacgaaaccggggctaaggtggagcgtgcggatggctacgaacctccagtgcaggaaagtgtgtag

SEQ ID NO: 239140 - DNA, 627 bp, synthetic construct
  misc_feature 1..627: note = Description of Artificial Sequence: Synthetic coding sequence
  source 1..627: mol_type = other DNA
aaaaggttgaccaaggggggaaagaaaggggctaaaaagaaagttgtggaccctttctcaaagaaggactggtacgatgtgaaggctcctgcaatgttcaatattcggaacattgggaagactctggtgactcgaacacagggtaccaagattgcttccgacgggctcaaaggccgagtattcgaaactatgatcgaggcccacgtagatgtgaagaccactgatggatacctccttcgcctgttctgcgtcggatttactaagaaaaggaataatcagattagaaagacctcatacgctcagcaccagcaggtgcgccagattaggaagaaaatgatggagatcatgactcgggaggtccagaccaacgatctgaaggaagtagtgaacaagctgattcccgacagtatcggtaaggacattgagaaagcctgtcagtccatttatccacttcatgatgtattcgtgagaaaagttaaaatgcttaagaagcctaaattcgaactgggtaagcttatggagctgcatggagagggctctagctcagggaaagctacaggagatgagaccggcgcaaaggtcgagcgcgcagacgggtacgagccacctgtgcaagagagcgtctag

SEQ ID NO: 239141 - DNA, 792 bp, synthetic construct
  misc_feature 1..792: note = Description of Artificial Sequence: Synthetic coding sequence
  source 1..792: mol_type = other DNA
atggctcggggacctaagaagcacctgaagagggtggccgcaccaaagcactggatgttagataaactgactggcgtttttgctcctcgaccaagcactggaccccacaaattgcgggaatgcttgccactgatcatctttctgcggaaccgactgaaatacgcactgacaggagatgaggtgaaaaaaatctgcatgcagcggtttatcaagattgacggcaaagtgaggaccgacattacttaccctgctggcttcatggacgtgatctcaattgataagaccggcgagaactttcgcttaatatatgacacgaagggcaggttcgctgtgcacaggattacgccagaagaagccaagtacaagctttgcaaagttaggaagatctttgtcggaactaagggaatacctcacctggtgactcacgacgctcggacaattaggtaccctgatccgctcatcaaagtgaacgataccatccaaattgatctggaaaccggaaagattacagacttcattaaattcgacacagggaacttatgcatggtcacgggcggagccaacctgggtcgcattggagtgatcaccaaccgtgaacgccaccctgggtcttttgatgtggtgcacgtgaaggacgcaaatggcaacagctttgcaacccgcctgtccaatatcttcgtgatcggcaagggtaacaaaccttggatcagtctgccccgtgggaaaggcattcgcctaacaattgcagaggaacgagacaaacgattggcagccaagcagtccagcggatag

SEQ ID NO: 239142 - DNA, 369 bp, synthetic construct
  misc_feature 1..369: note = Description of Artificial Sequence: Synthetic coding sequence
  source 1..369: mol_type = other DNA
atggcacgtggccctaagaaacacctgaagcgcgttgcagctcctaaacactggatgctggacaaactcactggggtgttcgctcctcggccaagtacaggcccacataagctcagggagtgcctgcccctcattattttcctgcgcaatcggttgaagtacgcactgactggcgacgaggtgaagaagatttgcatgcagaggtttatcaagatagatggtaaggttcgcacagatatcacctatcctgccggatttatggacgtcattagcatcgacaagactggggagaactttaggctaatttacgataccaagggaagatttgccgtccaccggatcacgccagaggaggctaagccctgctag

SEQ ID NO: 239143 - DNA, 792 bp, synthetic construct
  misc_feature 1..792: note = Description of Artificial Sequence: Synthetic coding sequence
  source 1..792: mol_type = other DNA
atggcgaggggaccaaagaagcatctgaagcgcgtggccgcaccgaagcactggatgctggacaaactgacaggggtatttgcccctcgcccaagcacagggcctcataagctgcgagagtgtctccccctcattgtgttcctgcggaataggcttaagtacgcgcttaccggagacgaagtgaagaagatatgcatgcagcgattcatcaaaatagacggtaaggtgagggtcgatgtcacctaccctgctggctttatggacgttattagtatcgaaaagactggagagcacttccgtcttgtttatgacacaaagggcagatttgcagtgcacaggataacggtggaggaagccaaatataagctttgcaaggtgcgtaagattactgtcggtgttaaggggatcccccacctggtgactcatgatgcacgaacaatcaggtatcctgacccggtgatcaaagtcaatgatactgtgcagattgacttgggcactggcaagatcatcaacttcatcaagttcgatactggcaatctgtgtatggtgattggaggtgccaacctgggtcgtgtcggggtaatcaccaaccgggagaggcaccctgggagctttgacgtggtgcacgtaaaagatgccaacggaaattctttcgccaccagactctccaacatctttgtgatcggaaatggaaacaaaccttggatcagtcttccaagagggaaaggaatccgacttacggtggcggaggagcgggacaaacgtttggcgacgaaacagtcctcggggtag

SEQ ID NO: 239144 - DNA, 789 bp, synthetic construct
  misc_feature 1..789: note = Description of Artificial Sequence: Synthetic coding sequence
  source 1..789: mol_type = other DNA
atgcttggccgtcctgccaagtttagcaaggctaggggacccaaaaaacacctcaagcgcgtcgccgcacctaagcattggatgttagataaactgacaggcgtgtttgcccctcgtccctctaccgggcctcataaactgagggagtgcctgcctttaattgtgttcctgagaaaccgcctcaagtatgccctcacaggggatgaagttaagaaaatctgcatgcagcgcttcattaaaatagacggcaaggttagagttgatgtgacttatcctgctgggtttatggatgtcattagtatcgagaaaacaggagagcacttccggttagtgtatgataccaagggaagatttgcggtgcatcgcatcaccgtagaagaggctaaatacaagttgtgtaaagtgaggaagatcaccgtgggcgttaaaggcatcccccacttagtcactcacgatgctcgcactataaggtaccccgatccagtgattaaggtgaatgacaccgtgcagatcgatctcggtacaggtaagatcattaacttcatcaaattcgataccggtaatctttgtatggtgattggcggagctaacctgggacgggtgggagtaattactaaccgggagcgtcaccctggcagtttcgatgtggtacacgtgaaggacgcaaacgggaactcttttgcaaccagattaagtaacatatttgtcattgggaacgggaataagccctggatatcactgccacgtggtaagggcattagattgaccgtcgccgaggagagagactag

SEQ ID NO: 239145 - DNA, 792 bp, synthetic construct
  misc_feature 1..792: note = Description of Artificial Sequence: Synthetic coding sequence
  source 1..792: mol_type = other DNA
atggcgcgtggtccaaaaaaacacctgaagcgcgttgctgcacccaaacactggatgctggataagctcactggggtgttcgctcccagaccgtcaactggccctcacaaactgagagaatgtttacccctgattgtatttctccgcaacagattgaagtacgctttaaccggcgatgaggttaagaaaatttgcatgcagcatttcctgaagatcgatggtaaagtccgtgtggacatcacttatcccgctggcttcatcgatgttataagcatcgagaagactggagagcattttcgtttggtgtataatactaaggggtgttttgctgtccatcgaataaccgtagaagaagcgaagtataagctttgtaaggttcgaaaaatcacagtcgggacgaagggaatcccccacctggtaacgcacgatgcaaggaccattcgataccctgatccactgatcaaagtaaacgatacagtgcagatcgatttgggcactggcaagataacatcgttcattaagttcgatactgggaacgtgtgtatggtgattgctggcgctaacttgggcagggtcggcgtgatcaccaacagagagaggcaccctggctcttgcgatgtggtccacgtcaaggacgcaaacgggaactcattcgcaacccggatcagcaatatctttgtcattgggaacggtaacaagccttggatctcactccccagggggaagggcattaggctcactatcgccgaagaacgggataaacggcttgccgcaaagcagagcagcggctag

SEQ ID NO: 239146 - DNA, 615 bp, synthetic construct
  misc_feature 1..615: note = Description of Artificial Sequence: Synthetic coding sequence
  source 1..615: mol_type = other DNA
atgaccgagtgggagaccgctgctcccgcagtcgcggagacccccgatatcaagctgtttggcaagtggtcaactgatgatgtgcagattaacgatatctcgctacaggactatattgccgtgaaagagaagtacgctaagtacctgccacacagcgcagggagatacgcagctaagcggttcagaaaagcacagtgcccgatcgtagagcggttgaccaattccatgatgatgcatggcagaaataacgggaaaaaactcatgaccgtgagaattgtgaagcatgcttttgaaatcattcatctgctcacaggcgaaaatcctctgcaagtactggttaacgctattatcaattctggcccacgtgaagatagcaccaggattggccgtgcagggaccgtgcggaggcaggccgtggacgtgagcccactgaggcgcgtgaaccaggcaatttggttgctctgtaccggcgctcgggaggccgcatttcgaaacatcaaaacaattgccgaatgtctggctgatgagctcatcaatgccgctaagggttcatccaatagttatgcaattaagaaaaaagatgagctggagcgggtggctaagtccaaccgatag

SEQ ID NO: 239147 - DNA, 615 bp, synthetic construct
  misc_feature 1..615: note = Description of Artificial Sequence: Synthetic coding sequence
  source 1..615: mol_type = other DNA
atgacggagtgggagacagctgcccctgccgttgctgaaacacctgatatcaagctcttcgggaagtggtctactgacgatgtgcaaatcaatgacatctccctgcaggattatatcgctgtaaaggagaagtatgctaagtacctcccccattcagcaggcaggtacgccgctaaacgcttcaggaaggctcagtgcccaattgtagagcgacttactaactcaatgatgatgcatggaaggaacaatggcaaaaaactgatgacagtgaggattgtaaagcacgccttcgaaataatccacctcctgactggtgaaaatcccttgcaggttctcgtcaatgccattataaattcgggacctcgggaggactcaactcggatcggccgagctggcaccgtacgacgtcaagccgttgacgtcagcccattgcgcagggtgaaccaggcgatttggctcttatgcacaggggctcgggaagccgctttcagaaacattaaaaccatcgcggagtgcctggctgacgagctgattaatgcagccaaagggtcctcaaatagctacgcaataaagaaaaaggacgaattggagcgcgttgcaaaatccaacaggtag

SEQ ID NO: 239148 - DNA, 657 bp, synthetic construct
  misc_feature 1..657: note = Description of Artificial Sequence: Synthetic coding sequence
  source 1..657: mol_type = other DNA
atggccactgaagtggccgcagacgccctgggggaagaatggaaaggttacgtggtgcgcatcagcggaggaaacgacaagcaaggcttcccaatgaagcagggcgttctgacacacgggcgagtgcggttacttttgtccaaaggccattcctgctacagacccaggagaacaggcgagagaaagcgcaagtccgtccggggttgtattgtggatgccaatctcagcgtactcaatctggttattgtgaaaaagggtgagaaagacatccccggactcactgataccaccgtgccccgtcgcctggggccaaaacgggcatctcgcatcagaaagctgttcaacctcagtaaggaggatgatgtaagacagtatgttgtgaggaaacccttaaacaaggagggcaagaagccacgaactaaggctcccaagatacagcgcttggtcacgcctcgagtcctccagcataagcgacgcagaatagccctgaaaaagcaaaggacaaagaagaataaggaggaagcagctgaatatgccaagctgctcgccaaaaggatgaaagaagcaaaagaaaagagacaggaacaaatcgctaagcggcgtcggctgtctagccttcgagccagcacttcgaaatccgaatcctcccagaaatag

SEQ ID NO: 239149 - DNA, 276 bp, synthetic construct
  misc_feature 1..276: note = Description of Artificial Sequence: Synthetic coding sequence
  source 1..276: mol_type = other DNA
atgaagctcaacattagcttccccgcaactggctgccagaagttaatcgaagtggatgatgagcggaaactcagaaccttttatgagaagcgtatggcaactgaggttgccgcagatgcacttggtgaggagtggaaggtgaaggttgacaaactcctgcaagtttttaaatcagagacagtcaacgctattggcaactggtacctcgagtggggcagcgattccggcttctggctccttacgttcggcaaacttttacccaacgctaccctttag

SEQ ID NO: 239150 - DNA, 657 bp, synthetic construct
  misc_feature 1..657: note = Description of Artificial Sequence: Synthetic coding sequence
  source 1..657: mol_type = other DNA
atggcgaccgaggtcgctgcggatgccctgggtgaggaatggaagggatatgttgtacggatttctgggggtaacgacaaacagggtttcccaatgaagcagggggtgctgacccacggccgtgtgcggctgctcctctccaagggccattcttgttaccgcccacgccgaacgggcgagcgtaagagaaaaagcgtccggggttgtatcgtcgacgctaacctaagtgtgctcaacctagtgattgtaaaaaaaggggagaaagatatacctggtttaactgataccaccgtgccaaggagactggggccaaaaagggccagtagaattcggaagctattcaatttgtccaaagaggacgatgttaggcaatacgtggttcgcaagccactgaataaggaagggaaaaaacctcgcacaaaggcccctaagattcaacgactggtcacaccccgagtgctccagcataaaaggaggaggatagccctcaagaagcagcgcacaaaaaagaacaaagaggaggccgctgagtacgcaaaactgctggcgaagagaatgaaagaagcaaaggagaaaagacaagaacagatcgccaagcgcagacgactgtcatctctccgggctagtactagcaagtccgaatctagccaaaagtag

SEQ ID NO: 239151 - DNA, 750 bp, synthetic construct
  misc_feature 1..750: note = Description of Artificial Sequence: Synthetic coding sequence
  source 1..750: mol_type = other DNA
atgaaactgaacatctccttccccgcaacagggtgccaaaaactcatcgaagtcgacgacgaacgcaaactgcggaccttctatgaaaagagaatggcgacagaagtggccgctgacgccctgggcgaggagtggaaaggttatgtggtgagaatctccggtggtaacgacaaacaggggttccctatgaagcagggcgtgctgacccacggtagggtgagactgcttctgtctaaaggacactcttgctatcggcctcggcgtacaggtgaacgcaagaggaagtctgttagagggtgcattgttgacgcaaatctgtctgtgcttaatttggtgattgtgaaaaaaggcgaaaaagacattccaggacttactgatacgacagttcccagaaggctggggcctaagcgggcttcgaggatacgcaagctgtttaatctgtcgaaggaggacgatgtgcgacagtacgttgtacgtaagccattgaacaaagaaggtaaaaaaccaagaacaaaggcccctaaaatccagagactagtaacgcctcgcgtgttacagcataagaggcgcagaattgcacttaagaagcaacgaaccaaaaagaacaaggaggaagctgccgagtatgccaagttgttggctaagagaatgaaggaggcaaaggaaaagcgtcaggagcagatagccaagaggaggagactgagctcattaagggctagtacttctaaatccgagagcagccagaagtag

SEQ ID NO: 239152 - DNA, 585 bp, synthetic construct
  misc_feature 1..585: note = Description of Artificial Sequence: Synthetic coding sequence
  source 1..585: mol_type = other DNA
atgttctccagctcagcaaagattgtgaagccgaatggagagaagcccgacgagttcgagagtggtatttcccaggcgctcctggagttggagatgaatagcgatttgaaggctcagcttcgcgaactcaacatcacagccgctaaggagatcgaagtggggggtggtcgtaaagcgattatcatcttcgtccccgttccccagcttaagtcatttcagaagattcaggtgaggttggtgcgggagctggagaaaaaattctccggtaagcatgttgtgttcattgcccagagacggatcctgccgaaacctacacgtaaaagtcgaacgaaaaacaaacagaagaggccgagatcaagaaccctgacagccgtgcatgacgctattctggaagacctggtgtttccaagcgaaattgtgggaaagcggattagggtgaaactcgacggttctagactgatcaaagtgcatctggacaaggctcagcaaaacaacgtcgagcacaaggtggagacgttttcgggcgtttacaagaaactcaccggaaaggacgtcaacttcgaattccccgaattccaactgtag

SEQ ID NO: 239153 - DNA, 585 bp, synthetic construct
  misc_feature 1..585: note = Description of Artificial Sequence: Synthetic coding sequence
  source 1..585: mol_type = other DNA
atgtttagtagctctgcgaaaattgtgaaaccaaacggagaaaagcccgatgaattcgaatcgggcatctctcaagcattattggagctcgagatgaactccgatttgaaggctcagctccgcgaattaaatatcactgctgctaaggagatagaggtcggtggcggtcgaaaagcaattattatatttgtgcctgtgccccaactgaagagttttcaaaagattcaggttcggctggtccgcgagcttgaaaagaagtttagcgggaaacatgtagtgttcatcgctcagaggcgcatcctccctaagcccactcggaaaagcaggacgaaaaacaagcagaagcggcctcggtccagaactctgaccgcggtgcacgatgcaattctcgaggaccttgtctttccttcagagattgtgggcaagcggattagggtgaaattggacgggtccaggctgatcaaagtgcacttagataaagcgcaacagaacaacgttgagcataaggttgaaactttttccggtgtctacaagaaactcaccgggaaggacgtgaatttcgagtttcctgaatttcagttgtag

SEQ ID NO: 239154 - DNA, 585 bp, synthetic construct
  misc_feature 1..585: note = Description of Artificial Sequence: Synthetic coding sequence
  source 1..585: mol_type = other DNA
atgttctctagcagtgccaagattgtgaagccaaacggagaaaagcctgatgaatttgagtctggtatcagccaggctcttctggagctcgaaatgaacagcgatctgaaagctcaactacgcgagctgaacatcacagcagctaaggaaatcgaagtgggcggaggtaggaaggcaattatcatttttgttcctgtgccacagttgaaaagcttccagaagattcaggtgcgtctcgtgcgggagctcgagaagaaatttagcggcaagcatgtcgtgtttatcgcccagcgcaggattcttccaaaacccacacgtaaaagccgcaccaaaaataaacagaagaggccacggagccgcaccctaacagccgttcacgacgccatcttagaagaccttgtgtttccatcagagatcgtcggcaagcggatcagggtgaagctggacggcagtcgtcttatcaaggtccacctcgacaaggcacagcagaataacgtagaacataaagtcgaaacatttagcggcgtctacaagaagctgaccggcaaagacgtcaattttgagttcccagaatttcagctatag

SEQ ID NO: 239155 - DNA, 567 bp, synthetic construct
  misc_feature 1..567: note = Description of Artificial Sequence: Synthetic coding sequence
  source 1..567: mol_type = other DNA
atggggatctctagagacaactggcataagcgaagaaagaccgggggtaaaagaaaaccctatcacaagaaacgaaagtacgagcttggacggcctgctgccaatactaaaatcggaccgagaagaattcacacagtgagagttcgcggagggtgtacacgaaagacccgcattatcgatgtcgtgtacaacgcttccaataacgagcttgtgagaacgaagacactcgtcaagaattgtatagtccttattgattctactccgtatcgccagtggtatgagtctcactacgcactgccgctcgggaggaaaaagggcgctaagttaactccggaagaagaagaaattttgaacaaaaaacgaagcaaaaagatccaaaagaaatatgacgagcggaaaaaaaatgcaaaaatttcatctctgctagaagagcaattccaacaaggtaaattgctcgcctgtatcgcttcccgcccaggacagtgtggcagagcagatgggtacgtactagaaggaaaggaactggagttctatctgaggaaaatcaaggcacgcaagggaaaatag

SEQ ID NO: 239156 - DNA, 627 bp, synthetic construct
  misc_feature 1..627: note = Description of Artificial Sequence: Synthetic coding sequence
  source 1..627: mol_type = other DNA
atggggatctctcgtgacaattggcacaaaaggcgtaaaaccggaggcaagcggaaaccttatcacaaaaagcgtaagtatgaactcggcagaccagccgctaatacgaagatcggccctcggcgtattcatacagtcagagtgagaggaggcaacaagaagtacagagccctacgcttggacgtaggcaattttagctgggggtcagaatgttgcacccggaagacaaggattatcgacgttgtgtacaacgcctccaataatgagctggtgcgtacgaagactctagtgaaaaactgtatcgtgcttatcgacagcaccccctaccgccaatggtatgaatcccactacgcgctcccccttggaaggaagaaaggggctaaactgacccccgaggaggaagaaatattaaataaaaagcgttctaaaaagatccagaaaaagtatgatgagaggaagaaaaatgctaaaatctcgtctctgttggaggagcagttccagcagggcaaactactggcatgtattgcatcccgtccaggccagtgcgggcgagcagatgggtacgtcttggagggaaaggaactcgaattttatctgcgcaaaatcaaagctcgcaaaggaaaatag

SEQ ID NO: 239157 - DNA, 585 bp, synthetic construct
  misc_feature 1..585: note = Description of Artificial Sequence: Synthetic coding sequence
  source 1..585: mol_type = other DNA
atgccagtggccagatcctgggtgtgcagaaagacttacgtgaccccccgaaggccttttgagaaaagccggctggaccaggagctgaagttaatcggtgaatacggactccgaaataaacgagaagtgtggcgtgtcaagtttaccctggcgaagatccggaaggctgctagggagctgctgaccttggatgagaaggatcctaggagactgttcgagggaaatgctcttctgcggaggctcgtgcggattggtgtgttggacgagggtaaaatgaagttggactatatcctcggtctgaaaatcgaagatttcctagagagacgcttgcagacacaagtttttaagttgggccttgccaagtccatccatcatgccagagtgttgattcggcagcgtcacatccgagtcagaaagcaggtggtgaatatacccagctttatcgtgagactcgattctcagaagcacattgatttttcactgagaagcccgtacggaggtggtagacctggtcgggtgaagagaaagaatgctaagaagggacaaggaggggcaggtgcaggtgatgatgaagaggaagattag

SEQ ID NO: 239158 - DNA, 585 bp, synthetic construct
  misc_feature 1..585: note = Description of Artificial Sequence: Synthetic coding sequence
  source 1..585: mol_type = other DNA
atgcctgtggccaggagctgggtttgcagaaagacgtacgttactccacggcgaccttttgagaagtcccgattggaccaagaactcaaactcatcggggaatacgggctccggaacaagcgcgaggtctggagggtgaagtttactctggctaagatccggaaggctgccagagagctcctgacattagacgagaaagatcccaggcgtctgttcgagggaaatgcactgctgagacggctggtccgcatcggtgtactggatgagggtaaaatgaagctggactacattctcggcttgaaaattgaggactttcttgagcgaagactgcagacccaagttttcaaattgggtctggctaagagcattcaccacgccagagtgcttatccgacagcgacatatccgtgtccggaaacaggtagtgaatatcccgagtttcattgtgagactcgacagccagaagcacatagatttttcccttagaagtccatacggcggaggccgaccagggagggtgaagaggaagaatgccaaaaagggtcagggaggagccggagccggagacgatgaagaggaagattag

SEQ ID NO: 239159 - DNA, 585 bp, synthetic construct
  misc_feature 1..585: note = Description of Artificial Sequence: Synthetic coding sequence
  source 1..585: mol_type = other DNA
atgcctgtggcgcgtagctgggtgtgcaggaagacctatgtgacaccccgaagacccttcgaaaagagtcgcctggaccaggagcttaaactcattggggaatatgggctcagaaacaagcgcgaggtttggagggtgaagttcacactggctaaaatccgtaaagcggctcgcgagctgctgactctcgacgagaaggacccacgacgactgttcgaaggaaatgcattgctacggcgactggtccggatcggggtgcttgacgagggcaaaatgaaactcgattacatcctgggacttaagatcgaggacttcctggaacgcaggctccagacacaagtattcaaacttgggctcgcgaaatccattcaccacgctagagtactgatcaggcagcgtcatatccgcgtgcgaaaacaggtggttaacataccctcgtttattgtgaggctggatagccagaagcatatcgacttctctctaagatccccctatgggggaggtagacccggacgcgtcaagaggaaaaacgcgaagaagggccagggcggagcaggggcaggtgatgacgaagaggaagactag

SEQ ID NO: 239160 - DNA, 420 bp, synthetic construct
  misc_feature 1..420: note = Description of Artificial Sequence: Synthetic coding sequence
  source 1..420: mol_type = other DNA
atgccagttgccagatcctgggtgtgccgaaagacctatgtgacacccagaaggccttttgaaaaatcgcggctcgatcaggaattaaaattaatcggcgagtatggactgcggaataagagggaggtctggagagtgaaattcacgctcgccaaaatacggaaggcagcacgggaattgctcaccctggacgaaaaggatcccaggcgactgtttgagggtaatgccctactgagacggttggtgcgaattggggttcttgatgaaggcaagatgaagctagactatattctgggcctgaaaatcgaagatttcctggagcgtcgtctccagacccaggtgtttaagctcggcttggccaaatctatacaccacgccagggtgctgatccgccagagacacatttcgcccaggcgctag

SEQ ID NO: 239161 - DNA, 420 bp, synthetic construct
  misc_feature 1..420: note = Description of Artificial Sequence: Synthetic coding sequence
  source 1..420: mol_type = other DNA
atgcccgtcgctcggagctgggtctgtcgtaagacatatgtgacacctcggaggccattcgaaaagagtcgactagatcaggagttgaagctgattggggaatatggactacgaaataagcgcgaagtctggagggtcaagtttactctcgccaagattcgcaaagcggctagggagctgctgacccttgacgagaaggatcccagacggctgttcgaagggaacgctctgctccgcaggttggtgcgcattggcgttctggacgagggcaaaatgaagctggactacattctgggtttaaagattgaagatttcctggagcggcgattgcagacccaggtgtttaagctcgggctggccaagtccatccatcatgctcgggttttgatccgccagagacatataagtccaagacggtag

SEQ ID NO: 239162 - DNA, 471 bp, synthetic construct
  misc_feature 1..471: note = Description of Artificial Sequence: Synthetic coding sequence
  source 1..471: mol_type = other DNA
atgccagtggcaagaagctgggtgtgtagaaagacctacgtgactccacgcaggccctttgagaagtcaaggctagatcaggaactgaagcttatcggtgaatacggtctgaggaataagcgcgaggtttggcgagtcaaattcaccctagcaaaaattagaaaagcagctagggagctgctgacccttgacgagaaagacccccgaaggctgtttgaaggaaatgcgttgctaagacgcctggtccgcataggggtcctagatgagggtaagatgaagctcgactatatcttgggcctgaagatcgaggactttttggagcggcgtctgcagacacaggtcttcaagttaggcctcgctaagtcaatccaccacgccagagtgttaattcgacagagacacataagatatcacctgggttgggctccagaaagtagcagcacttgcccaagtgacgggtgcccccactag

SEQ ID NO: 239163 - DNA, 420 bp, synthetic construct
  misc_feature 1..420: note = Description of Artificial Sequence: Synthetic coding sequence
  source 1..420: mol_type = other DNA
atgcctgttgcccgatcctgggtgtgtaggaagacttacgtgacaccccgacggccattcgagaagagccggttggaccaagaattgaagctgattggggagtatgggctacgcaacaagagggaggtttggcgggtgaaattcacactggctaagatccgtaaagccgctagagaactgcttaccctggacgaaaaggaccccagacggctgttcgaggggaatgccctccttaggcgtcttgtgcggattggtgtgctcgacgagggaaagatgaagttagattacatcctcggactcaagattgaagatttcttggagcgaagacttcagactcaggtcttcaagctgggccttgccaaatcaatacaccatgctcgcgtactcattcgccaacgccacatctccccgagaaggtag

SEQ ID NO: 239164 - DNA, 2844 bp, synthetic construct
  misc_feature 1..2844: note = Description of Artificial Sequence: Synthetic coding sequence
  source 1..2844: mol_type = other DNA
atggccacaagggtgaggactgccagtatctgggtacctcccctgcaggagcggaactcatcatgggatcgcatacgtaagttacaagggcaagaatccatcctgggtcaggggaccccaggattgcaacctctacctggcactccacgccagaaacaaaaaagcaggcgcattgagaaggtcctggagtggctcttcattagccaggaacaacccaaaataaccaagtcttggggtcctcttagctttatggatgtgttcgtcgactttacatgggaagagtggcagctcctcgacccagcccaaaagtgtctgtacagatctgtgatgctcgaaaattattctaacctcgtcagtctgggttatcagcacaccaagccagacataatcttcaagctggaacaaggagaagagctttgcatggtacaggcgcaggtgcctaaccagacctgccccaacaccgtctggaaaattgacgacctgatggattggcatcaagagaataaagataagctcggtagcacggccaagtcctttgagtgtactacttttggaaaactctgcctcctcagcacgaagtatttgtcacggcaaaaacctcacaagtgtggaactcacggcaagagtctaaaatacatagatttcaccagcgactatgctcgaaataaccccaacggttttcaggtgcacggtaaatccttctttcacagtaaacatgagcagacggtgataggtattaaatattgtgagtcgatcgagtccggaaagacagtcaacaaaaagagtcagctaatgtgtcagcagatgtatatgggggagaagccctttggttgctcctgttgcgaaaaagccttttcaagcaaatcttatctcctggtccatcaacagacccatgccgaagagaaaccctacggctgtaacgagtgtggaaaagatttcagcagtaagtcatacctgatagtacatcagcgcattcacacaggggaaaagctgcacgaatgcagtgaatgtcggaagactttcagcttccacagtcagttggttattcaccagcggattcacaccggagaaaacccttatgagtgctgcgaatgtggcaaggtgttcagtcgtaaggatcagttggtctctcatcaaaaaacccacagcggccaaaagccctatgtatgcaatgaatgcggcaaagcgtttggcttgaagagccaattgatcattcacgagcggatccacactggcgagaagccgtacgaatgtaatgagtgtcagaaagcattcaacactaaatccaatctgatggtgcatcaaagaacacatacaggggagaaaccttacgtgtgctccgactgcggtaaagctttcacctttaaatctcaattaattgttcatcaaggcatccacaccggggtgaagccatatggatgtatacagtgcggtaagggtttctctctgaaatctcaactcatcgtccaccaacgctcccatactggcatgaaaccctacgtctgtaacgagtgcggcaaggcctttagatctaaatcctatttaattattcacacaaggacacacactggcgagaagctgcacgaatgtaataattgcgggaaggccttctcgttcaaatcccaattgataatccatcagaggatccatactggtgagaacccctacgaatgtcacgaatgtggcaaagccttttcgagaaaataccaattaatttctcaccaaaggactcatgcaggcgagaagccatatgagtgcaccgactgtgggaaagcgtttggtctgaaaagtcagctcattatacaccagagaacacacacaggcgaaaagccatttgagtgctccgaatgtcagaaagcttttaacaccaaatccaatttaatcgtgcatcagagaacgcacaccggagaaaagccttacagctgtaacgaatgtggcaaagccttcactttcaagtcccaactgatcgtgcataaaggtgtgcataccggagtgaagccttatggttgttcacaatgcgccaaaacttttagtctgaaatctcagctgattgtgcaccaacgatcacacactggagtaaagccctatggatgcagcgaatgtggcaaggcattcagatccaagagctatctgattatccatatgcgcactcacactggcgagaagcctcacgagtgcagagagtgcggcaaatcattcagttttaacagtcagttgatcgttcaccagaggattcataccggtgagaacccgtacgagtgcagcgaatgcggaaaagcattcaatcgaaaggatcaattgatctcacatcagcgaacccatgctggagagaagccatatggatgcagtgagtgtgggaaggcatttagttcaaaatcctatttgataatccacatgagaacacactcaggagagaagccgtatgaatgtaacgaatgtggtaaggcgtttatctggaagagcttgttgatcgtccacgagaggactcacgcaggcgtcaatccttacaaatgtagtcaatgcgagaagtccttctccggcaagttgaggctgcttgttcaccaacgcatgcatactcgcgagaaaccatacgagtgttcggaatgcggaaaagctttcatcagaaattcccagctgatcgtgcatcagaggacccattctggtgagaagccatacgggtgtaacgaatgtggcaagactttcagccagaaaagcatcctgtccgcccaccagcggacacatactggagagaagccctgcaagtgcaccgagtgcggcaaggccttctgctggaagagtcagctgatcatgcaccaaaggactcacgtggatgataagcattag

SEQ ID NO: 239165 - DNA, 768 bp, synthetic construct
  misc_feature 1..768: note = Description of Artificial Sequence: Synthetic coding sequence
  source 1..768: mol_type = other DNA
atgcctagagaagatagggccacctggaagtccaattactttcttaaaatcatacagctgttggacgactaccctaagtgcttcatcgtgggtgctgacaacgttgggtcaaagcagatgcagcagatcagaatgagtctccgaggcaaagccgtggtactcatgggcaagaacacaatgatgagaaaggccatacgcggacacctcgagaacaatccggctttggaaaagctgctgccgcacattcggggaaacgtgggcttcgtgtttacgaaggaagatcttacagaaattcgtgacatgctgcttgcgaataaggtccctgccgctgcgagggccggtgccatagcaccgtgtgaagtgacagtgccagcccaaaacaccggactggggccagagaagaccagctttttccaggcactcgggatcacgaccaaaatttctagaggcaccattgaaatcctgggagtccgtaacgttgccagcgtgtgcctccagatcggataccctaccgttgcatctgttccacactcaattatcaatggatataagcgggttctagctttgtcagtcgagactgactatacctttccgctggcagagaaagtaaaggcgtttctcgccgatccctcggcttttgtggccgcagccccagtggcagctgctaccactgccgctcctgcagcggcagccgcacctgcgaaagttgaagctaaagaagaatccgaggaatccgatgaggacatgggattcggcctttttgactag

SEQ ID NO: 239166 - DNA, 954 bp, synthetic construct
  misc_feature 1..954: note = Description of Artificial Sequence: Synthetic coding sequence
  source 1..954: mol_type = other DNA
atgcccagggaagacagagctacctggaaaagcaactactttctcaagatcatacagctcctggatgactaccccaagtgctttattgtgggggctgataatgtagggtcaaagcaaatgcaacaaatccgcatgagcctgcggggtaaagccgtggtgcttatgggaaagaatactatgatgaggaaagctatccggggtcatttagaaaataatcctgctttggaaaagctgcttccacatattaggggaaacgtcggttttgtttttaccaaggaggacctgacggagatccgcgacatgttactggcaaacaaggtccctgctgctgctcgagccggagccatagctccctgcgaagtgacagtaccagcccagaatactggactcggacctgaaaagactagctttttccaagctttaggaataaccaccaaaattagccgcggtaccattgaaatcctatcagacgtccagctgattaagacgggcgacaaagtgggcgcttccgaagcaacactgctgaatatgttaaacatttcaccttttagtttcggactcgtaatccagcaggtctttgataatggttctatctacaaccctgaggttttggatataacggaggagactttacacagccgctttctggagggggtccgaaatgtagcatccgtatgtctacagatcgggtacccaacggtggcgagcgtcccccattcaatcatcaacgggtacaagcgcgtcctcgctctgtccgtcgaaaccgactacacttttcctctggcggagaaagtcaaggccttcttagccgaccctagtgccttcgtggctgcagctccagtcgcggcagctaccacagcggctcccgctgcagccgctgcaccagccaaggtagaggcaaaagaggaaagtgaggaaagcgatgaagacatggggttcggcctatttgactag

SEQ ID NO: 239167 - DNA, 954 bp, synthetic construct
  misc_feature 1..954: note = Description of Artificial Sequence: Synthetic coding sequence
  source 1..954: mol_type = other DNA
atgccaagagaggaccgtgcaacctggaagtcaaactacttccttaagataatacagctgctggatgattatccaaagtgctttatcgtcggggctgacaatgtggggtctaagcagatgcagcaaattaggatgtcactgagaggaaaagctgtggtactgatggggaagaatacgatgatgcggaaggcaattagaggacacctggaaaataacccggctctggaaaaactgctgccacatattaggggcaacgtgggcttcgtattcactaaggaagatttgaccgagattagagatatgctgctggcgaacaaggtccctgccgcagcaagggctggtgctattgctccatgtgaagttactgtgccagcacagaataccggactgggccctgaaaagacgtcattttttcaggcgctgggcataacgacgaagatcagcaggggaacaatagagatcctatccgatgtgcagcttattaaaacaggggacaaggttggcgcatccgaagctacccttctgaacatgttaaatatctctcccttcagttttgggttggtaattcagcaggtctttgataacggcagtatatacaaccccgaggtattagacatcacagaggaaactctgcattcaaggtttcttgaaggtgtgcggaacgtggcctctgtatgtcttcagatcggctatccgacagttgcttccgtgccccattcaattatcaacggatataaacgtgtgttggccctctctgtagaaacagactatacttttccactggctgagaaggtcaaggcgttcctcgcagacccttctgctttcgtggccgcagctcctgttgcagctgcaactacagcggctccggcagctgctgccgctccagcgaaggtggaggctaaagaagagagtgaggagagcgacgaagatatgggttttgggctctttgattag

SEQ ID NO: 239168 - DNA, 345 bp, synthetic construct
  misc_feature 1..345: note = Description of Artificial Sequence: Synthetic coding sequence
  source 1..345: mol_type = other DNA
atggcgtcggtgtctgagttagcatgtatatattccgctttgattcttcacgatgacgaagttacggtgaccgaggacaagatcaacgccttaatcaaggccgcaggcgtcaacgtggagccattctggcctgggctgttcgccaaagccttggctaacgtcaacatcggatccctgatatgtaacgtgggagcaggtggacccgcacccgctgcaggagctgctcctgccggagggccagctccaagcacggccgctgcccctgctgaggagaagaaggtggaggcaaaaaaagaagagagcgaagaatctgatgatgacatgggtttcggtcttttcgactag

SEQ ID NO: 239169 - DNA, 270 bp, synthetic construct
  misc_feature 1..270: note = Description of Artificial Sequence: Synthetic coding sequence
  source 1..270: mol_type = other DNA
atggccagcgtatctgaactggcttgcatttactctgctttaatcctccacgatgacgaagtgacggtgacagccttagcgaacgtgaacattgggtcactgatctgcaatgtgggagcaggcggaccggcacccgcagccggtgccgcacccgctgggggaccggcacctagcacagctgctgccccagccgaagaaaagaaggtggaagcaaagaaagaagagtcagaagaaagcgacgacgatatgggctttggactgttcgactag

SEQ ID NO: 239170 - DNA, 2277 bp, synthetic construct
  misc_feature 1..2277: note = Description of Artificial Sequence: Synthetic coding sequence
  source 1..2277: mol_type = other DNA
atggccccagccatgcagccggctgaaatccagttcgctcagcgtctggcatcctccgagaagggtatcagggacagggcagtcaaaaaacttaggcagtatataagtgtgaagacacagcgcgagaccgggggattctcacaggaagagctgcttaagatctggaaaggcttgttttattgtatgtgggtccaagacgagcctctcctgcaggaggaactggccaatactatagcacaactggtgcatgcagtcaataattctgcagcccagcacctcttcatccaaacgttctggcaaacgatgaatcgcgagtggaaaggtatcgataggctgcgactggacaaatattatatgctcattcgcctggttcttcgccagagcttcgaggtcctgaagcgaaacggatgggaagaatcgagaataaaagtcttcctcgatgttctgatgaaagaggttctgtgtcccgagtcccagtccccaaacggagtacgattccattttatagatatctatctggacgagttgtcaaaggttggcggtaaggaactgctagcagatcagaatctgaagtttatagatccattctgcaagatcgctgctaagacaaaggatcacaccctagtccaaaccatcgcgaggggagttttcgaggcaattgtggaccagtcaccttttgtacccgaggaaactatggaagagcaaaaaactaaagtgggagatggtgacttaagcgctgaggagattccggaaaacgaggtgagccttaggagggccgttagcaagaaaaagaccgcccttggcaagaatcatagccgcaaagatggattgtccgacgagcgcggacgggacgactgcggcactttcgaagatacaggacctcttctgcaatttgactacaaggcagtggctgatcgtctattggagatgacttcccggaaaaataccccccactttaacagaaaaagactatcaaaactgattaaaaaatttcaggatctgtcagagggatcttcaatatcacagctttcgtttgctgaagacatctcagccgacgaggacgaccagatcctttcacaggggaagcataagaagaaaggtaacaaactattggagaagaccaacctcgaaaaggaaaagggcagtagagttttttgcgttgaagaagaagatagcgagagctctttgcaaaaacggaggcgcaaaaaaaaaaaaaaacaccatcttcaacccgaaaaccccggacccggtggagcagctccaagtctcgaacagaacagagggagagagccagaggcctctggcctcaaggccctgaaagcccgagtcgcagagcctggggctgaagccacaagttccacaggcgaagagtccgggtctgaacaccccccagccgttccaatgcataacaagagaaaaagaccgagaaaaaagagtcctagagcacatagagagatgttggagtccgctgtcctgccacccgaggatatgtcccagtccggcccttccggaagccacccgcaaggcccacggggttccccaaccggcggagcacagctgctgaaaaggaagaggaagttgggcgtggtcccggttaacgggtcaggactttccaccccagcttggcccccactacagcaggagggcccacccactggaccggctgagggagctaacagccacactactctgcctcagcgtcgccgattgcagaaaaagaaagcgggacccggaagcctcgaattgtgcgggctcccatcacagaaaaccgcatcactgaaaaagcgaaaaaagatgagagtgatgtccaaccttgtagagcacaacggggtcctggaatcagaagccggacaacctcaagctctgggatctagtggaacctgctcttcattgaaaaaacagaagctgcgtgccgaaagcgatttcgttaagtttgacactccctttctgccaaaacctctctttttcaggagagccaagtcttcaacagctactcacccgcctggaccagcagtacagctaaacaaaacccccagtagctctaagaaagtgacctttggattaaatcggaacatgacggcggaatttaagaaaacagataaaagcattcttgtcagcccgactggaccaagtagggtggcttttgatccagaacagaaaccactgcacggagtgctgaaaactccaacctccagcccagcttccagccctttggttgccaagaaacccctgactacgactcctagacgtaggcctcgggctatggactttttttag

SEQ ID NO: 239171 - DNA, 780 bp, synthetic construct
  misc_feature 1..780: note = Description of Artificial Sequence: Synthetic coding sequence
  source 1..780: mol_type = other DNA
atgcctggagccaattaccgggctggggcaggcgcaggtgcaggtgcccgacgcccaagaggcgcacgcgatagggaagaggatgggggtggactggagcctgccgctgtggcgagggatctcctccgagggacctcaaacatgtcctttgaggaactgctggaactgcagtcccaagtgggaactaagacttataagcaactcgtggctgggaactccccaaagaagcaggcaagcaggccaccaatccagaacgcatgcgttgcagataagcatcggccactcgagatgtccgccaagattagggtgcccttcctgcggcaagtcgtgcctatctcaaaaaaggttgctcgagaccccaggttcgatgatctgagcggagaatataatcctgaggtgtttgataagacttatcagttcctcaatgacatccgggctaaggagaaggagcttgtgaaaaagcaactcaaaaaacatttatctggcgaggagcacgaaaagttgcagcagcttcttcagagaatggagcaacaagagatggcccagcaagagcggaagcaacaacaggaactacatctggccttgaaacaagagcgccgagcccaggcccagcagggccataggccttatttcctgaagaagtccgaacagcgacaacttgcactggcggaaaagtttaaagagctgaaaaggtccaagaaactggagaatttcctttcccgcaagcggcgacggaacgctggcaaggaccgaaggcatctccccttgtccaaagagtag

SEQ ID NO: 239172 - DNA, 4233 bp, synthetic construct
  misc_feature 1..4233: note = Description of Artificial Sequence: Synthetic coding sequence
  source 1..4233: mol_type = other DNA
atggacatctacgacacgcagactctgggcgttgtggttttcggaggattcatggttgtgtcagcgattggaattttcctcgttagcaccttttctatgaaagagacttcttacgaggaagctctggcaaatcagaggaaggagatggccaaaacccaccaccagaaggtggagaagaaaaaaaaggagaagacagtggaaaagaaggggaagactaagaagaaggaagagaaacctaacgggaaaatcccagaccacgatcccgctcccaatgtcaccgtcctgttgagagagcccgtacgggcacctgccgtcgccgttgcacctaccccggtgcagccacctataatcgtggctccggtggccaccgttcccgcaatgccacaggagaagcttgcttccagtccgaaagataaaaaaaaaaaggagaaaaaggtcgcgaaagtcgagcctgcagtctcaagcgtggttaatagcatacaagtgctcacctccaaggccgctatcctggagacggcccctaaagaggtacccatggtggtagtcccccctgttggcgctaaaggaaacactccagccacgggaaccactcagggtaagaaggctgagggaacgcagaaccagagcaagaaggcagagggcgcacctaatcagggtagaaaagccgagggcacccctaaccaggggaagaaaacagagggcactccaaatcaggggaagaaggccgagggcacacctaatcagggaaagaaggccgaaggcacaccaaatcaagggaagaaggctgagggcgctcagaaccaggggaaaaaggtcgacacaacacccaaccagggtaaaaaagtcgagggcgctccgactcagggccgaaaggctgagggcgctcaaaaccaggctaagaaggtggagggtgcacagaatcagggtaaaaaggccgagggggcacagaaccagggtaagaaaggcgaaggagctcaaaatcaaggcaaaaaggccgaaggcgcacaaaaccaggggaaaaaggccgagggagctcaaaaccagggcaaaaaggcagaaggggcacagaatcaggggaagaaggccgagggggctcagaatcaagggaaaaaggcagagggcgcacagaaccagggcaaaaagtccgaaggagctcaaaatcagggtaagaaggtggagggcgctcaaaaccaaggaaaaaaggccgagggcgcacaaaatcaggggaagaaggccgaaggggctcagaaccaaggcaaaaaggctgaaggagcgcagaaccaagggaagaaagctgagggagctcagaaccaggggaagaaggctgagggcgctcagaatcaggggaaaaaagccgaaggcgctcagaaccagggaaagaaagctgagggggcacagaatcaaggcaaaaaggtggagggggcacaaaatcaaggcaaaaaggctgagggcgctcaaaaccagggcaaaaaagctgagggtgcacaaaatcaaggcaaaaaggctgaaggcgctcagaatcaaggccaaaaaggtgaaggggctcaaaaccagggcaaaaagactgagggagctcagggcaagaaagccgagcgtagtcctaatcaaggtaagaagggagagggagcgcctatccaaggtaagaaagcggatagtgtggccaatcagggcaccaaggtcgagggcatcaccaaccaggggaagaaggcggagggaagcccttctgagggcaaaaaagccgaaggatcaccaaaccaggggaagaaagcggacgcggctgcgaatcaaggtaagaaaaccgagtctgcatcagttcaagggagaaacacagacgttgcccaaagccctgaggcccctaagcaggaagcccctgctaaaaaaaaaagcggcagcaagaagaagggggaacccggtcctccagacgcggacggtcctttgtatctcccttacaaaaccttagtgtccacagtgggtagcatggtttttaacgagggcgaggctcagagactaattgaaatccttagcgagaaggctgggattatccaggatacatggcataaagctacccaaaagggcgacccggttgccattctgaaacgacagctggaagagaaggagaagttgctggctaccgagcaggaggacgcagccgtcgccaaaagtaaactacgagagcttaacaaggagatggcggctgagaaagctaaagccgcagccggtgaggctaaggtgaagaaacaactagtcgctagagagcaggagatcactgccgtacaggcacgtatgcaagccagctaccgggaacacgtaaaagaggtgcaacagctgcagggaaagatacggacattacaagagcaactggagaacggcccaaacacccagttagcgaggctgcagcaggaaaattctattctccgtgacgcactcaaccaggctacatcccaagtggagtctaagcagaatgccgagctggccaaactgagacaagagctcagcaaagtgtccaaggagttggtggaaaaaagcgaagctgtccgacaggacgaacaacaacgcaaagccctcgaagcaaaggccgcagccttcgagaagcaggtgttgcagcttcaggcatcccacagggaatccgaagaagcattgcagaagagattagatgaagtttcccgcgagctgtgtcatacgcaatcctcccatgccagcttgcgggctgacgcagagaaagcccaggagcaacaacagcaaatggctgaactgcactccaagcttcagagttcagaagctgaggtgcggtccaagtgtgaggaactgtctggattgcatggccagctccaggaagcccgagccgagaatagccagttgacagaacgaataaggtcgatagaagccctactcgaggcagggcaagcccgagatgcccaagacgtacaggcctctcaggcggaggccgaccagcagcaaaccagactcaaagagctggagagccaggtgagcggcctcgagaaggaggccattgagctgagagaagctgtggaacagcagaaggtgaagaacaatgatctacgcgagaaaaattggaaggccatggaagcgctggcgacagcagaacaagcatgtaaggagaagctgctaagcctgacacaagctaaggaggagtctgaaaagcagttgtgtttgatcgaagcacaaaccatggaagcattgctggccctcctgcctgagctatctgtgctggcacagcagaactacaccgaatggcttcaggatttaaaggagaagggcccaacacttctcaagcacccccctgcaccagcagagccttcttccgatctggcctccaagttaagagaggctgaggaaacccaatctacactccaggcagagtgtgatcagtacaggtcaatactcgcagagaccgaaggcatgctgagggacctgcagaaaagtgttgaggaggaggagcaggtatggcgagccaaagtcggggcagctgaagaagagctccagaaaagccgagtcacagtgaagcacttggaagaaatcgtcgagaagttaaagggcgagttagaaagcagcgaccaggtcagggagcacactagccatttggaggcagagctggagaaacatatggccgcagcctcagctgagtgccagaactacgcaaaggaagtggcaggcctaagacagcttctgttagaatcgcagagtcaactcgacgccgcaaaatctgaagcacagaaacagtctgacgagctggctctggtgcgtcagcagctttctgagatgaagtcccatgtcgaggatggtgatattgccggagcacccgcaagttcccccgaggcgcctccggcagaacaggatccagttcagctcaagactcagcttgagtggaccgaggcgattttggaggatgaacaaactcagcgtcagaagttgacggcggaattcgaggaggcccagacttccgcatgccggctccaggaggagctggagaagctgaggacagcaggaccactggaaagcagcgaaacagaggaggcctctcagctgaaagagcggctggagaaagagaagaagctgacctcagacttaggacgcgcagccacccgtctgcaggagctgctgaagaccactcaagaacagctggcgcgtgagaaagatactgtgaagaagttgcaggagcagctcgagaaggcagaagatggctcctcttccaaagaagggaccagcgtgtag

SEQ ID NO: 239173 - DNA, 2934 bp, synthetic construct
  misc_feature 1..2934: note = Description of Artificial Sequence: Synthetic coding sequence
  source 1..2934: mol_type = other DNA
atggatatctatgatacacaaaccctgggggtagtggttttcggcggtttcatggtcgtttcagcaatcggtatatttctcgtatccaccttcagcatgaaggagacatcctacgaggaagcccttgcgaatcagaggaaggagatggccaagacacaccatcagaaggttgaaaaaaagaagaaagagaaaaccgttgaaaagaaggggaagacaaaaaaaaaggaggaaaagccgaatgggaagatacctgaccacgacccagctccaaatgtaactgtgctgctccgggaaccagtgcgggctccagcagttgccgtcgctcccacaccagtgcaacctccaattattgtggcgccagtggccacggttcctgccatgccacaggagaagcttgcgtctagccccaaagacaaaaaaaagaaggaaaagaaggttgcaaaggtcgagccagccgtgagctcagtggtcaactctatccaggtgttgactagtaaagctgcaatcctggagactgcaccaaaagagggtaggaatactgacgttgcccagagccccgaagcacccaaacaggaagccccagcgaagaagaagagcggtagcaaaaagaaaggtccaccagacgctgatggccctctgtacctgccatacaagacgctagtgagcaccgtcggaagcatggtgttcaatgaaggcgaggcacagcgcctgatagaaatacttagtgaaaaggccggtataatccaggacacatggcataaagccacacagaaaggggacccagttgctatactcaagaggcagctggaagaaaaggagaagctcctcgccactgagcaggaagacgccgctgttgcaaagtccaaactcagagaactcaacaaagagatggccgcagaaaaagcaaaagctgccgcaggagaggcaaaagtgaagaaacaactggttgcccgagagcaagaaatcactgctgttcaggcaaggatgcaggccagctatagggaacatgtcaaggaagtgcagcagctgcagggcaaaatccgaacactgcaggaacaactggaaaacggacccaatacccagctggccagactgcagcaggagaattcaatcctaagagatgccctaaatcaggccactagccaagttgagagcaaacagaatgcagaactcgcaaaactgcgccaagaattgtccaaagtgtccaaggaactcgttgaaaaatccgaagccgtccgacaggacgagcagcagaggaaggctctcgaagctaaagcagctgcgtttgaaaagcaggtactgcaactgcaggcctctcatcgcgagtccgaggaggccctccagaagcgcctggatgaggtcagtagagagttgtgtcacacacaatcctcacacgcctccctgagagcagacgccgagaaggcccaggagcagcagcaacagatggccgaactgcactccaagcttcagagtagcgaagctgaggtgcgttctaaatgcgaagaattatccggactccatgggcagcttcaggaagccagagccgaaaatagtcagctgactgagaggatacgaagtatcgaggccctacttgaagccggtcaggctagggacgcccaagatgtgcaggcttctcaggctgaggcagatcagcaacagactcgtctcaaagagcttgaaagtcaagtgagcggactcgaaaaggaagccatcgagttaagggaggctgttgagcagcagaaggtgaagaataacgacctgcgcgagaagaattggaaagccatggaggccctggctactgccgaacaggcctgtaaagaaaaactgttgagtctgactcaggcaaaagaagagtcagaaaaacaactctgcctgatagaggctcagacgatggaagctctgctggccttactgcccgaattgagcgttttggcccagcagaactatacagagtggttacaggatctcaaagaaaagggcccaacgttgcttaagcaccctccggctccagccgagccaagttccgatttggccagcaaattacgtgaggccgaggaaactcagagcactctacaggccgaatgcgaccagtacagaagcatcttggctgaaacagaaggcatgctgagggacctccagaaatcggttgaagaggaggagcaagtgtggcgcgcaaaagtgggcgcagctgaggaggagctgcagaaaagccgtgttacggtcaagcacttggaagagattgtagagaagctgaaaggggagttggaaagctcggatcaggtccgcgagcacacctcacatctggaagcagagctcgagaagcacatggcggcagcctctgctgaatgccaaaattatgccaaggaagtcgccggtctgagacaactcctgctggagagccagtcccagctggacgcggctaaaagcgaagcccagaaacagtcagacgagctcgctctggtgagacagcaattatccgaaatgaaaagccacgtggaagacggggacatagctggagctccggcttcaagcccggaggcgcctccagcagagcaggaccctgtccagttgaaaacccagctagagtggaccgaggccatactggaagacgaacaaactcagcgacaaaagcttacggcggagttcgaagaggcccagaccagcgcttgtagactgcaagaggagttggaaaagctgagaacagccggacctctagaatcaagcgaaactgaggaagcgagccagctgaaggaacgactggagaaagaaaagaagctgacatcggatctgggcagagccgctacaagattgcaagaacttctgaagacaacccaagagcaattggcaagagaaaaagataccgtgaaaaagctgcaagaacaactggagaaggccgaggatgggagctctagcaaagaagggacctctgtgtag

SEQ ID NO: 239174 - DNA, 2934 bp, synthetic construct
  misc_feature 1..2934: note = Description of Artificial Sequence: Synthetic coding sequence
  source 1..2934: mol_type = other DNA
atggatatctatgatacacagaccctcggggtagtagtattcggcggatttatggttgtgtctgccatcggaattttcctggtgagtactttctctatgaaggagacatcgtatgaagaggccctggccaatcaacggaaagaaatggccaaaactcaccatcagaaggtggaaaagaagaaaaaagagaagaccgtggagaagaaaggcaagacaaagaagaaggaggaaaaaccaaatgggaaaatacccgatcacgatcccgctcccaacgtgactgtgctgcttcgtgagcctgttcgggcacccgctgttgctgtggcaccgacacccgttcaacctcctataatagtcgctcctgtggcaactgttcctgctatgcctcaggaaaagctcgccagttcccccaaagacaagaaaaagaaagaaaaaaaggtcgccaaggtcgagccagccgtgagctcggtggtgaactccatccaggtgttgacttccaaggctgcaatcctcgaaacggccccaaaagagggcagaaacacagatgttgctcagtcccctgaagctccaaaacaggaggctccagcaaagaaaaagagtggttcaaaaaagaagggcccacccgacgcagacgggcctttgtatttgccatataaaacactcgtttccacagtcggatccatggtcttcaacgaaggggaggctcagaggctgattgaaatcctcagcgagaaagccggaatcattcaggatacgtggcataaggccacccagaaaggcgatccagttgccatccttaagagacagcttgaagagaaggaaaagctgctggccaccgaacaggaggatgcagccgtggctaagtcaaagcttcgggagctgaacaaggagatggctgccgaaaaggcaaaagcggcagcaggggaggcaaaagtgaaaaaacaactggtggcgagggagcaggagattactgcagtacaagcacgcatgcaagcctcctacagagagcacgtgaaagaggtgcaacagcttcagggaaagattcgcaccctccaggagcagctcgagaatggtccaaacacccaactcgcaagactgcagcaggagaactcaattctgagggatgcactgaatcaggcgacttcgcaggtagaatccaaacagaacgccgaactggccaaactgaggcaggaacttagcaaagttagcaaggagttggtggaaaagagcgaagccgtgcgccaggatgagcaacaacgaaaggctctggaggcaaaagctgcagctttcgaaaagcaggtgctgcagctgcaagcttctcatcgcgagtcggaggaggctttgcaaaaaagattagacgaggtgtctcgcgaactgtgccatactcagagttcacacgcctccttacgggcagacgcggaaaaagctcaggagcaacagcagcaaatggctgaacttcatagcaagctgcagagttcggaagcagaggtgcgtagcaaatgtgaggaattgagtgggctgcacggacaactgcaggaagccagagcagagaactcacaactcaccgagcggatacgtagtatcgaagcactcctagaggcgggtcaggcaagagatgcccaggacgtgcaggcctcccaggccgaggccgaccagcaacagacacggcttaaggaattagaatcacaggtgtccggattagaaaaagaagcgatagagttgcgggaggctgtggaacagcaaaaggtgaagaataatgatctgagggagaagaactggaaggccatggaagccttagcgacggccgagcaggcgtgtaaggaaaagctattgtccctgacgcaggcgaaagaggaatcagagaaacaactctgcctaattgaggctcagacaatggaggcactgctggccctgctgccagaactgagcgtgctcgcgcagcagaattacactgaatggctgcaggacctgaaggaaaagggacccaccctgctgaagcatccacccgctcctgccgagccttccagcgatctggcctctaagctgagggaagccgaagagacccagtccaccctccaggcagaatgtgatcagtatcggtcaattctggccgagaccgaaggaatgcttagagacctgcagaaaagcgtagaagaagaggagcaggtgtggagggcaaaagtcggagctgccgaggaggaactgcagaaatccagggttaccgttaagcatctggaggagatcgtggaaaaactgaaaggggaactggagtcgagcgatcaagtgcgggaacacaccagccacctagaggccgaactggagaagcatatggccgctgcttccgccgagtgccagaactacgcgaaagaggtagcaggcctcagacagctactattagagagtcaatctcaactggacgcagctaagtcggaggctcaaaaacagagcgacgaactggcactggtgcgacagcagttaagcgaaatgaaaagccatgtagaggacggggacattgccggtgctcccgcatccagcccagaggcccctcccgctgagcaggacccagttcagctgaaaacccaactggaatggacagaggcgatcttggaggacgagcagacccaacgccaaaaactgacagccgagttcgaggaagctcagaccagcgcgtgtcgccttcaggaagaactggagaagctgcgaaccgccggacctctggagtccagcgagaccgaagaggcctcccagcttaaagagagactagaaaaagaaaaaaaactgacatccgatctcggcagagccgctacacgcctacaggagcttcttaaaaccacacaggaacaactggctcgggaaaaagatactgtcaagaagctccaggagcagctcgaaaaagccgaggacggctcaagctccaaagagggtacatcggtgtag

SEQ ID NO: 239175 - DNA, 4233 bp, synthetic construct
  misc_feature 1..4233: note = Description of Artificial Sequence: Synthetic coding sequence
  source 1..4233: mol_type = other DNA
atggacatctacgacacgcagacccttggagtggtggttttcggtgggttcatggtcgttagtgctataggaatttttttggtgtcaaccttctccatgaaagagacatcttacgaagaagcactggcaaaccagagaaaggaaatggccaagacacatcatcaaaaggtcgagaagaaaaagaaagaaaagaccgtagagaagaaaggcaaaacaaagaagaaagaagaaaaacccaatggcaagatcccagatcatgatccagcacctaacgttacagtgttactccgggagcccgtcagagcacccgctgtggcagtagctcccacacccgtgcagcctccaataatcgtggcacccgtggctactgtgcctgcgatgccacaagagaagttggcatcttcaccaaaggacaagaaaaaaaaggaaaaaaaggttgccaaggtcgagccggctgtgtcaagcgttgtaaactccattcaggtgttaacgagcaaggccgctatcctcgaaacggcacccaaagaagtgcccatggttgtggttcctccagtcggggctaaggggaatacacccgctaccggcacgacacaaggaaaaaaggcagaaggcacacagaatcagagcaaaaaggcagaaggggcacccaaccaggggaggaaggctgagggaactcccaatcaaggaaagaaaaccgagggcacgcccaatcagggaaaaaaggcagagggaaccccaaaccagggtaagaaagctgaaggtacacctaaccaagggaaaaaggccgaaggggctcagaaccagggcaaaaaagtggatactacccccaaccaaggcaaaaaagtggagggtgcccctacccagggccgaaaggctgagggcgcacagaatcaggctaaaaaggttgagggcgctcaaaaccaggggaagaaagccgagggcgctcagaatcagggcaaaaagggagaaggtgcccaaaaccaaggcaagaaggccgaaggggcacagaaccagggaaaaaaagccgagggcgctcaaaaccagggtaagaaggcagagggggcacaaaaccaaggcaaaaaggctgaaggggctcagaaccaaggaaaaaaagctgagggagcccaaaatcagggaaagaaatcagagggcgctcagaaccagggtaagaaagtggagggtgcccaaaaccagggaaagaaggccgagggtgctcaaaaccaaggaaaaaaagcagagggcgctcaaaaccaggggaaaaaggccgagggcgcacagaaccaggggaagaaagctgagggcgctcagaatcagggcaaaaaggcagagggtgctcagaatcaggggaagaaggccgagggggcacagaaccaaggcaaaaaagctgaaggcgcacagaaccagggcaagaaggttgagggggcacaaaaccagggcaagaaagccgaaggcgcacagaaccagggaaagaaagccgaaggagcccagaatcaggggaaaaaggccgaaggtgcacagaatcaggggcagaaaggagaaggggcacagaaccagggcaagaaaaccgaaggggctcagggaaagaaggcagaacgtagccctaatcagggtaaaaaaggcgaaggggcaccaattcagggaaagaaagcggactctgtcgcaaaccagggaaccaaggtggagggaataaccaaccaggggaagaaggcagaagggagtccctccgagggaaaaaaggctgaagggtcccctaaccagggaaaaaaagcggatgctgccgctaaccaaggaaaaaaaacagaatcagctagcgtccagggaagaaacacagatgtcgcccaaagtcccgaagcgcctaaacaggaggcaccggcaaaaaagaagagtgggtcgaaaaagaagggtgagccgggacctccggatgccgatggccctctgtatctgccttataagactctggtgagtaccgtgggatcaatggttttcaacgaaggggaggcccagcgcctgatcgaaatactgagtgaaaaagctgggatcatccaagatacgtggcacaaggctactcagaagggcgatcccgtagcaatcctgaaaagacagctcgaagagaaggagaagctgctggccactgaacaggaggacgctgctgtcgccaaaagtaaactacgtgagcttaataaggagatggcagccgaaaaagccaaagccgcagcgggagaagctaaggttaagaagcagcttgtggctcgggaacaggagataaccgcggtccaagcgaggatgcaggcgtcttaccgagagcacgtaaaggaggttcaacagctgcagggtaagatcaggactctccaagaacagctggagaacggtccaaatacccaactagcaagattgcagcaggagaattccatcctcagggacgcactaaaccaggctacaagccaggtggagagcaagcagaatgccgagctggcgaagctgcggcaagaattgtctaaagtctcaaaagagcttgtggaaaaatcagaagctgttcggcaggatgagcagcagcgaaaggcactcgaggcaaaagctgctgcttttgaaaaacaggttctacaactgcaagcctcacacagggagagcgaagaagcgttgcagaagaggcttgatgaagtctcaagagagctttgtcatacgcagtccagtcacgcctccctcagggccgacgcggagaaggctcaggagcaacagcaacagatggcggagctacactctaagctgcagtcctcggaagctgaggtgaggtctaagtgcgaagagctgagtgggctccacgggcagctccaggaggcaagggctgagaatagccagctcactgagcgcattaggagcatagaggctctgctcgaggccggacaagcacgggatgctcaggacgttcaggcttcacaggccgaggccgaccagcagcagactagattaaaggagctcgaatcccaagtgagcggattggaaaaagaagccattgaactcagggaagctgtggaacagcagaaagtaaaaaacaatgacctgagagagaagaattggaaagcaatggaagccctggccaccgctgagcaggcatgtaaagagaagctcctatccctcacgcaggcaaaagaggagtctgaaaagcaactctgtctgatcgaggcacagactatggaagcactcctcgccctgctgcctgagttgtcagtgttggcgcaacaaaattatacagaatggctccaagacctaaaggaaaaaggcccaacactgcttaagcacccacccgcacccgcagagccttctagcgacctagcatcgaagctccgagaggccgaagagactcaatctacattgcaagccgagtgtgaccaataccggtcaattcttgccgagaccgaaggaatgctgagagatttgcagaagtcagtggaggaagaagagcaagtatggcgcgctaaagtcggagccgctgaagaggagctgcagaaatctcgggtaactgtaaagcatctggaagaaatcgtcgagaagctcaaaggcgagcttgaatcttccgaccaggtgcgcgaacacacctctcatctggaagctgagctagagaaacatatggcggctgcttccgcagagtgccagaattatgccaaggaagttgccggacttagacagttactcttggagtctcaaagccagctggacgcagctaagagcgaggcccagaagcagtctgatgagcttgcactggtgcgacagcagctttctgagatgaagtcccatgtggaggacggcgatatagcaggcgctcctgcatctagtccagaagctcctccagctgagcaagatccggtgcagctgaagacccagctagagtggacagaggctatccttgaagatgaacagacacagaggcagaagctcactgcggaattcgaggaagctcagacatcagcgtgtaggctacaagaggagctcgagaagttacggacagctggcccactggaatcctcagagactgaggaagccagccagctcaaagagaggttggagaaggagaagaagctgacatcagacctagggagagccgctacacgactgcaggagctactaaaaacaactcaagagcagctagccagggaaaaagacacggtaaaaaagctccaagagcagctggaaaaggctgaagatggttctagcagcaaggaggggacatccgtttag

SEQ ID NO: 239176 - DNA, 903 bp, synthetic construct
  misc_feature 1..903: note = Description of Artificial Sequence: Synthetic coding sequence
  source 1..903: mol_type = other DNA
atggacatttatgatacacaaactttgggcgtggttgtattcggaggctttatggttgtatccgctattggtatctttcttgtttctacgttcagcatgaaggagacgtcctacgaggaggctcttgctaaccaacgcaaagagatggcaaaaacacaccaccagaaggttgagaagaagaaaaaggagaaaacggtggagaaaaaaggcaaaaccaaaaagaaggaggaaaaacccaatggaaaaatcccagatcatgacccggcacctaacgtgaccgtgcttctacgggaacctgtgagagccccagctgtggcagtggccccaacccctgtgcagcctccaatcattgttgccccagtcgctacagtccccgcaatgccacaggaaaagctggcgagcagtccaaaggacaaaaaaaagaaagaaaagaaagtggccaaggtggaaccagccgtctcgtcagtggtgaactctattcaagtgctgacctcaaaagctgccatcctggaaaccgccccaaaggaagttcctatggttgtggttcccccagtaggcgctaaaggtaacaccccggctactggaaccacacaaggtaagaaggccgagggaacccagaatcaatctaaaaaagcggagggcgcacccaatcaaggtaggaaagcagagggcactcccaatcaaggcaagaagacagagggaacccccaatcagggcaaaaaggccgagggcaccccgaatcaggggaagaaggctgaaggcacgccgaaccagggtaaaaaggctgaaggggctcagaaccaaggcaaaaaggtagatactacccccaatcagggcaagaaggtggagggtgcgcctacacagggtaggaaggcggagggggctcagaatcaggccaaatag

SEQ ID NO: 239177 - DNA, 2256 bp, synthetic construct
  misc_feature 1..2256: note = Description of Artificial Sequence: Synthetic coding sequence
  source 1..2256: mol_type = other DNA
atggtgtttaacgaaggcgaggcccagcggcttattgaaattttgtccgagaaggctgggatcatccaggatacatggcacaaggccactcaaaagggtgacccggtggctatcttgaaacggcagctcgaagagaaggaaaaactgctcgccaccgaacaggaggacgcggcagtggcaaagtccaagctgagagagcttaataaggagatggcggctgaaaaagctaaggcagctgccggagaagccaaggtgaagaagcagctcgtggctcgtgaacaagaaatcacagcagtgcaggctcgtatgcaggcgagttaccgggagcacgtcaaggaggtacaacaactgcagggcaagatcaggacactccaggagcagttggagaacggaccaaacactcagcttgccaggctgcagcaggaaaactctatattgagagacgctctcaatcaggcaaccagccaggtggaaagtaaacagaacgcagaactggccaagctaagacaggaactgtccaaagtgagcaaagaactggtcgaaaagtctgaagccgtgagacaagatgaacagcagagaaaagcgctggaggctaaagccgcagcattcgaaaagcaagtactgcaactgcaggcctcccatcgtgaatcagaggaggccctccaaaagcgcctcgacgaagtgtccagggaattgtgtcacacccagtctagccatgcctctctgagagccgacgctgagaaggcccaggaacaacagcaacagatggccgaactccattcgaagctccagtcctctgaggctgaggtgagaagtaagtgcgaagagctttctgggctacatggacagctccaggaggcaagagctgagaactcccagctcactgaacgcatccgtagcatcgaggccctgttagaggctgggcaggcaagggacgcacaggatgttcaggccagccaagcggaagccgatcaacagcagacccgtctgaaggagctcgagtcgcaggtctcgggtctggagaaggaagcaatcgagttaagggaggccgtcgagcagcagaaagtgaaaaataacgatctgcgagagaagaattggaaagccatggaggcgctggccacggcagaacaggcttgtaaggagaagttattgtcactgactcaagccaaggaggagtctgagaagcagttgtgtctcatcgaggcccaaaccatggaggcattacttgcactactgccggaactcagcgtactggcccagcaaaattacactgagtggctgcaagaccttaaagaaaaaggccctactctgctgaagcacccccctgctccagccgagccttcttctgaccttgcttcaaaattaagggaggcggaagagacccagtcaactctccaagccgagtgcgatcagtaccgctccattctggccgagactgaaggaatgcttagagatctgcagaaaagcgtcgaggaggaagagcaggtctggcgtgcaaaggtcggcgcagccgaagaggaactgcagaagtcacgggtaactgttaagcacctggaagaaattgtagaaaagctgaagggcgaactggagtcttctgatcaggtgcgggaacatacttctcacctcgaagccgaactggagaaacatatggctgctgcaagcgcagagtgtcaaaattatgccaaagaagtagcgggtctccgtcagctcctcttggagagtcagagccagttagacgcagctaagtccgaggctcaaaagcagagcgacgagctggcgctcgtcaggcaacagctgagtgaaatgaagtctcacgtagaggacggtgatatcgccggagccccagcttcgagccccgaagccccacctgccgagcaggacccagtacagcttaaaacacagttggagtggaccgaagccatattggaggatgaacaaactcagcgccagaagttgaccgcggaattcgaagaggcccagacatcggcctgtcggcttcaggaagagctggagaaactaagaactgccggtcccctggaatcttccgagaccgaggaggcgtctcaattgaaagagcggctggagaaggagaaaaaactgacttctgatctcgggcgtgctgctaccagactccaagagctactcaaaaccactcaagagcagctcgccagagagaaggatactgttaagaagctgcaggagcagcttgaaaaagctgaggatgggtcgtccagcaaggaaggtacttccgtctag

SEQ ID NO: 239178 - DNA, 663 bp, synthetic construct
  misc_feature 1..663: note = Description of Artificial Sequence: Synthetic coding sequence
  source 1..663: mol_type = other DNA
atggcatcaggatgtaaaatcggcccttcaatcctcaattctgatttggccaacctgggtgcggagtgtctgaggatgctagattcaggcgcagattacctacatctcgatgtgatggatggctatatgcatatgatggtgagcaagccagaacagtgggtgaagcctatggcagtcgctggcgcaaaccagtatacattccacctggaggcgaccgagaaccctggagcgctaattaaggatatacgggaaaatggcatgaaaagctgttccgtgacacaggctgaagtacagtggcacagtcaaggtccgcttcaggtgggattggccataaaaccgggaacctctgtggagtatttggccccttgggccaaccaaatcgacatggccctcgtgatgactgttgagccgggatttggaggtcagaagttcatggaggatatgatgccaaaggtgcattggctgcgcacgcaattcccctctctggatattgaggtggacgggggtgtggggcctgacaccgtacataagtgcgccgaggcgggagcaaacatgatagtgtccggttctgcaataatgaggtctgaagatcccaggtcagtgattaacttgttgcgaaacgtgtgcagtgaggccgctcaaaagcgttcactggataggtag

SEQ ID NO: 239179 - DNA, 687 bp, synthetic construct
  misc_feature 1..687: note = Description of Artificial Sequence: Synthetic coding sequence
  source 1..687: mol_type = other DNA
atggccagtggctgcaaaattggcccttcaatcctaaactctgatttggcaaatttgggagccgagtgcctcagaatgctggacagcggagcagattacctccacctggacgtgatggacggccactttgttccgaacataacattcggtcaccctgttgtggaatcactcagaaagcagctgggccaggacccgttttttgacatgcacatgatggtgtccaagcccgagcaatgggttaaacccatggcagtcgctggcgcaaatcaatacactttccacctcgaggcaacggagaacccaggcgctctgatcaaagatatccgtgagaacggcatgaaagtgggcctggcaataaagcccggaacgtctgtggaatatctggctccatgggcgaatcaaattgacatggctctagtgatgaccgtcgaacccggattcgggggacaaaaattcatggaggatatgatgccaaaggtccattggctccgcactcagtttccttcgctggatatcgaagtggacggcggtgttggccctgacacggtgcataagtgcgccgaagcaggagccaacatgatcgtgagcggatcagctatcatgcgtagcgaggatcctcgctctgtaattaatctccttaggaatgtgtgctccgaggctgcccagaagagaagcctggacagatag

SEQ ID NO: 239180 - DNA, 537 bp, synthetic construct
  misc_feature 1..537: note = Description of Artificial Sequence: Synthetic coding sequence
  source 1..537: mol_type = other DNA
atgcatatgatggtgagtaaacccgagcagtgggttaaaccaatggccgttgccggtgctaaccaatataccttccacctggaagccacagaaaatcccggagctctgataaaagacatacgggagaacgggatgaaatcttgttccgtcactcaagcagaggtccagtggcactcccagggccctctccaggttgggctggctatcaagcctggcacaagcgtggaatatctggccccttgggccaaccagatcgatatggctctggtcatgacggtggagcccggtttcggtggccagaagtttatggaggatatgatgcctaaagtgcactggcttaggacacaatttccatccctggacatagaagtcgatggaggtgtcggccctgacactgttcacaagtgcgctgaggccggagccaacatgatcgtcagcggtagtgcaatcatgagaagtgaggatccacggtcggtgatcaacctgttgcgaaatgtgtgctctgaggctgctcagaaaaggagtctggaccgttag

SEQ ID NO: 239181 - DNA, 537 bp, synthetic construct
  misc_feature 1..537: note = Description of Artificial Sequence: Synthetic coding sequence
  source 1..537: mol_type = other DNA
atgcatatgatggtgagcaagcctgagcaatgggttaagcctatggctgtcgcgggtgcaaatcagtatacatttcacctggaggcaactgaaaatcccggagctctgataaaggacattcgagaaaacggaatgaagagctgctcagtgacgcaggccgaggtccaatggcattcccaggggcctcttcaggtgggcctggcaattaagcccggtacttcggtcgagtatctcgcaccctgggccaatcagattgacatggccctggtaatgacagtggagcctgggtttggtggccagaaattcatggaggacatgatgccaaaagtgcattggctgcgaacccagttcccatcactggacatcgaggtcgacggaggagtgggccctgatacggtacacaaatgcgccgaggctggagctaacatgatcgtgtctggctctgctataatgcgttccgaggacccaaggtcagtcattaacctactccgcaatgtgtgtagcgaggccgctcaaaagaggagcctggaccgatag

SEQ ID NO: 239182 - DNA, 285 bp, synthetic construct
  misc_feature 1..285: note = Description of Artificial Sequence: Synthetic coding sequence
  source 1..285: mol_type = other DNA
atgcatatgatggtctccaaacctgagcagtgggtgaagcctatggcggttgccggagccaatcagtataccttccacctggaggcgactgagaatcccggtgcactgatcaaagatatcagagaaaatggaatgaagagctgcagtgtcacacaggctgaagtgcaatggcacagccagggccctttgcaagtgggattggctattaaaccaggcacttcggtggaatacctggccccttgggccaatcaaatcgatatggcactcgttatgactgtcgagtag

SEQ ID NO: 239183 - DNA, 537 bp, synthetic construct
  misc_feature 1..537: note = Description of Artificial Sequence: Synthetic coding sequence
  source 1..537: mol_type = other DNA
atgcatatgatggtgtccaaacccgaacaatgggtcaagcctatggccgttgccggagcgaaccagtatacgttccacctggaggcaacagaaaacccaggtgcactcatcaaagacatccgtgaaaatggcatgaagtcttgtagtgtaactcaggcagaggtacagtggcactctcagggtcctctgcaggtcggattggccattaagcctggcacctctgtcgaatatctggccccatgggccaaccagattgatatggctcttgtgatgacagtagagccgggattcggaggacagaagttcatggaggatatgatgccaaaggttcactggctgcgcacccagttcccttctctagacatcgaggttgacggaggcgttggccctgatactgtgcacaagtgcgccgaggcaggcgctaacatgatagtgagcggatcagcaataatgcgctctgaggacccacgaagtgtgattaatttgcttagaaatgtgtgttccgaagccgctcagaagagaagcctggatcgttag

SEQ ID NO: 239184 - DNA, 600 bp, synthetic construct
  misc_feature 1..600: note = Description of Artificial Sequence: Synthetic coding sequence
  source 1..600: mol_type = other DNA
atggcttccggatgtaaaatcggaccttctatcctgaacagtgacctggccaacttaggagccgaatgtctgagaatgctggactcgggagccgattacctgcatctagacgtgatggatggtcactttgttcctaatatcactttcggtcaccccgtcgtggaatccctacggaagcagctgggacaggacccttttttcgacatgcacatgatggtcagtaaacccgagcagtgggtgaaaccaatggccgtggccggagcgaatcagtacacattccatctcgaggctactgagaaccctggggcacttatcaaggacattcgggaaaatggtatgaaggtcgggttagctatcaaacctggaacgtcggtcgaatatctggctccttgggcgaatcaaatcgatatggcactggtcatgaccgtcgaacccggtttcggcggacagaagttcatggaggacatgatgcctaaggcaggggctaatatgatcgtttctggatctgccatcatgcggtcggaggacccccgttccgtgattaatctgctgcggaatgtatgtagcgaagccgcacagaaaaggtccctggacagatag

SEQ ID NO: 239185 - DNA, 3159 bp, synthetic construct
  misc_feature 1..3159: note = Description of Artificial Sequence: Synthetic coding sequence
  source 1..3159: mol_type = other DNA
atgcgtgaagcagccgaacgtagacagcagctccaactggagcacgaccaggctcttgccgtcctgtcagcaaagcaacaagagatcgacctcttgcagaaatccaaagtaagggagctggaggagaagtgtaggactcagtcagaacagtttaacctgctaagtcgagacctcgaaaaattccgacagcacgctggaaaaatagatcttcttggcggtagcgcagtagcaccacttgacatcagtactgctccatccaagcccttcccgcaattcatgaatggcctcgctaccagcctaggaaaaggtcaagaatcagcaatcggcggatcatctgctatcggagaatacatccgcccactcccgcagcccggtgacaggcctgagcctctcagtgcaaagcctacattccttagccgctccggcagcgctagatgtcgatcagaatctgacatggagaatgagcgaaacagcaacacatccaagcaacgatactccggaaaagtgcatctctgcgtggcccgatatagctacaaccccttcgacggcccaaacgagaatcccgaagccgaattgccgctcacggctgggaaatatttgtacgtatacggtgacatggatgaggacgggttttacgagggcgagctgctggatggccagcgtggccttgtaccatccaacttcgtggactttgtgcaggataacgaaagccggctcgcttcaacgctcgggaacgagcaggatcagaacttcataaatcactccgggattggtctggaaggtgagcatatcctcgatctgcacagccctacccatatagatgcgggaatcaccgataattccgctgggacactggacgtcaacattgatgatatcggagaggacatcgtaccttaccccaggaagatcaccctcataaaacaacttgctaagagcgtgatcgtgggatgggaacctccagcagtgccgcctggatggggcacagtatcctcgtacaatgtgctggtggataaggagacgcgcatgaacctgactctgggctcacggacaaaggctctaatcgaaaagctgaatatggcggcttgcacctacagaatttcagtccagtgcgtaacaagcagaggtagctctgatgagcttcagtgcacgctgctcgtgggtaaggatgtggtcgtggccccaagccacctcagggtggacaatatcactcagatctccgctcaattgagttggttgccgacaaacagtaactactcccatgtaatcttccttaatgaagaggaattcgacatcgtgaaggcagcgcgatataaatatcagttctttaacctgcggccaaatatggcctataaggtgaaggtgctcgcgaaaccgcatcagatgccatggcagctgcctttggagcagcgagaaaagaaggaggcctttgtggagttcagcaccctgcccgcaggccctcctgcccctccccaggacgtgacagtgcaggcgggagtaacccccgctactattcgcgtaagctggagaccccctgttctaacacctaccggcctctcaaatggggctaacgttacgggctacggcgtttacgctaaggggcagcgcgtagcggaggtcatatttccgacggcagatagcactgctgtcgagcttgttaggctgcgctccctagaggctaagggcgtgacagtcaggaccctgagtgcacagggggaaagtgtggacagcgccgtcgcagcggtaccgccagagctcttggtccctcccactcctcatcctagacctgccccacagtccaagcctctggctagcagcggtgtgcctgagaccaaggatgaacacctcggcccacacgctcgtatggatgaggcatgggagcagtcccgggcacctgggcctgtccatggtcatatgctggagccccctgttggtcccggaaggcgctccccatcaccttcgcgcatccttccacagccccaaggcacccccgtctccactaccgttgcgaaagctatggccagagaggctgcacagcgtgtagccgaaagttcgaggttggaaaagagatctgttttcctggagcggtccagcgcaggccagtacgccgcttccgacgaagaggacgcctacgatagtccagacttcaagcggaggggtgcctcagtggacgacttcctgaaggggtccgaattgggaaaacagccccactgttgccatggagacgaataccacactgagtcaagcagaggatcagaccttagtgacattatggaagaggacgaggaggaattatatagcgaaatgcaactggaggacggcggacgacgtagaccatctggcacgtcccataacgcattgaagatattagggaaccctgcgtccgcagggagggtggatcacatgggccgacgctttccacgcggttccgcgggaccgcagcggagcaggccagtgacggtcccttcgattgatgactacggaagggaccgcctatctcctgacttctacgaggaaagcgaaacagatcctggcgcagaggagctccccgctaggatttttgtggcactgttcgactacgatccgctcactatgtctcccaatcctgatgccgcagaggaggagctcccatttaaagagggtcagattattaaggtttacggcgacaaagacgctgacggcttctatcgtggagagacctgcgccaggttgggactgatcccatgcaacatggtctctgagatccaggctgacgatgaggaaatgatggatcagctgttgcgccagggtttcctgccattgaatacccctgtggagaagatcgagaggtctaggcgatctggccgtagacatagcgtgtccaccagaagaatggtagcattgtatgattatgatccaagagaaagcagccctaacgtcgacgtcgaggctgaactgacgttttgcacaggcgatatcatcacagtgtttggggagatcgacgaagacggattctactacggtgaactgaacggccagaaaggacttgttccttcaaacttcctggaggaagttcccgatgacgttgaagtctacttatctgatgcgcctagtcattactcgcaggatacccctatgaggtcaaaggctaagaggaagaaaagcgttcatttcactccatag

SEQ ID NO: 239186 - DNA, 1938 bp, synthetic construct
  misc_feature 1..1938: note = Description of Artificial Sequence: Synthetic coding sequence
  source 1..1938: mol_type = other DNA
atgaatgggttggcgacctcactgggaaaaggccaggagtcagcgatagggggatcaagcgccattggggaatacatcagaccactgccacaacccggtgatcggccagaaccgctttcagcgaagcctaccttcctgagccgaagcggatctgcccgatgtcggagcgagagcgacatggagaacgagcggaactctaatacgagcaagcagagatatagcggaaaggtgcacctctgcgtagcccgttattcctacaacccatttgacgggcctaatgagaatcccgaagcagagctgcccctgaccgctgggaaatatctttatgtgtatggtgatatggacgaagacgggttttatgagggggagctgctcgatggacagcgcggactggtgccttctaacttcgtggatttcgtgcaggataacgagtcacgcttagcctccacattaggaaatgagcaggatcagaactttataaaccattccggcatcggtctggagggcgagcacatcctggatttgcacagcccgacacacatcgatgccggaattactgacaactcggccggtacattggatgtgaatatagacgatataggggaagacatagtgccataccctagaaagatcaccctgattaagcaattagccaagtcagtgatcgtcgggtgggagcctcccgctgtcccaccagggtggggaaccgtgtctagctataatgtgctagtggataaggagacccgtatgaacctgaccctcgggtcccgtacgaaggcactcatcgagaaacttaatatggccgcttgtacataccgaatttccgtgcagtgcgtcacttcccggggatcctccgacgagctacagtgtacactgctagtcggtaaggacgtggtggtcgcccctagtcatctacgtgtggataacattacccaaatctccgcacaattatcctggctgcctaccaattctaactactcgcacgtaattttcttaaacgaagaggagttcgatatcgtgaaggcggctcgctacaaatatcagttctttaatctgaggcccaacatggcttataaggtgaaggtgctggctaagccgcatcagatgccgtggcagctgcccctggagcagcgagagaagaaagaagcctttgtggagttttctacactgcctgctggtcctcctgcgccacctcaggacgtcactgtacaggctggtgttacacccgctacgatccgggtctcctggcgtcctcccgtgttgaccccaactggccttagtaacggcgctaacgtcacaggctacggggtgtacgccaaaggtcagcgtgtcgcagaggtgatcttccctactgcagattctaccgccgtagagttagttagactgagaagtcttgaggccaagggcgtgacagtgcggacactgtctgcgcagggcgagtctgtggatagtgccgtggcggctgtcccccctgagctcctggtgccacctacaccccatccacgacctgctccgcaaagcaaaccattagcaagctctggtgttcccgaaaccaaagacgagcaccttggaccacacgcgaggatggacgaggcctgggaacagtctcgggcaccaggtcctgttcatggccatatgctggagccacccgtcggcccagggagacgatctccctcacccagtaggatcctgccccaaccccagggcacgcccgtgtctactactgtggccaaagcaatggccagagaagctgcccagcgggttgccgaaagtagccgactggaaaaacgaagtgtttttctcgagcgctcaagtgccggacagtacgccgcatccgacgaagaagacgcctacgactctcccgacttcaaacgcaggggggcaagtgtcgatgattttttgaaaggatccgagctgggaaaacaaatggcttcttag

SEQ ID NO: 239187 - DNA, 1938 bp, synthetic construct
  misc_feature 1..1938: note = Description of Artificial Sequence: Synthetic coding sequence
  source 1..1938: mol_type = other DNA
atgaatgggcttgccaccagtctgggcaaggggcaggagtctgcgattggcggatcgtctgctatcggcgagtatatccgcccactcccccagcccggagataggcctgaacctctctccgccaaaccgacctttctctcaaggtccggatctgcacggtgtcgctcggagagcgatatggaaaacgagcgaaacagcaatacaagtaagcagagatacagcggtaaggtacacctctgcgtggccagatattcttacaatccctttgacggtcccaatgaaaaccccgaagcagaactaccgctcaccgctgggaagtatctttatgtatatggagacatggatgaggatggattctacgaaggtgagctgctcgatggacagcgcggacttgtgcccagcaactttgtagattttgtccaggacaatgagtcccgattagcgtctactctgggcaacgagcaggatcagaatttcattaaccatagtggaataggattggagggcgagcatatcttggatctgcactctcctactcacatcgacgcgggaattacggacaattcagcaggaaccctggacgttaatatcgatgatattggtgaggacatcgtcccatatccaaggaagatcacacttatcaaacaactcgcaaaatctgtgatcgtgggctgggagccccctgcggtgccccctggctggggtaccgtgagttcgtacaatgtgctggtggataaggaaactagaatgaacctcacactgggtagccgaaccaaagcactgatcgagaaactgaatatggctgcctgcacctaccggataagcgtgcaatgcgtgacatctcggggatcctctgacgaactgcagtgcacactgctcgttggcaaggacgtggttgttgctcccagccatctcagagtcgataatatcacccagataagcgctcaactctcctggctccctacaaattcaaactactcacatgtgatcttcctcaacgaggaagagtttgatatcgttaaggccgcacggtataaataccaatttttcaatctgagacccaacatggcctacaaggtgaaagtcctggccaaacctcatcagatgccttggcagctgcctctggagcagcgtgagaagaaggaagccttcgttgaatttagtacgctccccgcaggtcctccggctccaccccaggacgtgacagtacaggccggagtgacacctgcaaccatcagggtgagctggcgccctccagtgctgacaccaacggggctttcaaatggcgctaacgtgactggctacggggtgtacgccaaagggcaacgagtggcggaagtaatttttccgacagctgactcaactgcagttgaacttgttcgcctcagatccctggaggcgaagggagtgacagtgagaactctcagcgcccaaggcgagtctgtagatagcgctgtagctgccgtgccaccagaactcctggtgcctcccaccccacatccacgccctgcaccccagagtaagcccctggcctctagcggcgtccctgagacgaaggacgaacatctcggacctcatgctcggatggatgaggcttgggaacaatcacgggctcctgggcctgtgcacggccacatgctcgagcctcctgtggggccagggcgacgaagtccctccccatcgagaatactgccccaaccgcagggtaccccggtgagtacaaccgtggcgaaagcgatggcgagagaggctgcacagcgcgtagcagagtcttcccgattggagaagaggtccgtgtttctcgagaggagttccgctggacagtacgcagcctcagatgaggaggacgcatatgactcacccgacttcaaacgtcgaggcgcatccgtcgatgatttccttaagggttcagagttgggaaagcagatggtttcctag

SEQ ID NO: 239188 - DNA, 4638 bp, synthetic construct
  misc_feature 1..4638: note = Description of Artificial Sequence: Synthetic coding sequence
  source 1..4638: mol_type = other DNA
atgcagcgagagcgggaggcagaaatcagacaacttcttagatggaaagaggccgagcagcggcagctgcagcagttactgcaccgggagagggatggagtcgttagacaggccagagagctccagcgtcagctggccgaggagctcgtcaacagaggccattgctcaagacccggagcttccgaagtgagtgcagcccaatgccgctgcagactgcaggaggtgctggcccagcttcgctggcagaccgacggggagcaggcagcccgaattaggtatctgcaggctgcattggaggttgaacgacagctgttcttaaagtacatccttgcccactttcggggtcatcctgctctctcaggcagccctgatccgcaagctgttcacagcctggaggagccgctcccgcagacgtccagtggttcctgccatgcgccaaagcccgcatgccagcttggctccttagactcattgtccgctgaggtgggagtgagaagcaggagcctagggctcgtgtcttccgcatgttcgagctctcccgatggcctcctgagtacacacgccagctctttagactgctttgcaccagcatgcagtcggtcattagactcgacccgatctctccccaaggcctcaaaatccgaggagaggcctagcagtccagatacctcaacccccggttctagaaggctgagccccccaccttctccactgccacccccacctcctccctcagcacatcggaagctatctaatcctcgcggaggagagggctctgagtcccagccatgtgaagtccttactccttcaccaccagggctgggccatcatgagctcatcaagctgaactggctgctggccaaagcgctctgggtcctggcacgcaggtgttacactctgcaggccgaaaacaaacagcttagacgggcaggctgtccctaccaggcagatgaaaaggtgaaacgcctgaaagtgaagagagccgagctcaccggcctcgccagacgtctggctgaccgcgcaagaaagctgcaggaaacaaacttgagagccgttagcgcaccaatcccaggcgagtcctgtgcaggactagagttgtgccaggtatttgctcgtcagcgggcacgcgatttatctgaacaggcctcagccccactagcaaaagacaaacagatcgaagagctcagacaggagtgtcacctgcttcaggcacgggttgccagcggcccatgctcggacctccatactgggagaggtggcccatgcacacagtggctgaatgttcgggacttagacaggcttcagagggagtcgcaacgcgaggtgctgcggctgcagcggcagctcatgctgcagcaggggaatggaggggcttggcctgaggccggaggccagtcagccacttgcgaagaggttagaagacagatgttagcactggaaagagaactcgatcagcgtaggcgggagtgtcaggaattaggcgcacaggccgctcccgctaggcgtcgaggagaggaggctgagacgcagctgcaagccgctctcctgaagaatgcctggctcgccgaagagaatggcagacttcaggctaagacagactgggttaggaaagtcgaggcagaaaactccgaggtgcgcggtcacctggggcgtgcctgtcaggagcgcgacgcttcaggcctcatcgctgagcagctgctccagcaggcagctagaggccaggatcggcagcagcagctgcagcgggacccacagaaagccctgtgtgacctgcatccttcttggaaagaaatacaggcgcttcagtgcagacctggacacccgccagagcagccctgggagaccagccagatgcctgagtctcaagtgaaagggagcaggcgtccaaaatttcacgcacgccctgaggactatgcggtcagtcagccaaaccgtgatattcaagaaaaacgggaagcctcacttgaggagtctccagtagctttgggcgaaagtgccagtgtgcctcaggtgtctgagaccgtgccagcctcccagccattgagtaagaagaccagcagccagtcaaattctagttcagagggcagcatgtgggccaccgtgccgtcctcccctacattggacagggacaccgccagcgaggtggatgacttggagcctgactccgtgtcccttgccttagagatgggcggttccgcggctcccgcagccccaaagctgaagatcttcatggcacagtacaactataatcctttcgaaggcccaaatgaccacccagaaggggagcttccactgaccgccggagactacatctatattttcggcgacatggacgaggatggcttctacgagggcgaacttgaagacggacggagaggactcgtgccaagtaatttcgtggagcagattcctgattcttatattcctggatgcctgcccgcaaagtcccccgacctcggccctagtcagcttcctgccggtcaagatgaggccctcgaagaggatagcctgctcagcggcaaggctcagggcgtggttgacagggggctgtgccagatggtcagggtgggttctaaaactgaagtggcaactgagattctggacacgaaaaccgaagcatgccagttaggcctacttcagagcatgggcaagcagggcctgtctcgcccactgctaggcacaaaaggagttcttagaatggcccctatgcagctgcatttgcagaacgtcacggctacatctgctaacatcacatgggtctacagttctcatcggcacccacatgtagtgtatctggacgaccgggagcatgctctgaccccagctggagtgtcttgctacacgtttcagggcctctgtcccggaacccactatcgcgcacgggtggaagtcagactacccagggacctgctgcaggtgtactggggcactatgtcaagcacagtcacatttgataccctccttgcgggacctccctacccccctctggatgtgctggtcgaaagacatgcctcacccggagttctagtggtgagctggctgcctgtgacaatcgacagcgcgggaagttcaaacggcgtgcaggtcaccggatatgccgtgtatgctgacgggctgaaggtgtgtgaggtcgctgatgctacagcaggctcaactctcttggagtttagccaacttcaggttccgctaacttggcaaaaagtttcggtcaggactatgtccctgtgtggtgagtccctggattccgttccggctcagattcccgaagactttttcatgtgccatcggtggcccgaaacgccaccctttagttatacctgcggggaccccagcacttatcgggttaccttccctgtgtgtccgcagaagttgtctctcgctccgccttcagccaaggcctctccacacaaccccggatcgtgtggggaaccacaggcaaagtttctggaggctttttttgaagagccaccaaggagacagtcaccggtctcaaatctggggagcgagggggagtgcccttcaagcggtgctgggagccaggcacaagagttggctgaagcttgggagggctgtcggaaggatctgttatttcagaagtcccctcaaaatcatcgacctccctccgtatcagatcagcccggtgaaaaggagaactgctcgcagcacatggggacgtcgaagtcacccgcacccggttttattcacttacgaacggagtgcggtccgaggaaagaaccttgccaggaaaaggcagcgctcgaacgagttctccgtcagaaacaggatgcccaaggttttaccccccctcagctcggggctagccagcagtatgccagcgacttccataatgttttgaaggaggaacaggaggcgttgtgtctggacctgtggggtaccgaaagaagagaagagagaagggagccagagccccactcccgccaaggccaggccttaggtgtcaaaagggggtgtcagctgcacgagccttccagtgccttgtgccctgctccatctgctaaggtgattaaaatgcctcgagggggaccccagcagttgggcacgggagccaacacacccgctcgagtgtttgttgccctgtccgactataacccactcgtgatgagtgccaacctgaaggccgctgaagaagaactggtgtttcagaaaagacagctgctaagggtgtggggttcccaggacacccacgacttttacctatccgagtgtaataggcaagtaggtaatattccgggtcgcttggtggccgagatggaagtcggtacagagcagacggataggaggtggaggagcccggctcagggtaatctccctagcgtagcgcacctggaggactttcaggggctgaccattccacaggggtcttccttggtgttacaaggaaattccaaaaggttacccttatggacccctaagataatgatcgcagctctggactacgatccaggagatgggcaaatgggcggtcagggcaaaggacggttagccctgagggccggtgatgtggttatggtgtacggcccaatggacgatcagggcttttactatggcgagctggggggacatcgcggactggttccagcacacctgctcgatcatatgagtctccacggacattag

SEQ ID NO: 239189 - DNA, 4920 bp, synthetic construct
  misc_feature 1..4920: note = Description of Artificial Sequence: Synthetic coding sequence
  source 1..4920: mol_type = other DNA
atggccaaggattcacccagtcctctaggggcttcccctaagaaaccagggtgttccagcccagccgctgcggtcttagaaaaccaaaggagagaactggaaaagctgagagccgagctcgaggcagagagggcagggtggcgggctgaaagaagacgttttgccgctcgcgagaggcaattgagggaagaagctgagagggaacgcagacagctggccgaccggcttcgatctaagtgggaggctcagagatcacgggagctgaggcagctgcaggaagaaatgcagcgggagcgggaggccgaaattcgccagctgttaaggtggaaagaggccgagcagaggcagcttcaacagttacttcatcgcgagagagacggagttgttcggcaagccagggaacttcagcggcagttggccgaggagcttgtgaaccgaggacactgttcacgaccgggtgcatctgaagtgagtgcagcgcagtgtcggtgccgtctgcaagaggtgttggcccagctgcgatggcagacagatggcgaacaggctgcccgaattagataccttcaagctgctcttgaggtggaaagacagcttttcttaaagtatattttagcacattttcggggacatcccgcactgtccggctcaccagatccacaagcagtgcatagtttagaagagcctttaccgcagaccagcagcggatcttgccacgctcctaagcctgcctgccagttaggaagtcttgatagcctgtctgccgaagtaggggtaaggagccggagcctgggtcttgtgtctagtgcctgcagttcttctcctgacggcctgctatccacccacgccagtagtttagactgcttcgccccagcgtgttctaggagtctggactccactcgctccctgcccaaggcaagcaagtctgaagagcgcccttccagccccgatacaagcacacctggatctcggcgtctgagccctccaccttcccccctcccaccgccacccccaccttcagcccatcgcaagctttccaatccgaggggcggtgaggggagcgagtcccagccctgcgaagttctgacaccaagtcctcccggactgggccaccacgaactcatcaaactgaactggctcttggccaaagcgttatgggttctcgccaggcggtgctacactctgcaggcagagaataaacaactgagacgagcaggatgcccataccaggcggatgagaaagttaaacgcctcaaagtgaaaagggctgagctgaccgggctagcaagacggcttgccgatagagcccgtaagctgcaggagaccaatcttagggccgtttcggccccaatcccaggtgaatcttgtgccggtctcgaattatgtcaggtgtttgccaggcagcgagctcgcgacctctccgagcaagcctcagctccactcgccaaggataaacagatcgaggagctgcggcaggaatgtcacctgctgcaagcaagggtggcttcaggtccgtgctcggacctccatacagggaggggaggcccatgcacccagtggctgaatgtcagagaccttgaccgcttacagagggaatctcaacgcgaggtccttagattgcagaggcagctgatgctccaacaaggcaatggtggtgcatggcctgaggccggaggacaatccgccacttgtgaggaagtcaggcgccaaatgctggctttagagagggagctggatcagagaaggcgcgagtgccaggaactgggggctcaagctgcccctgcacgacgaagaggtgaggaggccgagacccagctgcaggctgctttattaaaaaacgcttggctggctgaggaaaatggcaggctgcaggccaagacagactgggtccgcaaggtggaggctgagaactctgaagtgcgagggcacctgggacgcgcttgtcaggagcgcgatgctagcggattgatcgccgagcagctgctgcaacaggcagcacgtggccaggatagacagcagcagctgcagagagatccacagaaggccctgtgcgatttgcaccctagttggaaggagatccaggctctgcaatgccgcccaggccacccgccagagcagccttgggagacctctcagatgcccgagtcacaggtaaagggcagcagaagacccaagttccatgctcggcctgaggattacgcagtgagtcagcccaacagggacatccaagaaaaacgagaggcctccctggaggagagccccgttgctctgggagagtcagccagcgtcccccaagtgtcggagaccgtgcctgcctctcagccgctatctaagaaaaccagctctcaaagcaactcctcaagcgagggaagtatgtgggcaacagtgcctagttctcccacccttgacagagataccgcatctgaggttgacgatcttgaaccagatagtgtgtctctggccttagagatgggcggttcagcagcccctgccgctccaaagctcaagattttcatggcacagtacaactacaatccctttgaaggcccaaatgaccacccagagggagagctgcctcttacagcaggcgactacatctacatcttcggcgatatggacgaagacgggttttatgagggagaactcgaagatgggcgacgcggactggtgccttctaactttgtcgaacagatcccagattcttatatccctggctgtctcccggcaaagtcccctgatctgggtccttcacagcttcccgcaggccaggatgaggctctggaggaggacagtttactgtcaggtaaggcccagggcgtcgttgatcggggtctgtgtcagatggtgagggtaggcagcaaaaccgaggtggcgacggagatcctggacaccaagacggaagcttgtcaactgggactgctccaatctatgggcaaacaggggcttagtcggcctctgttgggaaccaaaggcgtacttcggatggcaccgatgcaactacatctgcagaatgtgaccgccacctctgccaacattacctgggtgtatagctctcacaggcaccctcacgtcgtttatcttgatgatcgagagcacgcattaacccctgctggcgtgtcctgctacaccttccagggcctctgcccaggcacacactatagagccagggttgaggtccgactgccccgagatttgctacaggtgtactggggaacaatgagctctaccgtgacgttcgatacgttgttggctggcccaccatatccacccctggatgttcttgtagaaaggcatgctagccccggagttctggtcgtgtcatggttgcccgtgactatcgatagcgctggctcatccaatggggtccaagttacgggatacgccgtgtacgcagacggactgaaggtgtgtgaggtcgctgatgcaaccgcgggttccacgctgctagagtttagccagctgcaggttccattaacttggcagaaggtttccgtgcgcactatgagcctctgcggcgaatcacttgattctgtgcccgctcagattcctgaggacttcttcatgtgccaccggtggcctgaaacccccccattcagttacacctgcggtgacccgagcacctatcgagtgacctttccagtgtgccctcagaaactctccctggcaccaccctctgccaaggcgagtccacacaatcctggctcgtgtggtgaaccgcaggctaagttcctggaagcttttttcgaggaaccgcctcgtcggcagagtccagtgagcaacctggggagtgagggagaatgtccgagctcgggcgcaggttcgcaggctcaagagctggctgaagcatgggaaggatgtaggaaggacctgttgtttcaaaaaagccctcaaaatcacaggccaccttccgtgagcgaccaaccaggagagaaagagaattgcagccaacatatgggcacttccaagtccccagctccagggttcatccatttgcgtaccgagtgtgggcctcgcaaggaaccatgccaagagaaagctgctctagagcgagtcctgaggcaaaagcaagacgcccagggatttacacccccacagctgggagcaagtcaacagtacgctagtgactttcacaacgtactaaaggaagagcaagaagcactgtgcctggacctatggggcacagaacgtcgggaagagcgacgggaacccgaaccccattcgagacaaggccaggctctgggcgttaagcgtgggtgccagttgcacgagccttctagtgcactgtgtcccgcaccatccgcaaaagtcataaagatgccacgtggcggaccacagcagctggggacaggcgcaaacacaccagcacgcgtgttcgtggcgttgtcagattacaatccactcgtaatgagtgctaacctcaaggccgctgaggaggagctggtgttccagaagaggcaattgttgagagtgtgggggtcccaggacacacatgatttctatctgagtgagtgtaatcgccaggtgggaaacatcccaggacggttggttgccgagatggaagtgggaactgagcagactgaccgccgatggaggtcacctgcccaggggaatctgcccagtgtagctcacttggaagactttcagggcctaaccattccacaaggctcttctctcgtgttacaggggaactccaaacgcctgccgctatggaccccaaaaatcatgatcgcagctctagattatgatccaggagacgggcaaatgggtggtcaggggaagggcaggctggcccttcgagctggcgatgtggttatggtctacggtcccatggatgatcaagggttctattatggtgagcttgggggacacagggggctggtcccggctcatttattagatcacatgagccttcacggtcactag

SEQ ID NO: 239190 - DNA, 4638 bp, synthetic construct
  misc_feature 1..4638: note = Description of Artificial Sequence: Synthetic coding sequence
  source 1..4638: mol_type = other DNA
atgcaaagggagagagaagctgagattcgccaactgctcaggtggaaggaggccgaacagcgtcagttgcagcagctgttgcaccgcgagcgcgatggtgttgtccggcaagcacgcgaactgcagagacaactagctgaagaactggtaaaccggggacattgttcaagacctggcgcatctgaggtatctgcagcccagtgtaggtgccggctacaagaggtcttggcacagctaaggtggcagactgatggcgagcaggcagccagaataaggtatctgcaggctgctctcgaagtggagcgccagctgttccttaagtacatcctcgcgcatttccgcggacatccagctttgtccggaagtcccgatccccaagcggtccactctctggaggagccactgccccagacttccagtgggtcatgtcacgcccctaaaccagcctgccagctagggtccctggatagcttatctgcggaagtcggtgtgcgctcacgttctctggggctagtgagttctgcatgttcctcgtcccccgatggactactctccacacacgccagtagtctggattgttttgccccagcgtgttcaaggtcactggactctactcgttctctccctaaagcttcaaaatccgaagaaagaccgtcgtctcctgatacatctaccccgggttcacgccgactgtctccgccaccaagtccattgcctcctccacctcctccatctgcccaccgcaagctgtccaatccacgaggtggcgagggaagcgaatcccagccatgcgaggtgttgaccccgtctccccctggactcggccaccatgagcttataaagctcaattggcttctggctaaagcgctgtgggtactagcccgtagatgttacaccctgcaggaggagaataaacagcttagacgagccggatgtccataccaggctgacgaaaaggtcaagcgcctgaaagtgaaacgcgcagaactcaccgggcttgcgagaaggctggctgacagggccagggagctacaggaaacaaacttgcgcgcagtgagcgcccctatacccggtgaaagttgtgcgggtcttgaactgtgtcaggtgttcgctcggcagcgagccagggatctttccgagcaggctagcgcaccattagccaaggataagcagatcgaggagttaagacaagagtgccaccttctccaggctcgggtagcatccgggccttgttccgacctccacaccggcaggggcggtccatgcacccagtggctgaacgttcgggatctagaccgcctacagagagagagccaacgggaggtcttacgcttgcagcggcaactcatgctccagcagggaaacggcggtgcatggcccgaagcaggcggtcagagtgccacatgcgaggaagtgagaaggcagatgctggcgctggagcgcgaactggaccagcggagacgggagtgtcaggaacttgggactcaggctgcccctgccaggcgcaggggcgaagaagctgagacgcagctgcaagcagctctgctgaaaaacgcttggctagcggaagagaatggacggttacaggctaagacagactgggttaggaaggtcgaagctgaaaatagcgaagtgcgcggacacctcgggcgagcttgtcaggaaagggacgccagtggccttattgcggagcagctcctgcagcaggccgcacggggacaggaccggcagcagcagctgcagagagacccacagaaggccctttgtgacctccacccctcatggaaagagatacaagccctgcagtgccgcccaggccaccctccggagcagccctgggagacaagtcagatgcccgagtcacaagtcaaaggatctagacggccaaaattccatgcccgaccagaggactacgctgtgagccagccgaatagggatattcaagaaaagagggaggcctcccttgaggaatcaccagtcgcactgggagaaagtgctagtgtacctcaggtgtcagaaacggtgcctgcttcccagcccctctccaagaagacttccagccagagcaatagttcctcagaggggtccatgtgggcgactgtgccgagtagtcccactttggacagggacaccgcctcagaggtcgacgatctggagccagattcggtctctctcgctctggaaatggggggatcagctgccccagcagccccaaaactcaaaatattcatggcacagtataactacaaccccttcgagggcccaaatgatcaccccgaaggcgagctacctctaaccgctggagactacatttacattttcggcgatatggatgaggacggcttttatgaaggggagctcgatgacggtcggaggggactcgtgccgtctaatttcgtcgagcagattcccgacagttacatcccaggatgtctgcctgcgaagtcaccagacctgggaccgagccagctccctgcagggcaagatgaggccctggaagaggacagccttctgtcaggcaaagcccagggcatggtggaccggggactctgccagatggtcagagtcggttctaaaacggaggtagccaccgagatcctcgataccaagaccgaggcctgccagctggggttactccagagcatgggtaagcaaggacttagcagacccctgcttgggactaaaggggtgctaaggatggcacctatgcagctgcatctgcagaacgtgaccgcaaccagcgccaatatcacttgggtttactcgtcccatagacatcctcatgtagtgtacctggacgaccgcgagcatgccctgacgccagccggtgtgtcctgttatacattccaaggtttgtgtcctggcactcattatcgcgtacgggtggaagtgcggttgccttgggacttactccaggtgtactggggaactatgagttctactgtcactttcgacactctgctggctggcccaccctatcctcctctagaggtgcttgttgagagacatgcctctccaggagtgttggtggtgtcatggctgccagtgactatcgacagcgccggttcctctaacggagtgcaggttactggctatgccgtgtacgcagacggactgaaagtatgtgaagtcgccgatgctaccgcaggctctaccgtcctcgaattctcacagttgcaggtacccctgacatggcagaaggtgagtgtgcgcactatgtccctctgcggagagtcactggacagtgttcccgcacaaattcccgaagacttctttatgtgccatagatggccagaaacaccgcctttttcatacacatgcggggatccctcaacatatagagtgactttcccagtttgtccccagaaactgagcctagcaccaccgtccgccaaagctagtccacataacccgggtagctgtggtgaaccccaggccaagttcttggaggcattcttcgaggaaccacctcgacggcaaagtcctgtgagtaatttagggagcgaaggtgaatgcccgtcgtcaggggctggcagccaggctcaggaactggctgaggcctgggagggttgtagaaaggatctgctgttccagaagagcccacaaaaccatagacccccaagcgtcagcgatcaaccaggggaaaaagagaattgttaccagcacatgggcacctccaagagccctgccccaggcttcatccacctgcgcactgagtgcggacctcggaaagagccctgccaggaaaaagccgctctagaacgggtgctgcgtcaaaagcaagatgcacagggttttactcctccacagctgggagcttctcagcaatacgcttccgactttcacaacgttttgaaggaggagcaggaggcactttgtctggatctccgaggaactgagcgccgtgaggagagaagggaaccggagcctcactcgagacaaggccaagcactgggagtgaagcgtggttgccaacttcacgaaccttcatcagcactgtgccctgcccctagcgcaaaggttataaagatgccccgtggagggcctcagcagctgggcacaggcgctaatacacccgcacgcgtcttcgttgctctaagtgactacaatcccctcgtcatgtccgctaacctcaaggccgctgaagaggagttggtctttcagaagagacagctgcttagagtctggggctcccaggacacccatgacttctacttgtccgagtgcaatcggcaggtaggcaacattcccggtcggcttgttgcagagatggaggtcggaaccgaacagacagatcgacgttggagaagtcctgcacagggacacctgccaagcgtggcccacttggaagacttccaaggcctgacgattccccaaggctcctccctggttcttcagggtaactcgaaacggctacccttgtggacacccaagatcatgattgccgctctcgactatgaccctggcgatggtcagatgggcggtcagggaaaaggacggctggcccttcgcgcaggagacgttgttatggtctacggcccaatggacgaccagggtttctattacggagaactcgggggtcatcgtggcctagtgcccgctcatcttttagatcacatgtcactgcacggccactag

SEQ ID NO: 239191 - DNA, 4920 bp, synthetic construct
  misc_feature 1..4920: note = Description of Artificial Sequence: Synthetic coding sequence
  source 1..4920: mol_type = other DNA
atggcaaaggacagcccatccccactgggcgcttcacctaagaagccagggtgttcctctcctgccgcagctgtgctcgagaatcagaggcgtgagctggaaaaactccgtgccgaacttgaggcagagcgggctgggtggcgggcagaaagaaggcgtttcgccgctagagagcggcaactccgggaagaagccgagcgggagcgcagacagctcgccgatcggctacgttccaagtgggaagcccagcgctcaagggagcttagacagcttcaggaggagatgcaaagggaacgggaggcagagattaggcagctgctacggtggaaggaggcagagcagaggcagctgcagcaattgcttcatagggaacgcgatggtgtggtaagacaggctcgcgagctgcagcgccagctggcggaagagctggtcaatcgcggtcactgcagccggcctggagcatccgaggttagcgctgcgcagtgtagatgtcgactccaggaagtgctggcccaattgaggtggcagacagatggggagcaggcagctagaatcagatacctgcaagcagcactcgaggtggagaggcaactgttcttaaagtacattcttgctcacttcagaggccatcccgctctgtctggatcaccagacccacaggcggtccactccctagaagaacctctgccacagacatcaagcgggagctgtcatgccccaaaaccagcgtgccagctggggtcactagacagtctgtctgcagaagtgggggttaggtccagatctcttggactagtatcttccgcctgctcgtcttcacccgatgggctactgtctactcacgcgtcaagcctcgattgctttgcccctgcttgctctagatcattggattcaacgaggagcttgcccaaggctagcaaatcagaggaaagaccatcctctccggacacatctacccctgggtcaaggagattgtccccccctccctctcccctccctccaccacccccacccagcgctcacagaaagctctctaacccacgcggaggggagggatccgagagtcagccttgtgaggtactgacaccctctcccccaggactaggtcaccacgaactaattaagttgaattggctgctcgcgaaggccttgtgggtgttggcccgtagatgttatactcttcaagaggagaacaagcaactgaggagagccggttgcccttatcaggccgacgagaaagtgaaacggctgaaggtgaaaagagccgagctgacgggtctcgccagaagactggcagacagggctagggaactgcaggagaccaacctgagagctgtgtctgctcccattccgggtgagtcttgcgctggccttgaactttgccaggtgttcgcgcgacagagggcccgagatctctcggaacaggcctcggcaccccttgctaaggacaagcagattgaggagctgagacaggagtgccacttgttgcaagcaagggtggcctcaggaccctgcagcgacttacacactggcagggggggaccctgcacccagtggctcaatgtccgcgacctggataggctacagcgggagagccagcgggaagttttgagactacagagacaactgatgctgcagcaaggaaacggtggggcttggcccgaagcaggcggacagtcagcaacatgtgaagaagttcggcgtcagatgctcgctctggaaagggagctggaccagcgacgccgtgaatgccaggagttgggtacacaagccgcacctgccagaaggagaggtgaggaggccgagacccagctacaggccgcactgctaaagaacgcgtggctagctgaggaaaatggcagacttcaggcgaagacggactgggttcgaaaggtggaggctgagaactcagaagtcagggggcacctgggaagggcttgccaagagcgcgatgcgagcggtttaattgcagaacagctgctgcagcaggctgcacgcggacaagatcgccagcagcagttgcagagagacccccagaaggccctgtgcgatctgcacccaagctggaaagagatccaggcattgcagtgtagacccggacaccccccagagcagccctgggaaacgagccagatgccagaaagtcaggtgaaaggatcccgaaggcctaaatttcacgccaggcctgaggactatgccgtgtcccaaccaaatcgggatatccaggaaaagcgtgaggcgtccctggaggaatccccagtcgcccttggagaaagtgcctctgtgcctcaggtttccgaaacagtgccagcttctcagcctctctccaagaagacaagcagtcagtccaacagttcttccgaagggtctatgtgggctactgtgccctccagccctactctggaccgggacaccgcctctgaagtggacgatctggaacccgattctgtctcgctggcgcttgagatgggagggtctgcggctccggcagcgcctaaactaaaaattttcatggcccagtacaactacaatcctttcgaaggcccaaacgaccatccggaaggggagctcccgttgaccgcaggggattatatttacatattcggcgacatggatgaggacggattttatgagggtgaactggacgacgggagacgcggtctcgtgccttcaaactttgtggaacagattcccgacagctatattcctggctgcctccccgctaagtcgccagacctcgggccatctcagctgcccgcaggtcaggacgaagcactcgaagaggactccttattatctggcaaggcacagggcatggttgaccggggattatgccagatggtacgcgtaggctccaagaccgaggtggcgacggaaatcctagatacaaaaaccgaagcctgtcagttagggctgcttcagtccatgggcaagcagggcttgagtaggccacttctgggcactaagggcgtgttgcgcatggcgcctatgcaacttcacctccaaaatgtgacggcaacctccgccaacatcacatgggtgtattcctcccaccggcaccctcatgttgtgtatctggatgacagggagcatgctttgacccctgcgggagtcagttgctacacttttcagggcctgtgtcccggaacccattacagagtgagagtggaggtgcggctaccatgggatctgttacaagtctattggggcactatgagctccacagtaacatttgatacactgctcgctggtcctccgtacccccctctcgaggtcctggtagagagacatgcatcgcccggagttttggttgtatcttggctacccgtgacaattgacagcgccggaagcagcaacggtgtccaggtgactggatacgccgtttacgcggacggactgaaggtctgtgaagtcgcagatgctacagccggaagtacagtgctggaatttagtcaacttcaggtgcccctgacctggcagaaggtgtctgtgcgtactatgtctctgtgcggcgaaagcctcgattccgtccccgctcagataccggaagacttttttatgtgtcatagatggccggagacgccccctttttcatatacatgcggtgacccatccacttatcgggtcacctttcccgtgtgcccgcagaaactatctctggctcctcccagcgccaaagcgtccccccacaaccccggatcctgcggtgagccacaggctaagtttcttgaggctttcttcgaggagcctcccagaaggcagtcgccagtaagcaacttgggtagtgaaggcgagtgtcctagttccggggctgggagccaggcgcaggaactggccgaggcctgggaggggtgcagaaaggatctcctgttccagaaatccccccagaatcaccgacctccttccgtcagcgaccagccgggagagaaggagaactgttatcagcacatggggacaagtaagtctcctgcccctggttttatccatctgcgcaccgaatgcggtccgcgaaaggagccatgccaggaaaaagccgctctggagcgggtactgcgtcagaaacaggatgctcaaggattcacacctccgcagcttggcgcatctcagcagtacgcttccgatttccacaacgtgctgaaggaggagcaagaagccctgtgtctggacctccggggtaccgaaagaagggaggaacgtcgagaacccgagccccacagcaggcagggacaagctcttggtgtaaaaaggggttgtcagctgcacgagcccagctccgccctttgtcctgcaccttccgccaaagtgatcaaaatgccccgaggtggcccacagcaactgggcacgggggctaacactcccgctagggttttcgttgcgctttctgattataacccactcgtaatgtccgccaacctgaaggctgcggaggaagagttagtgtttcagaaaaggcagttgctaagggtgtggggcagtcaggatactcacgatttctatctgtcagagtgcaacagacaagtcgggaatattcctggcagacttgtcgccgagatggaagttggaactgagcagacagacagacgttggcggtccccagcgcagggccacttgccctccgtggcccacctggaagattttcagggtcttactattccgcagggttcatctcttgtcctccagggaaacagcaagagactgccactctggactcccaaaattatgatagccgctctcgactacgaccccggagacgggcagatggggggacaagggaaaggacggctggcactgcgcgcaggtgatgtagttatggtgtacgggccaatggatgatcaggggttttactacggcgagttgggaggtcacaggggactggtacctgcacacctgttagaccacatgtctctgcacggtcactag

SEQ ID NO: 239192 - DNA, 4638 bp, synthetic construct
  misc_feature 1..4638: note = Description of Artificial Sequence: Synthetic coding sequence
  source 1..4638: mol_type = other DNA
atgcagcgtgaacgggaagccgaaattagacagctcctgaggtggaaagaagccgaacagcgccagctccagcagctgctgcaccgcgagagggatggcgtcgtccgccaggcgcgagaactccagagacaactggcagaagaactcgttaatcggggacactgtagtagacccggtgccagcgaggtatccgctgcccagtgccggtgtaggctgcaggaggttttagctcagcttcgctggcagactgacggcgaacaggccgcacggatccgctacctgcaggctgctttggaggtggagagacagctgtttctaaaatatatcttagctcacttcaggggccaccccgctctgtccggcagcccggacccacaggcagttcattcccttgaggagcccctgccccagacctcctctggatcttgtcacgcacccaaacccgcttgtcagctcggttccctggatagtctgagtgctgaggtgggtgtgcggtcacggagcctgggcctcgtgagctcagcctgtagttcttcaccagacggtcttctttcaacgcacgctagttcgctcgattgcttcgcccctgcttgttcacggagcctggacagtacaaggagcctgccaaaggcttccaaaagtgaagagagaccttcgtctccagatacatcaacacccggtagtcgtcggctcagcccccctccaagcccgctccctcctccgccacccccatcagcccaccgaaagctcagtaatcctcggggaggcgagggcagcgaaagccagccttgtgaggtgctgactccatcaccaccagggctggggcaccatgaattaatcaagctgaattggctgcttgctaaggcgctctgggtgcttgccagaagatgttacaccctccaggaggagaacaagcagttgcgcagggctggttgcccataccaggcagacgagaaggtaaaacggcttaaggtgaaacgggcagagctaacaggcctggcccgacgcctggcggatcgggcacgggagctgcaggagaccaacctgagggctgtgtcggcacccattcctggggaaagctgcgcgggtctggaactatgtcaggtgttcgctcgccagcgtgctcgcgatttatcagagcaagcatcagccccactggcgaaagacaagcagatcgaggaactgcgacaagaatgtcaccttctgcaggcccgagtggcctctggaccctgcagcgatttacatacaggaagaggcggaccctgtactcaatggttgaacgtgcgggatctggataggctccaacgagaatcccaaagagaagtcttgaggctccagcgccaattaatgctgcagcaggggaacggtggggcatggcccgaagccggtggccagtcagcaacatgcgaagaagtgagaaggcagatgctggccctggagagggaactcgatcagagacgacgggagtgccaggaactgggtacacaggccgcacctgctcggagacgtggggaggaagcagaaactcagcttcaggctgccctgctgaaaaatgcttggctggcggaagagaacggtcgccttcaggcgaagactgattgggttagaaaggtggaagccgagaacagcgaagtccgcggtcacttggggcgtgcctgtcaagaaagggacgctagtggcctaattgcagagcagttgctgcagcaggccgcaagaggccaggaccgccagcaacaactgcagagggacccccagaaggctctgtgcgatctgcatccctcttggaaggagatccaggccctccagtgccgtcccggacacccccctgaacagccgtgggaaactagccaaatgcccgagagccaggtgaagggctcacgaagaccaaaattccacgcacgccctgaggactacgccgtttcacagcccaaccgtgatatccaggagaaaagagaggcatccctggaagagagccctgtggcactgggtgagagcgcctccgtgcctcaggtcagcgaaacagttcccgcaagccaaccgttgtctaagaaaactagtagtcaatctaacagctcaagtgaggggagcatgtgggccaccgttcctagcagtcctaccctggatcgagacaccgcaagcgaggtcgacgacctggagccagactccgtatccctggcacttgagatgggcggatcggctgcaccggcagcaccgaaactgaagatatttatggcacagtataactataatccctttgagggccctaatgatcacccagaaggagaactaccgctcactgccggtgactacatctatattttcggtgatatggacgaggacggcttctacgagggcgagctggatgatggaagaaggggactggtaccctcaaatttcgtggagcagattccggattcctacatacctgggtgtctgcctgctaagtctcccgaccttggtcctagtcagcttccagcaggccaggatgaggcacttgaagaagactcactgctgagcgggaaggctcaaggcatggtggacaggggtctgtgccagatggtgcgggtcggctcaaagacagaagttgccacggagatccttgataccaaaactgaggcatgtcagctaggcctcctgcagagtatgggcaagcaaggtctgtctcgtccgctactcggtaccaaaggggtgctgagaatggcacccatgcaactgcatctgcagaatgtgacagctacctctgccaacatcacttgggtctactcatcccatcgccacccacacgtggtttatctcgatgatcgagaacatgccctcacacccgcaggcgtgagttgttacacattccaggggctgtgcccaggcacacactatcgtgtccgggtcgaagtcaggctgccctgggacctgctccaagtgtattgggggacgatgtccagcaccgtgacctttgataccttgctagcagggcctccatatccacctctcgatgtgttagtcgaacgccacgcctccccaggtgtgttggtcgtgagctggctccccgtcacaattgacagtgcgggaagtagcaacggcgtgcaagtgaccgggtacgctgtctatgctgacggtttgaaggtgtgcgaagtagcggacgccaccgccggttcgacggtgctggaatttagccaactgcaagtcccccttacgtggcagaaggtgtccgtgagaacgatgtccctctgcggagaaagcctggattccgtgcccgctcagattcctgaagacttctttatgtgccacagatggcccgaaacaccccctttctcatatacatgcggagatccttccacctatagggttaccttccctgtgtgtcctcaaaaactgagccttgcaccaccctctgcgaaagcatcaccccacaaccccggtagctgtggagagcctcaagccaaatttctcgaggcattctttgaggaaccaccccgacgtcaatctcccgtgtctaatctgggtagtgaaggtgaatgccccagttccggagccggtagccaggcacaagaactggctgaggcttgggaggggtgccgcaaggatctgctgttccaaaaatctccccagaatcatcggccaccttcagtttccgatcaacccggagagaaggaaaactgttatcagcatatgggaacttctaagtcccccgcacctggtttcatccaccttcgcaccgagtgcggtcccaggaaggagccctgtcaagagaaagccgctcttgaacgggtattaaggcagaagcaggatgcacagggtttcactcccccacagctgggagccagtcagcagtatgccagtgactttcacaatgtgcttaaggaggaacaggaagccctgtgcctcgatctgaggggaacggaacggagagaggagcggcgtgaaccagagccgcattcaagacagggacaggccctgggcgtcaagaggggttgtcagctccacgaaccttcctccgctctgtgccccgctccttccgctaaggtgatcaaaatgcctagaggtgggccacagcaactgggtactggggctaatacacccgcaagggtttttgtggccctgtccgattataaccctttagtcatgtccgccaatcttaaagctgccgaagaggaactggtctttcagaagaggcagctcctccgcgtgtggggctcccaggatacccacgatttttacctttctgagtgcaatagacaagtgggtaacatccccggtcgtctagttgcagagatggaagtgggaaccgaacaaactgatagaagatggcgaagtcctgcccagggccacttaccctccgtcgctcaccttgaagactttcaggggctaataattcctcagggatcgtcgctcgtgctccaagggaatagtaagcggcttcctttgtggactcctaagattatgattgccgctctcgactatgatcccggtgacgggcagatggggggtcaagggaaaggtaggttagctctgagagctggcgatgtggtgatggtgtacggccctatggatgaccaaggattctattatggggagctgggcggacatcgtgggctggtgcctgcccacctcctagaccatatgagtttacacggccactag

SEQ ID NO: 239193 - DNA, 4920 bp, synthetic construct
  misc_feature 1..4920: note = Description of Artificial Sequence: Synthetic coding sequence
  source 1..4920: mol_type = other DNA
atggcgaaggactctcctagtccactgggcgcttcgcctaagaaaccagggtgtagtagtccggcagccgctgtgcttgaaaaccagaggcgggaattagaaaaacttcgagccgagttggaagccgagcgcgctggatggagggctgaaaggcggagattcgccgctcgcgagcggcagctgagagaggaggcagagagagaacgcagacagctggcagacagactccgcagtaagtgggaggctcaacggtcacgagagctgagacagctgcaggaggaaatgcagagggagcgggaagctgaaattagacagctgttaaggtggaaggaagccgagcagcgccagctgcaacagcttcttcacagagagcgggatggggtggttcgtcaagctcgcgaactgcaacggcagctggctgaggagttagtcaatcgtggacactgtagccggccaggcgcatccgaggtgtccgcagctcagtgcaggtgcaggctgcaggaagtccttgcccagctcagatggcagactgacggtgagcaggccgcacgcattcgttatctacaggcagccttggaagtcgaaagacagttgtttttgaaatatattttagcccatttccgtggacaccccgcactctccgggtcccccgaccctcaagctgtgcactccttagaagagccactgccacagacgagttccggtagttgtcacgcacctaaacccgcttgccaactgggtagtctggactcgctcagtgccgaggtcggagtccggagccgcagtcttggtctcgtaagcagcgcgtgcagttccagcccggacggtctcctaagcactcatgccagcagccttgattgctttgcacccgcatgttcccggagtctcgatagcactaggtcacttcctaaggcctctaagtccgaagaacgtcctagcagcccggatactagcacgcctggatcacgccgtctgtcgcctccaccaagccccctcccccctcctccaccgcctagcgcacatagaaagctctccaatccccgaggtggcgaaggctctgaaagtcagccgtgtgaggtgttgaccccaagccccccaggtctcggtcaccacgaactcattaaactgaattggttgctcgcaaaggccttatgggtgctggctagacggtgctacactcttcaggaggagaacaaacagctaaggcgagctggctgtccttatcaggcagatgaaaaggtaaagaggttgaaggtgaagagggctgagctgaccggcctggctagacggctggcagatcgagccagagagcttcaagagaccaatctgagagccgtctccgctcccatccctggtgaatcgtgcgccggtctcgaactgtgccaggtatttgccagacagagggctagagacttgagcgagcaggcttcagcaccgttagccaaggacaaacagattgaggaactgaggcaggaatgccatctgctgcaggctagggtcgcttcaggaccttgctccgatttgcatacaggcagagggggtccctgtacacagtggctaaacgtgagagatctggaccggctgcagagagaaagccagcgggaggtcttgaggctccaaagacagttaatgctgcaacaggggaatgggggagcttggcctgaggcagggggacagtctgctacatgtgaggaggtgcgtcgccaaatgttagcgttggagagggaactggatcagcggcgtagggaatgtcaagagctgggaacgcaggctgctcctgccaggcgtcggggagaggaggccgaaacccagcttcaggccgcactcttgaagaacgcctggctggcggaagaaaatgggaggctacaggccaagaccgattgggtgcgcaaggtggaggcggagaatagcgaggtcagggggcatctggggcgagcatgtcaggagagagacgctagcggcctaattgctgagcaattgcttcagcaagcagcccgagggcaagatcgtcagcagcagctgcaacgagatccgcaaaaggccctctgcgatctgcatcccagctggaaagagatccaggcgctgcagtgtcgacccggtcacccccctgaacagccctgggagaccagccagatgccagaatctcaagttaaggggtctcgcaggcctaagttccatgcacgcccagaagattacgccgtttcccagcccaacagggacatacaagagaagagagaagcttcattagaagagtctcctgtggcgctcggtgagagtgctagcgtgccacaggtgtcggagactgttcccgcttcccagcctttatcaaaaaaaacctcatcgcaatccaactctagcagcgaaggatccatgtgggccacggtgccaagttcacccacactggatcgcgacacagcttctgaagttgacgatctggaacctgacagcgtgagcctggccctggaaatggggggttctgcagcgcctgccgctcccaagctgaaaatatttatggcccagtacaattataatccctttgaagggcctaacgatcacccagagggtgaactacctctgacagcaggtgattatatctatattttcggtgatatggacgaagatggtttttacgagggcgagctcgatgatgggaggagagggcttgttccttctaactttgtggagcagatccctgatagctatataccgggttgtctccctgccaagtctcctgacctgggtccctctcagctgcccgctggccaggacgaggcccttgaggaggacagtctcctgtcagggaaggcacaaggaatggtagatcgtggcctgtgccagatggtgcgggtcggaagtaaaacagaggtagctacagagattctcgatactaagactgaggcctgccagctcggtcttcttcagtcaatgggcaagcagggactatccaggccccttctgggtacaaaaggggtgctccgaatggctccaatgcagctgcaccttcaaaacgtgactgctacctcggccaacatcacatgggtatatagttctcatcggcatccgcatgtggtctacctcgacgacagagagcacgcgctgacgcctgcgggtgtgtcctgctacacatttcaggggctgtgtccaggaacacactaccgggtccgcgtggaagttagacttccctgggacctgctgcaagtctactggggaactatgagcagtacagtcacgttcgacacactcctggccggtcccccatacccacccctggacgtcctggtggagagacacgcatccccaggtgtgctggtggtgtcatggctgcctgtaaccatcgactcagcgggtagttccaacggagtgcaagttacaggatacgctgtatatgccgacggcctgaaggtctgcgaggtcgcagacgcgacggccggttcaactgtgctggagttttcccaactgcaggtcccattgacatggcaaaaagtatctgtacggacgatgagcctttgcggcgagagcctcgactccgtgcccgcacagattccggaagattttttcatgtgtcaccgctggccggagaccccccctttttcctacacttgtggggatccctcaacctatagggtcacatttcccgtgtgtcctcagaaattgtcactcgcgcctccctccgcaaaagcgtctccccataatcctggaagctgcggcgagccccaggcaaaatttcttgaggccttctttgaagagcctcctcggagacagtcccctgtatccaacctcgggtcagaaggggagtgtccatcctcgggcgcagggtcccaggcccaagagctggctgaagcatgggaaggatgcaggaaggacctgttgttccaaaagagccctcagaaccataggcctcccagtgtgtccgatcaacctggcgagaaggaaaattgctaccaacatatgggcacttcgaaatctccagcccctggattcatccatctccgcacggagtgcggtccacgcaaggagccatgccaggaaaaagccgctttggagcgcgtactgaggcaaaagcaagacgcacagggttttactccaccccagctgggggcaagccagcagtacgcgagcgactttcataacgtcctcaaggaagagcaagaagctctgtgcctggacctaagagggactgaaagacgcgaagagcgccgtgaacctgagccacacagccggcagggccaggccctcggcgttaagcgcggatgccaacttcatgagcctagctctgcactgtgtccagccccatctgccaaggtgattaagatgcctagaggcggaccacagcagctgggtacaggagcaaatacacccgcacgcgtctttgtcgctctttcagactataacccactcgtaatgagtgcaaatcttaaggcagccgaggaggaactagtgttccaaaagcgtcaactgttgcgagtgtgggggtcccaggatacgcatgacttctacctgtccgaatgcaacagacaggtaggaaatatacccggacggttggtagccgagatggaggttggaactgaacagacggaccgacgatggcgctctcccgctcagggccatctgcccagcgtggcacacctcgaggactttcagggactaatcatcccacagggatcatccctagttctgcaaggcaattccaaacgactcccactgtggactcctaaaatcatgatcgccgcattggactatgatccaggggacggccagatgggtggccaggggaaggggcgactggccctcagagcaggcgatgtggtcatggtgtatgggcctatggatgatcagggtttttactatggggaactcgggggacaccgaggcttggtcccagcccacctgttggatcatatgtctcttcatggtcactag

SEQ ID NO: 239194 - DNA, 3402 bp, synthetic construct
  misc_feature 1..3402: note = Description of Artificial Sequence: Synthetic coding sequence
  source 1..3402: mol_type = other DNA
atgcctgtccaggcaccccagtggactgattttctctcatgtcccatatgtacccagacgttcgatgagacaattcggaagccaatctctctgggttgcggccacacggtttgtaagatgtgcctgaacaaactccacaggaaggcctgccctttcgaccaaaccacaatcaacaccgacattgaattactacccgtgaacagtgcactgttgcagctggtcggggctcaggtgcccgaacagcagcccatcacattatgtagcggagtagaggacacgaagcattatgaagaggctaagaaatgtgtggaggaactggcgttatatctcaagcccctctcttcagcaaggggcgtgggcctgaacagcacaacccagagcgttctttcaagaccaatgcagaggaagttagtcaccctggtgcattgtcaactggtggaagaggaaggccgaatcagagcgatgagagcagccagatcactgggcgagaggacagtcacggagctgatcttacagcatcagaaccctcagcagctatcctccaacctttgggctgccgttcgggctagaggctgccagtttcttgggccagcaatgcaggaagaggctttgaagcttgtcctcttagctttggaggacgggagcgccctgtcccggaaagtgttggtcctgtttgtggttcagagacttgaacccagattcccacaggcaagcaagacctcaattggtcatgtggtccagctgctgtatcgggcttcatgttttaaggttaccaaacgcgacgaggactccagcctgatgcagttgaaggaagagtttagaacgtatgaggctctgaggcgagaacacgacagtcagattgttcagatcgcaatggaggcaggcctgagaattgctcccgaccaatggtccagccttctgtatggggaccagtcccacaagtcccacatgcagtccattattgacaaactacagactccagcaagcttcgcccaaagtgtccaggagctgaccatcgctttgcagaggacaggagatcccgcaaatcttaacagattacggcctcatctcgaactactggctaacatcgatcctagccctgatgcccctcccccaacctgggaacagttagagaatggcctcgtggccgtgagaacagtggtgcacggccttgttgattacattcagaatcattccaaaaaaggcgctgatcagcagcagccaccgcaacactccaagtacaagacatacatgtgcagagacatgaagcagagagggggatgtccacgtggcgcatcatgtactttcgcacacagccaggaggagctcgaaaagtttaggaagatgaacaagcgcctggtgccccgacgacctctgtctgcatctctgggccagctgaatgaagttggcctccctagcgccgctatcctgccagacgagggggcagtggacctgcctagtcgaaaacctcccgctctgcctaatgggatagtcagtactgggaacactgtgactcagctgatcccgaggggcacagaccccagctatgatagttccctgaagccaggcaagatagaccatctctcatcctcggccccaggctcccctccggacttactggaatccgtgccaaagtctatttctgctctgccggtgaacccacactcaattccacctaggggtcctgctgaccttccacccatgcccgtgaccaagccactgcaaatggttcctcgagggtcacaactgtaccccgctcagcagacagacgtgtattatcaagatccacgcggagctgcccctccattcgagccagccccatatcagcaaggcatgtactatacaccacctcctcagtgcgtttccagattcgtgagaccaccaccctccgctccggagcccgctcccccatatctggaccactaccccccttatcttcaggagagggtggtgaactcacagtatgggactcagccccagcagtatccacctatctacccgtcccactacgacggcaggcgggtgtatcctgctccgagttatacaagggaggagattttccgggaaagccccattccgattgagatcccaccggcagcagtcccttcttacgtgcccgagtctcgtgagcgctatcagcagattgagagttattaccctgtcgctccacatcccacacaaatccgtccatcataccttcgggaacccccatattcacgcctgccacctcctccacagccacatccatccctggacgagctgcaccggagaaggaaggaaatcatggctcaactggaggagaggaaggtcatttctccaccaccatttgcgccttctcccacactgccacccactttccacccagaagagtttctggatgaggatctgaaggtcgcaggcaaatacaaagggaatgactattctcaatatagcccatggagttgcgatactatcgggtcctatatcggtaccaaagatgctaaacctaaagatgtcgtcgccgcaggatccgtggagatgatgaacgtggaatctaagggcatgcgggatcagcgattggatttgcagcgacgtgccgcagagacctcggacgatgacttgataccattcggggaccgcccaaccgtgtcaaggtttggcgctatttctcgaacgtccaagacaatataccagggagctggtccgatgcaggctatggcccctcaaggtgctccgactaagagtattaacatcagcgactactctccctatggaacccacggcggatggggcgcatcaccatacagcccccatcaaaacattccgagccagggacatttctctgaaagagagcggatctcgatgtccgaagtagcatcacatgggaagcctctaccttccgccgagcgagaacagttgaggttggagttacaacaactaaaccaccagatcagtcagcaaactcagttgagaggattggaggccgtaagcaaccggctcgtcttacagcgcgaggcaaacacactggctggacaaagccaaccgccacctccgcctccaccaaagtggcctggcatgatctcctctgaacagctgtccttagaactgcaccaggtcgagcgcgagataggaaagcggaccagggagttgtctatggagaatcagtgtagcctggatatgaagagtaagctcaatacaagtaaacaggctgagaatggacaacccgagccccagaataaagtgccagcggaggatctgaccttgacattttcggatgtgcccaatggcagcgcactgacacaagagaatatctctctgctgtccaataaaacaagttctctaaacctcagcgaggaccccgaaggcggaggcgataataatgatagccaaagaagcggcgtcacacctagttccgccccttag

SEQ ID NO: 239195 - DNA, 3378 bp, synthetic construct
  misc_feature 1..3378: note = Description of Artificial Sequence: Synthetic coding sequence
  source 1..3378: mol_type = other DNA
atgcctgtgcaggccccacagtggacagactttctctcatgccctatctgcactcagacatttgacgagactattcgcaaacccatttccctcgggtgcgggcataccgtatgcaaaatgtgcctaaataagctgcaccggaaggcttgcccctttgaccaaactactataaacacggacatagaactgctgccagttaactccgccctgctgcagcttgtcggggctcaggtccccgagcaacagcctatcacgctgtgttcaggggtggaggacaccaagcattacgaggaagccaagaaatgcgtggaggagttggccttgtatctcaagcctctgagcagcgctaggggcgtaggactgaatagcacaacacaatccgtgctgagcagaccaatgcagcgcaaactggtaaccctcgtacactgtcagttagtggaggaggagggacggatccgcgcaatgcgagctgctaggtcacttggcgaacgaactgttacagaattaatcctccagcaccagaatccccagcaactgtcatctaatctttgggccgctgtgagagcacgaggttgccagttccttggtccggctatgcaggaagaggccctgaaactggttctgctcgccctggaggacggatccgcgctcagtcggaaagtcctggttctttttgtggtccagaggctggaaccacgcttcccccaggcctctaagaccagcattggccatgtggtgcagttgctgtatcgtgcttcttgtttcaaggtcaccaagcgtgatgaagattcgtctttgatgcagctgaaggaggagttccgcacctacgaggcgttacgtcgagaacacgattcgcaaatcgttcagatcgccatggaggccggactgcgaatcgcccctgatcagtggtcaagcctcttatatggcgaccagagtcacaaatcgcacatgcagtccatcatcgacaaactgcagactccagcctccttcgcgcaaagcgtacaggagcttaccatagctctgcagaggacaggagatccagccaatttgaaccggctgaggccccacctggagctactggccaatattgacccatcacccgacgcaccaccaccgacctgggaacagctggagaatgggttagtcgcggtgagaacggtggtccacggcctggttgattacattcagaatcatagcaaaaagggggctgaccagcaacagcctccacagcatagtaaatacaagacatatatgtgtcgcgatatgaagcaaagggggggatgccccaggggcgcttcctgcacctttgcccattcccaggaggaactggaaaaatttcgcaagatgaacaagaggctcgtccctagaagacccctgagtgcctcccttgggcagctcaacgaggtcgggctccccagcgccgcaatccttccagatgagggggctgtcgacctgccaagtagaaaacctccagccctgcctaacggcattgtgtccactggaaatacagtgacacagcttatcccgcgtggcactgacccctcctatgactcctccctgaagcccggaaagatcgaccacctcagttctagtgctcccggatcacctcctgacctactggagtcagtgccaaagagcatatccgccctccccgtcaacccgcacagtattcctccgagagggccagcagacctgcccccaatgccagttacaaagccactccagatggtacccagaggctcccagctgtatccggctcagcaaaccgatgtgtattatcaggaccctagaggagcggcacccccattcgaaccagcaccttatcagcagggcatgtactatacacctccccctcaatgcgtttctcgcttcgtgcgtccacctccttccgcgccagagccagccccaccctatttggaccactacccgccatacctccaggagagagtggtgaattcacagtatgggacacagccacaacaatatccgcctatctacccctcccactatgatggcagaagggtgtaccctgctcctagctacacccgggaggagattttccgtgagtctcctatccccattgagattccacccgcagcggttcccagttatgtgcctgaatctagagagcgatatcagcagattgagagctactatccagtagcgcctcatccaacacagattcgtccctcatacctgagggaacctccttactctcgccttccccctccacctcagccacacccttctctggatgagctacacagacggaggaaagagatcatggcccagttagaggagaggaaagtgatatcaccgccacccttcgctccctctccaacccttccaccaaccttccaccctgaggaattcctggacgaagacttaaaagtagccggtaagtacaagggcaatgattattcgcagtactcaccttggtcttgtgacacgataggaagttacatcggtacgaaggatgcgaagcctaaggacgtggttgcagcaggatcagtggaaatgatgaatgtcgagtcaaaaggcatgagggatcagagacttgacctacagcgacgcgctgcggaaacctctgacgacgacctgatccccttcggggacagacccacagtgtctagattcggagccatttctaggactagcaagactatttaccaaggggctggccctatgcaggccatggcccctcaaggagcccctactaagtcaattaacatcagtgattattccccctacggcacccatggcggatggggagcaagcccctattcccctcatcagaacatcccttcgcagggccacttttccgagcgcgagaggataagcatgtcagaggttgcaagccacggtaaaccactaccgtccgcggagcgagaacagttgcgccttgagctgcagcaacttaaccaccagataagccagcaaacacagctgagggggctggaaagagaagctaacacccttgcaggccagtcccagcccccaccacctccacccccaaagtggccaggaatgatctctagtgaacaactcagcctcgagctgcaccaagtggagagagagatcggaaaacgtactagggagttgtctatggaaaaccagtgctccttagacatgaagagcaagctgaacaccagcaagcaggcggagaacgggcagcctgagcctcagaacaaagtgcctgcggaagatttgactttgacattctcatcagatgtgccaaacggctcggcactgacccaggaaaacatcagtctgttgtccaataagactagctccctcaatttatcagaggatcctgagggcggtggggacaataatgatagccaacgatctggcgtgaccccttctagtgcaccctag

SEQ ID NO: 239196 - DNA, 3402 bp, synthetic construct
  misc_feature 1..3402: note = Description of Artificial Sequence: Synthetic coding sequence
  source 1..3402: mol_type = other DNA
atgccggtgcaagctccgcagtggaccgatttcctcagctgccccatatgtactcagacctttgacgagaccatccggaaacccatcagccttgggtgcggacatactgtgtgtaaaatgtgcttgaacaagctgcatcgtaaggcttgcccgttcgatcagactacaatcaataccgatattgagctgctccctgtgaattcagcattactccagctggtcggcgcacaggtaccggagcagcagccgattacattgtgtagcggggtcgaagataccaaacattacgaagaggccaagaagtgtgtggaagaacttgccctgtatttaaaaccactgtcctccgcaaggggagtcgggctgaactctacaacacaaagcgtgctctccagacctatgcagcgtaagctggtgacactcgtccactgtcagcttgtggaagaagaaggaaggattagagccatgcgcgcagccaggtccctgggtgagcgcacggtcacagagctcatccttcagcaccagaaccctcagcaactgagtagcaacctgtgggccgcagtacgcgctcgcggatgccagtttctggggcctgctatgcaggaagaggctctgaagttggtgcttctggctttggaggacgggtcagcattatcaaggaaggttctggtcctgttcgtcgtacaacggctcgagccacgctttccccaagccagcaagactagtataggccatgtggtgcaactcttgtatagggcctcctgctttaaagtaaccaaaagggacgaagactcttccctgatgcaattgaaagaggagtttagaacttacgaagctctgagacgggagcatgactctcagatagttcagatcgctatggaggccggacttcgaattgcacccgatcaatggtcctcgctcctatatggagatcagagtcataagtcccatatgcaatcaataatcgataagctccagaccccagcgtcatttgcccagagcgtccaggaattgaccattgccctccagaggaccggcgatccggcaaatctgaaccggctcaggcctcacctagaactactggcgaacatcgacccatccccagacgcaccacctccaacctgggagcagttggagaacgggcttgtcgcggttcggacagtggtacatgggctcgttgattacatccagaatcattccaagaaaggagctgaccagcagcagcccccacaacatagcaaatataaaacttatatgtgccgggacatgaagcagagaggaggttgtccaaggggcgcatcatgcactttcgcgcattctcaagaggagctggagaagtttcgaaagatgaacaagaggcttgtgccgcgaagacctctgagcgcaagcttaggccagctgaacgaagttggactgcctagtgcagcaatcctacccgacgaaggggcagtggatctcccaagtcggaagccacccgctctgccaaacgggattgtgtctaccggcaacaccgtgacgcagctgatccccagaggcaccgaccccagctacgactcctctctcaagccaggaaagatcgaccacctctccagctcagcacccggatcccctcccgatctgctcgaaagcgtgcctaaaagtatttctgcgctgcctgtaaatccccactccatcccccctaggggtcccgcagacctgccccctatgcctgttactaagcccttgcaaatggtgcccagaggtagccagctgtatcccgctcaacaaactgatgtctactaccaggacccccgaggagccgcaccgcctttcgaacctgctccataccagcagggcatgtattatacgcccccaccccagtgcgttagcaggttcgtgcggccacctccatcagcgcctgaacccgctcccccttatttggatcactacccaccctacctccaagaacgtgtggtgaattcccaatatggaactcagcctcagcagtaccccccaatctaccccagccactacgacggaaggcgagtgtatcccgcaccgagctacaccagggaagagatcttcagggagagccctatccccatcgagattccgccagcagcagttccctcttatgtccccgagagtagagaacgataccagcaaattgaatcttattatcccgtcgctccacatcccactcagatccgcccatcttacctccgtgaacccccatacagccgcctgccccctccaccgcagcctcacccgtcactcgatgaacttcacaggagacggaaagaaatcatggcccagcttgaggagaggaaggtgatctccccccctcccttcgctcccagcccgacactgcccccaacattccaccctgaggagttcttagacgaggacctgaaagtggccggaaaatacaaaggtaacgattactctcagtattctccgtggtcatgtgatactatcggcagttacatcggaaccaaagatgccaaaccaaaagatgtggtggctgctggctccgtggagatgatgaatgtagagagcaaaggtatgcgcgatcagaggctggacctgcagcgcagggccgcagagacctccgacgatgacctcatcccctttggcgaccgtccaaccgtatctcggtttggggctatctctagaacatccaagaccatctatcaaggtgccggtccaatgcaggcaatggctccccaaggggctccaaccaaaagcattaatatctccgactacagcccctatggaacccatggcggttggggggctagtccgtattctccccatcagaacatcccttcccaaggccatttctctgaaagagagaggatctccatgagtgaggtggctagtcacgggaaacctttgcctagcgctgaaagagagcagctcagactggagctgcagcagctgaaccatcagatttcccaacagacccagcttcggggtcttgaggccgtcagtaaccgcttagtcctgcagcgggaagcgaacacgttggccggacagtcccagccgcctccaccacctccacccaagtggcctggcatgataagtagtgagcagttgtctctggaactgcaccaggtcgagagagaaattggaaaacgcacccgtgaactaagcatggaaaatcaatgtagcctggatatgaaatccaagctgaatacctcaaaacaggcagaaaatgggcagcccgaacctcaaaacaaggtgccggctgaggaccttactttgactttttccgacgttcctaacgggtcagcactgactcaggagaacattagccttcttagcaacaaaacttccagcctcaacctgagcgaagacccggaaggagggggtgataacaacgactcacagcgctcgggcgtcacaccatcctcagccccatag

SEQ ID NO: 239197 - DNA, 984 bp, synthetic construct
  misc_feature 1..984: note = Description of Artificial Sequence: Synthetic coding sequence
  source 1..984: mol_type = other DNA
atgtgggccacatgctgtaattggttttgcctggacggacagcccgaagaagtgcccccaccccaaggtgctaggatgcaggcttatagcaaccctggctatagctcctttccgagccccacgggattggagccgtcctgtaagtcttgcggagcccacttcgctaatacagccagaaagcaaacatgcctggattgtaagaagaacttttgcatgacatgctcttctcaggtcgggaatggcccaaggctgtgcctgctttgccagcggttccgcgctaccgcgttccaaagagaggagttgatgaagatgaaagtgaaggacttaagagattacctgtccttacacgacatctccactgagatgtgccgggaaaaagaagaactcgttttgctggtgttaggccagcagccggtcatttcccaggaagatcgcacccgggcttcaaccctgtcccccgacttccccgagcagcaagcctttctcacccaaccgcacagcagcatggtgcctccaacatcaccaaacctgccctcaagctcggctcaggcaactagtgtccctcctgcgcaagtgcaggaaaaccagcagtctatcgacagcgaagacagctttgtgcctgggcgtcgagcctcattaagtgacttgactgatctggaggacattgagggactcacagtgcgccagcttaaggagatcctcgccagaaatttcgtcaattacaagggatgctgcgagaagtgggaattaatggagcgggtgacacggctgtacaaagaccagaaagggctgcaacacctgggcggtgccgtgccgtccggcttagaagaaaatctctgcaagatatgcatggattcacctatcgactgcgtgttgcttgagtgtggtcatatggtgacttgcactaaatgtggtaagagaatgaatgagtgccctatttgtagacaatacgtgattagagccgtgcacgtgtttcgtagctag

SEQ ID NO: 239198 - DNA, 1092 bp, synthetic construct
  misc_feature 1..1092: note = Description of Artificial Sequence: Synthetic coding sequence
  source 1..1092: mol_type = other DNA
atgtgggcaacttgttgtaactggttttgtctcgatggacagcccgaggaagtcccgcctccacagggtgcaaggatgcaggcctactccaatcctggctactcctcattcccctctcccacgggcctggagccatcctgtaaatcctgtggggctcactttgcaaacacggcgaggaaacaaacatgtctggattgcaaaaagaatttttgcatgacatgtagttcccaggttggcaacggccctagactgtgcctgctctgtcaacgcttccgagccacagccttccaacgggaagagctgatgaaaatgaaggtgaaagacctgcgagactatctgtcactgcacgacatctctaccgaaatgtgccgcgagaaggaggagttggtgctgctggtgctcggccagcagccggtcatcagtcaggaggacagaacaagggcatctaccctcagtccggacttccccgagcaacaggcctttctgacacagcctcactcctccatggtgcctccaactagccctaatctgccaagtagtagcgcccaggccaccagcgtgcccccagcccaggtgcaggagaaccaacaagctaatggtcacgtgtcacaggaccaagaggagcctgtgtacctggaatcagttgctcgggtgcccgctgaagacgaaactcaaagcattgactccgaggacagttttgtacccggaagaagggcgagcctgtccgatctaacggacctcgaagacatcgagggacttaccgtgaggcagcttaaagagattcttgcacgtaactttgtcaactacaagggttgctgtgagaagtgggagctgatggaacgcgtcacaagactctacaaggatcaaaaaggcttgcagcacctggtgtctggtgccgaggatcaaaatggaggcgcagtgccaagcggtttagaggaaaacctgtgcaaaatatgtatggacagtcccattgattgcgtcttactcgaatgtggacacatggtgacatgtactaagtgcggcaagcgtatgaatgagtgtcctatttgcagacaatacgtgatccgagccgttcacgtattcaggtcatag

SEQ ID NO: 239199 - DNA, 1068 bp, synthetic construct
  misc_feature 1..1068: note = Description of Artificial Sequence: Synthetic coding sequence
  source 1..1068: mol_type = other DNA
atgtgggccacctgttgcaattggttctgcctggatggacagcccgaagaggtccctccacctcagggggctaggatgcaggcctattctaacccaggatactctagctttcctagcccaactggtttagaaccaagctgtaaatcctgtggagcccacttcgccaatactgcaagaaagcagacatgcctagactgtaagaagaatttctgtatgacctgtagctctcaggtcgggaatggaccaaggctgtgtctcctttgtcagcggtttcgagctaccgccttccagagagaggagcttatgaagatgaaagtgaaagacctgcgcgattacttgagcctacatgacattagcactgaaatgtgcagagagaaagaagagctggtcctcctggtgcttggccaacagcccgtgatcagtcaagaagatagaactcgggcatccactctttccccggacttcccagaacagcaggcatttctgacccagccccacagctccatggtaccgccaactagtccaaatcttcccagctcgtcggcacaggcaacatctgtacccccagcccaggtgcaggaaaatcaacaggcaaatggacatgttagtcaggaccaagaagagcctgtgtatctggaaagcgttgcacgggtgcctgcagaagatgaaacccagagtatcgacagcgaggatagttttgtccccggacggcgagcgtcactttccgatctgaccgatttggaggacatcgagggcctaacggtccgccagctgaaagagattttagctaggaattttgtgaattacaagggatgctgcgagaagtgggaattgatggagagagtgactcggctctataaggatcaaaaggggctgcagcacctcggaggcgcagtgcctagcggcctggaggaaaacctctgtaagatttgtatggattcacctattgactgtgtcctgctcgaatgtggacatatggtcacctgcacaaagtgtggcaaacggatgaacgagtgtcccatttgccgccagtacgtcatccgagccgtacacgtctttagaagttag

SEQ ID NO: 239200 - DNA, 1092 bp, synthetic construct
  misc_feature 1..1092: note = Description of Artificial Sequence: Synthetic coding sequence
  source 1..1092: mol_type = other DNA
atgtgggctacttgctgcaattggttttgcctcgatggacagccagaggaggtcccgcctccacagggcgcaaggatgcaggcttatagtaacccaggctattcgtcctttcctagtcctacagggttggaaccttcgtgcaagagctgtggcgcacacttcgccaataccgcgagaaaacagacatgcctcgattgtaagaaaaacttctgcatgacctgttccagccaggttggaaatggcccaagactgtgcctcttgtgtcaacgttttcgcgctactgcgtttcagcgcgaagaactcatgaaaatgaaggtgaaggacctccgcgattacctcagtctccatgatatctccacagaaatgtgccgggagaaggaggaacttgtattgctcgttctggggcaacagcccgtaatttctcaggaggaccgcacacgcgcttctacactgtcgccagacttccctgagcaacaggccttcctaactcagccgcacagcagcatggtgccacctacaagtcccaacctgccctccagcagcgcacaagccacatcagtgcctccagcccaagtccaggaaaaccaacaagcgaacggtcatgtttctcaagaccaggaggaacctgtgtatctcgagtctgtcgcacgagttccggctgaggacgagacacagagtattgactctgaagatagtttcgttccgggtcgcagggcatctctgtctgacctaacagacctggaggacattgaggggctgacggttcggcagctcaaagagatacttgcacgtaattttgtcaattataaggggtgttgtgagaagtgggagctaatggaacgcgtgacacgactgtataaggatcagaaagggctgcagcatcttgtgtccggagccgaggatcagaatggaggagccgtcccctccgggctggaagagaatctgtgtaagatttgtatggattcccctatcgattgcgtcctgttggagtgcgggcacatggttacgtgtactaaatgtggcaagagaatgaacgaatgcccaatttgtcgtcagtacgtcatcagagccgtacatgtgtttagatcctag

SEQ ID NO: 239201 - DNA, 816 bp, synthetic construct
  misc_feature 1..816: note = Description of Artificial Sequence: Synthetic coding sequence
  source 1..816: mol_type = other DNA
atgtgggctacatgctgtaactggttctgccttgatggccagcctgaagaagtgccacctccccagggagccagaatgcaggcttattcgaacccgggatattccagttttcctagtcctaccggcctagaaccttcctgtaagtcttgtggggcacactttgccaacacagccagaaaacaaacatgtctggattgcaagaagaacttttgcatgacctgtagctcacaagtgggcaacggacctcggctgtgcctcctctgtcaaaggtttagggccaccgcttttcaaagggaagagctgatgaaaatgaaagtgaaagatctgcgggactatctgagcttgcacgacatctcaacagaaatgtgccgggagaaggaagagttagtacttttggttcttggacagcagccagttatctcccaggaagaccggacgcgtgccagcaccttgagcccggacttccccgagcagcaagcatttctgacacagcctcactcttctatggtgccaccaacatctccgaatctcccctcttctagtgcgcaggccacttcggtgcctcctgctcaggtgcaggaaaaccagcaggctaatgggcatgtctcccaggatcaagaagaacccgtctacctggaatcggtggccagagtgcctgcagaagacgaaactcagtcaatcgattccgaagattcctttgtccccggacggagggcatcacttagcgatctgacagatctggaagacattgaggggctgacggtcaggcaactcaaagagatcctagctcggaattttgtgaactataagggatag

SEQ ID NO: 239202 - DNA, 402 bp, synthetic construct
  misc_feature 1..402: note = Description of Artificial Sequence: Synthetic coding sequence
  source 1..402: mol_type = other DNA
atgtgggccacatgctgcaattggttctgcctggacggccagccagaggaggtgccgccaccacaaggcgcaaggatgcaagcatactccaatcccggttatagcagcttcccatcccctaccggattagagccatcatgtaaatcatgcggagctcacttcgcaaacactgcaaggaagcaaacttgcctggactgtaaaaagaatttctgtatgacctgctcaagtcaggtcggcaacggtcccagactctgcctcctctgccagcgttttcgcgctacagcatttcagcgagaggagctgatgaagatgaaggtcaaggatctgagggactacctatccctgcacgacatctccaccgagatgtgcagagagaaggaggaactggtcctgctggtttag

SEQ ID NO: 239203 - DNA, 570 bp, synthetic construct
  misc_feature 1..570: note = Description of Artificial Sequence: Synthetic coding sequence
  source 1..570: mol_type = other DNA
atgtgggctacatgttgcaactggttttgccttgatgggcaacctgaggaggtccctccgcctcagggagcccgaatgcaggcctatagtaaccccggatactcttcatttccctcgcccactggactcgagccatcttgcaagagttgcggggctcattttgccaacactgccaggaaacagacatgtctggactgtaaaaaaaatttttgtatgacatgctcctcccaggttggcaacgggcctagactttgcctcttatgtcaaaggttcagagctaccgcatttcaaagagaggagctcatgaagatgaaagttaaagatctgcgggattatctgagtctccacgatattagtactgagatgtgtagggagaaagaagaattggtcctcttagtgctgggccagcagcctgtgatcagtcaagaagataggaccagggcatcgacattgtccccggattttccagaacaacaggcatttctgactcagccacacagttcaatggtaccacctacgtctcccaatctgccctcctccagcgcccaggccacgagtgtcccaccctag

SEQ ID NO: 239204 - DNA, 138 bp, synthetic construct
  misc_feature 1..138: note = Description of Artificial Sequence: Synthetic coding sequence
  source 1..138: mol_type = other DNA
atgtgggccacctgttgtaactggttctgtctcgacgggcagcccgaggaggttccgcctccacagggagccaggatgcaagcttacagtaaccctggttacagctcatttccctcacctacaggattggagccttag

SEQ ID NO: 239205 - DNA, 2124 bp, synthetic construct
  misc_feature 1..2124: note = Description of Artificial Sequence: Synthetic coding sequence
  source 1..2124: mol_type = other DNA
atgtcaggctccaggcaggctggctcaggctcagcaggaactagtccaggaagcagtgctgcgtcatcggtcacatctgcatcctcaagcctttcaagctcaccaagtcccccttcggtggcggtgtccgccgcagcccttgtctccgggggtgttgcacaagccgctggcagtggcggtctgggcggacccgtgcggcctgtcctggtcgctccggctgtttccgggtctggcggtggcgcagtttccacagggctgagcaggcatagctgtgcagctcgcccttcagcgggagttggaggcagctcatcctcactaggaagtgggtcccgcaaacggccattactcgccccactgtgcaacgggctcatcaactcgtacgaagacaagagcaacgattttgtgtgtcccatttgctttgatatgattgaggaagcctatatgacgaaatgcggtcactcattttgctacaaatgcatccatcagtcactcgaagacaataacaggtgccccaagtgcaactatgtagtggataacatagaccacttgtaccctaattttcttgtgaacgaactgatccttaagcagaagcaacgctttgaggagaaaagattcaagctagaccattcgaacggacacaggtggcaaatttttcaggactggctggggactgaccaggacaacctggacctggccaatgtcaatctgatgttagagctgttagtccagaagaagaaacagttggaggctgaatcccacgctgcacagctgcaaatattgatggagttcttaaaagtggcccgaaggaataagcgcgaggagatgtcaggtctgtactctcctgtaagtgaagatagcacggttccacaattcgaagcccctagcccctctcatagctcaatcatagatagcactgagtatagtcagcccccaggcttttcgggctctagccagacaaagaaacaaccctggtacaactccaccctggcctctcgtcggaagcgccttacagctcattttgaagacctcgaacagtgctacttcagcactaggatgtcaaggatcagcgacgatagccgaaccgcgtcacaactggacgaattccaagaatgtttaagcaaatttacccgctataacagtgtgcgcccactggctaccttgtcttatgcatcagacctatataacggcagtagtatcgtaagctctattgaatttgatcgcgattgtgattatttcgccatcgcgggagttacaaagaaaataaaggtttatgaatatgatacagtaattcaggatgcagtcgacatccactatcctgaaaatgaaatgacatgtaactccaagatttcctgcatttcctggtctagttaccacaaaaatctgctcgcttcctcagactacgagggaaccgtgatactctgggatgggtttacaggccaacgctcaaaagtctatcaggaacacgaaaaacgatgctggagcgtggacttcaatcttatggatcccaaactacttgcaagcggatcagacgacgccaaggtgaaactgtggtcaacaaacctcgacaactctgtggccagtattgaggccaaggccaacgtttgttgcgtgaaattttcgccctcgtctaggtaccatctggcattcgggtgtgccgatcactgcgtgcactactatgacctcaggaatactaaacagcccatcatggtgtttaagggacaccggaaagctgtcagctacgcaaagttcgtgtctggagaagagattgtttccgcctcaacagactcccagttaaaactgtggaatgtgggcaaaccatactgcctccggagtttcaaagggcatatcaatgagaagaactttgtgggcctcgcaagtaacggggactatatcgcctgcggaagtgagaacaacagcctttacctgtattacaaaggcctgtcaaagacactgctaacatttaagtttgatactgtgaaatccgttctggacaaagatcggaaggaggacgacactaatgaatttgtatctgctgtgtgttggagggcattgccagacggggaaagtaatgtgcttatcgcggctaactcacaaggcacgattaaggtgctggaattggtgtag

SEQ ID NO: 239206 - DNA, 1521 bp, synthetic construct
  misc_feature 1..1521: note = Description of Artificial Sequence: Synthetic coding sequence
  source 1..1521: mol_type = other DNA
atggaattcctgaaggtggccagacgaaacaaaagagagcagctcgagcaaattcagaaggagctgtcagtactagaggaggatataaaacgggtggaggagatgtctggtctgtattctcccgtgtccgaagattctaccgtgcctcagttcgaggctcctagcccaagtcattcctcaattatcgactcaaccgagtactcccaacctcctggattttcaggaagcagtcaggctggggtgcagtggcgatacttaggtagtctccagccaccccctcccagatataaacgcttctcctgccttacacttccttctagctgggactaccgtcgtctgccaccgcatctcaccaagaaacagccctggtataactccaccctcgcctctcgcagaaaacggctgactgcccattttgaggaccttgaacaatgctatttctctactcgcatgagcagaatttcagacgatagtaggacagcttctcaactcgacgaatttcaggagtgcctgtcaaagtttacgagatacaatagtgtgcgccctctcgctaccctttcatatgcctccgacctctacaacggcagtagtattgtgtcttccattgaatttgatagagattgcgactacttcgctattgctggcgttaccaaaaaaataaaagtgtatgagtatgacactgtgatacaggatgccgttgacattcactaccccgaaaatgagatgacatgcaatagcaagatttcttgcattagttggagcagctatcacaagaatctgctggcgtcatctgactatgaggggaccgtaatactctgggacggattcactgggcaacgcagtaaggtctatcaggagcacgagaaaagatgctggtcagtggatttcaatttaatggaccctaaacttttggcctccgggagcgatgatgcgaaggtgaagctttggagcactaacctagataattccgtcgccagcatcgaggcaaaggccaacgtctgttgcgtcaaatttagccccagctctcgctatcaccttgcgttcggttgcgcagatcactgcgtgcactactatgatcttcggaacacaaagcagccaatcatggttttcaagggacacagaaaagccgtaagctatgcgaagtttgtgagtggtgaagaaattgtgtcagccagcacagattcccagcttaagctctggaatgttggaaaaccctattgcctgaggagctttaagggacatatcaacgaaaaaaatttcgttggactggcatctaacggcgactacatcgcgtgcggtagcgagaacaatagcctgtatttgtactataagggcttgtctaaaaccctgctcaccttcaaatttgacacagtgaagtccgtgctggacaaggaccgaaaggaggatgacacaaatgagtttgtgagcgctgtgtgctggcgggcactgccggacggcgagtctaacgtcttgattgccgctaacagtcaggggactatcaaggtgctagcgctgctctag

SEQ ID NO: 239207 - DNA, 2196 bp, synthetic construct
  misc_feature 1..2196: note = Description of Artificial Sequence: Synthetic coding sequence
  source 1..2196: mol_type = other DNA
atgtccggatcacgacaggcgggttcggggtccgccggaaccagtcccggttcttcagctgcctcaagtgttaccagtgcttccagtagtctcagcagtagcccgtctccaccttcagtcgctgtgtccgcagccgcacttgtctccggcggtgtcgcccaagccgcaggtagcggagggctgggaggcccagtaaggccagtcttggtggctccagcggtctccgggagtggtggcggagctgtgtccacagggctgtcacgccattcctgcgctgccagaccctccgcaggggtgggtggctccagttcatcccttggctccggcagtcggaaacgccctctgctggcacccctgtgcaatgggctcatcaacagctacgaagacaagtccaacgattttgtctgcccaatttgcttcgacatgattgaggaggcgtatatgacaaagtgcggacacagcttctgttataagtgcatacaccagtcattagaggacaataaccgctgtcctaagtgtaattacgtggtggacaacattgatcacctttaccccaactttcttgtaaatgagctcatactcaaacaaaaacagcggttcgaggagaagcggtttaagctcgatcattctgtgtcctcaacaaatggtcatcgctggcagatttttcaggactggctcggcactgaccaggataacctggacctggcaaacgtgaaccttatgctggaactcctagtgcagaagaagaagcaattagaggcagagtctcatgccgctcagttacagattttgatggagtttttaaaggtggcacgccgtaacaagcgggagcagcttgagcagatccaaaaggaactgtcagttttagaggaagacatcaagcgcgtggaggagatgtccggactctattcgccagtgagcgaggactctactgtgccccagtttgaagcccctagcccttctcactccagcattatcgactctacagaatattcccaacctccgggattctccggtagtagccagaccaagaaacagccctggtacaactctaccctcgcaagccgacggaaaaggctgacagctcatttcgaggatctggagcaatgttacttcagcacccgcatgagtcgaataagcgatgactcaaggacggctagtcagctggatgaatttcaagagtgtttgtcaaagttcactcggtacaattcagtgcgccctcttgctacactttcctatgcttctgatttgtataacggatcatccattgtgtccagtatcgagtttgaccgcgattgcgactatttcgcaattgccggagtgactaaaaagatcaaggtttacgaatacgacacggtgatccaagacgccgtggacatccattatcctgagaatgaaatgacttgtaactctaagatctcatgtatttcatggagtagctatcacaagaatctactggcttcgtcagactacgaggggacagtgatcctctgggatggattcacaggccagcgctctaaggtctaccaggaacatgaaaaacggtgctggagcgtggattttaacctcatggatccaaagctattggcgtcagggagtgacgacgccaaggtgaaattgtggtcgacgaacctggacaattccgttgcgagtattgaagcaaaggctaatgtatgctgcgtcaaattctctccgtccagtcgttaccatctggccttcggctgcgcggatcattgcgtccactattatgacctgcgcaacaccaaacagcccataatggtcttcaaaggacaccgaaaagcggtcagctacgctaagtttgtgtcaggggaggagattgtgtctgcttctaccgattcacaattgaaactctggaatgtgggaaagccatactgcctcagatccttcaagggccacattaatgagaagaacttcgttggacttgcctccaatggggactacatcgcctgcggatccgaaaataattcactatacttatattacaaggggctgagtaagacactgcttacattcaaattcgacacagtcaagtccgtgctggataaagaccggaaggaggatgacaccaacgagtttgtttccgccgtgtgctggcgggcattgcccgatggagagtccaatgtcctcatagccgctaactcacaggggacaatcaaggttttggagctcgtatag

SEQ ID NO: 239208 - DNA, 774 bp, synthetic construct
  misc_feature 1..774: note = Description of Artificial Sequence: Synthetic coding sequence
  source 1..774: mol_type = other DNA
atgtcaggttctcggcaagccggatctggatccgcaggcacatctcccggtagcagtgcagctagttccgtcacatccgccagcagcagtctgtccagcagcccctccccgccatccgtggccgtttctgcggctgcccttgtgagtgggggagtggcccaagctgcaggcagtggaggcctcgggggacctgtccgtcccgtcttggtggcacccgctgtcagtggatcaggaggaggggctgtctcaaccggcctgagtcggcactcctgtgcagctcggccaagcgcgggtgtgggcggaagctcatcctcactcggctccggcagtcgcaagcggccactcctggcacccctgtgtaacggcctgattaattcttacgaagacaagagtaacgactttgtgtgtcctatatgtttcgatatgattgaagaggcatatatgacaaaatgcggtcactccttttgttataaatgcatccaccaaagccttgaggataataatcggtgccctaagtgtaactatgtcgtcgataacatcgatcatctttaccctaactttctcgttaacgagctaatcttaaagcagaagcagcgcttcgaagaaaagcggtttaagctggatcattccgtatcttccactaatggtcatcgctggcagatatttcaagactggcttgggactgatcaggacaacttagatctggctaacgtgaatttaatgctcgagctgcttgtccagaagaataagaaaaagaaaaagaaaaagaaatag

SEQ ID NO: 239209 - DNA, 2325 bp, synthetic construct
  misc_feature 1..2325: note = Description of Artificial Sequence: Synthetic coding sequence
  source 1..2325: mol_type = other DNA
atggcccacgaggcaatggaatacgacgtacaggtgcaactgaaccacgcggaacagcaacctgctccagcaggaatggcatcaagtcagggcggtccagccctgcttcagcccgttcccgcagatgtggtgtccagccagggcgtcccctcgattttacagcccgcacccgctgaagtcattagctcacaggctactcctcctttactgcagcccgcaccccagctgtccgtcgacctgacagaggtcgaggtactcggtgaagataccgtagagaacatcaatcctcgcacatccgaacagcatcgccaaggcagcgatgggaatcatacaatacctgcttcaagtttgcactctatgaccaacttcatctccggtctgcaaagactccatgggatgctcgaattcctaaggccatccagtagtaatcactcagtcggtcccatgaggacaagaagacgcgtgtcagcctcacgcagagctcgagccggagggtctcagaggaccgactccgcccgtctccgggctccacttgatgcctatttccaggttagccggacccaaccggatcttccagccaccacctacgatagcgagaccagaaatccggtttccgaggaattgcaggtgagcagttcatcagattccgatagcgatagttcagcagagtatggcggagtggtcgaccaggccgaggaaagtggggctgttatcctcgaagagcaattggccggagtgtctgcagaacaggaggtgacatgcatagatggcggaaagacattgcccaaacagccatctcctcaaaagtcggagcctcttttgcctagcgcttctatggacgaggaggaaggggatacgtgtactatctgcctggaacagtggactaatgcaggcgaccatcgactaagcgcacttagatgcggacatttattcggatataggtgtatctcaacgtggttgaaaggtcaagtgaggaaatgcccacaatgtaacaagaaggccaggcattccgatatcgtcgtcctctacgccaggacactgcgggctctggacacatcagagcaggagagaatgaagtcatcattgcttaaggagcagatgctgaggaaacaggcggaattggaatctgcccagtgccgactccagcttcaggtgctaaccgataaatgtacgcgtcttcaacgtcgcgtgcaagatcttcaaaaactgacctcccatcagtcacagaacctgcagcagccacgtggtagccaagcctgggtcctgtcctgtagcccttcgtcccagggccagcacaagcacaaatatcacttccagaaaaccttcacagtttcacaggccggtaattgcaggataatggcctactgtgatgctctatcatgtttagtcatttcccagcctagccctcaagccagttttctacctggattcggtgtgaaaatgctgtcaactgccaatatgaagtcaagtcagtacatcccaatgcatgggaagcagataagaggtttagcgttttcttcctacctgagaggcctgttgctctcagcaagtctcgataacaccatcaaattgacctctctagagacgaacaccgtcgtccaaacatacaacgccggtagaccggtgtggtcctgctgctggtgtctggatgaggcaaactacatctatgccggactggcgaacggaagcatactcgtgtacgatgtacggaatactagctcccacgttcaggaactcgttgcacagaaggccaggtgccctctagtgtccctgtcttatatgcctcgagccgctagcgctgctttcccctacgggggagtgctggctggaacactcgaggacgcaagtttttgggaacaaaagatggacttcagccattggcctcatgttcttccactggaaccaggtggttgtattgacttccagaccgagaactctagcagacattgtctggtaacatatcgccctgacaaaaatcatactactatccgaagcgtattgatggagatgagttaccgtctggacgacaccggtaatccaatctgctcatgtcagcctgtgcatactttctttggaggccctacatgtaaattgctcaccaagaatgctattttccaaagccctgaaaacgacggcaatatactggtatgtacgggcgacgaggcagcaaatagtgccttactgtgggatgccgcaagtgggagcctgctacaggacctgcagacggatcaacctgtgctcgatatctgtcccttcgaagtgaaccgcaattcctatctcgctaccttgaccgaaaagatggtgcacatatacaagtgggaatag

SEQ ID NO: 239210 - DNA, 792 bp, synthetic construct
  misc_feature 1..792: note = Description of Artificial Sequence: Synthetic coding sequence
  source 1..792: mol_type = other DNA
atggcacacgaagcgatggagtatgacgtgcaggtgcagcttaatcatgctgagcagcagcccgcacccgctggtatggcttcctcgcagggaggcccagcactccttcagccagtgcctgctgacgtggtgtcaagccagggagtgccatctatcctgcaacccgctccggcagaggtaatcagcagccaggccactccgccactgctacagccagctccgcagctgagtgtcgatttgactgaagttgaggtgctgggagaggataccgtggagaacattaatcccaggacctcagagcagcataggcagggatccgacggaaatcacactatcccagcctcctccttgcattccatgcctcttgagccgggaggctgcatcgattttcagacagagaatagctcaaggcattgcctcgtgacatatcggccagacaaaaaccataccactatacggagcgtactcatggagatgtcctatagattagatgatactgggaacccaatttgcagctgccagcccgtacatactttcttcgggggacccacctgtaagctgttaacgaagaacgcaatttttcagagccctgagaatgatggtaacattctcgtatgtaccggcgatgaggccgctaattctgccctgctgtgggacgctgcttctgggtcactccttcaggacttgcagacagatcagcctgtcctggacatatgcccattcgaagtgaatcgtaattcttatctagccaccctgaccgaaaagatggtccacatatataagtgggaatag

SEQ ID NO: 239211 - DNA, 2058 bp, synthetic construct
  misc_feature 1..2058: note = Description of Artificial Sequence: Synthetic coding sequence
  source 1..2058: mol_type = other DNA
atgaatcaatcaaggtcacgctctgacggaggaagcgaggaaacgctcccccaggaccacaaccaccatgagaacgaaaggcgctggcagcaagagcggctacacagagaggaagcctactaccagttcattaatgaactgaatgacgaggactatagacttatgagagatcataatcttcttggcactccaggggaaattacgtctgaggaacttcagcagaggctggatggggtgaaagagcagctggcttcccaaccagacctgagggacggcaccaattatagagatagtgaagtgcccagagaaagctcccatgaagacagcttgctggagtggcttaacacctttcgacggactggaaacgcgacaagatctggccagaatggaaatcagacctggagagctgtttctagaaccaaccctaacaatggcgagttcagattctccctcgagatccacgtcaatcatgagaatagagggttcgagatccatggagaagattatactgacattccactttcggactccaacagggatcataccgctaaccgacagcagaggtctacctctcccgtcgctcgacgcacacgaagtcagaccagtgttaattttaacgggtcttcatctaacattcccagaaccaggctggctagccgagggcagaaccccgctgagggttcattttctaccttaggccgactgagaaatgggatcggtggggcagccggaatccctcgagcgaatgcctctaggaccaacttctccagtcacacgaaccagagcgggggtagtgaacttcgacagcgggaaggtcagcggtttggagctgcacatgtctgggagaacggggcaaggtcaaatgtgacagtgcgcaatactaatcagcgattggaacccatcaggctgaggtccacttccaactccagatcgaggtcgccgattcagagacaaagtggcaccgtttaccacaactcacagcgcgagagtaggccagttcagcagacaaccagaagaagcgtccgccgaaggggtagaacgcgggtcttcctcgaacaagaccgcgaacgagagaggcggggtaccgcatatacgcctttcagcaactctcgattggtgtctcgaattaccgtggaggagggcgaagagagttccagaagttccaccgctgtgcgaagacacccgaccatcacgctcgatcttcaagtgcgcagaataagaccgggagagaatcgggatagagattcaatagctaacaggacacgctcccgggttggactcgccgagaatacagtaactatcgagagcaattcaggaggttttaggcgtacaattagccgactggagcgaagtgggatcaggacctacgtgagcacaataactgtgccactgcgtcggatctccgagaatgagctggtcgaaccatcttctgtggccttgcggtctatcctgagacagataatgactggattcggcgagctcagctccctgatggaggctgatagcgagagcgaactccagagaaacggccagcatttgccagacatgcattctgagttgagcaacctgggcactgacaacaatcgttcacaacaccgagagggatcatcacaggatcggcaggctcagggggactccaccgaaatgcacggcgaaaacgagaccacacagccccacaccaggaattccgactcacgcggtggtagacaactgcgaaatccaaataacttggtggagaccggcacactgcccatccttagactcgcccacttttttcttctcaacgagagtgacgacgatgacagaatcaggggcctgaccaaagaacagatcgacaatttaagcactcgccactatgagcacaatagtatcgactccgagttgggcaaaatttgttctgtgtgcatcagcgattacgtaaccggtaacaaattaaggcaactcccttgtatgcacgagttccacattcattgtattgatcgctggctttctgaaaattgtacatgtccaatttgtaggcagccagtccttgggagcaatatcgcaaataatggatag

SEQ ID NO: 239212 - DNA, 2058 bp, synthetic construct
  misc_feature 1..2058: note = Description of Artificial Sequence: Synthetic coding sequence
  source 1..2058: mol_type = other DNA
atgaaccaatcgcgctcccggtcagacggcggtagtgaagaaaccttgccgcaagaccataaccatcatgagaatgagagaaggtggcagcaggagcgacttcatcgggaggaggcttactaccagtttatcaacgagctcaacgatgaagactatagactgatgagggaccacaatctgctagggacaccgggtgagatcaccagtgaggagctgcagcagaggcttgacggcgtgaaggagcagttggctagccaaccagacctgagggacggtactaactaccgagactctgaggtgcccagagagtcctcacacgaagattcgctattggagtggctgaatacatttagacgaaccggaaatgccaccagatcaggacagaatggaaatcagacctggcgtgccgtgagccgaacgaatccaaataacggagagttccggttctcactggagatacacgttaatcacgagaacagaggattcgagattcatggcgaagattacacagatattcccctgagcgatagcaaccgcgatcataccgccaatcgccagcaacggtcaacatctccagtcgctaggagaacacgatctcagacttctgtgaacttcaacgggagctcaagcaatatacccagaacacggttggcttctcggggacaaaatcctgccgaaggctcgttctccaccttgggacgactccggaatggcattgggggtgcggctggcataccaagagctaatgcttctaggaccaatttcagttctcacacaaaccagtctgggggatccgagctgagacagagagaaggtcagcgttttggagccgctcacgtgtgggagaatggagcgaggagcaacgtgacagtaaggaatactaaccagagactggaacccattcgcctaagaagcacatctaactcacgttcacggagtcccattcaaagacagtctggtacggtgtaccacaactcgcagcgagagtcccggcctgtgcagcagaccacgagacgatcagtgcggagaaggggcaggaccagagtttttttagagcaggatcgagagcgcgagcgacggggaacagcttacaccccattcagcaattcccggctggtcagccgaatcaccgttgaagagggagaagaaagcagccgttcctccacggctgttcggaggcaccctactataacattagatctgcaggtgcgcaggataaggccgggagagaatagggacagggattccatcgccaataggacccgctcacgggtgggactggcggaaaataccgttaccatcgaatcgaatagtggaggttttcgacgaacaatttctaggctggagagatctggcattaggacatatgtgagcacaatcaccgtgcccctccggcgaatatcggaaaatgaattggtcgagccaagtagcgtggctttacggagcatcctgagacaaatcatgactggctttggcgagctcagctcactgatggaagctgattctgaatctgaactgcagcgtaacggccagcacctgcctgacatgcactcagaactctcaaacttgggaactgacaacaacagatctcagcacagagagggatcgtcacaagataggcaggcccaaggtgatagcaccgaaatgcacggtgagaatgagacgactcagcctcatacccggaactcagacagtagaggcggacggcagcttcggaatcccaataacctggttgagacagggaccctgcccattctaaggctggctcatttttttctgctgaatgagtctgacgacgacgaccgcatacggggactgaccaaagagcagatcgacaatttgagcacccgacactatgagcacaactccatcgatagcgaactgggcaaaatctgcagcgtgtgcataagcgattacgtaacaggaaataaactacgccagttaccctgtatgcacgagttccacattcattgtatagaccgatggctgtccgagaactgcacctgtcctatttgtcgacaaccagtcctgggaagtaacattgcaaacaacggctag

SEQ ID NO: 239213 - DNA, 2058 bp, synthetic construct
  misc_feature 1..2058: note = Description of Artificial Sequence: Synthetic coding sequence
  source 1..2058: mol_type = other DNA
atgaatcagtctcgatccaggagcgacggagggtccgaggagaccttgccacaagaccacaaccatcatgaaaacgagcgcaggtggcagcaggagagattacaccgagaagaagcgtactaccagttcatcaatgagcttaacgacgaagactataggctgatgcgggatcataacctgctgggcaccccaggcgaaataaccagcgaagagttacaacaacgactggatggcgtgaaggagcagttggcctcgcagccagacctaagagacggaacgaattatcgcgattctgaggtccctagagagagctctcacgaggattctttgctggaatggctgaacacattcaggcggactggtaacgctacgcgcagtggccagaacggaaaccagacctggcgtgcggtatctaggaccaatcccaataacggtgagttcagattctcacttgagatacatgtaaaccacgaaaatcggggttttgagatccacggagaggactacaccgatatccccttgtccgactccaacagggatcataccgccaacagacagcagagaagcacgtccccagtggcgaggcgtacacggtctcaaaccagtgttaactttaacggctcttcaagcaacatccctcgtactcggctagccagtagaggacaaaaccctgcggagggcagcttttcaaccctagggcgattgagaaatggcataggcggagccgctggaattccacgcgcaaacgcatcaagaactaacttttcatcccatacaaatcagtccggaggtagtgaactccgacagcgagaagggcagaggttcggggcagcccacgtgtgggagaatggtgctcgtagcaatgtaacggtgcgcaacacaaatcaaagattggagccaattcgcctccgatctacctcgaatagccgaagccggtccccgattcaacgacagagcggcaccgtgtaccacaactcccaacgtgaaagccggcctgtgcagcagacaaccaggaggtcagtgcgaagaaggggcagaacacgcgtgttcctggagcaggatagagagagagagcggagaggtaccgcttacaccccattcagcaattcccgactcgtttcacggatcactgtcgaagagggggaggaaagctcacgatccagcaccgcggtacgcagacaccctactattacgctcgatcttcaggtacggagaattagaccaggcgaaaaccgcgatagagattccatcgccaatagaaccagatccagagtcgggctggcagagaatacggtgactatagagtctaactccggcggatttaggagaactataagccgcttagaacgctcagggatcaggacctacgtgtcaaccatcacagtgccactaaggcgaatctctgaaaacgagctcgttgagcccagctctgtggctctgagatccatccttaggcagatcatgaccggatttggcgaactcagctcacttatggaggccgactcggagtcagagctgcagagaaacgggcagcacttgcctgacatgcactcagagctgtcaaatctaggtactgacaacaaccggagtcagcatcgcgagggaagtagccaggacaggcaggctcagggtgattctacggagatgcacggcgagaacgagactacccagccacacactcgcaacagcgactcacggggaggcagacagctcagaaatcccaataacttggttgagacgggaactttgcctatcctaagacttgcgcacttttttcttttgaatgagtctgacgatgatgatcgcatccgtggtctgacgaaggaacagatcgataatctttctactagacactacgaacataactccatagacagcgagcttgggaagatatgtagcgtttgtattagtgactacgtgacaggtaataagttgcggcagcttccctgcatgcatgaattccatattcattgtattgacaggtggctgtctgaaaattgtacatgcccaatctgccgccagccagtgctgggaagcaatatagcgaataacggttag

SEQ ID NO: 239214 - DNA, 990 bp, synthetic construct
  misc_feature 1..990: note = Description of Artificial Sequence: Synthetic coding sequence
  source 1..990: mol_type = other DNA
atgcagctggaagtcgataagatggggacaaagctaggggaattgctcgtttcacgcatcactgtggaggagggagaagaatcctcgaggtcctccactgccgtcaggcgtcacccaactattacacttgatctgcaggttcgtcgaatccggcctggggaaaaccgcgatcgtgatagtattgccaacaggactcgctcaagggtggggctggccgagaatactgttacaatcgagagcaactcgggtgggtttcggagaaccattagccggctggagcggtcaggtatacggacctatgtctctactattaccgtgcctctaagaagaatctccgaaaatgagcttgttgagccttccagcgtggccctgagatccatacttcggcagattatgactggattcggtgagttaagttccttgatggaggctgattccgagtcagaactgcagcgcaatggacagcacctacctgacatgcactccgaactgtccaacctgggcacggacaacaacaggtcccagcatcgagaagggagctctcaggatagacaggcccagggtgacagcacggaaatgcacggcgaaaacgaaactacccagccccatactcgcaacagtgactctcggggagggagacagcttaggaacccaaacaacctggttgagactggtacattacccattttgagattggcgcattttttcttgctgaacgagtcagacgacgatgatcggatacggggtttgaccaaagagcagatagacaacttgtccactcgccattatgaacataattcaatagattctgaacttggaaagatttgtagtgtctgtatcagcgattacgtcaccggaaataaactacgacagctgccctgcatgcacgaattccacattcactgtatcgatagatggctgtccgagaactgcacgtgcccaatctgccgacaacctgtcttgggctccaacattgcaaataacggctag

SEQ ID NO: 239215 - DNA, 1221 bp, synthetic construct
  misc_feature 1..1221: note = Description of Artificial Sequence: Synthetic coding sequence
  source 1..1221: mol_type = other DNA
atgaccactccagctaacgcccaaaatgcatccaaaacatgggagctgtctttatatgaactgcatcgcacccctcaggaggcaatcatggatgggacagaaatagccgtcagcccaaggtctctccacagtgagctgatgtgtcctatatgtctcgatatgctcaaaaacactatgaccaccaaggagtgcctgcaccgattctgctctgactgcattgtcaccgctctgaggtcaggcaacaaggaatgtcccacctgcaggaaaaagctcgtcagcaaaaggagtctacggcctgatcctaattttgacgcccttataagtaaaatttatccttcccgtgaagagtatgaagctcaccaggacagagttctgatcagactgtccagactgcacaatcagcaggcactctcatcgtccatagaagagggccttcggatgcaggccatgcacagggcccagcgcgtacgcagacccattcccggatctgatcagacgaccactatgagcggtggggaaggggagccgggtgagggggaaggcgatggggaagacgtctcttccgacagtgctcccgattcggcacccggaccagcccctaagcgtccgaggggcggtggagcaggcggaagtagcgtgggcaccggaggcggtggaactggcggtgtcggaggcggagccggaagcgaggactctggcgatagggggggaacactgggcggagggaccctgggtcctccatcccccccaggagcaccttcccctcctgaacccggtggagagattgaactggtttttcggccacatcccttgttggtggaaaagggggagtactgccagaccaggtacgtgaaaacgacaggaaatgccaccgttgaccatctctccaagtatctggctcttcggattgccctggagagacgacagcagcaggaagccggagagcccggtggcccaggtgggggtgcgtctgataccggtgggcctgatgggtgcggcggagagggaggaggcgctgggggaggcgacggccctgaggagccagccttgccgtccctagaaggagtatctgaaaagcagtacacaatctacattgccccaggcggtggagcgttcaccacactcaatggaagcctcaccctggagttggtgaacgagaagttttggaaagtctcccgaccattggaattgtgctacgctccaaccaaagaccccaaatag

SEQ ID NO: 239216 - DNA, 1221 bp, synthetic construct
  misc_feature 1..1221: note = Description of Artificial Sequence: Synthetic coding sequence
  source 1..1221: mol_type = other DNA
atgactacccctgctaatgctcagaatgccagcaagacttgggaactttccctgtacgaactacacaggacgcctcaggaggcaatcatggatggcacagagatcgccgtgagcccgaggtcactacactctgagctcatgtgccctatatgtcttgatatgctaaaaaacaccatgaccactaaggagtgtctgcataggttttgctccgactgcattgttacggcattgcgaagcggcaataaggaatgtccaacatgtcgtaagaaactcgtcagcaagcgttccctgcggccagacccaaactttgacgcactaatttctaagatttacccatctagggaagaatacgaagcacaccaggacagggtattaatcagattgagcagattgcacaatcagcaggccctgagctcgagtattgaagaaggattgcggatgcaagcaatgcatcgcgctcagagggttcgaaggcctatcccaggttccgaccagacaaccactatgtctgggggagagggggaaccaggggaaggggaaggcgatggtgaggacgtatccagcgacagcgctccagattccgcccctggacctgctcctaagcgcccaagaggaggtggagccggtgggtcctccgttggcacaggtggcggaggtacaggaggggtgggtggaggggcaggcagtgaagacagcggagaccgcggagggacactcgggggaggtactctggggcctccatcaccccctggggcaccatctccccctgagcctggtggagaaatcgaactcgtatttaggccccacccacttcttgttgagaaaggcgagtattgccaaacgcgatacgttaaaacaacaggaaacgccacagtcgatcacctatccaagtaccttgctctacggatcgcacttgaaaggcgccaacagcaagaagctggtgaacctggaggacctggcggaggtgcaagcgacactggcggacccgatggatgcggtggtgagggaggcggtgctggagggggtgatgggccagaggaacctgcattgccctccctcgagggagtctcagagaaacaatatacaatctacatcgcccctggaggcggtgcctttacaacacttaatggaagcctgaccttggaactcgtcaatgaaaagttctggaaggtaagccgcccactggaactgtgctacgcacctacaaaagaccctaagtag

SEQ ID NO: 239217 - DNA, 1221 bp, synthetic construct
  misc_feature 1..1221: note = Description of Artificial Sequence: Synthetic coding sequence
  source 1..1221: mol_type = other DNA
atgactacccctgcgaacgcgcagaacgcaagtaaaacgtgggagctcagcctgtatgagttgcacagaacgccccaagaagccatcatggatggaacagaaattgcagtaagcccccgaagtttacacagcgagttaatgtgtcctatctgcctggacatgctgaaaaacactatgaccacaaaggagtgcttgcatagattctgctctgactgtatcgtcaccgccctcaggagtggcaataaagagtgtcccacatgccgaaagaaactggtgtctaaacgatctctgaggcccgatcctaactttgatgccctgattagcaaaatttacccttctcgtgaagagtacgaggcacatcaggacagggtacttataagactgagccgactgcataatcagcaggcccttagctcttctatcgaggaaggtctgaggatgcaggctatgcacagagctcagcgtgtccggagacctatccccggttccgaccagactactacaatgagcggcggagaaggcgagcctggggagggagagggggatggagaggacgtgagctccgattctgccccagactctgcgccagggcctgccccaaaacgcccacgtggaggtggcgctggaggttctagcgtgggaactggcggtggtggaaccggaggagttggtggcggagctggaagcgaggactccggggaccggggaggcaccctcggcggtggcacattaggcccaccttccccaccaggtgccccatccccgccagagccaggcggtgaaattgagctggtgtttagaccacacccacttctcgttgagaagggagaatattgccagacgcgctacgttaagacaacaggaaatgcaaccgtggatcacctgagtaagtacctagccctgaggatcgcgcttgaacggaggcagcagcaggaagcgggtgaacctgggggacccggtggcggagcctccgacacaggaggcccagatggatgcggcggagagggcggaggagcagggggaggtgacggccctgaagagccagctcttcctagtctggagggagtctccgaaaagcagtacactatatatattgcacccggtggcggtgccttcaccactctcaacgggtcgctgacactggaattggtgaatgagaagttttggaaggttagcaggcccctggagttgtgttacgctcctaccaaggacccaaaatag

SEQ ID NO: 239218 - DNA, 1221 bp, synthetic construct
  misc_feature 1..1221: note = Description of Artificial Sequence: Synthetic coding sequence
  source 1..1221: mol_type = other DNA
atgacaacaccagctaacgcccagaacgcgagcaagacttgggagctgtccctgtatgagctgcatcgaaccccccaggaagccattatggatggcaccgaaatagctgtgagtccgcgaagtctgcacagtgagttaatgtgtccaatttgcctggacatgctgaagaacaccatgaccacaaaggagtgtttgcaccgcttctgtagcgattgcatcgttactgccctgcgctccgggaataaagaatgccctacgtgtagaaagaagttggtgtccaaaaggagtttgcggccagatcccaacttcgacgccttgatatctaagatctatccttcccgcgaagagtacgaagcccaccaagacagggttctgatccgcctgtctcggctgcataaccaacaggcccttagtagctcaatagaggagggactcagaatgcaggccatgcaccgggcacaacgtgtcagacgaccaattccaggctcagatcagaccactacaatgtccggcggagagggagaaccaggcgagggcgagggggacggggaggatgtctcgagcgattcagcacctgacagcgccccaggaccagctcctaagcgacctcgcggtgggggtgcaggaggctcttccgtagggaccggcggtgggggaactgggggagtgggcggtggtgccggatcagaagacagtggcgatagaggcggaaccctcgggggaggcacattaggcccaccctctcctccaggcgctccctccccacctgaacccggaggcgagatcgaactcgttttccggccacacccccttcttgttgagaagggcgagtactgtcagacccggtatgtgaagacaaccggtaatgctacagtggatcacttatccaaatacttagccctccggattgccctggagcgcaggcaacagcaggaggccggtgagcccggaggacctgggggaggtgccagcgataccggcggacctgatggttgcgggggagagggtggaggggcaggtgggggagatgggccagaggaacccgctctgccttccctagagggggtgtccgagaaacagtacacgatctacattgcccctgggggtggggcatttactacactgaacggttccttgactctggagctcgtcaacgaaaaattttggaaagtctcacgccctctggagctctgctatgcacccaccaaggatcctaagtag

SEQ ID NO: 239219 - DNA, 1221 bp, synthetic construct
  misc_feature 1..1221: note = Description of Artificial Sequence: Synthetic coding sequence
  source 1..1221: mol_type = other DNA
atgaccaccccggcaaatgcccagaacgcctccaagacttgggagctgagcctatatgaattgcaccgcactccacaggaagccattatggacggaaccgagattgctgtgtccccaaggtcactgcactccgagctcatgtgccccatctgtttagacatgctgaagaatacaatgacgacaaaagaatgcctgcaccgcttctgctcagattgcatcgtgactgctctacgctccgggaataaggagtgtcctacctgtcgcaaaaaattggtcagtaagcgaagtctcagacctgaccccaatttcgatgccctcatcagcaagatctacccatctagggaggaatacgaggcccaccaggatcgtgttctgataagactgtcccgacttcacaatcagcaggctttgtcgtcctctatagaggagggactgaggatgcaggcaatgcatcgcgcacagagagtgcgcagaccgatacccggtagtgatcagactacgacgatgagcggtggcgaaggagagccaggcgagggggagggggacggggaggacgtgtccagcgattccgccccagacagcgccccaggtcccgcaccgaagaggcctaggggaggaggtgctgggggatcctccgtgggtacaggaggaggcggtaccggtggcgtgggaggcggagcgggatccgaggacagcggcgaccgcggtgggaccctgggcggaggtaccctgggcccacccagtccccctggcgctccatcaccgccagaaccaggcggagaaatcgagcttgtctttcgtccgcatcccctgctggtggaaaagggagagtactgtcaaacacgatatgtgaaaacaaccgggaacgctaccgtcgaccatttgtctaaatatttagccctgcggatagctcttgagcgccgacagcagcaggaagccggagaacccggtggtcctgggggtggagctagcgacacagggggtcctgatgggtgtgggggagagggtggtggcgcaggaggtggggatggcccagaagagcccgcactgccctcactggaaggagtctctgagaagcagtataccatctacatcgctccaggaggtggcgctttcacaactcttaacggcagcttgacccttgaactcgttaacgagaagttctggaaggtgtcaagacccctggagctctgttacgcacccacaaaagaccctaagtag

SEQ ID NO: 239220 - DNA, 1221 bp, synthetic construct
  misc_feature 1..1221: note = Description of Artificial Sequence: Synthetic coding sequence
  source 1..1221: mol_type = other DNA
atgactacccccgcaaacgcgcaaaatgccagcaagacctgggagctgagtctgtacgaactgcacaggactcctcaggaagcgatcatggacggtactgagatagccgtatcccctcggagtctgcactctgaactgatgtgtccaatctgcttggacatgctcaagaacaccatgactacaaaggaatgtctccacagattctgtagcgactgcatagtcacagccctaagatccggcaataaggagtgccccacatgtcgaaagaagctcgtgtccaagcgctctctgcgcccagacccaaactttgatgctctgatcagcaaaatttatccttcccgcgaggagtatgaagcacatcaggaccgggtgctcattcgactgagtagattgcataaccaacaagccctttctagctctatcgaagaagggctgcgtatgcaggctatgcatcgggcacagagagtgaggcgaccaatacccggttccgatcagaccacaacaatgtcaggcggagagggcgagcccggtgagggagagggagatggagaggacgttagttctgacagcgctcccgattccgctcctggacccgcaccaaaacgaccccgagggggtggagccggtggctcgagtgtgggcacgggcggaggaggcactgggggtgtgggcggaggagccggtagcgaagattctggcgatcgaggtggcaccctggggggtggcacgctaggtccaccgtcaccacccggtgcaccaagcccgccagaacccggaggagaaattgagttagtatttcgcccacatccacttctagttgagaaaggagaatactgtcagacgcgctacgtgaaaacgacaggaaacgctactgtcgatcacttgtctaagtacctggcattaaggatcgctcttgaaaggcgccagcaacaggaagctggagaacccggagggccaggaggcggagcttcggacaccggaggaccagacggttgtggcggagagggaggaggcgctggtggaggggatgggcctgaagagcctgccttgccttccctggagggggtttctgaaaagcagtacaccatctatattgcccctggtggcggtgcgttcacaacactgaatggcagtttaacactggagctggttaatgaaaaattctggaaggtgtcacgaccgctcgagctgtgttacgcccctacaaaagatcctaaatag

SEQ ID NO: 239221 - DNA, 465 bp, synthetic construct
  misc_feature 1..465: note = Description of Artificial Sequence: Synthetic coding sequence
  source 1..465: mol_type = other DNA
atgggaaattgcctgaaatcccccacctcagatgatatctccctgcttcacgagtctcagagtgaccgcgcatcctttggagaaggtacggagcccgaccaggaaccccctcccccatatcaggagcaggtaccagtgcccgtctatcatcccaccccatctcaaactcggcttgcgactcagctaacagaagaggagcagatccgtatcgcccagaggatcggccttatccagcacctccctaaaggagtgtatgatcccggacgggacggatctgaaaaaaaaattcgcgaatgtgtcatttgtatgatggacttcgtgtacggtgatccaattaggtttctgccatgcatgcacatttaccacctagattgtattgatgactggctgatgcggtcattcacctgtccgagctgtatggagcctgttgatgccgctctgctgtcctcgtacgagacgaactag

SEQ ID NO: 239222 - DNA, 1896 bp, synthetic construct
  misc_feature 1..1896: note = Description of Artificial Sequence: Synthetic coding sequence
  source 1..1896: mol_type = other DNA
atgcctcgcccagcgctgtccgtgacttctttctgtcacaggcttggcaagcgggaacgtaaacaaagttttatgggaaattctggaaacagctggtcgcacactcctttccctaaattggagctcggcttgggccctcagccaatggcaccaagagagctgcctacctgcagcatctgtctggagcggttgagggacccaatctctttggattgtggccatgacttttgtatccgttgtttctctacgcatcggctccctggatgcgaacccccttgctgtccagagtgccggaagatttgcaagcagaaacgtggcctccggtcactgggagaaaaaatgaaactccttcctcaacgaccactgcctcctgccctacaggaaacttgccccgtgcgagctgagccgttactgctagtgcggattaatgcatctggaggtctcatcctccggatgggagcaatcaatagatgtctcaagcatcccttggcacgggacacccctgtgtgtctgctggccgttttgggcgagcaacattctggcaaatcatttctgcttaaccacctgttacagggtctaccagggttggaaagcggggaggggggaagacctaggggcggagaagcgagcttgcaaggctgtcggtggggcgcaaacgggttagccagaggcatttggatgtggtcccatccttttctactcggcaaagagggaaagaaggtggccgtcttcctagtcgataccggggacgccatgtccccagagctatccagagaaaccagaataaaattgtgtgcactgacaaccatgctaagttcgtaccagattctctctacaagtcaggagctgaaggatacagatctcgattacctggagatgttcgtgcacgtggcggaggtgatgggaaagcattacggaatggtgccgatacagcacctggacctactggtgagagattcctctcaccctaacaaggccggtcaggggcatgtgggcaatatttttcagcggctctcaggaagataccccaaagtacaggagcttctccagggcaaacgtgccagatgctgtctactcccagcacccggtagacgacggatgaaccagggccatgcgtcgccaggagatacggatgacgatttccgacatttattgggtgcctatgtgtctgacgtgctgagcgcagccccacagcacgctaaatcccgctgtcagggctattggaatgaaggacgtgcagtcgcaagaggcgaccggcgactcctgacaggccagcaattagcgcaggaaattaaaaatcttagcggatggatgggaagaacaggtcccggttttacaagtcctgatgagatggccgcacagttacacgacctgcgcaaagtggaggctgcaaagagagagtttgaagaatacgtccggcaacaggacgtcgcaaccaagagaatcttttctgccctgcgcgttctgcccgacactatgcggaacttgttatctactcaaaaggacgccattctggctcgtcatggcgtcgctcttctgtgtaagggacgtgatcagacactggaggccctagaagcagagctccaggccacggcaaaggcttttatggacagctatacaatgcggttctgtggccatctcgccgcagtcggcggtgccgttggcgcaggactgatgggcttagcaggcggagtggtcggagccggaatggccgctgcggcactggctgccgaggccggtatggtggcagccggagccgctgtgggggctactggtgccgctgtcgtgggcggaggcgtgggcgcaggcctcgccgcaacagtcggctgcatggaaaaagaggaagatgagcgcctcctcgagggcgatagggagccgctcttgcaggaagagtag

SEQ ID NO: 239223 - DNA, 687 bp, synthetic construct
  misc_feature 1..687: note = Description of Artificial Sequence: Synthetic coding sequence
  source 1..687: mol_type = other DNA
atggccgcacaacagcgcgactgcggtggtgctgcgcagttggcagggcctgccgcagaagccgatccactgggcaggttcacttgtccagtgtgcttagaagtctatgaaaagccagtccaggttccctgcggccacgtattctgttcagcatgcctgcaggagtgcctgaagccaaaaaagccggtgtgtggcgtatgccgctccgccttggcgccaggcgtcagagcggtggagctcgagcggcagatcgagtctaccgagacctcttgtcacggatgtagaaaaaatttcttcctatcaaaaatcaggtcccatgtagctacatgcagtaaatatcaaaactatatcatggagggcgtgaaagctactatcaaggacgcgagcctgcaaccgagaaacgtgcctaaccggtatacgttcccttgtccatattgccccgaaaaaaatttcgaccaggaagggttagttgaacactgcaagctctttcactcaactgacacgaaatcagtggtttgtccaatttgcgctagcatgccatggggagatccgaactatcgctctgccaactttagagagcatattcagagaaggcacaggtttagctatgacacattcgtagactatgatgtcgatgaagaggacatgatgaatcaggtgcttcagcggtccatcatcgaccagtag

SEQ ID NO: 239224 - DNA, 576 bp, synthetic construct
  misc_feature 1..576: note = Description of Artificial Sequence: Synthetic coding sequence
  source 1..576: mol_type = other DNA
atggccgctcagcaacgcgactgcggtggggctgcacagctcgccggaccagcggctgaagccgatcctctcggcaggtttacatgtcctgtctgcctagaggtctatgagaaaccagtgcaggttccttgcgggcatgtgttttgctccgcctgtctgcaggaatgcctgaagcccaagaaacccgtttgcggggtgtgtcgctctgccctagcacccggagtgagggcggtggaactggaaagacaaatagaaagtacagagacaagctgtcacggctgccgcaagaatttctttttatccaagattcggtcccatgtcgcaacctgttcaaaatatcaaaactacatcatggaaggagtaaaggcaaccattaaagatgcttccttgcagccaaggaacgtgcctaataggtatacttttccctgtccatactgtcccgagaaaaatttcgatcaggaaggcctggtggagcattgtaagctgttccactccaccgataccaagtccgttacgtctgagcagagcccctgcctcctgagcgtgagctgctacagagctagtatcacctattag

SEQ ID NO: 239225 - DNA, 1287 bp, synthetic construct
  misc_feature 1..1287: note = Description of Artificial Sequence: Synthetic coding sequence
  source 1..1287: mol_type = other DNA
atgggacccccacccggagcgggagtgtcctgtagagggggttgtggattctccagactccttgcatggtgtttcctactcgccctctccccccaggccccaggcagccgcggagccgaggccgtgtggaccgcctacttaaatgtatcctggcgcgtgccccacacaggggttaaccgaaccgtatgggaactgtccgaagaaggagtctatggacaggactctcccctagaacccgttgctggggttctagtgccccctgatggcccaggagccttaaacgcctgtaaccctcatacaaactttacagtgccaactgtgtgggggagcaccgtgcaggtctcatggctggcccttatccaacggggagggggttgcactttcgctgacaagatccatctagcctacgagcgaggcgcaagtggcgcagtgatcttcaactttcccggtacccgaaacgaagtaatcccaatgagccaccctggcgcagtagacatcgtggctataatgatcgggaatctgaaagggacaaaaatcctccaaagcatccagagaggaattcaggtaactatggtgattgaggtggggaaaaagcatggcccttgggtcaatcattattcaatattctttgtttctgtgtcattcttcatcatcaccgctgctaccgtaggatacttcattttctacagcgctagaaggctgcggaatgcacgcgctcagtcgagaaagcagcggcagctgaaggctgacgctaagaaggccatcgggcgtctgcagctccgcacattgaagcagggagacaaagagattggcccagacggagactcctgcgccgtctgcatcgagctgtacaagcccaacgatctggttcggatactcacatgtaaccacattttccacaagacatgcgtggatccctggctgctcgaacataggacgtgtccaatgtgcaagtgtgatattcttaaagctttgggtatagaggttgacgtagaggatggtagcgtatccctgcaggttccggtgagtaacgagatcagtaactctgcttcttctcacgaagaggacaatcgatccgagaccgcctcttccgggtatgcttccgtgcaggggacagacgagccacctttggaagagcacgttcaatccaccaacgagtctctgcagcttgtgaaccacgaagctaattccgttgcggtggacgtcatcccccacgtcgacaacccaacattcgaagaggatgagacgccaaatcaggagaccgcggttcgagagattaagagttag

SEQ ID NO: 239226 - DNA, 1209 bp, synthetic construct
  misc_feature 1..1209: note = Description of Artificial Sequence: Synthetic coding sequence
  source 1..1209: mol_type = other DNA
atgaatcaggaaaacagatcgtcatttttctggttactagtcatctttacatttctacttaagattaccgcctctttttcaatgtctgcctacgtgactgtcacgtactataatgagacctcgaactacacggcaatcgagacatgcgaatgtggagtgtacggactggcgagcccagtggcgaatgccatgggcgtcgtggggatccctaagaacaacaactaccaggcgtgcgaccataacaccgaatttagcaacacaaaaaaaccctggatcgctcttatcgagaggggcaactgcaccttttccgaaaaaattcagacggccggtcgcagaaacgcagacgccgtggtgatttataatgcacctgagactggtaatcagacaatccaaatggcaaattttggcgctgttgacatagttgcgatcatgattggaaacctgaagggtactaaaatcctccagagcatacaaagaggaattcaagtgaccatggttattgaggtgggaaaaaagcacggtccatgggtcaaccactactctatctttttcgtctccgtttcctttttcatcatcactgctgctacagtgggttacttcatcttctattctgcgcgtagactgagaaacgcgagggcgcagtcccggaagcagcggcagctcaaggccgacgccaagaaggccatcggaagactccagctaaggacactaaaacaaggagacaaggaaatcggaccggacggagattcttgcgccgtttgcatagagttgtataaaccaaacgatctcgtccggatcctgacctgtaaccacatctttcacaagacctgtgtggatccgtggctgttagagcatagaacatgccctatgtgcaaatgcgatatcctaaaggcccttggaattgaggtggacgttgaggatggatccgtttccctccaagtcccagtgagtaacgagattagtaactcagcctcttctcatgaagaggacaatcgctccgagacagcgtcatctggatacgccagtgtccaagggaccgatgaaccccctctggaggaacacgtccagagcaccaatgagagcttgcagctggtgaatcatgaagctaacagtgtggctgtagacgttatcccccacgtggacaatcccacttttgaggaagacgaaactcctaaccaggaaactgctgtaagggagatcaagagttag

SEQ ID NO: 239227 - DNA, 750 bp, synthetic construct
  misc_feature 1..750: note = Description of Artificial Sequence: Synthetic coding sequence
  source 1..750: mol_type = other DNA
atgtccgcttacgtaactgttacctactacaacgaaacaagtaattatacagccatagagacctgtgaatgcggggtgtacggcctagcatctcctgtggccaatgcaatgggagtggtgggaattcccaaaaataacaactaccaggcatgtgatcataacacggagttctctaatactaagaagccctggatcgcgcttatagagcgaggcaattgcaccttttccgagaagatccagaccgccggtcggcgtaacgccgacgccgtggttatctacaacgcccctgagaccggaaaccagactatacaaatggcaaacttcggcgctgtcgatatcgtggcgatcatgatcgggaaccttaaaggcactaaaatcctgcagtccattcagcggggaattcaagtcactatggttattgaagtgggcaagaagcatgggccttgggtgaatcactatagcatctttttcgtgagtgtgtcattctttatcattacagccgcaactgtgggctattttatcttttattctgcacgccgactcagaaatgcacgcgcacagagccggaaacagcgccaactcaaggccgatgccaagaaggctatagggagattgcagctgaggacattaaagcagggtgataaggaaattgggcctgacggcgactcatgtgctgtctgtatcgaattgtacaagcccaatgaccttgtccggattttaacttgtaaccacatcttccacaaaacatag

SEQ ID NO: 239228 - DNA, 633 bp, synthetic construct
  misc_feature 1..633: note = Description of Artificial Sequence: Synthetic coding sequence
  source 1..633: mol_type = other DNA
atggcgggactgggattgggcagcgccgtgccagtgtggttggccgaggatgatctggggtgtattatctgtcagggtctcttggactggcccgctactttgccatgcggtcactctttttgccgacactgtctggaggctctttggggagcaagagatgccagaagatgggcttgcccaacttgtcgtcagggtgccgctcagcaaccacacttgcgcaaaaacacactcctgcaagacctggccgacaaatatcgcagggccgcacgggaaattcaggctggatccgaccctgcccattgcccttgccctggatcttcttcccttagcagtgccgctgctagacctcgaagacgtccggagttacagcgcgtcgcggtggagaagagcattactgaagtcgcacaggagcttacagagttagtggaacacttggtcgacattgtgagatcccttcagaatcagcggcctctcagcgagagtggtcccgacaatgaactctctatcctcgggaaggaaaattcgtggaaacctagactcccccctcatgcccattgcctgacacgcgcaacattgcactcaggagaacttctcggattattaagtgggccaagcatccagccactgacttag

SEQ ID NO: 239229 - DNA, 1299 bp, synthetic construct
  misc_feature 1..1299: note = Description of Artificial Sequence: Synthetic coding sequence
  source 1..1299: mol_type = other DNA
atggccggactaggattaggcagcgctgtaccggtttggctcgctgaggacgatctgggctgcatcatttgccagggtttactggactggccagctacactgccgtgcggacactcattctgcaggcattgcctggaggcactgtggggcgcaagagacgcccgaaggtgggcatgtcctacatgtcgtcagggggctgcccagcagccgcatctgagaaaaaatacactgttgcaggacctggcagacaagtatagacgcgctgccagggagattcaagctggctccgacccggcacactgcccttgccctggctcctccagccttagttctgccgctgcgcgtcccaggaggcgccctgaactacagcgagtggctgttgagaagtcaatcacagaggtcgcccaggaattgacagagctggtagagcacctggtggacatagttagatccctccagaatcagcgtcctctgagtgaaagtggacctgacaacgaattatcgatactgggtaaagcctttagttctggagtggacctctccatggcaagccccaaacttgtaacctccgataccgcagccggaaaaatccgggacatccttcatgacctcgaagagatccaggagaaattacaggaatcagtaacgtggaaagaagctccggaggctcagatgcagggcgagctgcttgaggccccttcctcttccagctgcccgctgcccgatcaatcacatccagccctacggagagcatctaggttcgctcaatgggcaatacatcccaccttcaatctgaaaagtctgtcatgtagcctggaagtgtcaaaagactcacgaacggtcacagtatcacaccggcctcagccttacagatggtcttgtgagcgattcagcacatcacaggttctttgctctcaggccctgtcttctggaaaacattattgggaggtggatacacgtaactgctctcattgggctgttggcgtcgcctcctgggaaatgtctagagatcaggtcctcggacggaccatggactcatgttgtgtagagtggaagggcacgagccagttgagcgcatggcacatggtcaaagagaccgttcttgggtctgacaggccgggagtcgtgggcatctggctgaatctggaggaagggaagctagccttctactctgtggataatcaggaaaaactgctgtacgagtgcacgatatccgcttcctcccccttatacccggctttttggctttacggcctgcaccctgggaactacctgattatcaagcaagtcaaagtgtag

SEQ ID NO: 239230 - DNA, 255 bp, synthetic construct
  misc_feature 1..255: note = Description of Artificial Sequence: Synthetic coding sequence
  source 1..255: mol_type = other DNA
tgaaaggaagcgcctgaagcacagatgcagggaagcctcttgccaaggctcgagtgctcagggacgataacagctgccagcattagccaggcccaggaaaactcctggaagccccgtctacctcctcacgctcactgcctcacacgcgctacgttgcacagtggtgagctgctgggcctgctgagtgttccccctcgcggagagcttatcgctaaagcaaaacaggttgagacccttgatccacgggctctgtag

SEQ ID NO: 239231 - DNA, 291 bp, synthetic construct
  misc_feature 1..291: note = Description of Artificial Sequence: Synthetic coding sequence
  source 1..291: mol_type = other DNA
gcacagcagccacatctgcgcaagaacaccctgctacaggatctcgctgacaaataccgcagggctgctagggagatccaggccggttccgaccccgctcattgcccatgtcctggaagtagctcactgtcatctgctgctgctcgccctagacgaaggccagaacttcagagagaaaactcatggaagccccgtctccccccacacgctcattgccttacccgagccacactgcatagtggcgagttgttgggcctgctttcgggaccaagcattcaacctctgacctag

SEQ ID NO: 239232 - DNA, 861 bp, synthetic construct
  misc_feature 1..861: note = Description of Artificial Sequence: Synthetic coding sequence
  source 1..861: mol_type = other DNA
atggccggtctgggcctcggtagtgccgtgcctgtatggctggccgaggatgaccttggctgtatcatttgccaaggtctcctcgactggcctgctacgctaccctgcggccactccttctgccgccactgcctggaagcactgtggggagcaagagacgccagaaggtgggcctgccctacctgtcgccagggggctgcccagcagccccacttgcgtaaaaacacacttctgcaagacctggcggacaaataccggagagccgctcgggaaattcaagccggaagcgaccctgctcactgtccatgtccaggctccagcagcctgagcagcgcggctgcgaggccaagacgccgtccggagctccaaagggtggctgtggagaaatccatcacagaggtggcgcaagagttgacggagctggtggagcatctggttgatattgtgcggtcactgcaaaatcaacgacccctgagcgagagcgggcctgataacgagctctctatcctgggcaaagcattctcctccggggtcgatcttagcatggccagccccaaactagtcacaagcgacaccgcagcaggcaagatccgcgatatcctccacgacctggaggaaatccaggagaagttgcaggaaagtgtgacgtggaaggaagccccagaagctcaaatgcagggcagcttgctgcctaggctcgaatgttctggaacgatcactgctgcttcgatttcgcaggcccaggagaacagttggaaaccacgactgcctcctcacgcacattgtctcactcgcgctacgttgcattcaggtgagcttctgggcctcctgagcggccctagtattcaaccgctgacttag

SEQ ID NO: 239233 - DNA, 756 bp, synthetic construct
  misc_feature 1..756: note = Description of Artificial Sequence: Synthetic coding sequence
  source 1..756: mol_type = other DNA
atggcaagccctaagcttgtcacctccgacactgccgcaggaaaaatccgcgacattctgcatgacctggaagagattcaggaaaagctccaagagtcggtgacctggaaggaagcccctgaagcccagatgcagggtgaactgttggaggctccttcatccagctcgtgtcccctaccagatcagtcccatcccgctctcagaagggccagcaggttcgcccagtgggccatacaccctaccttcaacctgaagtcactgtcatgcagtctggaggtgtcaaaagatagccgaacagtcacagtgtcacaccgcccacaaccttaccgctggtcatgtgagaggttcagcactagtcaggtgctttgttcacaggcattatctagtggaaaacactattgggaggtggacactaggaactgctcccattgggctgttggggtggccagctgggagatgtcacgcgatcaagtgcttggcagaacaatggactcgtgctgcgttgagtggaagggaacctctcagcttagcgcctggcacatggtgaaagagactgtcctgggctccgatagacccggagtagtgggaatctggctgaatctggaggagggcaaactcgctttctactccgtggataatcaggagaagctgctgtacgaatgtaccatttctgccagtagtcctttgtacccagccttctggctgtacggcctacaccctggcaactacctgataattaaacaggttaaagtgtag

SEQ ID NO: 239234 - DNA, 1995 bp, synthetic construct
  misc_feature 1..1995: note = Description of Artificial Sequence: Synthetic coding sequence
  source 1..1995: mol_type = other DNA
atggccgcagtcgggccacctcaacagcaggtgcggatggctcaccagcaggtctgggcagctctggaagtcgccttgagggtgccctgcctgtatattattgacgccatctttaattcatacccagattcatcacagtccagattttgtattgtgctgcaaatatttctgcggctcttcggggtgttcgccagctcgatagtcctcatcctttcccagaggtccctgtttaagttctacacgtattccagtgcattcctactggcagccacctcagtcctggtgaactactacgcatcactccacattgatttctacggggcatacaatacaagcgccttcggtatagaactccttcctcggaaaggccctagcttatggatggccctcatcgtgctgcagctcacatttggcatagggtatgttacactgctccagattcacagcatctattcgcagttgattatcttggatctgctcgtgccagtgattggattaattactgagctgcccctccacattcgggagactctcctgttcacttcttccctgattttgaccctgaataccgtgttcgtcctggcagttaagttgaaatggttctactatagcactcggtacgtctacttgcttgttcgccacatgtacagaatctacggactccagctgctgatggaggacacatggaagagaattaggtttccggatattctgcgagtgttttggctgaccagggtcaccgcgcaggctacagtgttaatgtacattcttcgtatggccaatgagactgacagcttttttatctcttgggatgacttttgggatctcatatgcaacttgatcattagtgggtgtgattcaactctgaccgtattgggaatgtccgccgtgatcagctccgtggcccactacttgggcctagggattctcgcattcattggttccactgaagaagatgataggcgtctggggtttgtggctccggtcctcttcttcattctagcattgcagacaggcctttcaggcctgcggccagaggagcggctgatccgtctgagccgcaatatgtgccttcttctgacagccgtgctgcattttatccacgggatgactgaccctgtgctgatgtccttgtccgcttcccacgtgtcctcattccgtagacacttccctgtgctgttcgttagcgcctgcttgtttatcctgcctgttctgctgtcctatgtgctctggcaccattatgccctgaacacatggcttttcgccgttacagcgttttgcgtagagctgtgccttaaggtgatcgtctctctgacagtatacacactgttcatgattgatggttactacaatgtcctttgggagaagctggatgattatgtgtactatgtcaggtcaactggctcgatcattgagtttatattcggagtggttatgtttggtaatggtgcatatacgatgatgtttgaatcaggttctaaaatcagagcattcatgatgtgccttcacgcatacttcaatatttatttacaggccaaaaacgggtggaagacattcatgaataggcgcacagctgtcaagaagattaactccttgccggaaatcaagggaagccgtctgcaggaaatcaatgatgtctgtgccatctgttaccatgaatttaccactagcgctcgaatcactccatgcaatcattactttcatgccctgtgtttacgcaagtggctgtatattcaggacacatgccctatgtgccaccagaaggtgtatattgaggacgacataaaagacaatagcaacgtatccaacaacaacggtttcatacccccaaacgagactcctgaagaggccgtacgagaggccgctgcagagtctgatcgggagctgaacgaagacgacagtaccgactgtgacgatgatgtgcaacgtgaacggaatggggttatccaacataccggggctgcagctgaagaattcaacgatgacactgactag

SEQ ID NO: 239235 - DNA, 1425 bp, synthetic construct
  misc_feature 1..1425: note = Description of Artificial Sequence: Synthetic coding sequence
  source 1..1425: mol_type = other DNA
atgtccagcgaagacagagaggcccaggaagacgaactgctggctttagcatccatctacgacggagatgagttcaggaaggcagagagcgtgcaaggcggagagactaggatctatctggatctgcctcagaacttcaaaatatttgtaagcggcaacagcaacgagtgtcttcagaactccggatttgagtacacaatttgtttcttaccgcctctggtacttaacttcgagcttcctcccgactacccctccagtagtcccccatccttcacactttcaggaaaatggctctcacccactcagctgtctgcgctctgtaagcatctcgataacctctgggaggagcaccgcggtagcgtcgttctcttcgcatggatgcagttcctaaaggaagaaactctggcctacctgaatattgtgagccccttcgagctcaagattggctcccagaagaaggtgcagagacggactgcccaggcatcccccaatacggagctggatttcggcggtgcagcaggcagcgatgtggatcaggaggagatagtggacgagagggctgtccaggacgtggaatctttgagtaatctgattcaggaaatcttggattttgatcaggcccagcagattaagtgtttcaacagcaaactctttctctgcagcatttgtttctgcgagaaactgggctcggagtgcatgtactttctcgagtgccgccacgtatactgcaaagcatgcctgaaagattatttcgagatacaaatccgagacggccaagtgcagtgtctgaattgtccggaacccaagtgccctagcgtggccactcctgggcaggttaaggagctcgtcgaggctgagctgtttgcaagatacgatcgtcttttactgcagtctagtctcgacctgatggcagacgtggtctattgtccgcgtccatgttgccagctcccagtgatgcaggaaccgggttgcaccatgggaatctgttcttcgtgcaactttgccttttgcacattgtgcagactgacataccacggtgtgagcccatgtaaagtgaccgctgaaaaattgatggatctgaggaacgagtacctgcaggctgacgaagccaacaaacgactgctggaccaacgatacggaaaaagggtcattcagaaggcacttgaagagatggaatcaaaggagtggctggagaaaaatagtaaatcctgtccctgctgtggtacacctattgaaaagctcgacggctgcaacaaaatgacctgcactggatgtatgcagtatttttgctggatctgtatgggtagtctgagtagagccaacccttacaagcacttcaacgacccagggtccccatgcttcaatcggcttttttacgccgttgatgtagacgatgatatctgggaagacgaggtggaggactag

SEQ ID NO: 239236 - DNA, 1425 bp, synthetic construct
  misc_feature 1..1425: note = Description of Artificial Sequence: Synthetic coding sequence
  source 1..1425: mol_type = other DNA
atgtcttctgaggatcgtgaggcacaggaggacgaactgttagctcttgcctcgatctacgacggcgacgagttccgaaaggccgagagcgtacagggaggcgaaaccagaatctacctggatctgcctcagaacttcaagatattcgtgagcggcaacagtaatgaatgtctccagaactctgggttcgagtatacaatatgcttcctcccccctctagtgctcaactttgagctaccgccagattatccttcttcaagtcctccctctttcaccttatctggtaagtggctgagcccgacacagctgagtgcactgtgtaaacacttagataatctttgggaggaacacaggggcagcgtcgttctcttcgcctggatgcagtttctgaaggaagaaacgctggcttatcttaacattgttagcccatttgagctcaagattggatctcaaaaaaaggtgcaacgccgtaccgcacaggcttcccccaatactgaacttgacttcggcggtgcagctggatctgatgttgatcaagaagaaattgtggacgagagggccgtccaggacgtggaaagtcttagcaacctgattcaggagattcttgactttgaccaagcacagcagattaaatgcttcaatagcaaacttttcctgtgttctatctgcttttgcgagaagcttggatctgaatgcatgtattttctcgaatgcaggcatgtgtactgtaaggcctgtctgaaggactactttgagatccagatccgtgacgggcaggtccaatgcctgaattgccccgaacctaagtgtccatcagtggctacacctggccaagtgaaagagctagtggaagcagagctgtttgcgaggtatgatcgtcttttgttgcaatctagcctcgacctgatggccgacgtggtttattgtcccaggccctgttgtcaactgcccgtaatgcaagaacctgggtgcaccatgggaatatgctcttcttgcaactttgctttttgtaccttgtgtcgactcacctaccatggagtgtccccatgtaaggttacagccgaaaaattgatggacctgagaaatgagtacctgcaggccgacgaagcaaacaaaagactcttggaccaaagatatggaaaacgtgtgatacagaaggccctggaggaaatggagagtaaggaatggttagaaaaaaacagcaaaagctgcccctgttgtgggactcccattgagaaacttgatgggtgtaacaagatgacctgcaccggttgtatgcagtacttttgttggatatgtatgggatccctctctcgtgccaacccatacaagcatttcaatgaccccggaagcccatgctttaatcggttattctacgctgtcgacgtcgatgacgatatctgggaggatgaagttgaggactag

SEQ ID NO: 239237 - DNA, 1047 bp, synthetic construct
  misc_feature 1..1047: note = Description of Artificial Sequence: Synthetic coding sequence
  source 1..1047: mol_type = other DNA
atgcagttcttgaaggaggaaacactggcttatctgaatatcgtaagtccctttgaactcaaaattggtagccagaaaaaagtccaacggcgaacagcgcaagcatcaccaaacacagagttggatttcgggggagccgcaggatccgatgtggatcaggaagagatcgttgacgagagagcagtccaggacgtcgagtctctaagtaacctgattcaggaaatactcgatttcgaccaggcccagcaaatcaaatgttttaatagtaaactgttcctctgtagcatttgtttttgtgaaaagctgggctcagaatgtatgtactttctagaatgccggcatgtctactgcaaagcttgcttaaaagactactttgagattcagattcgggacggacaggtgcaatgcttgaactgccctgagcccaagtgcccctcagtggccactcccggtcaagtgaaggagctggtcgaggccgagttattcgcaagatacgataggcttctactgcagtcatcactagatctgatggctgatgttgtgtattgtcctcggccatgttgccagttacctgtcatgcaagagcctggatgtaccatgggtatttgcagctcttgtaacttcgctttctgtaccctttgtaggctcacctaccatggggtctcaccatgcaaggtgaccgccgagaagctaatggatctgagaaacgagtatttgcaggctgacgaggctaacaagagactgctggatcagcgatacggcaaaagggtgatccagaaggctttggaagaaatggagtccaaagagtggctggagaagaacagcaagtcatgtccatgttgcggaacccctatcgaaaaacttgacggttgcaataagatgacatgcaccggatgtatgcagtatttttgctggatctgtatggggtcactgagtagagctaatccatacaagcactttaacgatcccggttccccatgttttaatcgcctgttttacgccgttgacgtggatgacgacatttgggaggacgaggttgaagactag

SEQ ID NO: 239238 - DNA, 897 bp, synthetic construct
  misc_feature 1..897: note = Description of Artificial Sequence: Synthetic coding sequence
  source 1..897: mol_type = other DNA
atgagcagtgaggatagagaagcccaagaagatgaactgctggcgctggctagcatttatgacggcgatgaattccggaaggccgagtcagtgcagggaggggaaacgcggatttatctggatctgccacagaattttaagatattcgtcagcgggaacagtaatgaatgtctacaaaacagcggcttcgagtacacgatatgctttctccctccactggtcctcaattttgaactgcctcccgactatccttcctcctcgccacctagtttcacactgtcagggaaatggctgtcgcctacacaagtgaaggaactcgttgaagctgaattgtttgctcgctatgaccgcctgctactgcaaagtagtctggacctaatggcagatgtagtgtactgtcccagaccatgttgtcaactgccagttatgcaagagcctgggtgcaccatgggaatctgttctagttgtaattttgccttctgcacgttgtgccggctgacatatcacggagtgagcccctgcaaagttaccgccgagaaactgatggatctgcgaaatgagtatctccaggcagacgaggccaataaacggctgctcgatcaaagatacgggaaacgggtgatccagaaggccctggaagagatggagtcaaaagagtggttggagaagaacagcaagagctgcccctgctgcggaacccccattgagaagctggatggatgtaacaaaatgacttgcactggatgtatgcaatacttttgctggatctgcatgggcagcttatctcgcgctaatccatacaaacacttcaatgacccgggatccccgtgtttcaatcgtctgttttacgccgtggatgttgatgacgatatttgggaggacgaagtcgaagactag

SEQ ID NO: 239239 - DNA, 1425 bp, synthetic construct
  misc_feature 1..1425: note = Description of Artificial Sequence: Synthetic coding sequence
  source 1..1425: mol_type = other DNA
atgtccagtgaggacagggaagcccaggaagacgaactgctggcccttgctagcatctacgacggagacgaattccgcaaggctgagtctgtacagggaggggagacacgcatatacctcgaccttcctcaaaattttaagatcttcgtgtcggggaacagcaacgaatgcctgcagaatagcggcttcgagtacaccatttgttttctccctcccctagtgcttaatttcgagctgcctccggactacccaagctcttcccccccttctttcacactgtccgggaaatggctgtctcctacacagcttagtgcattatgcaagcatctggacaatctttgggaggagcaccgcggaagcgtggtgctgtttgcatggatgcaatttctcaaagaagaaactcttgcttacctaaacattgtctctccctttgaactgaagataggatctcagaaaaaagtccagcgaagaaccgcccaggcatctcccaacaccgaactagatttcggcggtgctgcaggctccgatgtcgaccaggaggagatagtcgacgagcgggctgttcaggatgtggagagcctgagcaatctgatccaggagatcctggacttcgaccaagctcagcagatcaagtgcttcaattcgaaactgtttctgtgttcgatatgcttttgcgagaagcttgggtcagaatgtatgtattttctggagtgtcggcatgtttactgtaaggcatgcttaaaagactattttgagatacaaattcgagacggacaagttcagtgcctgaactgtcctgagcccaagtgtccctcagtggctaccccaggacaagttaaggagctggtagaggccgagttgttcgctcgctatgatcggctgctcctccaaagttcacttgatctgatggccgatgtggtgtattgccctagaccctgctgtcagctgcctgtcatgcaagaacctggctgcacgatgggtatatgctccagttgtaacttcgctttttgcactttgtgccggctaacataccacggtgtctcaccttgtaaggtgacagccgaaaagctgatggatctgcgaaacgagtacttgcaggcagatgaggccaacaagcgtttgcttgaccaaagatacggcaaaagggtaattcagaaagcactggaagagatggaatctaaggagtggttagaaaaaaacagcaagagctgtccctgctgtggtacccctatcgaaaagttagacgggtgtaacaagatgacatgcactgggtgcatgcagtatttctgctggatctgtatgggaagtttgagcagggctaacccttacaagcatttcaatgacccaggcagtccctgctttaatcgccttttctacgccgtggacgtggacgatgatatttgggaagacgaagttgaggattag

SEQ ID NO: 239240 - DNA, 1425 bp, synthetic construct
  misc_feature 1..1425: note = Description of Artificial Sequence: Synthetic coding sequence
  source 1..1425: mol_type = other DNA
atgtcatcagaagaccgagaggctcaggaagatgagttactggcgctggccagtatttatgatggcgacgagtttcggaaggcagagtctgtccagggaggcgaaacccgtatctaccttgacctaccacagaacttcaaaattttcgtgtcaggaaattcaaatgaatgccttcagaattccggcttcgagtataccatttgcttccttcctcccctcgtgttaaacttcgaattgcccccagattacccctcgtccagccccccatcattcactttgtctggtaaatggctttccccaacgcagctgtctgcgctgtgcaagcatctggataatttatgggaggagcatagaggttccgtggtcctgtttgcatggatgcaattccttaaggaagagacgctggcgtatctgaacatagtctctccgtttgaattaaagattggaagccagaagaaagtgcagaggaggacggcccaggccagtccaaatacggagcttgatttcgggggagccgcaggttcagatgtcgatcaggaagagattgtggacgaacgagccgtccaggatgtcgagagcctctcaaatctgatccaggaaatccttgactttgaccaagcacagcagatcaagtgctttaacagcaagttattcctgtgttcaatctgtttttgtgagaagcttggctcagagtgtatgtatttcttagaatgtagacacgtttactgcaaggcatgcttgaaagactatttcgagattcaaattcgcgacggacaggttcagtgcctgaactgtccggaacccaaatgtccatccgtggccactcctggacaggtgaaggaattggttgaggcagagctgtttgccaggtatgaccgtttactgcttcagtccagcctggatttaatggccgacgttgtctactgtccacgcccttgttgccagctgccagtgatgcaggaaccgggttgcaccatgggaatttgttcctcttgcaacttcgctttttgtactctgtgccgactgacataccacggggtgtctccctgcaaagtgaccgccgagaagctgatggacttgcgaaacgaatacctgcaggctgatgaagctaacaagaggttacttgatcagcgctacggtaaacgggtgatccagaaggccctggaggaaatggagtccaaagagtggcttgaaaagaacagcaagagttgtccctgctgcggaacccctatagagaaactggatggatgcaacaaaatgacctgcaccggctgtatgcagtacttttgttggatatgcatgggaagcctgagcagggccaatccttataagcactttaacgatccaggatccccatgtttcaatcggttgttctacgccgttgatgtagatgacgacatctgggaagatgaagtggaggactag

SEQ ID NO: 239241 - DNA, 48 bp, synthetic construct
  misc_feature 1..48: note = Description of Artificial Sequence: Synthetic coding sequence
  source 1..48: mol_type = other DNA
atgtcgtccgaggatagagaggctcaagaggatgagctgctggcctag

SEQ ID NO: 239242 - DNA, 399 bp, synthetic construct
  misc_feature 1..399: note = Description of Artificial Sequence: Synthetic coding sequence
  source 1..399: mol_type = other DNA
atgtcctccgaggatcgggaggctcaggaggatgagttgttggctctagcctctatttatgacggtgatgaatttcggaaggctgaatctgtgcagggcggagaaactagaatttacctggatctacctcaaaacttcaagatttttgtgtccggcaattccaatgaatgcctccagaactccggcttcgagtacacaatttgcttcctgcctcctttggtactgaattttgaactcccccctgattaccctagttcatccccaccctcatttacacttagcggaaagtggctgtcacctacccaactgtccgccctctgcaagcacttggataatctatgggaagagcatcgaggctcagttgttttgtttgcctggatgcagttcttaaaggaatag

SEQ ID NO: 239243 - DNA, 516 bp, synthetic construct
  misc_feature 1..516: note = Description of Artificial Sequence: Synthetic coding sequence
  source 1..516: mol_type = other DNA
atgagttctgaggatagagaagcccaggaggacgagttgctggctctggcctccatttatgacggcgacgagttccggaaagctgagagcgtgcaaggcggagaaacaaggatttacctcgatctgccccagaatttcaagattttcgtgagcgggaattccaatgagtgccttcagaattctgggtttgagtacaccatctgcttccttccccctcttgtgctgaactttgaactgcctcccgattatcctagttcaagcccgccttcttttaccttgagtgggaaatggctgtcgcccacccaactgagcgccctatgcaaacatctggacaacttgtgggaagagcatcgcggatctgtggtgctattcgcctggatgcaatttctgaaagaggagaccttggcatatctgaatatagtcagcccttttgagcttaagatcggctctcagaaaaaggtgcagaggcgtactgctcaggcatctcccaatacagagctcgatttcggcggttag

SEQ ID NO: 239244 - DNA, 558 bp, synthetic construct
  misc_feature 1..558: note = Description of Artificial Sequence: Synthetic coding sequence
  source 1..558: mol_type = other DNA
atgagcagcgaggatcgtgaagctcaagaagatgagctattagcactcgcatccatctatgacggagatgaatttcgaaaagccgagtctgtgcagggtggagaaactcggatctacctggacctgccccaaaacttcaaaattttcgtgagcggaaatagcaacgagtgtctgcagaactctggcttcgaatatacaatttgctttctgccacctctggtcctcaactttgagttaccacctgattacccatccagctccccgccttcttttacactctccggcaagtggctgtcaccaacccagcttagcgccctctgcaagcaccttgataatctgtgggaggaacacagaggatctgttgtgttgtttgcttggatgcagtttctcaaggaagagaccctggcctacctgaatattgtctcccccttcgaactcaaaattggcagtcagaagaaggtgcagcgcaggaccgcacaagccagtcccaatactgaactcgacttcggcggagcggcaggctccgatgtggatcaggaagagattgtcgatgaatag

SEQ ID NO: 239245 - DNA, 186 bp, synthetic construct
  misc_feature 1..186: note = Description of Artificial Sequence: Synthetic coding sequence
  source 1..186: mol_type = other DNA
atgagttcagaggatagagaagcacaggaggatgagctactcgcactggcatcgatatacgacggagacgaattcaggaaggctgaaagtgtacagggaggggaaacaaggatatacttagatttgccccaaaattttaaaatcttcgtgtcaggcaatagtaacgagtgcctgcaaaattcatag

SEQ ID NO: 239246 - DNA, 837 bp, synthetic construct
  misc_feature 1..837: note = Description of Artificial Sequence: Synthetic coding sequence
  source 1..837: mol_type = other DNA
atgagttccgaagacagggaagcccaagaggatgagctgctggccttggcgtcaatttatgatggagatgagttccgcaaggccgagtccgtacaggggggagagactcggatataccttgatttaccccagaattttaagatcttcgtaagcgggaattccaacgagtgtctccagaactctggttttgaatacaccatctgcttcttacctccattagtgttaaattttgagctaccaccagactatcccagttccagtcctccctccttcactctgtctggcaagtggttaagtcccactcaactgagtgccctgtgtaaacacctcgataatctgtgggaggagcatcgtggttctgtggtcctgttcgcatggatgcagtttttaaaagaagaaactctggcctatctgaatatcgtgtctcctttcgaactcaagatcggatcccagaagaaagtgcagagaaggaccgcacaagccagccctaacactgaacttgatttcggaggagccgctgggtctgacgttgaccaggaggaaattgtcgatgaacgagccgtccaggacgttgagagcctctcaaacctgattcaggaaatcttggatttcgaccaagcacagcaaataaagtgctttaactccaaacttttcctgtgttcaatctgcttctgcgaaaagctgggcagcgagtgcatgtatttcctcgaatgccggcatgtttactgtaaggcctgtttgaaggattatttcgagatccagatccgggacgggcaggttcagtgtttgaactgtcccgagcctaagtgtccctcagtcgctacacccggtcaatag

SEQ ID NO: 239247 - DNA, 300 bp, synthetic construct
  misc_feature 1..300: note = Description of Artificial Sequence: Synthetic coding sequence
  source 1..300: mol_type = other DNA
atgtcgtcagaagacagagaggcccaggaggatgaactgttggcacttgcttccatctacgacggagacgaattcaggaaagcagaaagcgttcaagggggagaaaccagaatatatttggacctaccccagaatttcaaaatattcgtctccggcaactctaatgaatgcttgcaaaactcaggatttgaatataccatctgcttcttgccccctttggtgctgaactttgagctcccccctgattacccgtcttcctcccctccctccttcaccctctctgggaagtggctgagctag

SEQ ID NO: 239248 - DNA, 516 bp, synthetic construct
  misc_feature 1..516: note = Description of Artificial Sequence: Synthetic coding sequence
  source 1..516: mol_type = other DNA
atgtcgtcagaagaccgtgaagctcaggaggatgagctgttggcactagcgagcatctacgacggagacgagtttcggaaagccgagtcagtccaagggggagagacacggatctatttggacttacctcagaacttcaagatcttcgtttcggagaaactaatggacttgagaaacgagtatttgcaggccgacgaagcgaacaagcggctcttagaccagcgatatgggaaacgagtaatccagaaggcgctggaggaaatggagagtaaggaatggttggaaaaaaatagtaagtcctgtccgtgttgcggaactccaatagaaaagctcgacggatgcaacaagatgacttgtacaggatgcatgcagtacttttgttggatttgtatgggtagcctgagccgtgcaaacccgtataagcacttcaacgaccccggaagcccctgcttcaaccggttgttctacgctgtggacgtggatgacgacatctgggaggatgaagtggaagactag

SEQ ID NO: 239249 - DNA, 1077 bp, synthetic construct
  misc_feature 1..1077: note = Description of Artificial Sequence: Synthetic coding sequence
  source 1..1077: mol_type = other DNA
atggctggctgcggtgagattgatcactctatcaacatgctgcccaccaacaggaaggctaacgagtcatgctccaatactgcgccatccctcacagttcccgagtgtgccatctgtttacagacctgtgtgcaccctgtctctctgccctgtaagcacgtgttctgttatctctgcgtgaaaggcgcatcctggctcggcaagcgatgcgcgctgtgtaggcaggaaatcccagaagattttctcgacaagccaaccctgctgagtccagaagagctgaaggctgccagccggggaaacggcgaatatgcgtggtactacgaaggcaggaatggatggtggcagtacgatgaacgcacatcaagagaacttgaggacgctttctctaaagggaagaaaaacacggagatgctgattgccggatttctgtatgtggcagacctggagaacatggtccaatacagaagaaacgaacacggccgaagacgcaagatcaaaagagacataattgatatcccgaagaaaggcgtcgccggtctccgattggactgcgacgccaatacagttaatctggcccgagaaagctccgcggatggggcagactccgtgtctgcgcaaagcggagcaagcgttcagcccctcgtcagttctgtgagaccactgacatcagtggacgggcagttgacttcaccagctacccctagtcccgacgcttccaccagcctggaggattctttcgctcatctgcaactttctggggataacacagctgagcgcagccaccgaggcgagggcgaggaagaccacgagtcccccagctctgggagggtgcctgcccctgacactagcatcgaagaaacagagtccgatgcttcttctgactccgaggatgtgtcagctgttgttgcccagcatagcctcacacaacagaggctgctagtgtcaaatgctaatcagacagttcccgatagatccgacagatccggaaccgatagatcagtcgctgggggtggcactgtcagcgttagtgttcggtctcgcagacccgatggccaatgcacggtcactgaggtctag

SEQ ID NO: 239250 - DNA, 1077 bp, synthetic construct
  misc_feature 1..1077: note = Description of Artificial Sequence: Synthetic coding sequence
  source 1..1077: mol_type = other DNA
atggccggatgcggcgagatcgaccactcaattaacatgctgcccaccaataggaaggcaaacgaatcttgctccaatacggcgccatcccttactgtaccagagtgcgcaatatgcctgcagacctgcgtgcaccccgtgtcactcccgtgcaaacatgtgttttgctacctctgtgttaaaggcgcatcctggcttggtaaaagatgcgccttgtgtcgccaggaaatacctgaagacttcctggataagcccaccctcctgtcccccgaggagctgaaggcagctagtcgaggcaatggagagtacgcctggtactatgagggacgtaatggatggtggcagtatgatgagaggactagcagagagctggaagacgctttctcgaagggaaagaaaaatactgagatgcttattgccggatttctgtatgtggccgatctggaaaacatggtccagtaccggagaaacgagcacgggcgaagaagaaagattaaacgcgatatcattgatattccaaaaaaaggagtcgcgggtttgcgcctggattgcgatgcaaacacagtgaatctggccagagaatctagcgctgatggtgctgatagcgtgtcagcacaaagtggagccagtgtccagcccctggtgtcatctgttaggccccttacttcagtcgacggccagttgactagccccgctaccccttcacctgatgcttcgactagccttgaggacagcttcgcacacctgcagctgtcgggcgataacaccgctgagagatcccataggggggaaggagaggaggatcatgaatctcccagttccgggagggttcccgctcccgacacctccatagaggagaccgaaagcgacgcttcctctgactctgaagatgtgtccgccgtcgttgcacaacattcactaacacagcaacgcctcctcgtctccaacgcaaaccagaccgttcctgataggagcgaccgctctgggaccgatcgctcagtggccggtggcggtacagtgagcgtctccgtcaggtcccgacgcccagacggacagtgcactgttaccgaagtgtag

SEQ ID NO: 239251 - DNA, 1080 bp, synthetic construct
  misc_feature 1..1080: note = Description of Artificial Sequence: Synthetic coding sequence
  source 1..1080: mol_type = other DNA
atgatggccggatgcggggagattgatcattcaatcaacatgttgcctaccaatcggaaggcgaacgaatcgtgtagcaatacggccccatcccttaccgtaccagagtgcgccatatgtctccaaacctgcgttcaccccgtgagtctcccttgtaaacatgtgttctgttacctgtgtgtgaaaggcgctagctggcttgggaagagatgtgccctttgccgccaagaaatacctgaggactttttggacaagcccacacttctcagcccagaggaactgaaggccgcaagtaggggaaatggcgagtacgcctggtactacgaaggtcgaaacggttggtggcagtatgacgagcggaccagccgggaattggaagacgcattcagtaaggggaaaaagaacacggaaatgctcattgccggatttctgtacgtggcggacttagagaatatggtgcaatacagaaggaatgagcacggacggaggcgcaaaatcaaaagagatataatcgacatacccaaaaaaggggtggctgggctgaggttggactgcgatgccaatacggtaaaccttgctcgggagagttccgctgacggcgcagactccgttagtgctcagtccggagccagtgtgcagccgctagtttcgtccgtgcgccctttaacttctgtggacgggcagctgacctcaccagccactccgtcccctgacgcgtccacaagtctggaagatagcttcgcacaccttcagctgtccggcgataataccgctgagcgatcccacagaggcgaaggggaggaggaccacgaatctccatcctccggacgtgttccagcaccagacacatcaatagaggagacagagagcgatgcgtcatcagacagtgaagacgtctctgcagtggttgcacagcactctctgacccagcagcggctcctggtcagcaatgccaatcagactgttcccgaccggagcgatagatctgggacagatagaagtgtggccggaggaggaaccgtaagtgtctctgtgaggtccaggcggccagacggtcagtgcactgtaaccgaggtatag

SEQ ID NO: 239252 - DNA, 1716 bp, synthetic construct
  misc_feature 1..1716: note = Description of Artificial Sequence: Synthetic coding sequence
  source 1..1716: mol_type = other DNA
atggcgctgcccaaggatgcaattcccagtctcagtgaatgccagtgcgggatttgcatggagatcctcgtagaacccgtcactctgccttgcaatcatacgctgtgcaagccctgttttcagtctacggtagagaaggccagtctgtgttgtcccttctgccgtagacgcgtgtcatcttggacacggtaccacacgagaaggaatagcttagtgaatgtcgagttatggacgatcattcaaaaacactacccacgcgagtgtaagctacgtgcttcgggccaggaaagtgaggaagtggcggatgactatcagcccgtcagacttctctccaaaccaggcgaactgcgccgagaatacgaggaagagatcagcaaagtggccgcagaaagacgggctagcgaagaggaagaaaataaggcctcagaggaatatattcaacggctcctggcagaggaagaggaagaggagaaaagacaggcagagaagcgcaggcgggcaatggaagagcagcttaagagtgatgaggagttagcgagaaaactatcaattgatatcaacaacttttgtgaaggttctatttcagcatccccattgaactcgcggaagagtgaccccgtgactcccaagtctgagaagaaatctaagaacaagcagcggaacacaggagatattcaaaaatacctcacacccaaatcacagttcggttccgcttcacattccgaggctgtgcaggaggtgcgtaaggacagcgtcagcaaggacatagactccagcgacaggaagtctccaactggtcaggataccgagattgaggacatgcctacgctgtccccgcagattagtctgggggtgggggagcagggggcagattcctcgatagaatctcccatgccatggctctgcgcctgtggggctgagtggtatcacgaaggaaacgtaaagacacgcccatctaaccacggcaaggaactgtgtgtgctgtctcacgagaggcccaaaacaagggttccttacagtaaagagaccgccgtaatgccctgtgggagaacggaatccgggtgcgcccctacatctggggttacacagactaatggaaacaatacaggcgaaacagagaacgaggaatcttgccttttgatatccaaagaaatctctaaacgcaagaaccaagagtcaagttttgaggccgtaaaagacccttgcttttccgccaaaagacgcaaagttagccccgagtccagtcccgaccaagaggagactgaaatcaacttcacccaaaaactgatagaccttgagcacctactgttcgagcgacataagcaggaggagcaggatagattgctcgccctacagctgcaaaaagaggttgataaggagcagatggtgccaaaccgtcaaaagggttcacccgacgagtaccatctgagagccaccagtagccctcccgataaagtgctgaacgggcaaagaaaaaaccccaaggacggtaactttaagcgccagacacacactaagcacccgacccctgagcgaggctctagggacaaaaatcgccaggtctcactaaagatgcagttgaagcagagcgttaatcggcgaaaaatgcccaattctacgagagaccactgcaaagtgtccaaaagcgcccatagtctgcagccttctatttctcaaaaaagtgtgtttcagatgtttcaaagatgtaccaaatag

SEQ ID NO: 239253 - DNA, 1716 bp, synthetic construct
  misc_feature 1..1716: note = Description of Artificial Sequence: Synthetic coding sequence
  source 1..1716: mol_type = other DNA
atggctctcccgaaagatgccatcccatccctgagcgagtgtcaatgtggtatttgtatggagattcttgtcgagccagtaaccttaccctgtaatcacaccctctgcaaaccatgctttcagtccaccgtcgaaaaggcctcactctgctgccccttctgtcgaaggagagtgagcagctggaccagatatcacaccagacggaactctcttgttaatgtcgagctgtggacaatcatccaaaaacactatcctcgtgagtgcaagctgcgagcaagcggccaggagtccgaagaagtggcagacgattatcagcccgtgcggttgctgagtaagcccggtgaattaaggcgagaatatgaagaggaaatctcaaaagtggccgcagaacgtagggcctcagaggaggaggagaataaagcttccgaggagtatatccagagactactggccgaagaggaagaggaagagaaaaggcaagcagagaagcgaaggcgggcaatggaggagcagctaaagtctgacgaagagctcgccagaaagttatccatcgatatcaacaacttttgtgaggggtccattagtgcatcacccctcaattctcgtaaatcggatccagttactccgaaatccgaaaagaaatcaaaaaataaacagaggaataccggggacatacagaagtatctcacacccaaaagccagttcggctctgccagccactccgaggctgtgcaggaggtgcgaaaggatagtgtgtctaaggacattgacagctccgaccgaaagagtcccaccggccaggacaccgagatcgaggatatgcccaccctttctccacagatcagcctcggggtgggtgagcagggcgcagacagttctattgaatctcctatgccatggctttgtgcatgtggggctgagtggtaccacgaaggaaacgttaaaactagaccttccaaccatggaaaagagctctgcgtgctgtcccacgagcgaccaaagacacgtgtcccgtatagtaaggagactgccgtgatgccctgcggcaggaccgagagtggctgcgctcctacctctggtgtaacccaaactaacggcaataacaccggggaaaccgagaacgaagagtcttgtcttctcatctcgaaggagatttcaaagagaaagaaccaagagtctagcttcgaagccgtgaaagacccatgtttttccgcaaaaaggaggaaagtttctcccgagtcctcccctgaccaggaagagactgaaattaactttactcagaagttgattgacttagaacatctgctatttgagcgtcataagcaggaggaacaagacaggctgctcgccctgcagctgcagaaggaggtcgataaagaacagatggtaccaaacaggcagaagggcagccctgacgaataccacctaagagcgacatcaagcccaccagataaggtgctcaatgggcagagaaaaaatcctaaggacggcaacttcaaaaggcagacgcacaccaagcacccaacgcctgagcgcggatcaagagacaagaataggcaggtgtctctgaagatgcagctcaagcagtcagtgaataggcgaaagatgcccaattccacgagggaccactgcaaggtctctaaatccgctcacagcttacagccctctataagccaaaagtctgtgttccagatgtttcagaggtgtaccaagtag

SEQ ID NO: 239254 - DNA, 4872 bp, synthetic construct
  misc_feature 1..4872: note = Description of Artificial Sequence: Synthetic coding sequence
  source 1..4872: mol_type = other DNA
atggccgctgaggcatccaaaactggaccatcaaggtcttcctaccagaggatgggaagaaagtcgcaaccctggggagccgctgagattcaatgcacaagatgtggaagaagagtgtcccggagctccggccatcattgcgagttacagtgcggacacgcattctgcgagctatgtcttcttatgacagaagagtgtacaaccataatttgccccgactgtgaggtcgccacagctgtcaatacacggcagaggtactatcccatggccggttatatcaaggaagactctatcatggaaaaactccagcctaagacaattaaaaactgttcgcaggattttaagaaaactgctgaccagctgacaacaggcctcgaaaggagcgcatccacggacaagacacttcttaacagtagcgccgttatgctggacactaataccgcagaggaaatcgatgaggcacttaacactgcccatcacagctttgaacagctatcaattgccggtaaagcactggaacacatgcagaagcagactattgaagagagggagagggttattgaagtggtggagaagcagtttgaccagcttctcgctttttttgattctagaaaaaagaatctgtgcgaggagttcgccagaacgacagacgattacctctcaaatctgattaaggcaaagagttatatcgaggaaaagaagaacaacttaaatgcagcgatgaatattgccagggctcttcagctcagtcctagcctgcgcacatattgcgatttgaaccagattatccgaactttgcagttaacatctgattctgagcttgcccaagtgagcagcccccagctgcgcaaccctccaagactgtccgtgaactgctcagaaattatttgcatgttcaacaacatgggtaaaatagaatttagggatagcactaagtgttaccctcaggagaatgagattcggcaaaatgtccagaagaagtacaacaataaaaaggaattgtcttgttacgatacatatccacccctagagaaaaaaaaagttgatatgtcagtactcacctctgaagcgccacctccccctttgcagcctgagactaacgacgtacatctcgaggccaagaattttcagccccagaaggacgttgccacagcatccccaaaaacaatcgcagttttgcctcaaatgggttcctccccagacgtgataattgaagagattatcgaggataacgtcgagtcgtccgccgaactggtcttcgtctcccacgtgattgacccatgtcacttctatatcaggaagtatagccagataaaagatgcaaaggtgctggagaagaaagttaacgagttttgtaaccgctcttcccatctggatcctagcgacatactcgagttaggggctcgaatcttcgtgagctctatcaaaaacgggatgtggtgccggggaaccatcactgaattgataccaattgaggggagaaacacaaggaagccttgctcccctactcgcctttttgttcacgaagttgccctaattcagatatttatggtcgactttggtaattcagaggtcctaatcgtgacaggggttgtggatacgcatgtccggcctgaacactcagcgaaacaacacattgccctgaatgacctttgtctggtgctgagaaagagcgagccctatactgaaggccttctaaaggatattcagcccctcgctcagccatgcagtctgaaagatatcgtaccccaaaattcaaacgaagggtgggaagaagaggcaaaggtggaattcctgaagatggtaaataataaagccgtgagcatgaaagtctttagggaggaggatggggtcttgatcgtcgacttgcagaagcccccacccaacaagatcagctccgatatgccagtctcactgcgagacgccctggtgtttatggagctcgctaaattcaaaagccagtctctgcggtctcatttcgagaaaaatacaactttgcattaccacccaccaatcctgcccaaggaaatgactgatgtgagcgttacagtgtgtcacatcaattctccgggagacttctaccttcagctaattgagggtcttgatatactatttcttttgaaaacgattgaggagttctacaagagcgaggatggggagaacctcgagattttatgcccagtgcaggaccaggcgtgcgtcgccaagtttgaagatggcatctggtaccgggcaaaagtgattggacttccaggccatcaggaggtcgaggtaaaatatgtggatttcggcaacaccgcaaagataactatcaaagatgtacgaaaaattaaagacgaatttctgaatgcccctgagaaggcaatcaagtgtaaacttgcctatattgagccatacaagagaactatgcagtggtctaaggaggcaaaagagaagtttgaggagaaggcccaggacaaattcatgacttgctcggtcatcaaaattctggaggataacgtgctgctggtcgaactgttcgactccctgggcgctccagaaatgactaccaccagcatcaacgaccagctggtgaaagagggcctggcctcttacgagatcgggtatatcctaaaggacaacagccaaaagcacatcgaagtgtgggacccctcaccggaggagataatttcaaacgaagtgcacaacctgaatccggtgagcgccaaatccctccctaacgagaatttccaatcactttacaacaaagagctgcctgttcatatttgtaacgtgatctcaccagagaaaatttacgttcaatggctgctcacagaaaacctgttgaattcactggaggaaaagatgatagccgcttatgaaaactctaagtgggagcccgtgaagtgggagaacgatatgcactgcgccgtgaagattcaggacaaaaaccaatggcggagaggacagattatcagaatggtgaccgatacattagttgaagtgctgctttacgacgttggcgtggaactggtggttaatgtggattgccttaggaagctggaagaaaatttgaagactatgggcaggttgagcctggaatgcagcctcgtcgacataaggcccgcaggagggagtgacaaatggactgccaccgcctgcgactgcctgtcactatatctgacaggagccgtcgccactattatcttacaggtcgattctgaagaaaataacaccacgtggccattgccagtgaagatcttttgtagagacgaaaagggggaacgcgtagacgttagtaagtatctgattaagaagggcctggccctcagggaacgacgtatcaataatctggataatagccactccttgagtgagaaatctctggaggttccgttggaacaggaagactcagtggtgacgaattgtataaaaacaaacttcgacccagataaaaaaaccgcggatattatctccgaacaaaaagttagcgagtttcaggagaagattctggaaccaaggacaacaagaggatacaagcccccagccatcccgaatatgaacgttttcgaagcgactgtgagttgtgtgggggatgacggcaccatttttgtagtgcctaagttgagcgaattcgagctgataaaaatgactaacgagatccagtctaatcttaaatgtttggggctcctggaaccatatttttggaaaaagggtgaagcgtgcgctgtgcgcggttctgatacactgtggtatcgaggaaaagtaatggaggtggtggggggagctgtgagggtccagtatctggaccacggttttactgagaagattccgcagtgtcacctgtatcctatactactttaccccgacattccccagttctgcataccttgtcagctccataacaccacccccgttggaaacgtctggcaacccgacgctatcgaagtccttcaacagcttttgtctaagagacaggtcgacatccacattatggaactccccaaaaacccctgggagaagctgagcatccatctgtacttcgacggaatgtctctgagttattttatggcatattataaatactgcacgagcgaacacaccgaggaaatgttgaaggaaaagccaagaagcgaccacgataaaaagtatgaggaagagcagtgggaaattcggttcgaggagcttctaagtgccgagaccgatacacccctgctaccaccctacttgtcttcatctcttccgtctccaggggaactgtatgctgtacaggtaaagcatgttgtttccccaaatgaggtctacatctgtcttgattcaattgagacatctaaccagtctaaccagcacagcgacacagacgactcaggcgtgagcggcgaatcagagtccgaaagccttgatgaggcactccagagagtcaacaagaaggtcgaggccttgccccctttgactgactttcgcactgaaatgccctgcctggccgaatatgacgatggcctctggtatagggccaaaattgtggcaatcaaggagttcaatcccctgtccattctggtgcagttcgtcgactacggtagcaccgctaaactcactctcaacagactgtgtcaaatccccagccacctgatgcggtatccagccagagccataaaggtgctgctggctggctttaaaccaccactgcgggacctgggagagactaggattccttactgccctaagtggtctatggaggccctgtgggccatgattgattgtctgcagggaaaacagctctacgctgtgtccatggcccctgcacccgaacagatcgtaacactgtacgatgatgaacagcaccccgtgcatatgccactagtcgaaatgggactggctgataaggacgagtag

SEQ ID NO: 239255 - DNA, 1350 bp, synthetic construct
  misc_feature 1..1350: note = Description of Artificial Sequence: Synthetic coding sequence
  source 1..1350: mol_type = other DNA
atggctgctgaggcctcaaagacagggcctagcagatcatcataccaaaggatgggaaggaaatctcagccatggggcgcagcagaaattcagtgcacccgctgtggaagacgcgtgtcccgttcatcaggccatcactgcgaattacagtgcggacacgccttctgtgagttgtgcctactgatgaccgaggaatgtacaacaatcatctgccccgactgtgaagtggcgaccgcggtgaatactcgccagagatactaccctatggctggatatattaaagaagatagtataatggagaagcttcagcccaaaaccattaagaactgcagccaggacttcaagaagaccgcagatcaattgacgaccgggttagagcgctctgcaagcacggataagaccctgctaaacagttcggctgttatgttagacacgaacactgctgaggaaatcgatgaagcactgaatactgcccatcactccttcgagcaactctcgattgccggtaaagctctggaacacatgcaaaaacagaccatagaggagcgcgaaagagtgatagaggtggtggagaagcagttcgaccagttgttagcattttttgacagccggaagaagaatctgtgcgaggagtttgctaggaccactgatgactatctctcaaatcttatcaaggcaaagtcttacatagaagagaaaaagaataatttaaatgccgctatgaacattgccagagcccttcagctgtcaccaagtctgagaacttattgcgacctgaaccagatcattcggactctgcagctgaccagtgactcagagctagcgcaagttagctcgccccagctcagaaatccccctcgcttgtccgtgaattgctccgagataatatgcatgtttaataatatgggcaagatagagtttagggactccactaaatgctatcctcaggagaacgagattcgacagaacgtccaaaagaagtacaataacaagaaagagctgtcgtgctacgatacctacccgccactcgaaaaaaagaaagtggatatgtcagtgctgacttccgaggccccaccacctcccctccaaccagagacaaatgatgtgcatttggaggcaaagaattttcagcctcaaaaggacgtggctaccgcatcaccgaagacaattgctgtgctaccccagatggggtccagtcccgatgtcatcatcgaagagatcatcgaggataatgtggagacttgtggcactgatgatctgggcgagactcccagatatcccaaaaagcccctgcagaaaaattctagcgttccttttgggagcaaggcggacactgtcacaactgtctag

SEQ ID NO: 239256 - DNA, 4746 bp, synthetic construct
  misc_feature 1..4746: note = Description of Artificial Sequence: Synthetic coding sequence
  source 1..4746: mol_type = other DNA
atggccgcagaggcctctaagaccggaccctcacgatctagctaccaacggatggggaggaaaagccaaccctggggcgcagccgaaattcagtgcacccggtgcggccgaagagttagtcgctctagcggtcatcactgcgagctgcagtgcggtcacgcattctgcgagttatgcttgctgatgactgaggaatgtactaccattatttgcccagactgcgaggtggcaaccgcagttaacactagacaacgctactatcccatggctgggtacatcaaagaagattctataatggagaagctgcagcctaagaccatcaagaattgtagtcaggattttaaaaagaccgccgaccagctgacgactggactggaaagatccgcatccacagataaaacacttctcaactcttccgccgttatgcttgacacgaatacagcagaagaaattgatgaagcgcttaacaccgcacatcactccttcgagcagttaagcattgctggcaaagccctcgaacacatgcagaagcagaccatcgaagaacgagaacgggttattgaggtggttgaaaagcagtttgaccagttgctggcattcttcgactctagaaaaaaaaacctttgcgaggagtttgcccgtactacggatgattacctctcaaacctcattaaggctaaatcctacatagaggaaaaaaaaaataacctcaacgccgctatgaatattgcaagagccctccagctttcccccagccttagaacttactgcgacttaaaccagatcataagaacactccagctgacctccgactctgagcttgcccaggtttcatccccacagcttcgaaaccctccacgtctctcagtgaattgtagtgagatcatctgtatgtttaataacatgggcaagattgaattcagagactcaaccaagtgctacccccaggagaacgaaattagacagaacgttcagaagaaatacaacaacaaaaaagagttgtcatgttacgacacatatcccccactcgaaaagaagaaggttgatatgtccgtgctcaccagcgaggccccaccacccccactgcagcccgagactaacgacgttcatctcgaggcaaaaaactttcagccccaaaaggatgtcgccacagcctcaccaaaaacgattgccgtacttccccagatgggaagctcacccgacgtaattattgaagagatcatagaggacaatgtggagtcctccgcagagctcgtatttgtgagccacgtgatcgatccttgtcacttctacatcagaaagtacagccagattaaagatgccaaagtcctggagaagaaggtgaatgagttctgcaatcggtcttcgcatctagaccccagtgatatcctcgagctgggtgccaggattttcgtgtccagcataaagaacggtatgtggtgccggggtactattacagagcttattccaatcgagggacgcaatactcggaagccctgtagccctacaaggctatttgtgcacgaggtcgctctgatccagatctttatggtcgatttcggtaattccgaggtgctgatcgttacgggtgtagtcgacacccacgtgaggccggagcactctgccaagcaacacatcgctttaaacgatctttgcctcgtactcagaaagtccgaaccctataccgagggattactgaaggacatccagccactggctcagccctgtagtctgaaggatattgtacctcaaaatagcaacgagggctgggaagaagaagcaaaagtggagttcttgaaaatggtcaacaacaaggccgtctcaatgaaagtctttcgcgaagaggatggggtgttgatcgtggacctgcagaagccgccacctaacaagatctcatccgatatgcctgtgtcactacgagacgcactggtctttatggagctcgccaaattcaaatcccagagtctccgtagtcacttcgagaaaaacacaacactacactatcacccacccatcttgccaaaagaaatgaccgacgtgtccgtgaccgtctgccacatcaatagtcctggcgatttttaccttcagctgattgaaggccttgatattttgttcttgctgaagactatagaggaattttacaaatccgaagatggcgagaaccttgaaattctgtgcccggtgcaggatcaggcctgcgtggccaagtttgaggatggcatctggtacagagctaaagtgatagggttgcccggacaccaagaggtcgaggtaaagtatgtagactttggaaacactgcaaagattacaatcaaagatgtgaggaagatcaaggacgaattccttaatgccccagagaaggcgataaagtgcaaacttgcatacatagaaccctacaaacgcaccatgcagtggagcaaagaagctaaggagaagtttgaggaaaaagcccaagataaattcatgacctgctccgtgatcaaaatactcgaagacaatgttctgctcgtcgaattgttcgacagtctcggggcaccggagatgacgaccaccagcatcaacgatcaactcgtcaaggaaggcctggcttcctatgagataggctacatcctgaaggacaatagccaaaagcatatcgaggtatgggatccctctcctgaggaaatcatatcaaacgaggtccacaaccttaaccctgtgtccgctaagtcactccctaacgagaattttcagagcctgtacaataaagagctgcctgttcacatctgcaacgtgattagtccagaaaagatatatgtgcagtggttactgaccgaaaacctgcttaactctctggaggaaaagatgattgcagcttatgaaaactccaagtgggaacctgtgaagtgggaaaatgacatgcattgtgccgtcaagatccaggacaaaaatcagtggcggagaggtcaaattattcggatggtaacagacacccttgtggaggtgctgttgtacgatgtcggcgtagagctggtcgtcaacgtggactgtcttagaaaattagaggaaaacttgaaaaccatgggcagactctcgctggagtgttcattggtggacatccggcctgcaggcggttctgacaagtggactgctactgcctgtgattgtctgagcctttacttgaccggcgcagtcgcaaccattatactacaggtggattctgaagaaaataacacaacatggccactcccagttaagatcttctgccgtgacgagaagggtgagagagtggatgtgagcaagtacctgatcaagaaaggcttggcgctcagagagcggaggatcaataaccttgacaatagccattccctgtccgagaaatccctggaggtgccgctggaacaggaggacagcgttgtgaccaattgcataaagactaacttcgaccccgataagaaaaccgccgatatcatcagcgagcagaaggtgagtgaattccaggagaagattctcgaaccccgaacaacccgcggttataagccccctgctatccctaacatgaatgtgttcgaggcaacagtttcttgtgtgggtgacgatggcacaatctttgtggttcccaaattgtctgagtttgagctgattaaaatgaccaacgagatacagagtaacctaaagtgcctgggactgctcgaaccgtacttttggaaaaaaggagaagcgtgcgctgtgagaggctccgataccttgtggtatcgtggcaaagttatggaggtcgtgggaggcgcagtgagagtgcagtacctcgatcacggctttaccgaaaagataccacagtgccatttataccctattcttctctaccctgatattccacagttttgcattccatgccaactgcacaacacaacccctgttgggaatgtttggcagcccgacgccatagaggtcctccaacaactactatctaaacggcaggtggatatccacattatgaagcccagatccgaccacgacaagaaatatgaagaggaacaatgggaaatccgctttgaggagctactgtccgctgaaaccgatacccccctgctccctccttatctgtcaagttctctgccatctcctggcgagctttatgccgtgcaagtcaagcacgtggtgtcacctaacgaagtgtatatttgtctcgattctattgaaacttcaaaccaatccaaccagcactctgacactgacgattcaggggtaagcggtgagagcgaaagtgagagcctcgacgaggccctgcaacgggtgaataagaaagttgaggcactgccacccctgacagacttccggacagaaatgccctgtctggccgaatacgatgatggcctttggtatagagccaaaatcgtggctataaaggagttcaatccactgagtatactcgttcagtttgtggattacgggtcaacggcaaaactaactcttaaccggctttgccaaatcccttcgcatttaatgcggtatccggctagagccatcaaggtgctgttggctggctttaaacccccattaagagacctgggtgagacgcgtataccctattgtcctaagtggtccatggaggctctctgggcaatgattgactgcctgcagggcaagcagctctacgccgtgtcaatggcaccagctcccgagcagattgtcaccctctatgacgacgagcagcatcccgtgcacatgcctctggttgaaatggggctcgccgataaggatgaatag

SEQ ID NO: 239257 - DNA, 3207 bp, synthetic construct
  misc_feature 1..3207: note = Description of Artificial Sequence: Synthetic coding sequence
  source 1..3207: mol_type = other DNA
atgttagacactaacacagccgaggagatagacgaggccctgaacactgctcatcattccttcgagcagctaagcatagccggaaaggccctcgaacacatgcaaaaacaaactatagaggagagagaacgggttatcgaagtggtggagaagcagtttgaccagttgctggcctttttcgactcccggaaaaaaaacctctgcgaggaatttgccagaacaaccgatgactatctgagcaaccttataaaagccaagagctacattgaggaaaaaaagaataacctcaacgcggcaatgaatattgcacgggctcttcagctttcaccatccctaagaacctactgtgatctgaaccaaataatacgaacactccaattaacctccgatagtgagttggcgcaagtgtcatccccccaactgcgcaacccccctcgtctgtctgtaaattgcagcgagatcatctgcatgttcaataatatgggcaagattgaatttagagattcgacgaaatgctaccctcaggagaatgaaattcgccagaacgtgcagaagaaatacaataataaaaaagagctaagttgttatgatacctatccacccctggagaagaaaaaagtggatatgtcggtgctgaccagcgaggccccaccacccccactgcagccagagaccaacgatgtccacctagaggccaaaaatttccagcctcagaaagacgtcgcaacagcatcccctaagaccatagcggtcttgccacagatgggcagctcccccgacgtgatcatagaagaaataattgaagacaatgtagaaagcagcgctgagctggtctttgtatctcatgttattgacccctgtcacttttacatccgaaaatatagccagatcaaggatgctaaggttctggagaagaaggttaacgaattttgtaatcgatcttctcacctcgatcccagtgatattttggagctgggtgctcgcattttcgtgagttcaatcaagaatggaatgtggtgcaggggcaccataaccgagctaatacccatcgagggtaggaatactcgaaagccatgtagtcccacgcgccttttcgttcatgaggtggctctgatccagattttcatggtggatttcggcaacagtgaagtgctgattgtcaccggggttgtggacacacatgtgaggcctgagcactccgccaagcagcatattgcccttaacgatctgtgtcttgtacttcggaagtccgagccttatacagagggcctcctgaaagatattcaaccgttggcgcagccttgcagtctgaaagacattgtgccccagaattcgaacgaggggtgggaggaagaagccaaggtcgaatttctgaaaatggtcaataacaaagccgtgtccatgaaggtttttcgagaggaggatggagtgctcattgtggacttgcagaagccaccacccaacaaaatctcctctgacatgcccgtgtcgttgagggatgctctggtgtttatggagttggccaagttcaaaagccaatccctacgttcacactttgagaagaataccactttgcattatcatcccccaattctgcctaaagagatgacagatgtgagcgtgaccgtctgtcatattaactcgcccggtgatttctacctgcaactaattgaggggctggacatcctgttcctgttgaagactattgaggagttctataagagcgaggatggggagaacctggagatcttgtgtcctgttcaggatcaggcctgtgtcgctaaattcgaagacggaatctggtatcgagccaaggttatcggcctgccagggcaccaagaagtggaagtgaagtacgtcgactttggcaatacagctaagatcaccatcaaggacgtgcggaaaattaaagatgagttcttgaacgctccagaaaaagccatcaagtgcaagctggcttacattgaaccatataaacggaccatgcaatggtctaaggaagccaaggagaagtttgaagaaaaggctcaggacaaattcatgacctgttcagtgattaaaattctggaggataatgtgctcctggtggaactttttgacagtctgggcgcacccgaaatgacgaccacttccatcaacgatcagctagtcaaagaaggccttgctagctatgaaataggatatatcctgaaagataacagccaaaagcacattgaggtatgggacccatcacctgaagaaatcatttctaacgaggtccataatttaaatcccgtctcagccaaatcactgccaaacgagaatttccagagtctgtataacaaagaactcccagtgcacatctgtaacgttatctctcccgaaaaaatctatgttcagtggctgcttaccgaaaacttgcttaattcattagaggaaaaaatgatcgcggcttacgaaaactcgaaatgggagcccgtgaagtgggagaatgatatgcattgtgcagtgaaaattcaggacaaaaatcagtggcggagagggcagataatccgcatggtaacggatacactggtggaggtgctgctgtacgatgtgggcgtcgagctggtggtgaacgtggattgcttgaggaagttggaggaaaacctcaaaaccatggggcgtttgtctttggaatgctctctggtagatatccgcccagccggaggatctgataaatggaccgccacagcatgcgactgtctctctctgtacctgactggagcagtggccacaataatcctgcaggtcgactccgaagagaacaatacaacttggcctctccctgtgaagatcttttgcagggacgagaagggcgaacgtgtagacgtatctaaatacctgatcaaaaaagggttagctctccgcgagaggagaatcaataacctggacaattcccattctctctccgagaagagtctcgaggtccccctcgagcaggaggactctgtggtaaccaactgtataaagacaaatttcgaccccgacaaaaagacagctgacattattagtgagcagaaggtgtcagagtttcaagaaaaaattttagagcccaggaccacgcggggatataagcccccagccatcccaaacatgaatgtgttcgaggctacggtgtcctgcgttggtgacgatgggacgatcttcgttgtgcctaaactgtccgagtttgagttgataaaatag

SEQ ID NO: 239258 - DNA, 462 bp, synthetic construct
  misc_feature 1..462: note = Description of Artificial Sequence: Synthetic coding sequence
  source 1..462: mol_type = other DNA
atggcttcatactttgatgagcacgattgtgagccatcggacccggaacaggaaacccggaccaacatgttgttagagctggcccgaagcctctttaatagaatggacttcgaagatttgggcctcgtggtggactgggatcatcatctgcccccaccagccgctaagactgtcgtcgaaaatctgcccaggaccgtaatccggggatcccaggccgagctgaaatgtcccgtctgcctgttagagttcgaagaagaggagactgctatagaaatgccctgtcatcatctctttcatagttcttgtatcctcccctggctttcaaaaaccaactcttgccccttgtgtcgttacgagctgccgactgacgacgatacctacgaggaacaccgtcgggacaaagcccgtaaacaacaacagcagcaccggctggagaatctccacggcgctatgtatacatag

SEQ ID NO: 239259 - DNA, 684 bp, synthetic construct
  misc_feature 1..684: note = Description of Artificial Sequence: Synthetic coding sequence
  source 1..684: mol_type = other DNA
atggcatgtaccaaaactctgcaacagtctcagcccatatccgcaggggcaaccaccactactactgctgtcgctccggcaggaggccactcagggagcactgaatgcgacctcgagtgcctggtgtgccgagaaccatattcttgtcctaggctccccaaactgctcgcatgccagcacgctttctgcgccatctgcctgaagctgttgctgtgtgttcaggacaacacctggtccatcacatgccccctctgtcgtaaggtgaccgctgtaccgggaggcttaatctgctccctgcgagaccatgaggccgtcgtggggcagctggctcagccttgcacagaggtgagtctctgtcctcaaggcctggtggaccccgctgatcttgcagccggtcatccgtctctggtgggggaggatggacaggatgaagtgtctgcgaatcacgttgctgcacggaggcttgctgcacatcttctcttgctggcactcttgatcatactgatcggaccctttatctaccccggtgtactgcgatgggttctcacatttatcattgccctggcgttattaatgtccaccctgttttgttgtctcccttccacccggggatcatgttggcccagtagtcggaccttgttctgcagagagcagaagcatagccatatttcctccatcgcttag

SEQ ID NO: 239260 - DNA, 795 bp, synthetic construct
  misc_feature 1..795: note = Description of Artificial Sequence: Synthetic coding sequence
  source 1..795: mol_type = other DNA
atgagtcaggctgtgcagactaatggcacacaaccactgtctaaaacctgggaactgagcctttatgagttgcaacgcaccccccaggaagctatcaccgacggtttagagattgtcgtgagtcctaggtccctccacagcgaactcatgtgcccaatctgcctcgacatgctcaagaatactatgacgaccaaggaatgtttacacagattttgcgctgattgcatcatcaccgctttgcgctctggcttgcagcgagggaaaaaacagcaaatagaaaacggatccggagcagaagacaatggtgattcctcccactgcagcaatgccagtacacacagcaatcaggaggctggccctagcaataaaaggacaaagacatctgatgactctgggctcgagctcgataacaacaatgccgcaatggccattgacccggtgatggatggggcatcagagatcgaattggtctttcggcctcatcctactctgatggaaaaggatgactcggcacagacacgctacattaagacaagcggaaacgcaacggtggatcatctttcaaaatacctcgccgtgaggctagccctggaggagctgaggagcaagggggaatcaaatcagatgaatctcgacaccgctagcgaaaaacaatacaccatttatatcgctaccgcaagcgggcagtttaccgtgcttaacgggtccttctctcttgaactggtttctgagaagtattggaaggttaataagcccatggaactgtattatgccccaaccaaagaacacaaatag

SEQ ID NO: 239261 - DNA, 1011 bp, synthetic construct
  misc_feature 1..1011: note = Description of Artificial Sequence: Synthetic coding sequence
  source 1..1011: mol_type = other DNA
atgagtcaggccgtccaaacaaatggcacacaacccctgtctaaaacgtgggaactctccttgtatgagttgcagaggacaccgcaagaagcaatcacagacggtctggagatcgtcgtgtcacctagaagcttacacagcgaattaatgtgtccgatttgcctggatatgctgaaaaatactatgacaacaaaggagtgcctgcacaggttctgcgctgattgtattataacggcacttcgaagcggaaataaggaatgcccaacctgccgcaagaagcttgtctccaagaggagtttgcgccctgaccccaactttgacgcccttatcagcaaaatatacccaagccgcgatgagtacgaggcccatcaggagcgtgtattggcaagaattaacaaacataacaatcagcaggcgctctcccactccatcgaggagggtcttaagattcaggccatgaaccgattgcagaggggaaagaaacaacaaatcgaaaatggtagcggcgcagaggataacggagatagctctcactgtagcaatgcatctactcacagtaatcaggaggcaggacctagcaataagaggacaaagaccagtgatgattccggacttgaactagacaataataatgctgcgatggccatcgatcccgtgatggacggcgcatccgaaatcgaactcgtgtttcgcccacaccccactctcatggaaaaagatgacagtgcccagactcgatatatcaagacatctggcaatgctactgtcgaccacctgtctaaatatctggctgtacgattagccctcgaagagttgagaagcaagggcgagtctaatcagatgaacctggatacagcctccgagaaacaatatacaatctacatcgccaccgcaagcggccagttcacagtgttaaatggatcttttagcctggagctggtcagcgaaaaatattggaaggtcaacaagcctatggagttgtattatgctccaaccaaagaacacaagtag

SEQ ID NO: 239262 - DNA, 741 bp, synthetic construct
  misc_feature 1..741: note = Description of Artificial Sequence: Synthetic coding sequence
  source 1..741: mol_type = other DNA
atgagtcaagcagtccagactaacggcacacagcctctgtcgaaaacgtgggagttatcactgtatgagctgcagcggactccccaggaagcgatcacagatggcctggaaattgtagtgagccctagaagtctgcactccgagctgatgtgccctatctgtctggacatgttgaagaacacgatgacaactaaggaatgcctccatagattctgcgctgactgcattataacagctctccgctcagggaataaggagtgccccacctgcaggaaaaagttggtgtctaagcgctctctaaggcccgatcctaacttcgacgctctgatttcaaagatctatccaagtagggacgaatatgaggcccaccaagaacgcgtgttggctaggataaacaagcataacaaccaacaagctctgtcacattcgatcgaggaaggccttaagatacaggcaatgaaccgactgcagcgcggaaagaagcagcaaatcgagaatggctctggtgctgaggataacggagacagtagtcattgctcgaatgcttccacccattccaatcaagaggccggaccctcaaataagcgcacaaagacctcggacgacagcggcctggagctcgataacaataacgctgccatggccatcgacccagttatggatggggcaagtgaaattgaacttgtcttccggcctcatccgacactgatggagaaagacgattctgcgcaaacacgctag

SEQ ID NO: 239263 - DNA, 822 bp, synthetic construct
  misc_feature 1..822: note = Description of Artificial Sequence: Synthetic coding sequence
  source 1..822: mol_type = other DNA
atggcaaattgggtcttttgtaaccgctgctttcaaccccctcatcgcacatcatgctttagtctgacgaactgtggccacgtgtattgcgatgcttgtctggggaaggggaaaaaaaacgagtgcctcatatgcaaagcgccatgcagaaccgtcttactaagcaagcacaccgatgccgacattcaggccttttttatgtccatagattccctgtgcaagaaatattcaagagagacatcacaatacctgcgcctctctagaggctgttgtaggttgaaactttgccccgctacatcttccaaggaggtgcccagaggaagcacccacggctcgcaggccgcagctcgggatccgcaagaacattgggtttcgaccaccagagctccgcgaccagggtgccgacggagtcagtcccaacccgaggcccagggaaatacaatccaagacgcccctcaccctttgacactgctgcacccctctcggacgctgattcatacaaaatccccgtggggccaaaagctgctggagtttataaagcatgtgtgctaccaccgacatcagtctcatagaccatgcgcaccaggttggttttgtcaggttcttcagaggcctggcgcagtgtcgggcgagaagacccagcagacgcggccagccccaccagccacgtgtttgctttgtctgtcctgtctgtcagggttccggcacggcccttggcgcagtcaggcacttccttcagatctcgttgctccactattcgtttcatatacagtcgaggtgtccattactaatgcaggctggagctttccggctgccgtgtag

SEQ ID NO: 239264 - DNA, 699 bp, synthetic construct
  misc_feature 1..699: note = Description of Artificial Sequence: Synthetic coding sequence
  source 1..699: mol_type = other DNA
atggcaaattgggtgttctgcaaccgctgcttccagcctccgcaccgtacttcgtgtttctctctaacgaattgcggccacgtgtattgcgatgcttgcctcgggaaaggaaaaaagaacgagtgcctgatatgtaaggccccttgcagaacagtactactttccaagcatacggatgcagacattcaggctttctttatgagtatcgacagtttgtgtaagaagtattcaagagagacttcacagatcttggagtttcaagaaaagcaccgtaagcggctcctcgctttctaccgtgaaaaaatcagtaggcttgaagagagtctgcgcaaatctgtgttgcagatcgagcaactgcagagtatgcgaagcagtcagcagacagcattctctacaatcaagtcttccgtgagtacgaaaccccacggctgcctgctgccaccccacagttcggcccctgatcggttagagtccatggaggtggacctgagcccaagtccaattcgcaagagcgagatagcagctgggcctgcacgcatctcaatgatctcccccccacaggatgggcgaatggctccttgcgcaaggagagtttgtcatttccagaggttcacaatgtttctgcatcggagactgtccagcctggccgctcctccgtccgtgcagttttggaaagctcgcggaacgcatcagctctag

SEQ ID NO: 239265 - DNA, 894 bp, synthetic construct
  misc_feature 1..894: note = Description of Artificial Sequence: Synthetic coding sequence
  source 1..894: mol_type = other DNA
atggcaaattgggtattttgtaataggtgttttcagcctccccacaggacttcctgctttagcctaacaaattgtggtcatgtatattgtgatgcatgtctgggcaagggtaagaagaatgagtgcctcatctgcaaggcgccttgccggacagtcttgctgagcaaacacacagatgctgacattcaggccttcttcatgtcaatcgactcattgtgcaaaaagtacagccgtgagacatcccagatccttgagtttcaggagaagcaccgaaagaggctgctggccttttaccgtgagaagatatctagacttgaagagtctctacgcaagtctgtgctgcagatagaacagttgcagagcatgaggagcagtcagcagacagcctttagcacgattaaatcttccgtttcgaccaagccccacgggtgtctactccctccccacagctctgcgccagatcgccttgagtccatggaggtcgatctgagcccatccccgatccggaagtcagaaatcgccgctggaccagctaggatcagtatgattagcccaccacaggacggtaggatgggtcctcacctgaccgcctccttttgctttatcccatggctcactctttcaaaaccgccagtgcctggggagtgtgttatcagccgcggtagcccctgcttttgtatcgatgtgtgccctcattggctcctgctgctggccttttcctctggcagacacggcgagctgactaatagtaagacgctacctatctacgcagaggttcagagagctgtgttattcccatttcagcaggctgaaggtaccctggacacatttaggaccccagccgtttctgtagttttcccactgtgccagttcgagcggaagaaatcattctag

SEQ ID NO: 239266 - DNA, 3192 bp, synthetic construct
  misc_feature 1..3192: note = Description of Artificial Sequence: Synthetic coding sequence
  source 1..3192: mol_type = other DNA
atggaatgcccaagctgccaacacgtttcaaaggaggagaccccgaagttttgctctcaatgcggtgagcgactgcccccagctgcacccatagcggatagtgaaaataacaacagcacgatggcttccgcgagcgagggagagatggaatgcggccaggagctgaaggaggagggcggaccttgcctatttccagggtcagacagttggcaggaaaaccctgaggagccttgcagcaaagccagctggacggtgcaggagtcaaagaagaaaaaaaggaagaagaaaaaaaagggtaacaagtctgcaagctcggagctcgccagtctcccgctgagtccggctagcccatgtcaccttaccttgctatccaatccttggccccaggacactgctctgccacattcccaagcccagcagagcgggccaacagggcagcctagccaacctccaggcacagcaacgacaccactcgagggcgatggcctttctgctccgaccgaagtcggtgatagtccactgcaagcccaggccctgggggaagccggagttgcaacgggaagtgaggctcagtcatcccctcagtttcaagatcatactgagggggaggaccaggatgcctcaatcccttccgggggacgagggctatcccaagaaggtactggtccccctacctccgcgggtgaagggcacagccgcactgaggacgctgctcaggaacttttattacctgaatccaagggaggctccagcgagcccggtacggagctccagaccaccgagcaacaagctggagcttctgcaagcatggccgtagatgccgttgccgagcctgccaatgccgtgaaaggcgcaggtaaagaaatgaaagagaagacccagcgaatgaagcagccccctgcaacaactcctcctttcaaaacacattgtcaagaggctgagacaaagaccaaggatgagatggcagcagccgaggaaaaagtggggaagaacgaacagggagagcctgaggacctgaagaagcccgaagggaagaatcggtccgccgctgcagtcaagaacgagaaagaacagaaaaatcaggaggctgatgtgcaggaagtgaaagcctcgaccttaagtcctggcggtggtgtgactgtcttttttcacgctatcatcagtctgcactttccattcaatccagaccttcacaaggttttcattaggggtggcgaggaattcggagagagcaagtgggactcgaatatttgcgagctgcactatacccgggatctgggacatgatcgggtactggttgagggaattgtgtgcatcagcaaaaagcacctggacaagtacattccctataaatatgtgatctataatggagaatcattcgaatacgagttcatttataagcatcaacaaaagaagggcgagtatgttaatcgctgtctgttcattaaaagctctttgcttggttccggtgactggcatcagtactacgatatagtttacatgaaaccccatggcaggctccagaaagtgatgaaccatattacggacgggcctcgcaaggatctcgtcaagggcaaacagatagcagccgcactcatgctggactccacatttagcatccttcagacatgggacaccattaacctgaacagtttctttactcagttcgagcaattctgctttgttctccagcaacctatgatctatgaaggacaggcccaactatggacagatcttcagtaccgggaaaaagaggtgaagcgctacctttggcagcacttaaagaagcacgttgtcccactgcccgatggaaaaagcaccgactttctccctgtggactgccccgtacgctccaaactgaaaaccggtctcattgtcttgttcgtggtggagaaaatcgagctgcttctggagggatcattggactggttgtgccacctgctgacgtcagacgcctcgagcccagacgaattccatagggatctctcacatatcctggggataccacaatcgtggcgcctttatctggtgaatttatgccagaggtgcatggacaccaggacctacacatggctgggtgccttgcccgtcctgcattgctgcatggaattggccccaagacacaaggatgcatggcgccagcccgaggatacatgggcggcactagagggactttccttttccccattccgtgaacaaatgttggatacatctagtctcctccaattcatgagggagaagcagcatcttctgtcgatagatgagcccttgttcagaagctggttctctcttttgcctctgtctcatctcgtcatgtacatggagaactttatcgagcatctgggcaggttccccgctcatatccttgactgcctcagcggaatttactatcgcttgcccggactggagcaggtgctcaatacccaggatgttcaagacgtccaaaacgtacagaatatattggagatgttgctcaggctgctggatacctatagagataagattcctgaagaggccctctcaccatcttaccttaccgtgtgtctcaaattacacgaggctatttgtagcagtacaaagcttctgaagttctatgagctgcccgctctgtctgcagagatcgtgtgtaggatgatccgactcttgtcccttgtggattccgcagggcaacgcgacgaaacaggaaacaatagcgtgcagacagtgttccaaggcacactggccgcaactaagaggtggctgcgagaggtttttaccaaaaatatgctaaccagctcaggtgcaagttttacctatgtaaaagagatcgaagtgtggcgcagactcgtcgagatccagtttccagcagagcacggctggaaagagtctctcctgggcgacatggagtggcggctgacaaaagaggagcctctttcacagataactgcctactgcaactcatgttgggatacaaaaggcctggaagattccgtagctaagacattcgaaaagtgtattattgaggcagtctcttctgcttgtcaagtcaacaacctgtcatcttgggaaaccgacagcggctcacagctatgttcggcaatgacccagctgagagctatgaagcacccgctgggcctgagttcatccgcaaactcagaaatagggaagtgggctccatcttccctggccaagggtaacggggctgagatctag

SEQ ID NO: 239267 - DNA, 9842 bp, synthetic construct
  misc_feature 1..9842: note = Description of Artificial Sequence: Synthetic coding sequence
  source 1..9842: mol_type = other DNA
atggtgtgcgacggtgattgggagcattgctacctcccttctgccttttctcagcacaaagtttttgtaacaccgcaggccccattggaggccatccaggcctaccttgctggtcactatcgagtgccaaaacagacactatccgcggcagccgtatttaatgaccgcctttgcgtaggcattgtggccagcgagcgcgcaggcgttggcaaaagtctgtacgtgaaaagactgcacgataagatgaagatgcaactgaacgtgaaaaacgtgcctttaaagaccattaggctgatagatccccaggtcgatgagagccgcgtcctgggcgcattgttacctttcctggacgcacaatatcagaaggtacccgtcctgtttcatctcgacgtaaccagtagcgtgcaaactggcatctgggtttttctgttcaaactccttatcctccaatatctgatggatataaatggaaaaatgtggctgaggaacccttgtcacttatatatcgtcgaaatactggagcgcaggaccagcgtcccgtctcgtagcagctctgccttacgaacccgagtcccacaattttcattcttggacatcttccctaaagtgacatgccgtccgccaaaggaggtgatcgacatggagctctctgctcttcggagtgacactgaaccaggcatggatctctgggaattctgttcagagacatttcagagaccatatcagtacttgagaaggttcaatcagaaccaggacctggacacgttccagtaccaggagggcagtgtagaggggacacctgaagagtgcctgcaacattttctgtttcattgtggggtgataaatccaagctggtccgaactgcgaaattttgctaggttcctgaactaccaacttagggactgtgaggcctctcttttttgtaatccatccttcattggggacaccctccgcggatttaagaagttcgtggtcacctttatgatcttcatggccagggattttgctacaccatccctgcacacaagcgaccagagtcctgggaaacatatggtcactatggatggggtgagggaggaggacctcgcccctttctcccttcgcaagagatgggagtctgaaccacacccatacgtgttttttaatgacgaccacactaccatgaccttcatcgggttccaccttcagcccaacatcaacgggagcgtagacgctatctctcaccttacaggcaaggtcattaagcgagacgtcatgactcgggatctgtatcagggtttacttttgcagagagtgccctttaatgttgattttgacaaacttccgcgacataaaaaattggagagactgtgtctcacgctgggtatcccgcaggccaccgatcccgataaaacgtacgagctgactactgacaacatgttgaagatcctcgccatcgaaatgcgcttcaggtgtggaattcctgtgatcattatgggcgagactgggtgtggaaaaacacggctcatcaaattcctgagcgatttgagaaggggaggcaccaacgcagacaccattaaacttgtgaaggttcatgggggaaccacggcagatatgatctactcacgagtaagagaggccgaaaatgtggctttcgccaataaggatcagcatcaactggataccattctgttctttgacgaagctaacacaaccgaagctattagttgcattaaggaggtcctctgtgaccatatggtagatggacagccactggccgaggattccggcctccacataattgctgcatgtaatccataccgcaagcactctgaggaaatgatttgcaggcttgagtctgctggcctcgggtaccgtgtctctatggaggagactgcagaccgcttaggtagtattcctttgcgccaactggtgtatagggtgcatgccttgccaccgagcctgatccccctggtgtgggactttgggcagttgtccgatgttgccgagaagctttatatacaacaaattgtgcagcggctcgtggaaagcatctctttggacgagaatgggactagagttatcaccgaagtgctctgtgcaagtcagggctttatgcgtaagaccgaagacgaatgttccttcgtcagcctgagagatgtagaacgatgtgtaaaggtcttccggtggttccacgagcattctgctatgctgctggcccagcttaacgctttcttatcaaaatcaagcgtgtccaaaaaccatactgaacgcgaccctgtcctgtggagtctgatgcttgctatcggcgtgtgctaccacgctagtttggagaagaaagactcttatcgaaaagcaatcgcaaggtttttcccaaaaccgtatgacgattcaagactgctacttgacgaaatcaccagagcccaggacctgtttctggacggagtgccactccgcaaaacgatcgcaaaaaatctggcactgaaggagaacgtgttcatgatggtggtatgcatcgaactgaagatcccactgttcctcgtcggaaaacctggttctagcaaatcactggccaagaccatcgttgccgacgcgatgcagggccctgccgcatattccgatctcttcaggagcctgaaacaggttcatcttgtatcatttcagtgtagcccacattcaaccccacagggaatcatctcgaccttccggcaatgcgcccgtttccagcagggcaaggaccttcagcagtacgtcagcgtggtggtgttagacgaggtgggtcttgccgaagacagtccaaagatgcctctgaagactcttcatccactcctggaggatggctgcattgaggacgatcctgctccgcataagaaggtgggctttgtgggaattagcaattgggcactcgatccagccaagatgaacagaggtatctttgtgtcgaggggttcccccaatgaaaccgagcttatcgagtcagctaaagggatctgtagctctgacatcttagtacaggacagggtgcagggatatttcgcttcctttgccaaagcttacgaaacagtttgtaagcgccaagacaaggaattctttggcttaagagactactattctctcattaaaatggtgttcgctgcagcaaaagcctctaaccgaaaaccgtccccccaggatatcgctcaggccgtgcttcgcaatttttctggcaaagacgatatccaggccctggacatattcctggctaatctgcctgaggctaaatgctccgaggaagtctcacccatgcaacttattaagcagaacatctttggcccaagccagaaagtgccagggggagagcaggaggacgccgaaagtcggtaccttcttgtgctgacaaagaattacgtcgccctgcagattttgcagcagaccttcttcgaaggcgaccagcagcccgagatcatctttggcagcggctttcctaaggatcaagagtatacacagctctgccgtaacattaatagggtgaaaatctgcatggagacggggaagatggtgcttctgctcaatctccagaacctgtacgagagtctatacgacgcgctgaaccagtactacgtccatctgggtggacaaaagtacgtagacctgggcttgggcactcaccgtgtgaagtgcagggtgcatcctaactttaggcttattgtcatcgaggagaaggacgtcgtgtacaagcacttcccaattcccctcattaaccgcctggaaaagcattaccttgacataaatacagttcttgagaagtggcagaaatcgattgtggaagaactctgcgcctgggtagaaaagttcatcaacgttaaggcccatcacttccagaagaggcacaagtactcaccttccgatgttttcatcggataccactccgacgcctgcgcctctgtggtcctgcaggtgatagagcggcaaggcccacgggctctaacggaggaattgcaccagaaagtgagtgaggaggccaaatcaattctgctaaattgtgccacacctgacgccgttgtccgcctctctgcctattcgctcggcggatttgctgcagagtggctctcccaggagtatttccatcggcagcggcacaattcatttgctgactttctacaggcacatctgcacactgcggacctcgaacgacacgccatttttaccgagattacaaccttttctagactgctgacatcgcacgactgtgaaatcttggagagcgaagtcaccggccgtgcccctaagcctacactcctatggctgcaacaatttgacactgaatacagctttctgaaggaagtccggaattgcctaacgaacacagcgaaatgcaaaattctgatcttccagactgactttgaagacggcatcaggtctgcacagctgatcgcatctgctaaatattctgtgattaatgagattaacaagatccgggaaaatgaggacagaatttttgtatactttattactaagctttcccgagtcggtagaggaactgcgtacgtgggatttcacggaggtctctggcagtccgttcacatagatgacctgagacggtccactctgatggtgagtgatgtgacgcggttgcagcatgtgacaatttcacagctttttgctcctggggacctccccgagctgggactggagcaccgagcagaggatgggcacgaagaggccatggagaccgaggcctcaaccagtggcgaggtcgcagaggtggctgaggaagccatggaaacagaaagcagcgaaaaggtaggtaaagagacctctgaattaggtggaagcgatgtttctatcttagacaccacacggctgctccgctcttgtgtccagtctgccgtggggatgttgagggaccagaatgagtcctgcacccgcaacatgcgcagagtcgtcctcttacttggcttgctcaatgaggacgacgcttgccacgcctcattccttcgggtgagcaaaatgcgtttgtctgtcttcctgaaaaaacaggaggagtcccaatttcatcccttggagtggctggcacgcgaggcctgcaatcaggatgctttgcaagaggccggtacctttcggcacacactttggaagcgagtgcagggggcagttacaccactgttggctagtatgatcagcttcatagatcgggacggtaatcttgagttactaactcgccctgacactcctccatgggcccgtgatctctggatgtttatcttctccgataccatgctgttaaatatcccccttgttatgaataacgagaggcataagggcgagatggcgtacatcgtggtgcagaatcatatgaacctctcagagaacgcaagcaacaatgtacctttttcttggaaaattaaagattatctggaggaattgtgggtgcaggcacagtatatcactgacgcggaaggtctcccaaagaagttcgtggacatttttcaacagactcccctaggacggtttcttgctcagttacatggcgagccccagcaggagctcctgcaatgctacctgaaggatttcatccttctgacaatgagggtgtcaacggaagaggagctaaaattcctccaaatggccctttggtcatgtacacggaaacttaaagcagctagtgaagcgccagaagaggaggtcagcctcccttgggtccatctcgcttatcaaagattcagatctcggctgcagaactttagtcgtattctcacaatttatccacaggtgctacatagtctgatggaagcgaggtggaatcacgagttggcgggatgcgagatgaccctggatgcatttgcagctatggcttgtactgagatgctgacccggaataccctgaaaccttccccacaagcatggctccaactggtgaaaaatctgagcatgcctctggagctgatatgctcagatgagcacatgcagggttccgggtcattggctcaggcagtgatcagggaagtccgggctcagtggagccgaattttttcgacagccctgttcgtggaacacgtcctgctgggtaccgaatcaagagtgcccgagctgcagggcttggtgacagagcatgtatttctgctcgataagtgtttacgagagaattccgacgtgaagactcacggcccatttgaggcagttatgcgtacattgtgcgagtgcaaagagactgccagcaaaaccctgagtcgctttggcattcagccttgtagcatatgcctcggggatgccaaggatcccgtatgcctgccatgtgatcatgtccattgcctccgctgcttgcgcgcttggtttgcctcggaacagatgatctgtccctattgtcttacagcccttccagacgagttttcccctgctgtgtcccaggcccaccgcgaggctatagaaaagcacgccagattcagacaaatgtgcaactctttcttcgtagatctggtttctactatctgcttcaaggacaacgccccaccagagaaagaggtgatagaatctctgctgtctctgctgttcgtgcagaagggaagactgcgggatgctgcacaacgacactgtgagcacaccaaatctttgagcccattcaatgacgtggtcgacaaaacccccgtgatccgctccgtaatcctcaaactgttgctgaaatactcattccatgatgtgaaggactatattcaggagtacctcacactcctcaagaagaaagctttcatcacagaggataagactgagctttatatgctgttcattaattgtctggaggattctatcctcgagaagaccagtgcttattctagaaatgatgagctgaatcacctagaggaagagggacgctttctgaaggcttattctccagccagcaggggcagggaacccgctaatgaggcatctgtcgagtacctgcaggaggtggcacggatccgcctgtgcctggatcgagcagccgactttctttcagagcccgaggggggaccggagatggccaaggagaagcagtgctatctgcagcaggtcaaacagttttgcatcagggtggaaaacgattggcacagggtctatctggtgcgtaagctctcttcccagcgcggaatggaatttgttcagggactgagtaagcccggaaggccacaccagtgggtgtttcccaaagacgtagttaagcagcaggggctaagacaggatcacccgggtcagatggatcgatatttagtgtatggcgacgagtataaggctctgagagacgccgtggctaaagccgtgttggagtgtaaaccattggggatcaaaaccgccttgaaggcgtgtaagactccgcagtcccagcagtccgcatacttcctgctaacactgtttcgtgaggttgccattctgtatcggtcacataacgcgtccctgcaccctacccccgagcagtgtgaagctgtgtccaaatttattggggagtgcaagatcttatcgccaccagacatttcaagatttgccaccagcctggtggataatagcgtcccactgctgcgggcagggccaagcgattctaatctggacggaacagtaaccgagatggctatccacgcagcagccgtgctcctttgcggccagaatgaactgctcgaaccgctgaagaacctcgcctttagtccagccaccatggcgcatgcatttctgcccacaatgccggaggacctgttagcacaggccagaaggtggaaaggcctcgaaagggttcactggtacacctgtcccaacgggcatccttgcagtgtcggcgagtgcgggagacctatggagcaatccatctgcatcgactgccatgcacctatcggagggatcgatcacaagccgagggatggcttccacctcgtgaaggataaagccgatcgcactcagactggccacgtgctgggaaatccacaacgcagagatgtcgttacatgtgaccggggactgccgccagtggtatttctgcttatccggctcctcacacacctcgcccttcttctgggcgcaagtcagtccagccaggccctaataaatatcatcaagccccctgtcagagaccctaagggattccttcagcaacacatactgaaggacttggaacagctcgcaaagatgttaggccattctgccgatgaaaccatcggagtagtgcaccttgtcttgagacggcttcttcaggagcaacaccagctgagtagccggaggctgctaaattttgatactgaactgtccaccaaggaaatgaggaataactgggagaaagagatcgctgcagtcatttccccggagcttgaacacctggataagacacttccaacaatgaacaacttgatcagtcaggataaacgtatttcttctaatcctgtggctaagatcatttatggagaccctgtaacattcttacctcacctcccacgcaaaagtgtcgtccactgctctaagatctggtcctgcaggaagaggatcacggtggaatacctgcagcatatcgtggaacaaaagaacggcaaggagcgggttcccatcctgtggcactttctgcagaaggaggccgaactgcgtttagtgaagttcctgccagagattctagccctccagcgtgacctggtaaagcagtttcagaatgtacaacaggtggagtacagtagcatccgtggcttcctctccaagcactccagtgatgggctgcgacagctactgcacaacagaatcaccgtattcctcagcacatggaataagctcagaaggagtttggagacgaatggggaaattaatttaccaaaggattattgcagcacggatctcgacttggatacagaatttgaaattctgctgcctcgccgacgaggcctggggctgtgcgctacagccctggtgagctatctcattcgtctgcacaatgagatcgtatacgcggtggagaaattatccaaggaaaacaacagctattctgtggacgcagctgaagttaccgagttacacgtgatatcttacgaagtggagagggacctgacacccctgattttatctaactgtcaatatcaggtcgaggagggacgggaaaccgtccaagagttcgatctagagaaaattcagcgccagattgtttcgagattcctacaagggaaacctagactcagcctcaagggaatccccactctcgtttatcgacacgattggaactatgagcacctatttatggacatcaagaacaaaatggcccaggacagcctaccaagcagcgtgatctcggccattagcggtcaactccaatcctattctgacgcatgcgaggttctgagtgtcgtcgaggttaccctgggatttctctccaccgccggaggagacccgaatatgcagcttaacgtgtacactcaagacattttacagatgggtgatcaaaccatacatgttctcaaggctctgaacaggtgtcagctgaagcacactattgctctctggcaattcctgtcggctcataaatctgagcagctgctgcggctccacaaagaacccttcggtgaaatatcatctcggtataaggccgacctgagtccggagaacgctaaactgttaagcacattcttgaatcaaaccggactggacgcctttttgttagaactccatgagatgataatcctaaagttgaaaaacccccagacgcaaacggaagaaagatttcgcccacagtggagccttagggacacattggtctcctacatgcagactaaggagtctgaaatccttccagagatggcgtcccagttccctgaggaaattctgctagcgagctgtgtttccgtctggaagacggccgcagtcctcaagtggaatcgagaaatgcgtta

SEQ ID NO: 239268 - DNA, 4653 bp, synthetic construct
  misc_feature 1..4653: note = Description of Artificial Sequence: Synthetic coding sequence
  source 1..4653: mol_type = other DNA
atggagtgtccgtcttgtcagcatgtgagcaaggaagaaaccccgaaattctgctcccagtgcggtgaacgcctcccccctgcagcgccaatcgccgattccgaaaacaataactctaccatggcctccgcatccgagggcgagatggagtgtgggcaagagcttaaagaggagggaggcccttgcctgtttcccggaagcgactcttggcaggagaatcctgaagaaccttgcagcaaagcttcctggactgtacaggagtcaaaaaaaaaaaaacggaagaaaaaaaaaaagggaaacaaaagtgcctcttccgaactcgcaagcttgccactatctcccgcttctccttgccacctgaccttactgtctaatccttggccccaggacactgccctgccgcactctcaggcgcagcaaagtggtcccactggccagccatcccagcctcctgggactgcaaccactcccttggagggggacgggctttccgctcccactgaagtgggtgattcccctctgcaggcccaggctctgggggaggcgggtgtggcgaccggcagtgaggcacagagcagccctcagttccaggaccacaccgaaggagaggatcaggatgcctcaatcccaagcggcggtagaggacttagccaggaaggaactggacctcctacttctgccggagaggggcactctcggactgaagatgcagcgcaggagctccttctgccggagagtaaagggggttcaagtgaacccggtactgagcttcaaactactgagcagcaggccggagcctccgcttccatggctgtcgacgccgtcgccgaacccgcaaatgccgttaagggggctggcaaggaaatgaaggaaaagacccagaggatgaagcaacccccagccaccacaccacccttcaaaactcactgtcaggaggcagagactaagaccaaggacgaaatggctgccgctgaggagaaagtcggaaagaacgaacaaggcgagccagaggatctcaagaagcctgaagggaagaacaggagtgccgcagcagtcaaaaatgaaaaagagcagaaaaaccaggaagccgatgttcaggaggttaaggcctccactttgtcccccggaggcggtgtgaccgtattcttccacgctatcatctcccttcatttccccttcaatccagacttacacaaggttttcattagggggggagaagaatttggggagtccaaatgggactccaacatctgtgagctgcattatacgcgtgacctgggacatgatagagtgctggttgagggtattgtgtgtataagtaagaaacatttggacaagtatatcccatataagtatgtgatctataacggcgagagttttgaatatgagtttatttataagcaccagcagaaaaagggtgagtacgtaaataggtgtctctttatcaagtccagtctcctgggctccggagactggcaccagtactacgacatagtgtacatgaagccccacgggcgactgcagaaagttatgaaccatatcaccgatggcccaaggaaggacctggtgaagggtaaacaaatcgccgcagcattgatgctggattctacttttagtatccttcaaacgtgggatactattaacctgaacagtttctttacccagtttgaacaattttgtttcgtcctgcagcagcccatgatatacgagggccaggctcaactctggacagatctgcagtatagagaaaaggaggtaaagcgttacctgtggcagcacctgaagaaacacgttgtgcccctgccagatgggaaatctacagactttctgcccgttgactgtcccgtgcggtctaagttaaaaacaggactcatcgtcctttttgtggtcgaaaagatagagttactcctcgagggaagtcttgattggctttgtcatctcctcaccagtgatgcaagtagtcccgatgagtttcaccgagatcttagccacatccttggcataccacagtcctggaggttgtatcttgtgaacctgtgtcagcggtgcatggacacacggacatatacgtggctcggtgccctccctgtgctgcattgctgtatggagctcgccccacgacacaaggatgcttggagacagcctgaggatacctgggccgctctcgagggactgtcattttccccctttagagaacaaatgctggacacctcttctcttctacagttcatgagggagaagcagcatttgctgtcaatcgatgagcctctgttcaggtcttggttttctctcctgccactatcccacctcgttatgtatatggaaaacttcatagagcacctcggaaggttccccgcacacatcctagactgcctgagtggcatctattatcggttaccgggattagagcaagtgctaaacactcaggatgtacaagacgttcagaatgtgcagaacattctcgaaatgctactgagactgctcgatacctacagggacaaaatccccgaagaagcactcagcccgagttatcttaccgtgtgtctgaagctccatgaagcaatatgctcatctaccaagctgttgaagttctatgagctgccggctctgagcgctgagatagtgtgccggatgattcgccttctgagccttgtggacagcgccggacagcgggacgaaactgggaacaactccgtgcagacagttttccaaggtacacttgcggctacaaaaagatggctgagggaagtgttcaccaagaatatgctcacctcctccggggcttccttcacatatgtgaaagagatcgaggtctggaggcgcctggtcgagatccaattcccagccgagcatggatggaaagaaagcctgctgggggacatggaatggcggcttacaaaagaggaaccactgtcccagattacggcctattgcaattcctgctgggatactaagggcctcgaagactccgtcgcgaaaaccttcgaaaaatgcattatcgaggccgtttcttctgcttgtcagtcacaaacaagcatcttgcagggcttcagctattcggacctgagaaaatttggcattgtcctctccgccgtgattacgaaaagttggccacgcacagccgacaactttaacgacatcctcaagcacctcttgactctggccgacgtcaaacatgtgtttaggctgtgtgggacagatgagaagattctggcaaatgtgactgaggatgctaagcgtcttatcgctgttgctgattcagtgctgacaaaggtggtgggagatttgctcagtgggaccatactagtggggcagctggagctgatcattaaacacaagaatcagtttttggatatatggcagttgagggagaagtcactgtcccctcaggacgagcagtgtgccgttgaagaggccttggattggcgcagggaagaactgctgttgctaaaaaaagagaaacgatgcgtagacagtctgctgaaaatgtgcgggaatgttaagcacctgattcaggtagattttggggtcctggctgtgcgccatagccaggacctctcatctaaaaggcttaacgatacggtaaccgtccgtcttagtacgagctctaattctcaacgagccacccattaccatctgtcctctcaggtacaggaaatggcaggtaagattgaccttctccgagactctcacattttccaactgttttggagggaggcagctgagcccctctctgagccaaaagaggatcaggaagctgcagaactgttgtcggagccagaagaagaatctgagaggcacatcttggaacttgaggaggtgtacgattatctgtaccagcccagctaccgcaagtttatcaagcttcaccaggacctgaagagcggtgaggtgacactggcagagatcgatgtgatctttaaagactttgtcaacaagtataccgatctagacagtgagttgaagatcatgtgtacagtagaccatcaggatcagagggattggattaaagacagagttgaacagataaaggagtatcaccacctgcaccaggctgtgcatgctgccaaagtgattttgcaagttaaggaatcgttaggcctgaacggggattttagcgtactcaacactctccttaattttactgacaattttgacgactttaggcgcgaaacactggaccaaattaatcaggagttaattcaggccaagaaactcctgcaggatatctccgaggctcggtgcaagggcctgcaggccctgagtcttcggaaggaattcatttgctgggtgcgagaagccctggggggtatcaatgagctgaaggtctttgttgacctggcttcaatctctgccggtgaaaatgacatcgacgtagatcgagttgcttgttttcacgatgcagtgcagggatatgcatcccttcttttcaagttggatcccagcgtggattttagtgcgttcatgaagcacctgaagaaactgtggaaagcgctggacaaagatcagtatctgccacgcaaactagtttctctaattttgtcgctaatgcaaatattgctcaatagagccctcctctccaatgttcgggcagtaaccgtggaaatggtggcccacctatgcggcaggtttgttcacagtcggtttcagtag

SEQ ID NO: 239269 - DNA, 15770 bp, synthetic construct
  misc_feature 1..15770: note = Description of Artificial Sequence: Synthetic coding sequence
  source 1..15770: mol_type = other DNA
atggagtgcccctcctgccagcatgtcagtaaggaggagactccaaagttttgctcccagtgcggagagagactcccccctgctgctcccattgctgactccgaaaataataattcgacaatggccagcgcaagtgagggtgagatggagtgtggtcaggagctcaaggaagaaggcggtccatgtctttttccaggatctgattcttggcaagaaaaccccgaagagccctgttccaaggcctcatggaccgtccaggagggggcaacctcagaagttctcgttgatgctgcagtggatctgattagtgatgagtgggaagccgctaacgctatcccaagtaagcggagaaaacaggatgcagcccctttggaggccgcaagtgtgcccagcgctgattgtgagcaatcaaagaagaaaaagcgcaaaaaaaaaaagaaagggaataaaagtgccagctctgagctcgcttccctacctttaagccctgccagcccatgccaccttacattgctgtctaatccttggccacaggacactgcccttccgcactctcaggcccagcagagcggccctacaggccaaccaagtcaaccacctgggaccgccaccacgccactggaaggcgatggcttgtcagctcccaccgaggtcggagactcccccctacaagcccaggcccttggcgaagcaggcgtcgctacgggttcagaggcccagtcctcccctcagtttcaggatcacaccgaaggagaagatcaagacgcctccattccctcaggtggtaggggattgtcccaagaagggactggccctccaacctccgcaggcgagggccacagcagaacggaggatgctgctcaggagctgctcttaccagagtcaaagggagggtctagtgaacctggcacagagttgcagactacagaacagcaggcaggcgcatccgcaagtatggcagtcgacgctgtggctgagcctgctaatgcagtgaagggggcaggcaaggagatgaaagagaagacgcagcgcatgaagcagccacccgctactacccccccttttaaaacccattgccaagaagcagaaaccaaaactaaagacgagatggctgcggcagaggaaaaggtcggcaaaaatgagcagggtgagcccgaggatttgaagaagccagaggggaagaaccgttccgcggctgcggtgaaaaacgagaaggaacagaaaaatcaggaggctgatgtgcaggaggtgaaagccagcaccctgtccccaggaggtggcgtaacagtcttctttcatgcaataatcagcctgcactttccgtttaacccagatctccataaggttttcatcagaggcggagaggaatttggagaatccaaatgggattcaaacatctgtgaattgcattacactagggacctgggccacgaccgggttctcgtggaaggaatagtgtgcatctccaaaaaacatcttgataaatatattccttataaatacgtgatctataacggagagtcttttgagtatgagttcatctacaagcatcagcagaagaaaggagaatacgtcaaccgatgtctctttatcaagtcatccctcctgggcagcggcgattggcaccaatactatgacatcgtttacatgaagccacacggccgactccagaaagtaatgaatcacattacagacggccctcggaaagatttggtgaaggggaaacagattgccgctgctcttatgcttgattctactttcagcatactgcagacgtgggacaccattaatcttaactccttcttcacacagtttgagcagttttgtttcgtccttcaacaaccaatgatctatgaagggcaggcccaactctggaccgatctgcagtatagggagaaagaagtgaaacgatatctgtggcagcatctgaagaagcatgttgtccctttacccgacggcaagtcgacggactttctccctgttgattgcccagtgcggtccaaactgaagactggcttgatcgtgctgttcgtggtggagaagatcgaactactgcttgagggctctctcgattggctgtgccatctgctgacctctgacgcatcctctcccgatgagttccaccgcgatctaagccacatcctgggtatcccacaaagttggcggctttacctggtgaacctttgccagcggtgtatggacacaagaacctacacgtggctcggggcactgccggttctccactgctgcatggagctggcaccaagacacaaggatgcctggaggcagcctgaagacacatgggctgcactggaaggcctctcattttccccattccgtgagcagatgctggacactagctcactgctacagttcatgagagagaaacaacatctcctgtcaattgacgagcctctgttcagatcttggttctcacttcttcccttatctcacctggtgatgtacatggagaactttattgaacacctggggcgttttcccgcacatatcctagattgtctgtcaggcatatattataggcttccgggactggaacaggttcttaacactcaggatgtccaagatgtgcagaacgtacagaacattctggaaatgctgctgcggctcctggacacttatcgggataaaatacctgaggaagccctttcaccctcctacctcactgtttgcctgaagctgcacgaggccatctgttcttctaccaaactgctcaaattttacgaactcccagcactctcagccgagatagtgtgccgcatgattcgcctcttgtccctggtcgacagtgccggtcagcgagacgaaactgggaacaattctgtgcagacagtgtttcagggaacgctcgccgctacaaagagatggctccgcgaggtctttactaagaatatgctgacctccagcggagcctctttcacatatgtgaaggagatcgaggtgtggcggagactggtggaaatacaatttccagctgaacacggatggaaggagtccttactgggagacatggaatggcgactgacaaaggaggaacccctttctcagatcacagcttattgcaattcctgctgggacaccaagggtctcgaggatagcgttgccaagaccttcgaaaagtgtattatcgaggccgtgagctcagcgtgtcagagtcaaacgtccattctgcagggattctcttactctgatttaaggaagttcgggatcgttttaagcgcagtgatcacaaagtcttggcctcgaacagctgacaatttcaacgatattctgaaacacttacttacacttgcagacgtgaaacatgtctttagactgtgcggcacagatgaaaagatcctcgctaacgttactgaggacgcgaagcgtttgattgctgtcgcggatagcgttctgaccaaagtggtgggtgatctcctctcaggtacgattcttgtgggacaattagagctcatcatcaaacataagaatcagttcctggacatttggcagttgcgggagaaaagcctgagccctcaggacgagcagtgtgctgttgaggaggctctcgattggaggagagaagaattattactgctgaagaaggaaaagaggtgcgtcgacagtcttctgaagatgtgcggtaatgtcaaacacctgatacaagtcgacttcggtgtgctggctgtaaggcatagccaggacctctcatctaagagacttaatgatacagttactgttcggctgtctacttcaagcaattcgcagagggccactcactaccacctctcctcccaggtacaggagatggccggaaagattgatttacttagagactctcatatatttcagctcttctggcgagaggccgctgaaccattatcagaacctaaagaagatcaagaagcagctgagctgctctcagagcctgaggaagagagtgagcgccatatcctggaattagaggaggtgtatgactatttgtaccagccttcatacaggaaatttattaaactccaccaggacctgaagtccggtgaggtcaccctggctgaaattgacgtgatctttaaagattttgtcaacaagtatactgatctggatagtgaactgaaaattatgtgtacagtagaccatcaggaccaacgagactggatcaaggatcgagtggaacagatcaaggaataccaccatctgcaccaggcagtacacgccgcaaaggtgattctccaggtcaaggagagcctggggctaaacggggacttctccgttctgaacaccctactgaacttcacagacaatttcgacgactttagacgagagacactcgaccagatcaaccaggaactgatccaggcgaagaaactgctgcaggatatcagcgaggccagatgcaaaggcttgcaggcactgtctctgaggaaagaatttatttgctgggtccgggaagccctgggtgggatcaacgaactgaaagtgttcgtcgatttagcctccatttcagccggagagaatgacatcgatgtagatcgagttgcgtgcttccacgatgccgttcagggatacgcatcactgctctttaaactcgacccgagcgttgatttctctgcttttatgaagcacctcaaaaagctttggaaggccttagataaagatcagtacctaccacgtaagctctgtgattcggcgagaaatctggagtggctcaagactgtcaacgagtcccacggcagtgtcgagcgcagttctctgacactcgcaaccgccattaaccagaggggaatttatgtgatccaggctcccaagggtggtcagaagatatcacctgatacagtcctgcacttaattctccccgaaagcccgggaagtcatgaggaatctcgcgaatacagtttggaagaggtgaaagaactgctgaacaaattaatgcttatgtctggaaagaaggatcgcaacaataccgaagtggagcgtttctctgaggttttctgctccgttcagaggctctctcaagctttcatagacctccactcggctggtaacatgctgtttcgcacttggattgctatggcgtattgcagcccaaaacaaggcgtgagcctccaaatggacttcggcctggacttggtgactgagctgaaagagggcggtgatgtaaccgagctgctggcagccctgtgccggcagatggaacacttcctcgacagctggaagaggtttgtcacacaaaagcgcatggaacacttttatctgaacttttatacagctgaacagctagtgtaccttagtacggaactgaggaaacagccaccgagcgatgctgcacttacgatgcttagtttcattaaaagcaactgtacgttgagagacgttctgcgggcaagcgtggggtgcgggtccgaagctgcacggtaccggatgcggagagttatggaggaactgcccttgatgttgctgtctgaattctctctggtggataagctcaggattattatggaacagtccatgcggtgtctgcctgccttcttgccagattgcctggacttggaaactctcggtcactgcttggcacacctagccggtatggggggatctcctgtagagcggtgcctgccgaggggtctccaggtaggacagccaaacttggttgtgtgcggacattctgaggttctgcctgctgcacttgccgtgtatatgcagacccccagccaacccttaccgacctatgacgaggtgcttctgtgcaccccagccaccacatttgaagaggtggccctgctccttcgtcgctgtctgacacttgggtcgcttggacacaaggtctacagtctgctatttgctgaccagctttcatacgaagttgccagacaggcggaggaactctttcacaatctgtgcacccaacagcatagagaggactaccagctggtgatggtctgcgacggcgattgggaacactgttacttgccctcagctttttcacaacacaaggtgtttgttacaccccaggctccactggaagccattcaggcctacctcgctggccactaccgcgttcccaagcagaccctgagcgccgcagcagtgttcaatgacagattgtgcgtgggaattgtggcaagtgagagagccggagtgggcaagagcttgtacgtgaagcgactccatgacaaaatgaagatgcagctcaatgtgaaaaatgtccctctgaaaacaatccgtctgattgatccacaagtggatgaatctcgggtcttgggagctctacttccattccttgatgcccagtatcagaaagtcccggtgttattccatctcgatgtcacaagtagtgtacagacaggcatatgggttttcttgttcaagctgctgattctgcagtatcttatggatatcaatggtaagatgtggctacggaacccttgtcacctctacattgtagaaattctggaacgcagaacctctgtaccaagtcgttcgtcgtccgccctgaggactcgtgtgccccagttttcgttcctagatatctttcctaaggtgacatgtagacctcccaaggaggtgatagacatggagctgagcgccctgaggagcgatactgaacccggaatggacttgtgggagttctgctcggagaccttccagaggccatatcagtatctgaggaggttcaaccagaaccaggacctggacacctttcagtatcaggagggcagtgtggagggcacccccgaagagtgcctccagcattttctatttcattgcggagttattaacccctcatggtctgaactcagaaactttgctcggtttttaaactatcagctcagagactgcgaggcctcactcttttgtaaccctagttttattggcgacacacttagggggttcaaaaagttcgtggtcacgttcatgattttcatggcgagggatttcgctacccccagtcttcatacatctgaccagtcgcctggcaaacacatggtgactatggatggggttagagaagaggacttggctcccttttctctgcgtaagcgctgggagtccgagccacatccttacgtgttctttaatgatgaccatactaccatgaccttcatcggtttccatctccaacctaacatcaatgggagtgtagacgccatttctcatctcactgggaaggtgattaagcgcgacgtaatgacccgagacctctaccagggactgctgctgcagcgagtcccttttaatgtcgactttgataagctgccgcgacacaagaagctcgaaagactgtgccttactttgggcatcccgcaggcaaccgaccctgacaaaacatatgaactcactaccgataacatgctgaagatcctcgctatagagatgaggtttcgctgcggtatcccggtcatcatcatgggcgagacgggatgcgggaagacccggttaattaagttcctgtccgacctccgtcggggaggaacaaacgccgacaccattaaactggttaaggtacatggaggtaccacggccgacatgatctacagtagagttcgggaggctgagaatgtggctttcgccaataaggatcagcatcagctcgatactatactgttctttgatgaggcgaacacaacagaggccatttcatgtataaaagaagtgctttgtgatcatatggtggacggccagcctttggcggaggattccggcttgcatattattgccgcatgtaacccataccgtaaacattcggaagagatgatttgcaggttggaaagtgcaggcctggggtatcgcgtctccatggaggaaaccgccgacaggctgggaagcataccactccgacagctcgtatatagggtccatgctcttcccccatctctgatccctctggtttgggactttggacaactgtctgatgttgcggaaaagttatacattcaacagattgttcagagactcgtcgaaagtatttcacttgatgagaatgggactagagtcatcaccgaagttctgtgcgcctctcaggggttcatgcgtaagacagaagacgaatgctcctttgtttctctgagggatgtcgagcgctgcgtcaaagtctttcgctggttccatgaacacagtgctatgctgctcgctcagttgaacgcctttttatcaaagagtagcgtgtccaagaaccacacagagcgcgatcccgttctttggagcctcatgctggccataggcgtttgttatcacgcgtccctggaaaaaaaggattcttacagaaaagccattgcaagatttttccccaagccctacgacgactctagactactgctcgacgaaatcactcgcgcacaggacttatttctcgatggagtgcccctaaggaaaaccatcgcaaagaacctggcacttaaagaaaatgtattcatgatggtggtctgcatagagttaaagatcccgctgttcctggtgggaaaacccggatcaagcaagtcacttgccaagacaatcgtggctgacgcaatgcagggcccagccgcatacagtgacctgttccgtagtctaaagcaggtccatttggtctcgtttcagtgcagcccgcattccacgccacagggaattatcagtaccttcagacagtgcgcacgcttccaacagggtaaggatctacagcagtatgtgtccgtggtggtgcttgatgaggtaggcttggcagaagattccccgaagatgccgcttaagactctgcatcccctcctcgaggacggctgcattgaagatgatcccgcaccccataagaaggtgggctttgttggtatctcaaactgggctctcgatcccgctaagatgaaccgcggaatttttgtcagtcgcggtagtccaaatgaaacagaattgattgaaagtgcgaagggaatctgcagcagcgatattctggtgcaagatcgcgtccagggatactttgctagcttcgccaaggcatacgagactgtatgtaaacgccaggataaggaatttttcggacttagagactactacagcctgattaaaatggtgttcgcggctgctaaggcaagcaatagaaagccaagcccccaggacatcgctcaggctgtgttgcgaaacttctcaggcaaggatgacatccaggccctagatatctttcttgccaacctacctgaggccaaatgttctgaagaggtgtcaccgatgcaactgatcaagcagaacatcttcggcccttcccaaaaggttccagggggtgaacaggaggacgccgagagccgttatctgctggtcctgacaaagaattacgttgcccttcagatccttcaacaaactttttttgagggcgatcaacaacccgagattatatttgggagcgggttccccaaagaccaggagtacacccaactgtgcagaaatatcaacagggtgaagatctgcatggagactggaaaaatggtgttattgctgaatctgcaaaatctttacgagagtctatatgatgccctgaaccagtactacgtccacctgggcggacagaagtacgttgatttgggattggggacacatcgcgtgaagtgccgtgttcatccaaactttcgcttgatcgtgattgaggagaaggatgtggtgtataagcactttcctattcccctcattaaccggctggagaagcactaccttgacatcaataccgttttagaaaagtggcagaaaagcatagtggaggaactgtgcgcctgggtcgaaaagttcattaacgtaaaagcacatcactttcaaaagcggcataaatatagccctagcgacgtttttatcggctaccactccgatgcttgtgcctctgtcgtactgcaggtcatcgaacggcagggacccagggccttgacggaggaactgcaccagaaggtgagtgaagaggcgaaaagtatactgctaaactgtgccacgcccgacgccgtagtccggctgagcgcttactccctgggcggatttgctgccgaatggctgtctcaggagtacttccataggcagagacacaactctttcgccgatttcctacaggcacacctgcatacggcggatctggaaaggcacgccatttttaccgaaatcaccacattcagtagactgctgacatcccatgactgtgagattctcgagagtgaggttaccggacgcgcacccaagcccacactgctgtggctccagcaattcgatacagaatacagctttcttaaggaggtccgcaattgcctcacaaataccgcgaaatgcaagattttgattttccaaactgattttgaagatggcatcagaagtgcccagctgatcgcaagcgccaagtattcggtgataaatgagatcaataaaatacgtgagaatgaagacagaatcttcgtttactttatcaccaaactgagccgcgtgggccgtggaacagcttatgtcggcttccacggcggtctctggcagagcgtgcatattgacgacctcaggagatctactttaatggtctccgatgtgacccgactacagcatgttacaatctcccaacttttcgcacctggagacctgccggagcttgggctcgagcatcgagccgaagacggacatgaagaggcgatggagaccgaggcctccacctccggagaggtggcggaagtagccgaagaggcgatggagacggagtcttctgagaaagtggggaaggagacatccgaacttggaggatccgacgtgtcaattctcgataccaccaggctgttaagatcttgtgtgcagagcgctgtgggcatgcttcgggaccaaaacgagagttgcaccagaaacatgaggagggtcgtgttactgctgggcctgctgaacgaggatgatgcttgtcacgcttcctttctgagggtttccaaaatgagattgtccgtgttcctgaaaaagcaggaggagagccagttccatcccctggagtggctcgcacgggaggcttgcaaccaggacgccctgcaagaagctgggacgtttcgtcacaccctgtggaagagggtgcagggtgcagttactccactgctggccagcatgatcagcttcatcgaccgagatggcaatctggagctgttaaccagaccagacacgccgccttgggctagagacctttggatgtttattttctcagatacaatgctcctcaacattccacttgtgatgaacaatgagcggcacaaaggagaaatggcctacatcgtggttcagaaccatatgaacctgagcgaaaacgcaagcaacaacgtcccgttcagttggaaaatcaaagattacttagaggaactgtgggtgcaggctcaatacatcacggatgcggagggcttgccaaagaagtttgtggacattttccagcagactcctcttggacggttcctcgcacagttacatggagagccccagcaggaacttcttcaatgctaccttaaagactttattctgctgactatgcgggtgtcgaccgaggaggagctcaagtttctgcagatggctttatggtcctgtacaaggaagctgaaggctgcttctgaggcccctgaggaggaggtgtcccttccctgggtccacttggcctatcaaagattccgatcccggctccagaacttctctagaatcttgacgatttatccccaggttctgcactctttaatggaggccagatggaaccacgaattagccggttgtgagatgactctcgacgctttcgccgctatggcgtgcactgagatgctgacacggaataccctgaaaccatcccctcaggcctggcttcaactcgtgaagaatctgagcatgcccttagaacttatatgcagtgacgagcatatgcaaggatctgggagcctcgctcaagcagttatccgcgaagtgcgagctcagtggagtagaatcttctcaacggcgctgtttgttgagcatgtgctactgggcacagagtcccgagtacccgagctgcaaggcttagtgactgagcatgtgttcctgctggacaagtgtctacgtgaaaattccgatgtgaagacccatggaccctttgaggctgtgatgcggacgctgtgtgagtgtaaggagaccgcgagcaagaccttgagtcggtttggaattcagccatgtagtatctgcctcggcgatgctaaggatccagtgtgtctaccgtgcgaccatgtgcattgcctacgatgcctgcgagcttggtttgccagcgaacagatgatttgcccctattgtctcactgctctgccagatgaattcagcccggcagtgtcccaggcacacagagaagcgattgaaaaacacgccaggttccgacagatgtgcaattccttttttgtagacctggtgagcaccatctgctttaaggacaacgcacccccagaaaaagaagtgattgagtcgcttctctcccttctgttcgtgcagaagggtagactgagagatgcagcccagagacactgtgaacacactaagtccctgtctcccttcaacgatgtcgtagacaagaccccagtaattcgatccgtcatactgaaactcctactgaaatactcattccacgatgtcaaagactacatacaggaataccttaccctgttgaagaagaaagcatttataaccgaggacaagactgagctttacatgttgttcattaactgcctcgaggattcaatcttagaaaagacttcagcttactctaggaatgacgaactgaaccatttagaagaggaggggaggtttttgaaggcctactctcctgcgtcaagaggtcgcgagcccgctaacgaggcttcagtggagtatctccaggaggttgcacgaatcaggctctgtctggacagggccgctgactttctctctgaacctgagggaggcccagaaatggcaaaggaaaagcagtgctatctgcagcaggtgaaacagttttgcatccgtgtggaaaatgactggcaccgagtctacctggtgcggaaactgagctctcaacgcggaatggagttcgttcaagggttgtcaaagcccggtaggccgcatcaatgggtgtttccgaaggacgtcgtgaagcaacaggggcttcgccaggaccatcccggacaaatggaccgctacctggtatatggcgacgagtacaaagccctgagagacgctgtggctaaggccgttctggaatgcaaaccgttgggaatcaaaaccgctttgaaggcgtgcaaaactcctcaaagccagcagagcgcatacttcctgttaaccttattcagagaagttgcaattctgtatagatcacataacgcatcactgcacccaactccagagcagtgtgaagctgtgagtaaatttattggagaatgtaaaatcctctcgccgccagacatctcacggtttgccacgtctctcgttgacaacagtgtgccactgctgcgagccggtccaagtgacagcaatcttgacggaaccgtcactgagatggcgatccacgcagccgcagtccttttgtgtgggcagaacgaactgctggagccattgaagaaccttgcattctctccagccacgatggctcatgcattcttgccaacaatgcctgaggatttactggcccaggccaggcggtggaagggtctggaacgcgtccattggtacacatgccctaatggacatccatgttctgtgggcgaatgtggacgtccgatggaacagtcaatctgtatcgactgtcatgccccaatcggcggaattgatcacaaacctagggacgggtttcacttggttaaggacaaagccgacagaacacagaccgggcatgtgttaggaaatccccagcgaagggatgtagttacttgcgaccgaggcctgcctccagttgtctttctgctgattcgtctgctcacacaccttgcattgctgctgggcgctagccaaagctctcaggctctcatcaatatcattaagccccctgtacgagacccgaagggcttccttcagcagcacatcctcaaagatttggagcagttggcaaaaatgctgggccacagtgccgacgaaaccatcggagtggttcacctggtcctccggagattgctgcaggagcagcaccagctgagttctcggagactgcttaattttgatacagagctgtccaccaaggaaatgcgtaacaattgggagaaggagatagccgctgtgatcagtccagaacttgaacatttggataagacattgcctaccatgaataatctgatttctcaggataagaggatctctagtaacccagtggcaaagattatctacggcgacccagtgaccttcctgccccacctgccccgtaagtccgttgtgcattgctccaagatatggtcttgccgtaagcgcattactgtcgagtacctacagcacatcgtagagcagaaaaacgggaaggaaagggtgcccatactgtggcatttcctgcagaaggaggccgaactgcggctggtgaagtttctgcccgaaatacttgccctccaaagggacctggttaagcagtttcagaatgtgcagcaggttgagtatagttcgattcgtggctttttatccaaacactcgagcgacggcttaagacagctcctacataaccgcattaccgtgttcttgtcaacttggaacaaattaagacggagccttgaaactaatggggaaataaatttacccaaggactactgcagtacggacctcgatctggatacagagttcgaaatcctcctgccacggaggaggggactgggcctctgcgctacagctctcgtgtcgtacctgatccgactccataatgagatcgtgtacgcggtggagaaactgtccaaggagaacaactcgtactctgttgacgcagcagaggtgacagaactgcacgttattagttacgaggtagaacgggatcttaccccccttattctctctaattgccagtaccaagtagaggaagggcgagaaaccgtacaagagttcgacctggaaaagattcagagacagatcgtctcaaggtttctccaaggaaagcccagactcagtctcaagggcattcctactttagtgtacaggcatgattggaactatgagcacctgttcatggatattaagaataagatggctcaggacagtctgccgtcaagcgtgatctccgccatcagcggccagttgcagtcgtactctgacgcctgtgaggtgctcagcgtggtcgaagtgaccctcggctttttgtccaccgctgggggtgatccgaacatgcaactaaatgtgtatacacaagacattctccagatgggtgaccagactattcacgtgctcaaagccttaaaccgatgccagctgaaacacactatagctctttggcagttcctgtcagctcacaagtcagagcagctgcttaggctgcataaagagccttttggagaaattagttccaggtacaaggcagatctgtctcccgagaacgccaagctgctgtccaccttcctgaatcagacaggtttggacgccttcctgctggaactgcatgaaatgatcatactgaagctgaagaaccctcagacccagactgaagaaagattccgcccacagtggtctttgcgagacacacttgtctcttacatgcagacaaaagagtcagaaattctgccagagatggccagtcagttccctgaggaaattctcctggccagctgtgtgtctgtctggaagactgccgcagttctcaaatggaatcgtgagatgcgcta

SEQ ID NO: 239270 - DNA, 15624 bp, synthetic construct
  misc_feature 1..15624: note = Description of Artificial Sequence: Synthetic coding sequence
  source 1..15624: mol_type = other DNA
atggagtgtcctagttgccagcatgtttccaaggaagaaactcccaagttctgctctcagtgtggggagaggttgccacctgctgccccaattgctgacagtgagaacaataattctacaatggcgtcagcatcagaaggtgaaatggagtgtggacaagagctcaaagaagagggcggtccctgtctctttccgggatcagattcttggcaggagaatcccgaggaaccttgctccaaggcttcgtggacagtgcaggaaagtaagaaaaaaaaacggaagaagaagaaaaaaggtaataaatcagcatcttccgaactagctagtctgcctctgtctcctgccagtccatgtcatcttacactgttgagtaacccttggcctcaggataccgccctaccacacagtcaagctcagcagtcggggcctacaggccagcctagccagcctccaggcactgccacaactcccctagagggtgacggtctgtcggcacccactgaggtgggggattcccccctacaggcgcaagcactgggtgaagcaggtgtggctactggcagtgaagcccagtcctccccacagttccaggaccataccgaaggagaggatcaggatgccagcattccctcagggggtcgaggactcagccaagagggcactgggccacccacttccgccggtgaaggacatagcaggaccgaggacgcagcgcaggagctcttgctgccagaaagcaaagggggaagttcggagcccggaaccgagctgcagacgactgagcagcaggcgggagctagcgccagcatggctgtggatgctgtcgctgaacctgccaatgctgtgaagggcgcaggcaaggaaatgaaggaaaaaacccagcgcatgaaacaacctcccgctacgaccccacctttcaagacccactgccaggaggctgagactaagaccaaagatgagatggcagctgcagaggagaaagtgggaaaaaatgaacagggtgagccagaggatttaaagaagccagagggcaaaaatcgctcagcggctgctgttaaaaacgaaaaggagcagaagaaccaagaggctgatgtgcaagaggttaaagctagtacactgtctcccggaggcggagttactgtgttcttccacgctatcatctcactgcatttcccttttaatccagacctccacaaagtcttcattagaggcggtgaagagtttggagagagtaagtgggatagcaatatctgcgagctccattacacacgagacctcggccacgatagagtgctggtcgaaggaatcgtctgcatctcaaaaaagcacctcgataaatatattccttacaaatacgtaatctacaacggagagtccttcgagtacgagttcatctataaacaccagcaaaagaagggcgaatacgtgaaccgatgcctgttcatcaagtccagtctcctgggaagcggggattggcatcagtactacgacatcgtgtacatgaagcctcatggcagactccagaaggtcatgaatcacatcacagatggaccacgtaaagatctcgtgaaaggcaagcaaattgcggctgctctgatgctggactccacttttagcattctccagacctgggacacaatcaacctcaactcttttttcacgcagtttgagcagttctgctttgtgttgcaacaacccatgatttatgagggacaggcccagttgtggactgatctgcaatatagggagaaggaggtgaaacgatacctgtggcagcacctgaaaaaacacgtagtgccgttacccgacggcaagagtactgatttcctgccagtggactgccctgttaggagtaagcttaagacaggattgatagtgttgttcgtggtggaaaagattgaactgttacttgagggatcactggactggctgtgccatctcttaacatcagatgcttctagccccgacgaattccacagggacctgagtcatatactcggtattccccagtcgtggagactttacctggtgaatctttgccagcgatgcatggacaccagaacctatacgtggctgggcgcactgcccgtcctccattgttgcatggaactggctcctcgccacaaggatgcctggcgacagccagaggacacatgggccgctctcgaggggctctccttcagccctttccgcgaacaaatgttagacaccagttctttactacagttcatgcgggagaaacagcaccttctgagtatagacgaaccgttgttccgttcatggttctctttgctgcccctgagccatttggtcatgtacatggagaattttatcgaacacctgggccgattcccggctcacattctggactgtctgtcgggtatatattacaggctgccaggactggaacaagtgttaaatacccaggacgtgcaggatgtccagaacgtgcagaatattctggaaatgctgttacgactgctcgatacctacagggataaaatccccgaagaggccctgtccccctcctaccttacggtctgtctaaaactccatgaggctatctgctcatctactaagctgcttaagttctatgagctaccggctctaagcgccgaaatagtctgtagaatgatccgccttctgtctcttgtcgacagcgctggccagagagatgagaccgggaataattcagtacagactgtgttccagggaacactggcagccaccaagcgttggctccgagaagtgttcaccaaaaacatgttgacctccagcggcgcaagctttacatatgttaaggagatagaggtctggagacggttagtagagatccaatttcctgccgaacatggctggaaggaatcacttttgggagatatggagtggcggctgaccaaggaggagccactgtcacagattaccgcttattgcaattcctgctgggataccaaagggctagaggactccgtagctaaaacgttcgagaaatgtataatagaggctgtaagcagcgcttgtcagagtcagacttcaattctgcagggcttttcatactcagacctgaggaagttcggcatcgtcttatcagctgtgattaccaagtcctggccacgtacagccgacaatttcaacgacattctgaagcacctactgactcttgccgatgtaaaacacgtttttagattatgtggcaccgacgagaaaattctggccaatgttactgaggatgcaaaacggttgatagccgttgccgactcagtgttaacgaaagttgtgggcgatctcctgtccgggacaattcttgtgggccaactggagctgattatcaaacacaagaaccagtttctggatatttggcagcttcgcgaaaaatctttgagtccgcaggacgagcaatgtgccgtggaagaagcgctcgattggagaagggaagaattactgctcctcaaaaaggaaaaaaggtgtgtggatagtctgcttaaaatgtgcggcaatgtgaagcatttgattcaagtggacttcggggttctggccgtgcgccacagccaggacctctccagtaagaggctgaatgacaccgtgactgtgagattaagtacaagtagcaatagtcagagggccacccattaccacctgtccagtcaggttcaagagatggccggaaagattgatctgttgagagacagtcatatctttcagctgttctggcgtgaggctgcagaacccttgtccgaaccgaaggaggatcaggaagcagctgagctgctgagcgagcccgaagaagagtccgaacggcacatcttagagcttgaggaggtatacgattatctgtaccagccgtcttaccggaagtttatcaaactgcatcaagatctgaagagcggcgaagtgacactggccgaaatcgacgttatctttaaagacttcgtgaacaagtataccgacctagatagcgaactcaaaataatgtgtacagtggatcatcaagatcaaagagactggattaaagacagagtagagcagataaaggaataccatcacctgcatcaggcggtgcacgccgctaaggtgatactgcaagttaaggagagcctcggtttaaacggggactttagtgtgctgaatactctgctcaattttaccgataatttcgacgatttcagaagagaaaccctcgaccagattaaccaggaactcatacaggctaagaaactgttgcaggacatctctgaggctagatgcaaggggctccaggccctatccctgcggaaagagttcatatgttgggtgcgggaagccctcgggggaatcaatgagctgaaggtgttcgtggacttggcaagcattagcgcaggggaaaacgatatcgacgtggatcgcgtggcttgctttcacgacgctgtccagggctatgcttcattgctgtttaaactcgatcccagcgtagactttagcgcttttatgaagcacttaaagaaactctggaaagctctggataaggatcagtacctacccaggaaactctgcgactccgccagaaacctggagtggctgaaaacagtcaatgagtctcacggctccgtggagagaagctctctaaccttggcaaccgccattaatcaaaggggcatatacgtcatacaagccccaaaggggggtcagaagatttcacctgacactgttctgcacctgatcttacctgaatcccccggaagccacgaagaaagtagggaatacagtttagaagaagtcaaggagcttctcaataagctgatgctgatgtccggaaaaaaggacaggaataacacagaggtggaacgcttcagcgaggttttctgctctgtgcaaaggttatcccaggcgttcattgacctacactctgccggaaacatgttgtttcggacatggatcgccatggcctactgcagcccaaagcagggagtctcactccagatggacttcggcctagatctcgtgaccgagctcaaagaaggcggtgacgtgactgaactgctcgccgctctttgcagacaaatggagcactttcttgatagctggaagcgctttgtcactcagaaacggatggagcacttctatctgaatttctatacggctgaacagctggtgtacctaagcactgaattgagaaaacagcctccatccgatgccgcactgactatgctgagctttattaagagcaactgcaccctgcgcgatgtgctccgggcttctgtcggctgcggcagcgaggcagccagatatcgtatgcgtcgcgtcatggaggaactgccacttatgctgctcagcgaatttagcctcgtcgacaaactccgcattatcatggagcaatccatgagatgccttccagcctttctcccagattgcctggacctggaaaccttgggccactgtctggcgcacttggccggtatgggcggatcaccagtggagaggtgccttccgagaggactgcaggttgggcagcctaatttggtggtttgtgggcatagtgaagtgctgccagctgctctggcagtatacatgcagaccccaagtcagccccttcccacttacgatgaggtcctgttatgtactcctgcaactacttttgaggaggtagcactactcctccggcgatgcttgaccttgggatccctcggccataaggtgtatagcttattgtttgccgatcagttgagctatgaagtggcacggcaagcggaagaattgtttcacaacctctgcacccaacagcatcgcgaggactatcaattagtgatggtgtgcgatggggactgggaacattgttatctgccaagtgcgttttcacaacacaaggtgttcgtcacgccacaggcgcctcttgaagccattcaggcctacctggccggacattaccgcgtgccgaaacagacattatccgcggctgctgttttcaatgaccggctgtgcgtaggcatcgttgcctccgagcgggcaggggtggggaagtccctgtacgtgaaaagactccacgacaaaatgaaaatgcagctcaacgtgaaaaatgtccccttaaaaacaattcgcctgatagacccccaagtggatgagtctagagtgctcggcgcattgctgccttttctagatgcccaatatcagaaggtccccgttctatttcacctggatgtcacgagttccgtgcaaacaggcatctgggtgttcctgttcaaactcctaattctgcaatatctgatggacatcaacgggaagatgtggctgcggaacccatgtcacctgtacattgtggaaatccttgagagaaggacttccgtgccaagccgcagttccagcgccctccggacgagggtgcctcagttttccttcctggatatattccccaaggtaacatgccggcctccaaaggaggtgattgacatggaactatctgcactgcgaagcgataccgagcccggaatggacttgtgggaattttgtagtgaaacatttcaacgtccatatcagtatctgcgccgatttaaccaaaatcaagatctcgacacattccaatatcaggaaggcagcgttgaaggcactccagaggaatgtctccagcacttcctgtttcactgcggcgtgataaatccatcttggagcgagctgcgcaatttcgcgaggtttctgaactatcagctgcgagactgtgaggccagtctgttctgtaaccccagtttcatcggagatactctacgcggtttcaagaaattcgtggtcacctttatgattttcatggccagggatttcgccaccccctccctgcataccagcgaccagagtcccggaaaacacatggtgacaatggatggcgtgagggaggaggacctcgctccgttcagccttagaaaacggtgggagtctgaaccccacccctacgtcttctttaatgatgatcacactactatgaccttcataggcttccatctccagcccaacatcaatggctctgtagatgccattagtcatctgaccggcaaggtaattaaaagagacgtaatgacccgggacttataccaggggctgctccttcagcgcgtaccattcaacgtggacttcgacaagctgccacgacataagaagctggagaggctgtgtctgacattaggcatccctcaggctacagacccggataaaacatatgagcttactaccgacaacatgttaaaaatcctggcaattgagatgcgcttccggtgtggcattcccgtgattatcatgggggagactggctgtggaaagaccagactgatcaagtttctcagcgatcttcgccgaggagggacaaacgccgatacaatcaagctggtcaaagtgcacggagggacgactgctgatatgatatatagccgggttagggaggccgaaaatgtcgcatttgccaacaaggaccagcaccagctagacacaatcctgtttttcgacgaggccaataccacagaagcaattagctgtatcaaggaggtgctctgcgaccacatggtcgacgggcaacccctcgcagaggatagcggattgcacatcatagccgcatgtaatccatacaggaagcacagtgaggaaatgatctgccgcctggagagcgcagggctcgggtaccgggtgagtatggaggaaaccgccgacagactgggctccatccccctcagacaactggtgtaccgcgtccacgcactgcctccaagcctgattcccctggtgtgggatttcgggcagctgagtgacgtggctgaaaagttgtatatccagcagatcgttcaaagactcgtcgagagtatctccctcgatgaaaacggaaccagagtcatcacagaagtcctgtgcgctagccagggcttcatgcggaagacggaggatgaatgttcattcgtgagtcttcgggatgtagagcgctgcgttaaggtgttccgttggttccatgaacatagcgccatgctgttagcccaactgaacgccttcctgtctaaatcatctgtcagcaaaaatcataccgagagggatccagtcctgtggagtcttatgcttgcgattggcgtgtgctaccacgcatctcttgaaaaaaaagatagctacagaaaagccatagcacgctttttccctaaaccttacgacgactcaagactgctgctcgacgagatcactcgcgcacaggatctgttccttgatggtgtccctctgcggaagaccatcgccaagaatttggctcttaaggagaatgtgttcatgatggtagtgtgtatcgagctaaaaattcctctttttttggtgggaaagccgggaagctccaaatcattagctaaaaccattgttgccgatgccatgcagggtccagctgcttattcggatctgtttagatccctcaagcaggtgcatcttgtatcttttcagtgctcccctcactcaaccccacagggaatcatctccacgttccggcagtgcgcgcgatttcagcagggaaaggacctgcagcagtacgtgtctgtcgtggtgttggatgaagtcggactggctgaagattctcccaaaatgccgctgaagacacttcatcccctgctcgaggacggatgcattgaggatgatcctgctcctcacaaaaaagtggggtttgtggggattagtaattgggctctggacccagccaaaatgaatagaggaatttttgtgtctcggggatcacccaatgagacagagctaattgaaagcgcaaagggaatttgttcctcagatattttagtgcaggaccgcgtccaagggtactttgcgtcgttcgctaaggcctacgaaaccgtctgtaaacggcaggacaaagaattctttggactgcgcgattattactctctgattaagatggtcttcgcagcggcaaaggctagcaatcgtaaacctagcccccaggacatcgctcaggccgtcttgcgcaatttttccggcaaagacgacatccaagccctcgatatctttttggccaatttgccggaagctaaatgctccgaggaggtctcccctatgcagctgatcaagcagaacatattcggccctagccagaaggtgccagggggtgagcaggaggatgctgaatcaaggtacctgttggtcctaaccaagaactacgtcgccctgcagatacttcagcagaccttttttgaaggtgatcagcagccagagatcatctttggctccggattccctaaggaccaggagtatacacaactttgtaggaatatcaaccgagtgaagatatgcatggagacgggcaagatggtgctgctgctcaatctgcagaacctgtacgagtccctttacgacgcccttaatcaatattacgtgcacctaggcggacagaaatacgtggatctgggcctgggcacacatagagtgaaatgcagggtgcacccgaacttccgtttaattgtgattgaagagaaggatgttgtgtacaagcacttcccaattcctctcataaatcggctggaaaagcactacctcgacatcaacaccgtgctggaaaaatggcagaaatcaattgtcgaagagctgtgtgcgtgggtcgaaaagtttattaacgtgaaggcacaccacttccagaaacgccacaagtatagtccctcagacgtctttatcggatatcacagcgacgcctgcgcatctgtggtcttacaggtcatcgaaagacagggccctcgcgcattgactgaggaactccaccaaaaggtgagcgaggaagcaaagtccatccttctgaactgtgccacccccgatgcagtcgtccggctgtccgcatactccctgggaggtttcgccgcagagtggttatcccaggagtatttccatcgacaaaggcacaatagcttcgccgactttttacaggcacacctgcatacggctgatcttgagcgccatgcaatcttcaccgaaatcaccacattctcccgcctcctgacctctcacgactgcgaaattctggagtcagaagtgactggcagagcacctaaacctacgctgctatggctgcagcaatttgatactgagtactcctttcttaaagaggtgagaaactgtctcacgaataccgccaaatgcaagattctgattttccagacagacttcgaggacggtatccgctctgcccagctaattgccagcgcaaagtacagtgtgatcaacgaaatcaacaagatccgagagaatgaagaccggatctttgtatattttatcaccaagttatcaagggtgggcaggggcaccgcttacgtggggttccatgggggattgtggcagagcgtccatattgatgacctcagacggagtaccctgatggtcagtgatgtgacgcgtctccagcatgtgactatctcgcagctctttgcccctggcgacctgcccgaattgggcctggagcatcgtgcagaagatggacacgaagaggccatggaaactgaggccagcacctccggagaggtggccgaggtcgccgaggaggctatggagaccgaatctagtgagaaggttggcaaagaaacatcagagctaggaggcagcgatgtgtctatcctcgacactacccggctgttgcgatcctgcgtccagagcgcggtaggcatgctccgggatcagaacgagtcctgtacacgaaatatgcgtagagttgtgctcctgttgggactgttgaacgaagacgatgcttgccatgcaagctttctaagggtgagcaaaatgaggttgtccgtttttctcaagaagcaggaggaaagccagttccaccctctcgaatggctcgccagggaagcctgcaaccaggatgcattacaggaagccggaacattccgacacactctgtggaagcgcgtgcagggagccgtcacccccctcttggccagcatgattagctttatagatagagacgggaacctcgagctcctgacccgccctgacacccctccgtgggcgagagatctgtggatgttcattttctctgacacaatgttactgaatattccactcgtgatgaacaacgagcggcataagggagaaatggcctacattgttgttcagaatcacatgaatctgagtgaaaacgcttctaataatgtccctttcagttggaagattaaagattatctcgaggaactttgggttcaagcccagtacattactgatgccgaggggctgcctaaaaagttcgtggacatcttccagcagaccccgctgggtagattccttgctcagttgcacggggaaccgcagcaggagttactgcaatgctacctgaaggacttcattttgctcactatgcgggtctcaacagaggaggagctgaagttcttacagatggctctgtggtcctgtacgcgcaagctcaaggcagcttctgaggctccagaagaggaggtcagcttgccatgggttcacttagcatatcagcgatttagaagcaggctgcagaatttcagccggattctcacgatttatccacaggtgctgcattcactgatggaggccagatggaatcacgaactagccggttgcgagatgacattggatgcctttgccgcaatggcctgcacggagatgttgacaaggaacacgctgaagccaagcccgcaggcctggctacagttggtgaagaatctgtccatgcctctggagctgatctgctcagacgaacatatgcaggggtctggctctctcgctcaagccgtgatccgggaagttagagcgcagtggtcaaggattttctccaccgcattgttcgtggagcacgtgctgctaggaacagaaagtcgagttccggaactccagggtttggtcacagaacatgtgtttctgcttgataagtgccttcgcgagaactcagacgtcaagacccatgggcctttcgaggcagtgatgcgcactctatgcgagtgtaaagagaccgcttccaagaccctatcacgattcggaattcagccatgttctatatgtctcggtgatgcaaaggaccctgtgtgtcttccctgtgatcatgttcattgtctgcggtgtctgcgcgcatggttcgcttcagagcaaatgatctgcccttattgcctgaccgccttaccagacgaatttagccctgctgtctctcaggcccatagagaggccatcgaaaagcacgcgagattccgccagatgtgcaacagctttttcgttgatctcgtctcaaccatttgcttcaaagataacgcaccaccagagaaggaggttattgagtcactgctcagcctgctgtttgtgcaaaaagggcgtctgcgggatgccgcacagcgtcactgtgaacacacaaagagcctctctcctttcaatgacgttgtcgacaaaacgcccgtgattaggtccgtgattctcaagctgttactgaagtattccttccacgatgtgaaagattatatccaggaatacctcacattactcaagaagaaggcctttattacggaagacaaaacggaactatacatgttattcataaattgtctggaagattccatccttgaaaaaacaagcgcttattccaggaatgatgaactcaaccacctcgaggaagaggggaggttcctgaaagcttactcccctgcgtctcggggacgggaacccgcaaacgaagcttcagtggagtaccttcaggaagtagcacgaatccgtctctgcctggatagggccgcagatttcctgtccgagcccgaaggcggtccagagatggccaaggagaaacagtgttacttacagcaggttaaacagttctgcatcagggtggaaaacgattggcatagggtctacctggtcaggaaactgtcaagtcagcggggaatggagtttgtgcaaggcctgtcaaagccaggtcgaccacatcaatgggttttccccaaagacgtggtgaagcagcagggcctccggcaagatcacccaggtcagatggatagatatctggtgtacggtgatgagtacaaagccctgcgcgacgcagtggctaaagcagtcctggagtgtaaaccgttggggatcaaaaccgccttgaaggcttgcaagacaccacagagccagcaatctgcttacttcctcttgaccctgtttcgggaggttgcaatcctgtataggtcacataacgctagcttgcaccccacgccggaacagtgcgaggccgtttccaaattcatcggagagtgtaaaatcttgagcccacctgacatatctagatttgccacctccctggttgataattccgtgcctctcctgcgcgctggaccaagcgattcaaatctggacggcactgtgaccgagatggcaattcacgccgcagcagtcctcctgtgcggccagaacgagcttctggaacctttgaaaaacctggcattcagccccgctaccatggctcacgcatttctgcccaccatgcccgaagatcttcttgcccaggctcggcgttggaagggtctggaaagagtgcattggtacacctgtcctaacggacatccctgtagtgtgggggaatgtgggcgacccatggagcagagtatatgcatcgactgtcacgcgcctattggaggcatcgaccacaagccgagggatggtttccatctggtcaaggacaaagccgatagaacccagactggacacgtcctgggaaatccacagcgacgggacgtcgtcacatgcgatcgtggactgcctcccgtggtgttcctcttaataaggttgcttacgcacttggctctgcttttaggcgcatcccagtcctcccaagccctcatcaacattattaagccacccgtccgggacccaaaaggctttctccagcaacacatcctgaaagatcttgaacagctcgcgaagatgctgggacactccgctgatgaaacaattggcgtcgtacatttagtactgcgccgattgctgcaggagcagcaccagctcagctcgagaaggctgctaaatttcgatacagaactcagcaccaaagagatgaggaataactgggagaaagaaatcgccgcagtaatttcacctgagctggagcatctagacaaaacgctgccaacgatgaataaccttatcagccaagacaaaagaatctcctcaaatcctgtagctaagataatatatggcgaccccgttacgtttctgccacatcttccccgtaagagcgtcgtgcactgctccaaaatttggtcctgcagaaagagaatcacagtagagtacctacagcacatcgtggagcagaagaatggcaaggagcgcgtgccaattctttggcattttttacagaaagaggccgagttaaggcttgtgaaattccttccggagatcctggctcttcagagggatctggtgaaacagtttcaaaatgtacagcaggtggagtactccagcattaggggttttctcagcaagcattcaagcgacggtctgagacagctcctgcataatcggataacggtttttctcagcacctggaacaagttacgacggagcctggagacaaatggtgaaataaatttgcccaaggactattgtagtacggatctggatcttgacaccgaattcgaaatcctactcccaaggaggaggggtctgggcctctgcgccacggcacttgttagctacctgatccggctacataatgagatcgtgtacgccgttgagaaactgagcaaggagaataattcatactccgtcgatgcggcagaagttacagaattacatgtcatctcctacgaggtcgaacgagatctcacccccttgatcctctccaactgtcagtaccaggtcgaagagggaagagagacagtgcaggaattcgatctggagaagatccaacgacagatcgtgtctagattcttacaggggaaacccagactatctcttaagggaatcccgaccctggtttaccgccatgactggaactatgaacacctgtttatggatataaagaataagatggcccaggattctctcccctccagcgtcatcagtgccatatcgggccagctgcagtcttactctgatgcctgtgaggtgttaagcgtggtggaggtgactttaggcttcttatcaactgcgggaggcgacccaaacatgcagttaaatgtgtatacccaagatatcctgcaaatgggggaccagactatacacgtgctcaaggccctgaataggtgtcagcttaagcacactatcgccctgtggcagtttttaagcgctcacaaaagtgagcagctcctgaggctgcacaaggaaccttttggcgagatcagcagtcgttacaaagctgaccttagcccagagaatgctaagctccttagcacttttctaaaccagacaggattagatgctttccttctggaacttcatgagatgattatcctcaagttgaagaatcctcagacgcagacagaagagagattccggccacaatggtccctgagggatactctcgtctcatacatgcagacaaaggagtctgagatactaccagagatggcctcacagttccctgaggaaatcctgcttgcctcttgcgtttctgtgtggaagaccgctgcagtgctgaagtggaatagggaaatgcgataa

SEQ ID NO: 239271 - DNA, 2772 bp, synthetic construct
  misc_feature 1..2772: note = Description of Artificial Sequence: Synthetic coding sequence
  source 1..2772: mol_type = other DNA
atggaggaagggaacaacaacgaagaagtgatacacttgaataactttcactgtcatcgcggacaggaatggatcaacctcagagatgggccaatcactatttccgattccagtgatgaggagcggatccctatgttagtcaccccggcaccccaacaacacgaggaagaagacctggacgacgatgtaattctcactgagacgaacaagccgcagcgcagtcggcctaatttaattaaacccgcagcgcagtggcaggatctcaagcgccttggtgaagaacggcctaagaaaagcagagctgccttcgaatccgataagagcagttacttttcagtctgcaataacccattgtttgattccggtgcgcaggacgattccgaagacgattatggcgagtttttggatctcggtccaccaggtatcagtgagttcaccaagccaagtggccagactgagcgcgagcctaagccaggcccttctcacaatcaagctgccaacgatatcgtgaatcctaggtcggaacaaaaggtgataatcttggaagagggatccttactctatactgagtctgatcctctggaaactcagaaccagtcctccgaggactctgagacggagctcctctctaatctcggtgaaagcgcagcactggcagatgaccaagctatagaggaggattgctggctggatcacccatacttccagtcactgaaccagcagcccagggagattacgaatcaggtcgtacctcaggagcggcagcctgaggcagaattggggagactcctgttccagcatgaatttcctggacctgctttccccagacctgagccccagcaaggagggataagcggcccttctagcccccaacctgcacaccccttgggggagttcgaggatcagcagctggcttcggatgacgaggagcctgggcctgctttccccatgcaggagagtcaggagcccaacctggaaaatatttggggccaggaggccgctgaggttgatcaggagctggtggagctcctcgtgaaagagacggaagccagattccctgacgtggccaacggcttcatcgaggagattatccactttaaaaactattatgacttaaacgtgctttgtaacttccttctggaaaacccagattacccgaagcgcgaggaccggattattataaatccatctagctcgctgctcgctagccaggacgaaaccaagttgcctaagattgacttctttgactattcaaagctgactccgctcgaccagcgatgtttcatccaggctgctgatttgctgatggccgatttcaaggtgctcagtagccaggatatcaaatgggcactacacgaattgaaggggcattacgccataacacgtaaagccctctcagatgcgatcaagaagtggcaagagctgagcccagaaacaagcggcaaacggaagaaaagaaaacagatgaatcagtattcttacatcgattttaagttcgagcaaggagacattaaaatcgagaagcgcatgttctttttggaaaataaaagacgccattgtaggagctacgatagacgagcactgctaccagccgttcagcaggagcaagagttttacgagcagaagattaaagagatggctgagcacgaggatttcttgctggcccttcagatgaatgaagagcagtaccagaaagatgggcagttaatcgaatgtagatgttgttacggagaatttccttttgaagaacttacacagtgcgctgatgcacacctcttttgcaaagaatgtctaatccggtatgcgcaggaagcagtgtttggaagcggaaagctggagctatcctgtatggaggggagttgtacgtgtagctttcccacgtcagaactggaaaaggtcttgccccagactatcctgtacaagtattatgagcgcaaggctgaagaagaagtggcagcggcatacgcagatgagcttgtgcgatgtccctcatgctcttttccagcgttattggactctgacgtgaagcggttttcctgcccgaatccacattgtagaaaagaaacgtgtcggaagtgccagggattgtggaaggagcataacggtctcacatgcgaggaattagcggagaaagacgacataaagtaccgcacctctatcgaagaaaagatgaccgccgcaaggattagaaagtgtcataagtgtggaactggcctcattaagtctgaaggctgtaaccggatgtcatgtagatgcggggctcagatgtgctacctgtgcagagtgtctatcaatggctacgatcacttctgtcagcacccacggagtcccggagccccatgtcaggagtgctcaagatgctctctctggaccgaccctactgaggacgatgagaagctcattgaagaaatccagaaagaggctgaggaagagcagaagcgtaaaaatggggaaaatactttcaaacgaatcggtccccctctggagaagcccgtggagaaagtgcagcgcgtggaggcactacctagacctgtccctcagaatttaccccagccccaaatgcccccatatgcattcgcacatccaccgtttcctctgccacccgtgagacccgtgtttaacaactttccattgaacatgggccctatccctgccccatatgtgccacccctacccaatgtccgagtaaattatgacttcgggccaattcatatgccgttggaacacaacctgcccatgcatttcggcccacaacctcggcatcgattttag

SEQ ID NO: 239272 - DNA, 63 bp, synthetic construct
  misc_feature 1..63: note = Description of Artificial Sequence: Synthetic coding sequence
  source 1..63: mol_type = other DNA
atggaggaaggcaacaataatgaagaggtgatccacttgaacaattttcactgtcacagatag

SEQ ID NO: 239273 - DNA, 2601 bp, synthetic construct
  misc_feature 1..2601: note = Description of Artificial Sequence: Synthetic coding sequence
  source 1..2601: mol_type = other DNA
atggaggaaggaaataacaacgaagaagtgatccacttaaataactttcactgtcaccgtgggcaagagtggattaacctgcgcgatggacctattacaatcagcgattcctcagatgaagagagaatcccaatgcttgtgacccctgccccacagcagcacgaggaagaagacctcgatgacgatgtcattctgactgaggatgatagtgaagacgattacggggaattcctcgatctgggtcctccagggatcagcgagttcaccaaaccttccggacagaccgagcgagagccaaagccaggcccaagccacaaccaggcggctaatgatatcgtgaatcctaggtcagaacagaaggtgatcatactagaggagggtagcctgctctatactgagagtgaccccctggagacacagaaccagtcctctgaggattccgagaccgagctgctctcgaacctgggagagtccgccgcactagcagacgatcaggccatcgaagaggactgctggttggaccacccctactttcagtcgctgaatcagcaacctcgggagatcactaaccaagtcgtcccgcaggagcggcaacccgaggcagaactcggacggttactgtttcagcacgagttccccggacccgcttttcctagaccggagccgcagcagggcggaatttccggaccatcctcacctcagcctgctcaccctctaggtgagtttgaagatcaacaactggcgtcggatgatgaagaaccgggaccggcttttcccatgcaggagtcccaggaaccgaatttggaaaatatctggggtcaggaggccgctgaagtggaccaggagctggtggagctcctggtgaaggagacagaggcgaggtttcctgacgtggctaacggatttattgaggagattattcatttcaaaaactactacgacttaaatgtgctctgcaatttcttgctcgagaaccctgattacccgaagcgagaggacaggattataattaacccaagctcttcattacttgctagccaagacgaaacaaaactcccaaagatagacttttttgactatagcaagcttacccccctggaccagcgctgcttcatccaggccgctgatttactgatggcggactttaaggttctctcttctcaggacatcaagtgggctttgcatgagctaaaagggcattacgcgatcactcgcaaggcactctctgatgccatcaaaaaatggcaagaactatctcccgaaacttccggaaagagaaagaagcgaaagcagatgaatcagtattcatacatagactttaaattcgaacagggcgatatcaaaattgagaaacggatgttctttttggagaacaaaaggcgacactgtcgatcatacgaccgcagagcccttttgccagcagtccaacaggaacaagaattttatgaacagaagatcaaggaaatggctgaacacgaggactttttgcttgccttacagatgaacgaagaacagtaccagaaggacgggcagctgattgaatgccggtgctgttatggtgagtttccattcgaggaattgactcagtgcgctgatgcacacctgttttgcaaggagtgcctgatcagatatgcccaggaggcggtgttcggctcagggaaactagagctcagttgcatggaagggtcctgtacttgcagtttcccgacaagcgagcttgagaaggttttgccccagactattctttataagtattatgagcgtaaggcagaggaggaggtcgccgctgcctatgctgacgagctcgtccggtgccccagttgctcttttccagcgctcttggatagcgatgtcaagcgattctcttgtcctaatcctcattgtcgaaaggagacttgcagaaagtgtcagggcctgtggaaagaacacaacgggctcacatgtgaagaactcgctgaaaaagacgatatcaaataccgcacctctatcgaagagaaaatgacagctgcgaggatccggaagtgccacaaatgcggcacaggactaataaagagtgagggttgtaaccggatgagttgtaggtgcggcgcacagatgtgttatctgtgcagggtctccattaatggatacgaccacttttgtcagcatcctcggtcccctggggctccatgtcaagagtgttctcggtgctctctttggaccgatcctactgaggacgacgagaagcttattgaagaaattcaaaaggaggctgaagaagagcagaagagaaagaacggcgaaaacactttcaagagaatcggcccaccgcttgaaaaacctgtggagaaggttcagcgcgtggaagctctgcctcgacctgtaccacaaaacctcccacagccccagatgcctccctacgcttttgctcaccccccttttcctcttccacctgtgagacctgtgtttaataatttcccgttaaacatggggcctatcccagccccttacgtgcctcctttgcccaacgtcagagttaactacgacttcggcccaatccacatgccactcgaacacaatctgcccatgcattttgggcctcagcctcgtcacagattctag

SEQ ID NO: 239274 - DNA, 2037 bp, synthetic construct
  misc_feature 1..2037: note = Description of Artificial Sequence: Synthetic coding sequence
  source 1..2037: mol_type = other DNA
atggaggagggcaacaataacgaggaggtcatacatctcaataacttccactgtcacagaggacaggagtggatcaaccttagggatggccctattactatttcggacagttctgacgaggaacgcatcccaatgctcgtgacgcctgctccacaacagcatgaggaagaggatcttgacgacgatgtgatactcacagaaaccaataagcctcaacgaagtagaccaaatttgattaaacctgccgctcagtggcaggaggcagctgaagtggaccaggaactggtagagctgctggttaaagagacagaggccagattccccgacgtagccaatggattcattgaagagattattcacttcaagaactactacgaccttaatgttctgtgcaatttcctactagaaaaccccgactacccgaagagagaggataggattattatcaatccttccagcagcctcctcgcaagccaggacgaaactaaactccccaagatagattttttcgattattcaaagctgacgcctttagatcaaagatgcttcattcaagctgccgacctcttgatggcggacttcaaggtcctgtcgtcccaggacattaagtgggcattgcatgaactcaagggccattacgccatcacacggaaagccctgtccgacgccattaaaaagtggcaagagctgtcccctgaaacttcagggaagcggaagaagcgcaagcagatgaatcagtatagttacatcgatttcaaattcgagcagggcgacataaaaatcgaaaaacgaatgttcttcctcgagaataaacgacgacactgccggagttatgataggcgcgctctgttgccagccgtacagcaagaacaggagttttacgaacagaagataaaggaaatggccgaacatgaggactttttacttgccctacagatgaacgaagaacagtaccagaaagacggccagctaatcgagtgtcggtgttgttacggagaattcccctttgaagagctcacccagtgcgctgacgcacacctgttttgtaaggagtgtctgatcaggtatgcccaggaagcagtttttggttctggtaagctggaactctcatgtatggaggggagctgcacttgttcctttcccactagtgagctagagaaggttcttccgcagactatactctataagtactatgagaggaaagccgaagaagaggttgccgctgcatatgctgacgagctagtcaggtgtcccagctgttccttccctgctctactggatagcgatgtcaagcggtttagctgcccaaatccccactgccgtaaggagacctgtaggaaatgccagggcctgtggaaagagcacaatggcctgacgtgtgaagaactcgctgaaaaggatgacataaaatatcgtacctccatagaggagaaaatgactgccgctaggattcgtaaatgtcataagtgtggaactggcctgatcaagagtgaggggtgcaaccgtatgtcctgccggtgtggcgctcaaatgtgctacctgtgtagggtctcaataaatggctatgaccatttttgtcagcatccacgctcccccggtgctccatgtcaagagtgttccaggtgcagtctgtggaccgacccaaccgaagacgatgagaagctgatcgaggagatccaaaaagaggcagaggaagaacaaaagagaaagaatggagagaacactttcaagcggataggaccacctttagaaaaaccggtcgagaaagtgcagagggtggaggctctcccccgacctgtgccccaaaacctgcctcagccacagatgcctccctacgcatttgctcatccgccttttcccctacctccagtacggccagttttcaataacttcccattgaacatgggcccaattcccgctccgtatgtacctcctctgcctaacgttagggtcaattacgattttggcccaatccatatgcctctggagcataacctgccaatgcacttcggcccacagccccgacatcggttttag

SEQ ID NO: 239275 - DNA, 447 bp, synthetic construct
  misc_feature 1..447: note = Description of Artificial Sequence: Synthetic coding sequence
  source 1..447: mol_type = other DNA
atgtcatcggacttccctcattacaattttaggatgcccaacattggttttcagaacctcccactcaatatatacatcgtggtgtttgggactgcaattttcgtatttatcctctctttgcttttctgttgctatttgataagactccgacatcaggcacacaaggagttctatgcttacaagcaggttatcctaaaggagaaagtcaaggagctgaacctccacgagctctgcgcagtatgcttagaagactttaaacctcgcgatgaactcggaatttgcccatgtaaacacgcctttcatcgtaagtgtctcatcaagtggctcgaggtcagaaaggtttgccctctttgcaacatgccagtcttgcaattagcccagctacactctaagcaagaccgcggtcctccgcaggggcctctgccaggcgcagagaatattgtgtag

SEQ ID NO: 239276 - DNA, 447 bp, synthetic construct
  misc_feature 1..447: note = Description of Artificial Sequence: Synthetic coding sequence
  source 1..447: mol_type = other DNA
atgagctctgatttcccacattacaacttccgcatgcctaatatcggttttcagaatcttcccctaaacatttacatagtcgtctttgggactgcaatcttcgtgtttattctttccttgttgttctgctgttatcttattagacttcggcaccaagctcacaaggagttctacgcttacaaacaagtaatacttaaagagaaggtgaaggagttaaacctgcacgaactctgtgcggtctgcctggaggactttaaaccccgagacgaactggggatttgcccatgtaagcacgccttccaccggaagtgcctcatcaagtggctggaggtccgcaaagtgtgcccactgtgtaatatgccagtattgcagttagcacagttgcatagcaaacaggacagagggcctcctcagggccctctccccggagcagaaaatatcgtctag

SEQ ID NO: 239277 - DNA, 510 bp, synthetic construct
  misc_feature 1..510: note = Description of Artificial Sequence: Synthetic coding sequence
  source 1..510: mol_type = other DNA
atgctgaacaaatccggtgaatccagatatcccgcattattccccgtgcttgggggatcttcaatgtcctctgacttcccgcactacaattttcgcatgcccaacatagggtttcaaaatctgcccctcaacatctatattgtcgtctttggtactgccatttttgtctttatcctgtcgctcttattctgctgctacctgatccgtctgagacaccaggcccataaagaattttatgcctacaagcaagtgatcctgaaggaaaaggtcaaggagttgaacctgcatgagctttgtgctgtgtgccttgaggattttaaacccagggacgagttaggcatttgcccgtgcaagcacgcttttcatcgaaagtgtttaattaaatggctggaagtgcgcaaggtgtgtccgctgtgcaatatgcctgtccttcagctggcacaactccacagcaagcaagacagagggccaccacagggccctctgccaggtgcggaaaatattgtatag

SEQ ID NO: 239278 - DNA, 510 bp, synthetic construct
  misc_feature 1..510: note = Description of Artificial Sequence: Synthetic coding sequence
  source 1..510: mol_type = other DNA
atgctcaacaagtcgggggaatcgcgctaccccgcacttttccccgtcctcggaggttccagcatgtcatccgacttccctcattacaactttcgcatgccgaatatcggcttccaaaacttgccgctgaatatctatatcgtggtgtttggaacggcaatctttgtgtttattctttcattgctgttttgctgctacctcattcgcctgcggcatcaggcccataaggagttctatgcctacaagcaggtcatcctgaaggaaaaggttaaggaactcaaccttcacgagctttgcgctgtatgtctggaagattttaagcctcgggacgaactcggcatttgcccctgcaaacacgctttccaccgaaaatgtctgattaagtggttagaggttcgcaaggtatgccccctatgcaacatgcccgtgctgcaactcgcccaattacactccaagcaggaccgaggaccccctcagggccctctcccaggcgcagagaacatcgtgtag

SEQ ID NO: 239279 - DNA, 1302 bp, synthetic construct
  misc_feature 1..1302: note = Description of Artificial Sequence: Synthetic coding sequence
  source 1..1302: mol_type = other DNA
atggaggccgtttatctggtcgtgaacgggctcggactggtgcttgacgtcctcacgctcgtcctggaccttaactttctcctggtcagtagccttctcgcctccctggcttggttgctggcctttgtttacaatctcccccataccgtcctgaccagcttgttgcatctcggccgtggggtgttgctgtcattgttagcgttaattgaagccgtggtaaggtttacttgtggaggcttgcaagcactttgcactctcctatactcttgttgctctggtcttgagtcattgaaactgctcgggcaccttgccagccacggggctttacgcagccgagagattctgcatcgcggagtcctgaacgttgtttcgtctgggcacgcgctacttaggcaggcttgtgacatctgtgcaatcgccatgagcttagtggcgtatgtaatcaatagccttgtgaacatctgtctcattgggacacaaaacttgttctccctcgttttggccctatgggacgcggttaccggtcctctctggaggatgacggacgtcgttgccgcttttctggctcacatttcttcaagcgccgtggcaatggctattctcctctggacaccctgtcagctggcacttgagttgctggcgagcgctgccaggctcctcgcctcttttgtcttagttaacttaacggggctcgtgctcttggcatgtgtgctggccgtaaccgtaacagtcctacacccagacttcacccttagactggcaacacaggctcttagccagctgcacgctaggccctcctatcaccgactccgggaggatgtcatgcgcctgtctcggctggccctgggttccgaggcttggagacgcgtgtggtcacggagtctacagctggccagctggccgaaccgaggtggcgctcccggagctccccagggagatcccatgagggtgttttcagtgagaacccgcaggcaggacactcttccggaagcgggaaggcggtccgaggctgaagaagaagaggcgaggactatcagagttacccccgtccgcggacgtgagcgactgaacgaagaggaacctcctggtggacaagacccttggaagctcctgaaagaacaagaggagaggaagaaatgtgtcatctgccaagatcagtcaaaaacagtgctgctgcttccctgcagacatttgtgtctgtgccaggcctgcacggaaatattaatgcgccatccagtgtaccacagaaactgtcctctctgtaggcggggtatcctccaaactctgaacgtttatttgtag

SEQ ID NO: 239280 - DNA, 3219 bp, synthetic construct
  misc_feature 1..3219: note = Description of Artificial Sequence: Synthetic coding sequence
  source 1..3219: mol_type = other DNA
atgcctggagaggaagaggagcgggcttttcttgtggccagagaggaactggcctcggcccttcggcgagatagcggccaggccttttctttggagcagctgcgtccactgctggcctccagcctgccactggcagcacgatacctacagctcgatgctgcacgtcttgtacgctgcaacgcccatggggaaccacggaactatctcaatactctgagcactgccttaaatatcctagagaaatatggtaggaacctactcagcccccagcgacctagatactggcgcggagttaagttcaacaacccagtgtttaggtctacagttgatgctgtccaagggggacgagacgtgctcagactctatggctatacggaagagcagccagatggactaagtttccctgagggtcaggaagagccggatgaacaccaggtggctacggtgaccctggaggtgctcctcctgcggactgagctgtcactgctcctccagaatacccatccgcgacagcaagccctggagcagttactggaagataaagtggaggatgacatgctacagctttcggagttcgatcccctgctcagagaaattgcacccggacccctgacaacaccttccgtgccaggtagcacccctggaccatgtttcctttgcggcagcgctccaggaactctgcattgcccatcctgcaaacaggctctctgtcctgcctgtgaccacctgttccacggacaccccagccgagcacatcacctgcgtcagaccctgcctggggtgctacaagggacacacctgtccccctcgttaccggcatcagctcagcctaggccacaaagtacttctctcttagctctgggtgattctagcctcagttcccccaatcccgcttcggcccacctgccatggcattgtgcggcttgtgcaatgttgaacgaaccttgggccgtgctgtgtgtcgcctgcgacaggcccagaggatgcaaagggttgggcttaggaactgaaggcccacaaggcactggaggtctggaaccagatttagcccgtgggagatgggcatgccagtcgtgtacattcgagaatgaggcagctgccgtcctctgctctatatgcgagaggcctaggctagcacaaccacctagcttggtcgtggacagtcgagacgctgggatttgtctccaaccccttcagcagggtgatgcattacttgccagcgcccagagccaggtatggtattgcatccactgtacgttttgcaactcaagtccaggatgggtgtgcgtgatgtgtaatcgaacgtcctcccccattccagcccagcacgccccacgcccttatgcaagttcccttgagaaggggcctcctaaaccaggccctcccagacggctgtccgcgccactcccgtcaagttgcggcgaccccgaaaaacagcgtcaagacaaaatgcgagaggaggggctgcagctcgtgagcatgatcagggagggagaggccgcaggcgcatgccccgaggagatctttagcgcacttcagtatagcggcaccgaggtgcctttacagtggttgaggtctgagcttccttacgtccttgaaatggttgccgaactggcaggccagcaggacccaggcctgggggcattttcttgccaggaagccagaagagcttggcttgatcgacacggaaatcttgatgaggcggtggaggagtgcgtccgaacaaggcgcaggaaagttcaggagctgcagagtttagggttcggaccggaagaaggcagtcttcaggcccttttccagcatggaggtgatgtctctcgcgctttaacagagctgcaacgacagagattggaacctttccggcaacgtctgtgggacagcggaccggagcccactccatcttgggatggcccagacaagcagtctctggttcgacgacttttggccgtgtacgccttaccttcctggggacgggctgagctggccctgtctctgctgcaagaaacccccagaaattacgagctaggagacgtggtcgaggcagtgcgccattctcaagaccgagcctttttgagaagactcctggctcaggaatgcgcagtgtgcggctgggcattgcctcataaccgaatgcaggccctcactagttgcgagtgcaccatctgccccgattgtttccgacagcatttcaccatcgccctgaaagagaaacacattactgacatggtctgcccggcatgcggtagaccggatctgacggatgatacccagttattgtcctattttagcactttggacatccagctccgcgaatcactggagccagacgcgtacgccctattccacaagaaacttactgaaggagttctcatgcgcgatcctaagttcctgtggtgcgctcagtgcagcttcggcttcatctatgagagggagcagttggaggccacctgtccacagtgtcatcagacattctgtgtgcgctgcaagcggcagtgggaagagcagcaccggggtcgcagctgcgaggattttcagaactggaagaggatgaacgacccagaatatcaggcgcaaggacttgcgatgtatctgcaggaaaacggaattgattgtcccaagtgcaaattttcatacgccctggccaggggagggtgtatgcacttccactgtacacaatgtcgccatcagttttgttccgggtgttataacgccttttatgccaaaaacaagtgccccgagccgaattgcagagttaagaagtccttacatggtcatcatcccagggattgcctgttttacttaagggactggactgccctgcgtctgcagaagttactgcaagacaataatgtgatgtttaatactgaaccccctgcaggcgcaagggccgtccctggtgggggatgcagggtgatcgaacagaaggaagtgccgaatggcttgagggatgaggcatgcggaaaggagacccctgctggctatgcaggtctctgccaggcacactacaaggaatacctcgtgtctctcatcaacgcccattcccttgacccagccacactctacgaagtggaggaattggaaactgccacagaaagatacctccacgttagaccacagcctttagcaggggaagacccacccgcttaccaggctaggctcttgcagaaactcactgaggaagtgccattaggccagagcattcctcgcaggcgcaagtag

SEQ ID NO: 239281 - DNA, 1518 bp, synthetic construct
  misc_feature 1..1518: note = Description of Artificial Sequence: Synthetic coding sequence
  source 1..1518: mol_type = other DNA
atgcccggtgaggaggaggagcgcgcatttctggtggctagggaggagctggcatccgctctgaggcgtgactctggtcaggctttttcacttgagcagttgcgtccactgctggcctcctccctgccactagccgcaaggtatcttcagctggacgcggcaagactggtaaggtgcaatgcccacggcgagccacggaactatctgaacacgctaccaaccccctcatgggacggccctgacaaacagtctttagtccggagactcttggcggtgtacgccctcccaagctggggaagagccgagttggctctgagcctgttgcaggaaactccacggaactatgaactgggcgacgtcgtggaggcagttagacactctcaggacagagcatttctccgaaggttgctggctcaggagtgcgctgtctgcggctgggctctgccacataatcgcatgcaggcactcacatcgtgcgagtgcactatctgtccagattgcttccgccaacattttacaattgcgctcaaggaaaaacacatcacagacatggtatgccctgcctgtggtaggccagatcttaccgatgacactcagctgctgtcatatttttcgaccttagatattcaattgagagagagtctggagccagacgcgtatgctctgtttcataaaaaactcacggaaggggtcttgatgagggacccgaaatttctctggtgtgcccagtgctcttttggcttcatctacgagcgggaacagctcgaggctacatgcccacagtgccaccagacgttctgcgtgagatgtaaacgccagtgcgaggactttcagaattggaagcggatgaatgaccccgagtaccaagcccagggattggctatgtatttgcaggaaaatggcatcgactgtcccaaatgcaaattctcatacgctctggcccgaggaggctgtatgcatttccactgcacccagtgccggcaccagttctgttcagggtgttataacgccttttatgctaaaaacaaatgccctgaacctaattgccgggtgaaaaagtcgcttcacggtcaccaccccagagactgtctcttctatttaagagattggaccgcactgagactgcagaagcttttacaggataacaacgtgatgtttaacactgagccaccggctggggcacgggctgtacctggcggaggatgcagagtaatcgagcagaaagaagtcccaaacggcttgcgagacgaagcttgtggaaaggaaacccccgcaggatatgccggtctgtgtcaggcgcactataaagagtacctcgtttctctaattaacgctcactccctggatcccgctacgttatatgaagtagaggaactggaaaccgctacagagagatacctccacgtgcgacctcagcccttagcaggggaggaccctccagcctaccaagcgaggctcctgcagaagctcaccgaggaggtccctttgggccagtcaatccctcggagacgcaagtag

SEQ ID NO: 239282 - DNA, 2766 bp, synthetic construct
  misc_feature 1..2766: note = Description of Artificial Sequence: Synthetic coding sequence
  source 1..2766: mol_type = other DNA
atggacctatgtacccgagcaggggaaccctccttgacccagaacacacatcctcggcagcaggcgctcgaacaattgcttgaggataaggttgaagatgacatgttgcagctctctgagtttgacccattactgagggagatagcacctgggccattaacgacgccctccgtccctggcagcacgcctggcccatgcttcctctgcggctccgccccagggaccctgcattgcccaagctgcaaacaggccctctgtcccgcttgcgaccacctttttcatgggcatccctctcgtgcgcatcaccttcggcaaacgctgccaggtgtcctgcaaggaacccatctttctccctcactccccgcatctgcccagccccgtccacaaagtacctcattactggctctaggcgactcttcccttagctcacctaaccccgctagtgcgcatctcccttggcactgcgcggcatgcgccatgctgaatgagccatgggccgtcctgtgcgtggcatgtgatagaccacgcggatgcaaggggttagggctgggcaccgaggggcctcaagggacaggcggtttagaacctgatctggcacgaggtcgatgggcttgtcagtcatgcaccttcgaaaatgaggctgctgccgtgttatgtagtatatgtgagagaccaaggctggctcaaccccctagcctggtagttgattccagagacgctggaatctgcttgcaaccactccagcagggcgatgccctgctggcaagcgctcaaagtcaggtttggtactgtattcactgcaccttttgcaatagcagcccaggctgggtttgcgtgatgtgcaataggacatcatctccgattccagctcagcatgcccctaggccttatgctagttctctggagaagggacccccaaagcccggtcctcccagaaggctgagtgcccctctccctagtagctgcggtgatcccgagaagcagcggcaggataagatgcgtgaagaagggctgcagctcgttagtatgattcgcgagggggaggctgccggagcttgtccagaggaaatattctctgccctgcagtacagcgggacggaggtgccacttcaatggctacgtagcgagctcccctacgtgctcgaaatggtagctgagcttgcaggacagcaggacccgggactgggcgcttttagctgtcaagaagcgagacgcgcatggctggacaggcacggcaacctagacgaagccgtggaagaatgcgtgagaacacgacgtagaaaggtgcaggaactgcagtccctcggcttcggccctgaggagggcagcctgcaggcgctattccagcatggcggtgatgtctcgagggccttgacggaactacagcgccagcggctggagccatttagacagcgcctgtgggactctggaccggaacctaccccctcttgggacgggcctgataaacagtccttggtgcgtagactactcgctgtctacgccttgccgtcttggggcagggctgaactcgctctttcgttgcttcaggagaccccccgaaactatgagcttggagacgtcgtggaagcagtgcggcattcccaggacagggcattcctgcgcagactgcttgcacaggaatgcgccgtttgtggctgggcactcccccacaataggatgcaggcgctcaccagttgtgagtgcaccatctgccctgactgtttccgccagcatttcactatcgccctgaaagaaaagcatatcacggacatggtctgtccagcgtgtggaagaccagatttgactgatgacacacaactcctcagctacttttcgacactggacattcagttgcgagaaagtctcgagcccgacgcctatgccctgttccataagaaactcactgaaggtgttctgatgagagacccaaaattcttgtggtgcgcccagtgttctttcgggtttatctacgagagagagcagttggaggcaacctgtcctcagtgtcatcagaccttttgcgtgaggtgcaagagacagtgggaggagcagcataggggcagaagctgcgaagactttcagaactggaaaaggatgaatgaccctgagtaccaggcccagggactggccatgtacttacaggaaaatggtatcgattgccctaaatgcaaattttcttatgctttagccagaggaggatgtatgcactttcattgcacccagtgccggcatcagttttgcagtggatgttacaacgctttttacgcgaagaataagtgtccagaaccgaattgcagggtgaaaaaatctcttcacggacaccatccccgagattgcctgttttacttgcgcgattggacagcgctgcgactccagaagctgctccaggacaacaatgtgatgttcaatacagaaccgccagcgggtgcacgcgcagtaccgggaggcggatgcagggttatcgagcagaaggaagtgccaaacgggctccgggatgaagcatgcggaaaggaaacccctgccggttacgccggactatgccaggctcattacaaggaatacctggtgtccctcattaatgcccacagcctagaccccgctactctgtacgaagtcgaggagttggaaactgccaccgaacgctacctccacgttagaccgcaacctctcgccggagaagatccccctgcctatcaggcccgactgctgcagaaactcaccgaagaggtgcccttgggacagtcaatccctagaagacgcaaatag

SEQ ID NO: 239283 - DNA, 513 bp, synthetic construct
  misc_feature 1..513: note = Description of Artificial Sequence: Synthetic coding sequence
  source 1..513: mol_type = other DNA
atgcccggagaagaggaggagcgggctttcctcgttgcaagggaggaactggcatcagccctgcgacgggattcagggcaggcgttcagcctcgagcagctccggccactgctggcctcctccctgcccctcgctgcaaggtatttacagctggacgcagcgaggctggtgcgatgtaatgcacacggcgaaccccgaaactatcttaacactctgtctacagcattaaatattctggaaaaatacggacggaacctacttagtccgcaacgacccaggtattggcggggtgttaaattcaacaaccctgtgtttaggtccacagtcgacgccgtgcagggcggtcgcgatgtgcttcgcctatatggctataccgaggaacagcctgacggactaagctttcccgaggggcaggaagagcccgatgagcatcaggtggcaaccgtcactcttgaggtgctgcttcttcggaccgagcttagccttctccttcaaaatactcaccctaggtag

SEQ ID NO: 239284 - DNA, 171 bp, synthetic construct
  misc_feature 1..171: note = Description of Artificial Sequence: Synthetic coding sequence
  source 1..171: mol_type = other DNA
atgcccggagaggaggaggaacgtgcatttctggtggccagagaggagctcgcctctgctctccggagagatagcggtcaggcttttagcctagagcaacttaggcctctacttgcctcttccttgccattagccgctcggtatctgcagttagatgcggctaggctgtag

SEQ ID NO: 239285 - DNA, 1122 bp, synthetic construct
  misc_feature 1..1122: note = Description of Artificial Sequence: Synthetic coding sequence
  source 1..1122: mol_type = other DNA
atgcgcaaggcaggggcaacatcaatgtgggccagttgttgcgggcttttaaatgaagtcatgggcacgggcgctgtgcgcggacaacagagtgcctttgcaggagctacagggccttttagattcacacctaatcctgagtttagcacatatccacccgcagctaccgaaggaccgaacatcgtatgtaaagcatgtgggttgagcttctcggtcttccgtaaaaagcacgtctgctgcgactgcaagaaagacttctgtagtgtgtgttcagtgttgcaggaaaacctgaggaggtgtagtacctgtcatcttcttcaagagacggcctttcagcgaccacaactgatgcggttgaaagtaaaggatctgaggcagtaccttattctgaggaacattcctatcgatacttgtcgggagaaggaagacctcgttgatctcgtgctgtgtcatcacggcctaggatcagaggacgatatggacacttcatctctcaatagcagtaggtctcaaacatcaagcttctttactagatccttcttcagtaactatacggcgcctagtgcaaccatgtcgagctttcagggggaacttatggatggcgatcaaacttctcggtccggagtaccagctcaggttcagtctgaaattaccagtgcaaatacggaggatgacgacgacgacgacgacgaggacgatgatgatgaggaggaaaacgcagaggatcgaaatcccggtctgtccaaggagagggtccgagcgtccttgtctgacctcagttcactggacgacgtagagggcatgtccgtcaggcagcttaaggaaatcctcgcccgtaactttgtgaactactccggttgttgtgagaagtgggagctagtcgagaaggtgaacagactgtataaggaaaacgaagaaaaccaaaaatcatatggcgaacggttacagctccaggatgaggaagatgacagtctctgtaggatttgtatggacgctgtgatcgattgtgtattgctcgagtgtggccatatggtaacctgcaccaagtgcggcaagagaatgtcagagtgcccaatctgcaggcagtatgtggtgcgtgcggtccatgtattcaaaagctag

SEQ ID NO: 239286 - DNA, 1119 bp, synthetic construct
  misc_feature 1..1119: note = Description of Artificial Sequence: Synthetic coding sequence
  source 1..1119: mol_type = other DNA
atgaaagccggagctacatccatgtgggcttcctgctgcgggctgttaaatgaggtgatgggcaccggcgcagtaaggggccagcaatcggctttcgctggggctactggacccttcagatttactcctaatccagagttcagtacatatcctcctgcagctacagagggcccaaacatcgtctgcaaagcctgtggtctatccttctctgtattccgcaaaaaacacgtctgctgcgactgcaaaaaagacttctgtagtgtgtgctcagtactccaagagaacctgcgacggtgtagcacatgccaccttttacaagagaccgcttttcagagaccacagcttatgcgcctaaaggttaaagatttgcggcagtacctgattctgaggaacatccccattgatacttgtagggagaaggaggacctagttgacctggtgctttgtcatcatggcctgggttcagaagatgatatggacactagttctctgaattcatcccgaagtcagacctcatcattctttacaagatcttttttctccaattatactgcccctagtgctaccatgtctagctttcagggcgaactgatggatggggaccagacgagccggtcgggagtgcctgcccaggtgcagagcgagatcacttctgcgaatacagaggacgacgacgacgatgatgacgaggatgacgacgatgaagaagaaaatgctgaggatagaaatcctggcctatccaaggaaagagtcagagccagtcttagcgatctctcaagtctggatgacgtcgagggtatgtccgtcagacaactgaaagaaatcctggcacgaaactttgtgaactacagcggctgctgtgaaaaatgggaactcgtcgaaaaggtgaatagactgtacaaggagaacgaggaaaaccaaaagtcatacggtgagcggctccagctccaggatgaggaggatgatagcctctgtcgtatttgcatggatgcagtgattgattgtgtcctgcttgaatgtggccatatggtgacatgcacaaaatgcgggaagagaatgagtgaatgcccgatctgtcggcagtatgtcgtgagagcagtgcatgtgtttaaatcctag

SEQ ID NO: 239287 - DNA, 1122 bp, synthetic construct
  misc_feature 1..1122: note = Description of Artificial Sequence: Synthetic coding sequence
  source 1..1122: mol_type = other DNA
atgaggaaggccggtgccacatccatgtgggccagctgctgtgggctgctcaacgaggtcatgggcacaggagcagtgaggggtcagcagtccgccttcgccggtgccacgggccctttccggtttacaccaaaccctgagttttctacataccccccagcggcaacagaaggccctaacatcgtctgcaaggcctgcgggctctcctttagcgtctttcggaaaaagcatgtctgttgtgactgtaaaaaagacttttgttccgtgtgttcagtgctgcaggaaaacctgaggcgttgcagtacttgccacctcctgcaagaaacagcctttcaacgaccgcaactcatgcgcctgaaggtcaaagacttaagacagtacttgatcctgcggaacattcccattgacacgtgcagggaaaaagaggatttagttgacttggttttgtgccatcatggattgggctctgaggacgacatggacacaagttcccttaactccagcagatcccagacatcatcctttttcacacgtagtttttttagcaattataccgcaccatctgcgaccatgtcatctttccaaggagaactcatggatggggaccagacatcccggtcaggtgtgccagcgcaagtccagtccgagattacttccgccaatacggaggacgatgatgatgatgacgacgaagatgatgacgacgaagaggagaatgccgaggacagaaacccgggattgagtaaagaaagagtgcgagcctcactgtctgacttatcttcactcgacgatgtcgaaggaatgtctgtcagacagctcaaagagatcctggctagaaatttcgtaaactatagtgggtgttgtgagaagtgggaacttgtggagaaagtgaacaggctgtacaaagagaatgaggagaaccagaagagctacggagagcggctccagttacaggacgaggaggatgattcactatgccgtatttgtatggacgccgtgatcgactgtgtgctgctggagtgcgggcacatggtgacttgtaccaagtgtggtaagcgtatgagtgaatgccccatctgtcgacaatacgtggtgagggctgtccacgtttttaagtcctag

SEQ ID NO: 239288 - DNA, 1548 bp, synthetic construct
  misc_feature 1..1548: note = Description of Artificial Sequence: Synthetic coding sequence
  source 1..1548: mol_type = other DNA
atggcatgcaaaatctcgccaggcgcaaacagcgcctcgctgcccggacaccccaataaggtgatctgcgagcgtgtgcgccttcagagcctttttccgctgttgccaagcgaccaaaacacgactgttcaggaggatgctcacttcaaggctttcttccagtcggaggactctccatcccctaagagacagaggctgagccatagcgtgttcgattacacttccgcaagcccggctccctctcccccaatgaggccatgggagatgacatctaacaggcagccaccctctgtccgcccatcccaacatcacttctccggggagcgttgtaatacccccgctaggaaccggaggtcccctccagtgagaaggcagcgcggaaggcgcgacagattgtcgcgtcataactccattagtcaggacgagaattatcaccacttgccgtatgcccagcagcaggcaattgaggagccacgagcttttcatcccccaaacgtttcccccagactgctgcaccccgcagctcacccaccgcaacaaaatgccgtgatggtagacatccatgatcaactgcatcaaggcaccgtccccgtctcttacactgtcacaaccgtggcccctcacgggattcctctctgtacaggccaacatatccctgcttgctccactcagcaagtgcctggttgctcagtggttttttcagggcaacacctcccagtgtgctcagttcctccacccatgcttcaagcctgttcggttcagcacctgcctgtaccctacgccgcattcccccctctcatatcatcagatcccttcctcatccacccaccccacctcagtcctcatcaccctcctcatctgccacctcccggacagtttgtcccatttcagacacagcagtcaagatccccactgcagcggattgagaatgaggtcgaactgctgggcgagcatctgccagtgggagggttcacctacccgccttcagcccatcccccaaccctgccgccaagtgcccctttacagttcctcacccatgatccactgcatcaggaagtttctttcggggttccttaccccccttttatgccccgaagattaacagggcgatctcggtatcggagtcaacaacccattccacccccaccttaccacccttctttgctcccttacgtcttatccatgcttccagtaccaccagctgtgggtcctacattcagctttgagttagatgtggaggacggggaggttgaaaactatgaagccctgttgaacctggctgaacgcctgggagaggcaaaacctcgcggattgacaaaggcagatatcgagcagcttccttcatacagatttaaccccaacaatcatcagtctgaacagaccctgtgcgtggtgtgtatgtgcgactttgaatcccgacagcttctcagggtgttaccttgtaaccatgagttccacgcaaagtgcgttgacaagtggctcaaggcgaatcgcacatgccctatatgccgtgccgatgcttcagaggttcacagggacagcgagtag

SEQ ID NO: 239289 - DNA, 1299 bp, synthetic construct
  misc_feature 1..1299: note = Description of Artificial Sequence: Synthetic coding sequence
  source 1..1299: mol_type = other DNA
atgcgcccttgggaaatgacctctaatagacagccaccttcagtgcgcccttctcaacaccacttttccggagagcgttgcaatacaccggctcggaacagacggtcacctcccgtgcgaagacagcgaggcagaagagatcgtctgagccgacataactccatttcacaggatgagaactaccaccacttaccatacgcccaacagcaggcaattgaagagcccagagcctttcatcccccaaatgtgtcacccagactgctccatccagctgcccacccccctcaacaaaacgctgtgatggttgacatccacgaccagctccaccaggggaccgtccctgtgtcatatacagtaaccaccgtggctccacacggtattcccctgtgtacaggccagcacatccctgcttgcagcacgcagcaggttcctggatgcagcgtcgtcttctccgggcagcacctacctgtgtgtagtgtgcctcctccaatgctgcaggcatgttccgtgcagcatctgcccgtaccttatgcggctttcccccctctcatttccagcgatccgtttcttatacacccgccacatttgtccccacaccaccctccacatttgccaccccctggacagttcgtaccgttccagacccaacagagccggagcccacttcaacgcatagaaaatgaagttgaactgttgggagagcacctacctgttgggggattcacataccccccatcggcacaccctcccaccctgccaccttcggcaccgctccagtttcttacacatgatccattacaccaagaagtcagttttggcgtgccctaccctccattcatgccacgtagattaacaggacgctctcgttacagatcacagcagcctatccctcctcctccataccacccttcattgctaccatatgtcctttctatgctacccgtcccccctgcagtggggcctaccttctcattcgaattagatgttgaggacggcgaggtggaaaactatgaagccttgctgaatctggcagaacggctgggcgaagctaaaccacgcggacttaccaaagccgatatcgagcagctgccctcctatagattcaaccccaacaaccatcaaagcgaacagacactatgtgttgtctgcatgtgtgatttcgagagccggcagctgctacgtgtgctcccttgtaaccacgaattccatgctaagtgcgtggacaaatggctaaaagctaacaggacatgtcctatttgcagagctgacgccagcgaagttcatagagacagcgagtag

SEQ ID NO: 239290 - DNA, 1398 bp, synthetic construct
  misc_feature 1..1398: note = Description of Artificial Sequence: Synthetic coding sequence
  source 1..1398: mol_type = other DNA
atggcctgcaagtccgaggactcccctagcccgaagcggcagagactgtcccacagcgtgttcgactatacaagcgctagtcccgctccttcccctcctatgcgcccttgggagatgacatccaacaggcaaccaccatccgtgcggcctagtcaacaccatttctcgggtgagcgttgcaatactccagcacgcaataggcggtcgcccccagttcggaggcagagagggagaagggataggttgagcagacataattctatatcacaggatgagaattatcatcatctcccttatgcacaacagcaggctatcgaggagcctcgagccttccatcctccgaatgtatctccgagattattacaccctgcggcacatcctcctcaacagaacgctgtgatggtggacatccatgatcagctccatcaaggtaccgtcccagtgtcctacactgttactaccgttgcccctcacggaatccctctgtgcacaggccaacacatcccagcttgctcaacacagcaggtacccggatgctccgttgtcttctccggccagcatctgcccgtatgctctgtccccccacccatgctgcaagcctgctctgtgcagcacttgccagtgccctatgcggcatttccacccctgatctctagcgacccgttcctgatccatcccccacacttgtcaccacatcatccaccccatctgcctccgcctgggcagtttgtcccgttccaaacccagcagtcacggagccccctgcaaagaattgaaaacgaggtcgagttactcggcgagcacctacctgtgggaggcttcacctacccccctagtgcgcatcctcctactctcccaccaagcgcccctctgcagttcctcactcacgaccccctgcatcaagaagttagctttggagtgccataccccccattcatgccacggaggctcaccggaagatctaggtatagatcccagcagcccatcccccctcccccttaccacccatcactcttaccttatgttctgagcatgctccctgtgccccctgcagttggaccaaccttctctttcgagctcgacgttgaggacggggaggtagaaaactatgaggccctgctcaatttagctgagagacttggggaggcaaagcccagggggttaacaaaagctgacattgaacagctcccaagctacaggttcaacccgaacaaccatcagtcagagcaaaccctatgcgtggtatgcatgtgtgattttgagtcacggcagttgttaagggtgctgccatgcaaccatgaattccacgctaaatgtgtggacaagtggctcaaggccaacaggacgtgccctatttgtcgggctgatgcgagtgaggtgcatagggattccgagtag

SEQ ID NO: 239291 - DNA, 1299 bp, synthetic construct
  misc_feature 1..1299: note = Description of Artificial Sequence: Synthetic coding sequence
  source 1..1299: mol_type = other DNA
atgcgcccttgggaaatgacctccaacaggcagccaccatcagtgcggccttcccagcaccactttagtggagagcggtgcaatacccccgcaagaaatcggaggagtcctccagtaaggcgtcagcgtgggcgaagagaccggttgagccgccacaactccattagtcaggacgaaaactaccaccacctcccctatgcccagcaacaggcgattgaagaaccgagagcctttcacccgccaaacgtgtctccgcgtctgttgcaccccgctgcacatcctccacagcagaatgctgtaatggtcgatatacacgaccagctccatcagggcaccgtgcccgtttcctacaccgtaacgacggtcgctccccatggcatccccctctgcacgggccaacacatcccagcatgttctacccagcaggtgcctggctgcagcgttgtgttttccggtcagcacttacccgtgtgttcagttccgcctcctatgcttcaggcttgttctgtgcagcacctcccagtcccatacgcagcttttccccctttgatctccagcgatccattcctgattcatcctcctcacctgagccctcatcatccacctcacctacccccaccaggccaattcgtgccgttccagacgcagcagagcaggtcccccctacagcggattgagaacgaggttgaattgttaggtgaacatttaccagtgggtggctttacctaccccccatcagcacatcccccaaccctcccaccttctgctcctctgcagtttcttactcatgatcctcttcaccaggaagtgagctttggcgtcccatacccgccatttatgcccagaaggctgacgggcagatctaggtaccgatctcagcaaccaatcccacctcctccctaccatccgtccttgctgccatacgtactgagcatgctgcccgttcctccggcagtcggccctactttttcattcgagctggacgtggaagacggcgaggtcgaaaactatgaagcactccttaatctggctgagcggctgggcgaggccaagccccgaggactcactaaggctgatattgagcaattacctagttaccgattcaatcctaacaaccaccagtcagagcagactctgtgtgtcgtgtgtatgtgtgactttgagagcaggcagctgctaagggttttaccatgcaaccatgagttccacgcaaaatgcgtagacaaatggttgaaggcaaacaggacttgtcctatttgtagggccgatgccagtgaggtccacagggatagcgaatag

SEQ ID NO: 239292 - DNA, 1320 bp, synthetic construct
  misc_feature 1..1320: note = Description of Artificial Sequence: Synthetic coding sequence
  source 1..1320: mol_type = other DNA
atgcagcacacctgcacgcagcaaaagaaggtgacgtataagcatattgcacgattctctcccagaaaccgactttgccaggccgatgctgtgttcaacaataatcttgctggtttccagttgcaatctccgccagtccgcagacaaaggggcaggagggaccgactctcccggcacaattcgatatcacaggatgagaactatcaccatctgccctatgcacaacagcaggcaatcgaggagcctcgggctttccaccctccaaacgtgtcaccgaggttattgcatccagccgctcaccctcctcagcagaatgctgttatggtcgacattcatgatcagctccaccagggaacagtgccggtgagttatacggtcactacggtggctcctcatggcattcccctttgcactgggcagcatatcccagcttgctcgacccagcaggtgcccggttgttcagtggtcttcagcggccagcatctccccgtgtgctccgtgccaccaccaatgctgcaggcatgctccgtacaacacctccccgtcccgtatgctgccttccctccactgatctcaagcgacccatttcttatccatcccccacatctcagcccccatcatcctcctcacctaccccctcccggacagtttgtgcctttccaaactcaacagtcccgttcacctctccagcggatcgagaatgaagtagagctcttgggcgaacacctgcctgttggcggttttacctacccaccctcagcacacccccctacgttgccccctagtgcacccctgcagttcctcacccatgacccgctgcaccaggaagtttcttttggggtgccgtacccacccttcatgccccgtaggctgaccgggagatcccggtatcgctctcaacagccgatcccccctccgccataccacccatccttattgccatatgttctgtccatgctccctgtgcctcccgcagtggggccaaccttcagtttcgagcttgacgttgaggatggagaggtggagaattacgaggcgctgctgaaccttgccgagagactgggagaggcgaagccccgaggcctcacaaaggccgatattgaacagctaccgtcttatagattcaatcccaataaccaccagtctgagcaaacactgtgcgtggtgtgtatgtgcgatttcgagtctcgccagctgctacgcgtgttaccttgcaaccatgagtttcatgccaaatgtgtggacaaatggctgaaagcgaaccgaacatgccccatttgtagggcggacgcaagtgaagtgcaccgcgacagtgaatag

SEQ ID NO: 239293 - DNA, 999 bp, synthetic construct
  misc_feature 1..999: note = Description of Artificial Sequence: Synthetic coding sequence
  source 1..999: mol_type = other DNA
atggttgatatacacgaccaactgcaccagggaacagttcccgtttcatacaccgtgacaaccgtggctccacatggaattcccttgtgcactgggcagcatattcctgcctgcagtacccagcaggttcctgggtgtagtgtggtcttctccggtcagcacttaccagtctgtagcgtgcctccacccatgcttcaagcctgttctgtccagcatctacctgtaccatacgccgcattcccgccactgatctcctctgatccattccttatccatccccctcatctcagcccccaccaccctcctcacctaccccctcctggacagttcgttccctttcagacacagcaatctcgatcccccctccagagaatcgagaatgaggttgaactcctcggagagcacttgcccgtgggaggcttcacctaccccccttctgcgcacccacccactctgccccctagtgccccactgcaattcctgactcacgatcctctccaccaagaagttagcttcggggtgccctacccccctttcatgcccagacgccttaccggaaggtcaagataccgctcacaacagcctatcccccctccaccatatcatccatctctactgccttatgtcctgagtatgctgcctgttcctcccgctgtaggccctaccttctccttcgagctggatgtggaggacggagaggttgagaactacgaggccctgctaaatctcgctgagcgcctcggagaagccaagcccagagggttgacaaaagctgatatcgagcaactgccaagctacagatttaatcccaacaaccaccagtcagagcagaccctctgcgtggtgtgcatgtgtgatttcgaatctagacagctgctgagggttcttccctgtaatcatgagttccacgctaaatgcgtcgataaatggctgaaggctaaccgcacatgcccaatatgccgcgctgatgcttccgaggtacatagggactccgagtag

SEQ ID NO: 239294 - DNA, 1320 bp, synthetic construct
  misc_feature 1..1320: note = Description of Artificial Sequence: Synthetic coding sequence
  source 1..1320: mol_type = other DNA
atgcaacacacttgtacccagcagaaaaaagtgacttataaacatattgctcgattcagtcctcgcaataggctctgtcaggccgatgcggtgtttaacaataatctggctggcttccagctgcaatcaccaccagtaagaagacaacgtggcaggcgagatcggctgagtcggcataactcgatctcccaggatgagaactaccaccatttgccatacgcacaacagcaggctatcgaggagcccagagccttccacccacccaatgtgtcccccaggctccttcacccggctgctcacccacctcagcaaaatgctgtcatggttgatattcacgaccagcttcatcagggcactgtccctgtgtcttacactgtgacaaccgtggctccccacggtattcctctatgcacaggacaacatattcccgcttgttctacacagcaggtgccaggttgctccgtggtctttagcgggcagcatctgcctgtttgtagcgtgcctccgccaatgttgcaggcctgcagcgtgcagcatctgcctgtgccctacgcggctttccctccgcttatttcatcagatccatttctgatccacccaccccacctgtcaccgcatcatcctcctcacttgccccctcccggacagttcgtgccttttcagacgcagcagagccgctctcccctgcagcgcattgagaacgaggtggagctactcggcgagcacctgccggtggggggtttcacctacccaccttctgcacatcctccgactctgcctcccagtgcccctctccagttcttaacccatgatccgctccaccaggaggttagctttggagtgccatatcccccatttatgcccaggcgacttaccggccgatctcgctataggtcacaacagccaatccctccaccaccatatcacccttccctgctcccatacgttctgtccatgctgcccgtcccacccgcagtgggacccacctttagctttgagcttgatgtagaagatggggaagtagagaattacgaagcacttctgaatctggctgagcgtttgggcgaggcgaaacccagggggctcactaaagccgatatcgaacagcttcccagctaccgattcaatccgaataaccatcaatcagaacagacactgtgcgtagtgtgtatgtgcgacttcgaaagccgccaactcctgcgggtcctaccatgtaatcacgagttccacgccaagtgtgtagacaaatggctcaaagccaatcggacttgccctatttgtagggctgatgcaagcgaagtgcatcgcgacagcgagtag

SEQ ID NO: 239295 - DNA, 1299 bp, synthetic construct
  misc_feature 1..1299: note = Description of Artificial Sequence: Synthetic coding sequence
  source 1..1299: mol_type = other DNA
atgagaccttgggagatgacatctaaccgccagccaccaagcgtgcgtccaagccaacaccacttctccggagagagatgtaatacccctgcaaggaatcgcaggtctccgccagttcgacggcagcgcggacgcagggaccgcttatccaggcacaatagtatttcccaagatgagaattaccatcacctaccatacgcccaacagcaggcaattgaagaacctagagccttccatccccctaatgtatcgcctcgtctgttgcacccggctgcccatcctcctcaacaaaacgcggtgatggtcgacattcatgatcagctacaccagggtacagtgccagtctcctatacagtcacaactgtagcccctcacgggattccattgtgtaccgggcaacacattcctgcttgttctacacagcaggtgccgggatgcagcgtcgtcttcagtggccaacatctccctgtgtgtagcgttcccccacccatgttgcaggcttgttcagtgcagcacctgccagttccatatgcagcttttccccctctgatatctagcgacccttttcttatccacccccctcacctgtccccacaccatcccccacatctgccaccccctggacagtttgttccattccagactcagcagagtcggtctcccctacagcgcatcgagaacgaagtggaactgctgggggaacacctgccagtgggcggattcacctacccaccgagtgcccacccacccaccctgcccccaagcgcgcctttgcaattcttaactcacgacccactacaccaggaggtgtccttcggtgtgccatatcccccttttatgccaaggcgcctgacgggccgatcgagatatcgctctcagcagccaatcccaccgcctccctaccaccccagcctattaccttatgtcctgtctatgctgcccgttcctccagccgtgggtcccaccttctcctttgagttggatgtagaagacggggaggtggagaactacgaggccctcctaaatttggccgagcgactcggcgaagccaagccacgtggactgaccaaggccgacattgaacagctgccgtcatatcgctttaatcccaataatcaccagtccgaacaaaccctgtgcgtagtctgcatgtgtgacttcgaaagtcgccaacttctgcgggtgttgccttgcaaccatgaattccacgccaaatgtgtcgacaagtggctgaaggcgaatcggacctgccccatctgtagggccgacgccagcgaagtgcacagggattcagaatag

SEQ ID NO: 239296 - DNA, 1263 bp, synthetic construct
  misc_feature 1..1263: note = Description of Artificial Sequence: Synthetic coding sequence
  source 1..1263: mol_type = other DNA
atgtggtggcgcgacctgacccggcttcgcctctggctgaagcgcgaggctatccctggcgaggggaggaaagcagctaaagtcaacgctggagttggggagaagggtatttataccgcttctagccgcggagggcctccttctgctaggtctaaggccgttacagtggtcgcagagggcgctgccagtagaagttggctgagcatggacgccccagaactcggccctgggttggtggaaaggttggaacagctggccacatgcccactgtgtggcggaagcttcgaagaccctgtgcttctcgcctgtgagcatagcttctgcagggcctgcctagcaaggagatggggcacccctcctgctactggaactgaggcctctcccacggcctgcccgtgttgcggattgccttgcccaagacggtcactccgctccaacgtgcgattggcagtggaggttaggatatcacgagagttgagggagaaactcgccgagcctggagctagagctggtcggaggcgcggtgggaggattccaactatgggatgcctggatctcccaggggaagacatgagaaaaacctggcgcagattcgaagttccaacgtctaaaagttcaaactctgaggacgatctgccggaagattaccctgtcgtgaaaaaaatgctccatcgccttactgcggatctgaccctcgatccaggaacagcccaccgacgccttttgatttctgctgaccgcaggtctgtccagctggctccaccgggtactccagccccacctgacgggcctaagcgcttcgatcagctgcctgccgttctaggtgcccaaggattcggtgccggtcgccattgctgggaagtggagacagccgacgctgcatcatgccgagactccagcggggaggacgcggatgacgaagaatctcattacgcagtgggcgctgctggcgaaagtgtccaacgaaaggggtgcgtgcgtctttgccccgcaggagccgtgtgggctgtcgagggaagaggcggacggctgtgggccctcacagcccctgagccaaccctgcttgggggtgtggagccaccgcctcgacgcatccgggtcgacttggactgggagcgcggacgcgtcgctttttacgatggaagatcccttgatctgctctacgccttccaggcccctggacccctaggcgagaggatcttcccactattttgtacttgcgacccccgagccccactgcgcattgtgccggcagagtcttag

SEQ ID NO: 239297 - DNA, 756 bp, synthetic construct
  misc_feature 1..756: note = Description of Artificial Sequence: Synthetic coding sequence
  source 1..756: mol_type = other DNA
atgtggtggcgagacctaacgagactaagactgtggctgaagagggaagccattcccggtgaaggccgtaaagccgcaaaggttaatgcaggtgtgggcgagaagggtatctacacagcaagttccagaggcggacctccttccgcacgttccaaagcggtgacagtggtcgcagaaggcgcagccagtagaagctggctcagcatggatgcccctgaactgggtccgggattagtcgaaagactggagcagctggcaacatgtccactctgtgggggatcatttgaggatccagtgctgctcgcttgcgagcattcattctgcagggcctgtttagccaggcggtggggcaccccaccggctactggaaccgaggcgtcaccaactgcctgtccctgttgcgggctcccttgtccaagaagaagcctgcggagcaatgttcgactcgcggtggaggttcggatctcccgtgagctcctctttgggggtgggattcctcactcattcctgggcacacattcccacgcacactgtcgctccatcaacagcaacccgcattttagacctaaaatcatgcggccacatttggtatctacttttccacgaccctgctcgaaacccaacccctttctgccatcgggttcacaaaatctcctttctccaacagctaccaccgtgctgcccgacttcagccactctaatcactcgaggcctgcgatggggaaccgccctagtccgtctgtactggtcaagtag

SEQ ID NO: 239298 - DNA, 1065 bp, synthetic construct
  misc_feature 1..1065: note = Description of Artificial Sequence: Synthetic coding sequence
  source 1..1065: mol_type = other DNA
atgtggtggcgggatctgaccagacttcggctctggctgaaacgggaggcaattcctggcgagggcaggaaagctgcaaaggtcaatgccggtgtcggcgagaaagggatctacaccgcctcttcgcggggtggtcctccctctgcccgaagtaaagctgttaccgtagtcgcagagggagctgcgtctcgctcctggctgtccatggatgccccagagctgggccctgggcttgttgaaagattggaacagctcgccacatgtcccttatgcggaggatccttcgaggatccagtgttgctcgcttgcgaacacagcttctgtcgggcttgcctggctcggcgatgggggactcctccagcgacaggcactgaggctagtcccactgcatgcccttgctgcggcctaccgtgcccgaggcgttctctgcgaagcaatgtccggctggctgtggaggttcgcatttcaagagaactgagggagaagctggccgaaccgggagccagagccggtcggcgacgcggaggcaggatccccacaatgggctgcttggatctccctggagaagacatgcggaaaacttggcgcagatttgaagtgcctacccccaagtcctccaactccgaagatgacttgccagaggattaccccgttgtgaagaaaatgttacatcggctgaccgctgacctcactctggacccgggaactgcacacagaaggttgctgatttccaccgacaggcgatcggtgcagctggcgccacccggaactccggcacctcccgatgggccaaaaaggtttgaccagctgccagctgtgctgggggcacaggggtttggggcagggcgacattgttgggaagtggaaaccgcagacgctgcctcgtgtagagattccagcggcgaggatgaagacgatgaagaaagtcactacgccgtcggagccgctggggagtccgtacagagaaagggttgtgcaccaggtcccctgggtgagcgcatcttccctctgttttgtacgtgtgacccccgagcgccactcaggattgtgccagctgaatcctag

SEQ ID NO: 239299 - DNA, 1065 bp, synthetic construct
  misc_feature 1..1065: note = Description of Artificial Sequence: Synthetic coding sequence
  source 1..1065: mol_type = other DNA
atgtggtggcgagacttgacacgcttgcgactgtggcttaagcgggaagctatcccaggcgaaggccgaaaggcagctaaggtcaacgcaggtgtgggcgaaaaaggcatctacacagccagctcgagagggggaccaccatccgcaaggagtaaggcagttaccgtagtggcggagggagctgcatcccgatcatggttgtctatggatgctccagagctggggccaggattagtggagcggctggagcaactggcgacatgcccactttgtggaggatcattcgaggacccagtgctgttggcttgtgagcactcattctgtagagcatgcctcgccagaaggtgggggacaccaccggctacaggtacagaggcttcccctaccgcgtgtccttgctgcggattaccatgtccacggaggagcctaaggtctaacgtccggttggcagtagaggtccgtatttcaagggaactgcgggagaagctcgctgagccaggcgcaagagctggacgtagaagggggggacgcattcctacaatgggttgcctggacctgccaggcgaagatatgcgaaaaacgtggcggagattcgaggttccaacttccaagtcgtcgaacagtgaagatgacctcccagaagattaccccgttgttaaaaagatgttgcacagactcaccgccgacctgacattggatccaggcacagcacatcggagactattgattagtgctgatcggcgttctgtccagctggcgccacctggcacccccgctcctcccgatggaccaaaacggttcgatcagctccctgcagttctgggggctcaggggttcggggctgggagacattgctgggaagtagaaaccgcagacgcggcatcctgtcgagacagttccggggaggatgctgatgatgaggagtcccactacgcagtaggagccgcaggcgaatccgtccaaagaaagggctgcgccccaggcccacttggcgaacggatatttcctctcttttgtacgtgtgatccacgtgcccctctgaggatcgttcccgcagagagttag

SEQ ID NO: 239300 - DNA, 1263 bp, synthetic construct
  misc_feature 1..1263: note = Description of Artificial Sequence: Synthetic coding sequence
  source 1..1263: mol_type = other DNA
atgtggtggcgggatctgacccgtcttagattgtggttgaagagggaagccattcccggtgagggaaggaaggcagccaaggtcaatgcaggtgtgggcgagaaaggtatttacacagcctcttctagaggcggaccaccaagcgcacgctccaaggcagttactgtggtggcagagggcgcagccagccgctcctggctgagcatggacgcacccgagctggggccaggcctcgtggagaggctggagcaactggcaacctgcccactgtgcggtggatcgttcgaagacccggttctgctggcctgcgagcacagcttctgccgcgcatgcctggccaggagatggggaacgccccctgcgaccggcactgaagctagtcctactgcttgcccctgctgcggtctgccttgtccaagacggagcctgagatcaaacgtgagactcgctgtggaagttaggatctcaagagagttgcgggaaaaattggccgaacccggtgctcgagccggacgcagaaggggagggagaattccaactatgggttgcttagatctgcccggtgaagacatgcgcaagacttggcgacgattcgaagtccccacaccaaaatcttccaacagcgaggatgatctcccggaagattaccctgtcgtgaaaaaaatgctacaccgcctgacagcggatctcaccctggacccgggaaccgcgcaccggcgactgctaatctcaaccgatcgacgttcggtccagctggccccacccggaacccctgcacccccagacggacctaagcggttcgatcaactcccggctgtgctcggcgctcaaggattcggtgctggcaggcactgttgggaggtcgagaccgccgatgccgctagctgtagggactcatccggcgaggatgaagatgacgaagaatcccactacgctgtgggagccgctggggagagcgtgcagcgaaagggctgtgtccgcctgtgccccgctggcgctgtctgggccgttgaggggcgaggcggtaggctatgggcactgacagccccagaaccgacgctccttggtggcgtagagccccctcccagaaggatccgcgtggaccttgactgggaaagaggtagagtggcattctacgacggtcggagcctggacctattgtatgctttccaggcccctggcccacttggagaaagaatcttccccctgttttgtacttgcgaccctagagcaccgctgaggattgtacctgcagagtcatag

SEQ ID NO: 239301 - DNA, 1065 bp, synthetic construct
  misc_feature 1..1065: note = Description of Artificial Sequence: Synthetic coding sequence
  source 1..1065: mol_type = other DNA
atgtggtggagggacttaacccgtctgaggctgtggctgaagcgtgaggccatcccaggggagggtcgcaaagctgcaaaggtgaacgccggagtgggagaaaagggaatttatacggcatcttcccggggtggcccaccctcagctcggagcaaggctgttacagtggtggcggagggtgcagcttctcgcagctggctgagtatggacgcgcctgaactgggcccaggtctggttgaacgactggagcagctagccacctgtcctctatgtgggggatcttttgaggatcctgtcctactggcgtgtgagcactccttctgccgtgcttgcctggctcgcaggtgggggacccctcctgcaactggcaccgaagcctctcctacagcttgtccatgttgtggcctcccctgccccaggagaagcctgcggtcaaatgtaagattagcagtcgaagttcgaatcagtcgggaactgagagaaaagctggccgaaccgggagcgcgagctggcagacggagaggcggacgaattccaactatggggtgtctggacctacctggtgaggatatgaggaaaacttggcgtaggtttgaggtcccaacatccaagagctctaactcagaggacgacctgcccgaggactacccggttgttaagaagatgctgcaccgtttgaccgccgatctgacactggaccctgggactgcgcacaggagacttttgatttccgctgaccgaagatctgtacagctggcaccgccagggacccccgcacccccagacggcccaaaacggttcaaccagctccctgcggtcctgggggcacagggcttcggcgctgggcgacattgctgggaagtggagacggccgacgcagcatcatgccgcgatagttctggagaagacgccgacgatgaagaatcccactatgccgtcggggctgccggagaatccgtacagaggaagggttgcgcccctggcccattgggggagagaatcttccctctcttttgtacatgcgaccctcgggcacctctgaggatcgtgcccgcagagtcatag

SEQ ID NO: 239302 - DNA, 1263 bp, synthetic construct
  misc_feature 1..1263: note = Description of Artificial Sequence: Synthetic coding sequence
  source 1..1263: mol_type = other DNA
atgtggtggagggatctgacaagacttagactgtggctgaaacgagaggccatcccaggagaaggccgaaaagcggctaaagtgaacgcgggagtaggggagaaaggaatttacaccgctagctctcgcggtgggccaccgtccgcgaggagcaaggccgtgactgtcgttgccgaaggcgctgccagtcggtcttggctctccatggacgcccctgaacttggaccaggactggtggagagactagaacaattggccacgtgtcctctctgcggtggaagctttgaagatcccgtactgcttgcatgcgagcatagcttctgtcgggcttgcttggctaggcggtggggcactccaccagccactgggactgaggcctctcctaccgcttgcccatgttgcgggctgccgtgcccccgaagatctctcagaagtaatgtgagattagctgtggaagtgcgtatatctcgtgaattaagagagaagcttgccgagcctggagctcgagccggtaggagacggggtggcaggattcctaccatggggtgcttagatctgcccggagaggacatgcgcaagacctggcggaggttcgaggtgcccacctcaaaaagttccaacagcgaagatgatctgcccgaagactatcctgtggtgaagaaaatgttgcatagattaaccgcggacctgaccctagatccaggcaccgcacaccggaggttactgatatccgcagatagacgctccgtacaactggcccctccaggtactcccgctcccccagatgggccaaaacggtttgaccagcttcccgctgttctcggtgcccaggggttcggagctggccgacattgctgggaagtggaaacagccgacgccgcttcctgtcgagacagctctggcgaggacgccgatgacgaagagagtcactacgctgttggagctgccggagagagtgtgcaaagaaagggttgcgtgagactctgtcccgctggggcagtgtgggcagtcgggggtagaggtggtagattgtgggccctaacagctccggaaccaaccctgttggggggagtggaacctccacccaggaggattagagtggatttggattgggagaggggcagagtggccttttatgatggcagaagcctcgatctgctctatgctttccaagcgcctggaccattaggcgaacgcatatttcccctcttctgtacttgcgatcctcgcgcaccgctgcgcatagtgccggctgagtcctag

SEQ ID NO: 239303 - DNA, 1263 bp, synthetic construct
  misc_feature 1..1263: note = Description of Artificial Sequence: Synthetic coding sequence
  source 1..1263: mol_type = other DNA
atgtggtggagagatcttaccaggttgcggctgtggctaaaacgtgaggctatccctggcgaagggaggaaagcagcaaaagttaatgctggcgtgggagagaagggcatctacacagccagttcgagaggagggcctccatctgctcgttccaaggcggtcactgtagtggccgagggagccgcaagcaggtcctggctgtccatggacgctccggaactcggcccaggtctcgtcgagcgactggaacagctggccacttgtcccttatgtgggggatcttttgaagatcccgtgctcctcgcctgcgagcactctttctgtagggcttgcttagcacgtcgctggggaacacccccagcaacagggaccgaggccagcccaacagcatgcccatgttgcggcttaccatgtcccagacggtcattgaggagcaacgtgagactggctgtcgaagtgcgtattagccgcgaactgcgggaaaaactcgcagaacccggagctagagctggacggaggcgaggcggtcgcatccctactatgggctgcctggatctaccaggcgaggacatgcgtaagacctggagaagatttgaggtcccgacctcaaagtcaagcaacagcgaggatgatctgcctgaggattatccagtggtcaagaagatgcttcaccgtctgaccgctgacctaacactagatcctgggactgcacaccgacgcttgctgatctccgcagataggcggagtgtccagctcgcccctccaggcacccccgcaccacccgacggaccaaagcgttttgatcagctccccgctgtgctgggcgctcaaggttttggcgcaggacggcattgctgggaagtggaaactgcagacgctgcaagttgcagggactcgtccggtgaggatgcagacgacgaggagagccactatgctgtcggagcagctggtgagtctgtgcagaggaaagggtgtgtcagattatgccccgctggtgctgtctgggctgtggagggacgaggtggtaggctatgggctctaacagcccctgagcccaccctgctcggtggcgtcgagccaccaccccgacgcattagggtggacttagattgggagagaggacgtgtggccttttacgacgggaggtccctggatctactctacgccttccaggcccctggtcctctgggagagagaatcttcccactcttctgtacatgtgacccacgggcacctctgcggatcgtgccggctgagagctag

SEQ ID NO: 239304 - DNA, 1263 bp, synthetic construct
  misc_feature 1..1263: note = Description of Artificial Sequence: Synthetic coding sequence
  source 1..1263: mol_type = other DNA
atgtggtggcgggatttaactcggctccgattatggcttaagagagaggccatccccggtgaagggcgaaaggctgctaaagttaacgccggagtaggtgaaaaaggtatttacacagcaagcagcaggggaggtccgcctagtgccagatccaaggccgtgaccgtggtcgccgaaggtgccgcttccagaagttggctgagcatggacgccccagagctgggccctgggctggtggagcgcctagagcagttggccacctgcccactttgtggcggatcattcgaagatcctgtgcttctggcctgcgaacacagtttttgtagagcttgcctggcccgacggtggggaacaccgcctgccaccggcacggaggccagtccgacagcttgcccgtgctgcggccttccgtgccctcgtcggtctctaaggtccaatgtgcgactggctgtggaggtccgaatttcacgggagctgagggagaaactggctgaaccaggcgcaagagcgggaagacgcagaggagggcgtatcccgaccatgggctgcctggacttaccgggagaagatatgagaaagacatggcggaggttcgaggtacccacgtcaaaaagctcaaacagcgaggatgacctgccggaggattatccagtcgtcaagaaaatgcttcatagattgactgctgatctcactctggatcctgggactgcccatcggcgactgcttatctcggccgacagacgctccgtccagctagctccaccgggtactcctgcccctccagacggtccgaagcgcttcgatcagttaccagcggttctgggggcacaaggattcggggctgggaggcattgctgggaagtggagacggctgacgccgcaagttgtcgcgactcctccggtgaggacgctgatgacgaggagtcacattacgctgtgggagccgcaggtgagagcgtccagagaaaaggttgtgtgagactctgcccagccggagcggtgtgggctgtggaagggcgtggtgggagattatgggctctgactgctccggagcctaccctgctaggcggagtagaacctccaccaaggagaatccgggtggacttagactgggagcggggaagggtggccttttatgacggtcgctccctggacctgctctatgctttccaggccccagggccattgggtgaaagaatatttcccctcttctgtacttgcgaccctagggccccactgcggatagtgcctgctgaaagttag

SEQ ID NO: 239305 - DNA, 1065 bp, synthetic construct
  misc_feature 1..1065: note = Description of Artificial Sequence: Synthetic coding sequence
  source 1..1065: mol_type = other DNA
atgtggtggcgggacctcactcggctcaggctctggctcaaacgcgaagcaataccaggagaagggaggaaggccgcaaaagtgaacgccggtgttggtgagaaaggaatttacactgcttcatcgagaggcggacctccaagcgcccgaagcaaagccgtcactgtagtggcagaaggtgccgcatctcggtcttggcttagcatggacgccccagagctgggaccaggacttgtggagaggctggagcagctcgctacctgccctctttgtgggggttcattcgaggatcccgtcctacttgcttgcgaacattccttctgcagggcttgcctcgcgaggcgatggggaaccccgcctgctacaggcactgaagccagcccaaccgcttgcccgtgctgtggcctgccgtgtcctcgcagaagcttgcgctcaaacgtcagattggctgtggaggtccggatctcaagagagctgagggaaaaactcgccgagcccggagccagagcagggaggaggagggggggacgcatccccaccatgggctgtctcgatctccccggtgaggatatgcgtaaaacctggaggcgctttgaagtgcccacatcaaaatccagtaattcagaggacgatcttcctgaagactatcccgtggtcaagaaaatgcttcaccggctgacagctgatctgaccttagatccagggacagcccacaggcgtctccttatatccgcagaccggaggtccgttcagctggctccaccaggcaccccagcaccccctgatggacccaaacggttcgaccagctacccgctgtgctaggtgcccagggatttggagccggacgacattgctgggaggtcgaaactgcggacgccgcttcttgcagggattcaagtggagaagacgcagacgatgaagagagccactacgctgttggggcagctggagaatccgtccagcggaaaggttgcgcaccaggtcccctgggtgagcggatctttcccctgttttgtacttgcgacccccgagctcccctgcgcatagtgccagccgagtcatag

SEQ ID NO: 239306 - DNA, 1065 bp, synthetic construct
  misc_feature 1..1065: note = Description of Artificial Sequence: Synthetic coding sequence
  source 1..1065: mol_type = other DNA
atgtggtggcgagatcttaccaggctgaggttatggctgaaacgtgaagcgattccgggtgaggggaggaaggcagcgaaggtcaatgccggtgtgggcgagaaagggatttataccgcatcttcacgaggtggcccaccttctgcaaggtccaaggcagtgacagtcgtggcggaaggagccgcaagccggtcttggttgtcaatggacgccccagagctgggaccaggacttgtggagcgcttagaacagctggctacttgtcctctgtgcggtggctcatttgaagacccagtcctgctggcctgtgaacacagcttttgtagagcgtgcctggccagacgctggggcacaccacccgcaactggtacagaggctagccccacagcctgcccatgttgtgggctgccatgccccaggcgcagcctaagatcaaacgtgcgcttagccgtggaggtgcggatatcgcgggaactccgggaaaaactggcagagcctggcgcacgggctggtaggcggaggggcggtcgaatccccacaatgggctgtttggacctgcccggtgaagatatgcggaagacatggcgaagattcgaggtcccaacgtccaaatctagcaactccgaagacgacttacctgaagactatccagtggtcaagaaaatgctgcatagactcaccgccgacttgacgctggaccccggtacagcgcatcgtcggttgttgatatccgctgaccggaggagtgtgcagctggcgcctcctggaacccctgctccaccagacggacctaagagatttgaccagctccctgctgtgcttggtgcacagggattcggcgcaggtagacactgttgggaggtggaaaccgctgacgccgcatcctgcagggactcatccggcgaagacgccgacgacgaggaatcccactacgccgttggggcagccggagagtccgtacagagaaaagggtgtgcacccggtccactgggcgaaaggatcttcccactgttctgtacttgcgacccaagagcaccactgaggattgtgcccgctgaatcctag

SEQ ID NO: 239307 - DNA, 1065 bp, synthetic construct
  misc_feature 1..1065: note = Description of Artificial Sequence: Synthetic coding sequence
  source 1..1065: mol_type = other DNA
atgtggtggagggatctgacccggttgaggctgtggctgaagagggaagccatcccaggagaaggcagaaaggccgcaaaggttaatgcgggagtgggtgaaaaggggatctacaccgccagctccaggggtggaccccctagtgctaggagtaaggcagtcaccgttgtggctgagggcgcagcctcccgtagctggctctccatggacgcacccgagctggggccaggtcttgtggagcggttggagcagctcgctacctgccccctgtgcggcggatcattcgaggaccccgttctgcttgcgtgcgagcacagtttttgtagggcatgcctagcgaggaggtggggaacaccccctgccactgggaccgaagcaagcccaactgcctgcccatgttgcggtctgccctgccctcgcaggtcactcagaagcaacgtaaggcttgcagtggaggttcggatctccagggagctccgagaaaaacttgcagagcctggagctcgggcaggacggaggagaggcggaagaatccctaccatgggatgtcttgacctgcccggagaggacatgcgcaagacatggaggagattcgaggtgcccacttcaaaatcatctaactccgaagacgacctgcctgaagactacccggtagtcaaaaaaatgttgcatcgcttgacagctgaccttactctagaccctgggactgcacacaggcggctgttgatctccgccgataggaggtctgtccaactcgccccacctggtacccctgcacctccagatggccctaaaaggtttgaccaactgccagccgtgttgggtgcacagggcttcggggctggcaggcactgttgggaggttgagaccgctgatgctgcttcttgtcgagactcctccggcgaggacgcagatgacgaggagtcccattatgccgtcggcgctgctggagaatcagtccagcgaaagggctgcgcccctgggccacttggggagcgaattttcccactgttttgtacatgtgaccctcgggctcccctgaggatcgtgcccgctgagtcatag

SEQ ID NO: 239308 - DNA, 1263 bp, synthetic construct
  misc_feature 1..1263: note = Description of Artificial Sequence: Synthetic coding sequence
  source 1..1263: mol_type = other DNA
atgtggtggcgggacctgacacgactgagactgtggctgaagcgggaggcaattccaggagagggacgcaaggccgctaaggtcaatgccggtgtaggggaaaaagggatttacaccgcctcatctagagggggacctccatcagcaaggtcaaaagctgttacggtagtggccgagggagcggctagtaggagctggctgtcaatggatgcgccagaactggggccaggactggtggagaggctagagcagcttgccacttgtcctctgtgcgggggatccttcgaggaccccgtcctcctcgcctgcgagcactcattttgtcgagcttgcttagccagacgatggggaacaccgcctgccactggaaccgaagctagccccactgcatgcccctgttgtggcctgccttgcccaaggcgttccttaagaagtaatgtcagattagctgtggaagtcaggatctcccgggaactccgagaaaaactagccgagcccggagcgcgagccggaaggagaaggggcggtagaatccccactatgggctgtctcgacttgcctggcgaagacatgcgaaagacctggcggaggtttgaggttcccacaagcaaaagcagtaattccgaggacgacctacccgaagactatccagttgtcaaaaagatgcttcacaggctgaccgcagatctgactttggatccaggtacagctcacaggagactgcttatcagtgcggaccgcaggtctgttcagttagcaccaccaggcaccccagcgcctcccgatgggccaaagagatttaaccagcttcccgcagtgctcggcgctcagggcttcggtgccggacgacactgctgggaggttgaaacagcagatgcggctagctgcagggattcctccggcgaggacgcagatgacgaggagtcccactacgccgtgggggcagctggggaatctgtccagaggaagggatgtgtgagactctgccccgctggtgccgtgtgggctgtggaaggtagaggcggaagactgtgggcccttaccgcccctgaacccactcttctgggcggtgtggaaccccctccccgaaggatccgcgtagacttggactgggagcgaggcagggtcgctttctatgacggcaggagcctggacttactgtacgcatttcaggctccaggccctctgggggaacgcatttttcctctgttctgtacctgtgaccccagggcccctctaaggatcgtgcccgctgagtcatag

SEQ ID NO: 239309 - DNA, 1263 bp, synthetic construct
  misc_feature 1..1263: note = Description of Artificial Sequence: Synthetic coding sequence
  source 1..1263: mol_type = other DNA
atgtggtggagggacctgacacgccttcggctatggctgaaaagagaagccatcccgggagagggcaggaaagctgctaaggtgaacgctggggtgggcgaaaagggaatctatacagctagcagccgcggtggacccccatccgcccgaagcaaagccgtgactgtggtagctgaaggcgcagcctcaaggagctggttgtccatggacgcgccagaacttggtcctgggctggtggagagactggaacagctggcaacatgtcccctctgcggagggtcctttgaggatcctgtactgctggcttgtgaacacagcttctgccgcgcttgcctggctaggagatggggtacccccccagctacaggaacagaagcaagccctactgcctgcccctgctgcggtctgccgtgtcctcggcgaagtctcagaagcaacgtcaggctcgcagtcgaggtgaggatctcgagggaattgcgggagaaactcgccgaacccggagctcgcgctggcagaaggaggggcggtagaattcctactatgggctgtctggacttgcccggtgaagatatgagaaagacatggcgcagattcgaggtgcctacttccaaatccagcaattcggaagacgacttgcctgaggattatccagttgtgaagaaaatgctgcatagactgacagccgacctgactctagatccaggcaccgcacatagacgtttgctaatatcggccgatcggagaagcgtacagctcgctccaccgggaaccccggctccacccgacgggccaaagcgtttcgatcagttgcctgcagtgttgggagcacagggcttcggcgctgggaggcactgctgggaggtggaaacggccgacgccgcaagttgtagggacagctcaggagaagatgcagacgacgaagaatctcactacgccgtgggggctgctggtgagtcagtacagagaaagggttgtgtgcgcctctgtccagcgggagccgtgtgggctgtcgaaggaaggggcggtaggctatgggctttgaccgctccggaaccgaccctgctcggcggtgtggaacctccccctcgcaggattagggtcgatcttgactgggagcgcggtagagtcgccttttacgatgggcgatcactggatcttctttacgccttccaggcccctggcccactgggtgaacggatctttccactgttctgtacatgcgatcctagagcacctctcagaatcgtacctgcagaaagctag

SEQ ID NO: 239310 - DNA, 1065 bp, synthetic construct
  misc_feature 1..1065: note = Description of Artificial Sequence: Synthetic coding sequence
  source 1..1065: mol_type = other DNA
atgtggtggagggatttgacccgcctacgtctatggttgaagcgcgaggcaatccctggagagggaagaaaagccgctaaagtgaatgccggagtgggagaaaagggcatctatacagcgtcatcaaggggtggaccaccaagtgcaaggagcaaggccgtgacagtcgtcgcagaaggggctgcctcacgctcctggctgagcatggatgcaccagagttaggcccaggacttgttgagcggctggagcagctggcgacttgtccattgtgtggtgggagctttgaggatcccgtcttattggcctgcgagcactcgttttgtcgcgcttgcctggctcggagatgggggactccgccagcgaccggcaccgaggctagccctacagcgtgcccctgttgcggtttgccatgtcccaggaggtccctccgaagcaacgttagactggctgtggaggtgcgcatctcaagagaacttcgcgagaagctcgccgagcctggcgctagggctggcaggagaaggggcggtcggattcccactatgggctgcctggatctgcctggcgaggacatgcgcaaaacctggcggcgatttgaggtgccaacctctaagtcctcaaactccgaagacgaccttcccgaggattaccccgttgtgaagaaaatgctccataggctcactgccgacttaactctggaccccggaacagcccaccgtagactgctcatttccgcagaccgtagaagcgtccaacttgctcctccaggaacaccagccccacccgatggacccaagcgattcgaccagcttcctgcagtccttggggcacagggttttggggcagggagacactgctgggaagtggaaacagccgacgccgcaagttgccgcgatagttcaggggaggatgccgatgacgaagagtcccactatgccgtgggagctgcaggtgagagcgttcaaaggaaaggttgtgctcccggtccattgggagaacgcatcttcccactgttttgtacatgcgacccacgggctcctttgaggatcgtcccagctgagtcctag

SEQ ID NO: 239311 - DNA, 1263 bp, synthetic construct
  misc_feature 1..1263: note = Description of Artificial Sequence: Synthetic coding sequence
  source 1..1263: mol_type = other DNA
atgtggtggcgggacctgaccagactcaggctgtggctgaagagagaggcaataccaggcgaggggaggaaggctgcaaaagtgaatgctggcgtcggggaaaaaggcatatataccgctagctcacgtggtgggccaccgtccgctagatccaaagctgttacagtggtcgctgagggggcagcatcccgatcctggctgtcgatggacgcacctgagctgggcccaggcctggtggaacggttggaacagctggccacctgtccactctgtggagggtctttcgaggatcctgttcttcttgcatgtgagcatagcttttgcagagcctgtcttgcaaggcggtggggtacgcctcctgcgactggaactgaggctagccctacggcctgcccctgctgtggcttgccatgcccacgtcgctccctcaggagcaatgttcggctggctgtggaggtccgtatatctagggaactcagagagaagctggccgagccaggcgctcgcgctggacgccgtaggggaggaaggatcccaacaatgggttgcttagatctgcctggcgaagacatgcgcaaaacttggcggagattcgaggtgcctacctcgaaaagctcaaactccgaggatgacctccccgaagattacccggtagtcaagaaaatgcttcacagactcaccgccgatctgacgttagaccctggtacagctcaccgccgtctgctgattagtgctgacagacggtctgtccagcttgcccctccaggcaccccggctccaccagatggtccaaagcgcttcgaccagctgccagccgtgctgggagctcagggctttggcgcaggcagacattgctgggaagtcgagactgccgatgcggcttcttgccgcgattcctccggcgaggatgcggatgatgaagagtcccattacgccgtgggcgctgcaggcgaatctgttcaaaggaagggctgcgttagactctgtcctgccggagccgtctgggcagtggaaggtaggggcggacgcctctgggcattgacagcccctgaacctaccctgctcggaggggtcgagccccctcctaggcgtatcagagtggacttggattgggaacgcggacgtgtggccttctatgacggccgtagcctggatctgctttatgcatttcaggctccaggccctctgggcgagagaatctttcctctgttttgcacatgcgatcctagagccccattgcgaatagttcccgcagagagctag

SEQ ID NO: 239312 - DNA, 1065 bp, synthetic construct
  misc_feature 1..1065: note = Description of Artificial Sequence: Synthetic coding sequence
  source 1..1065: mol_type = other DNA
atgtggtggagagacctgactcgtctgagactctggctgaaacgtgaggctatcccaggtgagggaaggaaggccgcaaaagtgaatgcaggcgtgggagagaagggcatttacaccgcctctagcagaggcggtcctccgtcagctcgctcgaaggccgtcactgtggtagcggagggggcagcctcacgtagctggctgtctatggatgccccagagctgggccctggccttgtggaaaggctcgagcagttggccacttgcccactgtgtgggggtagtttcgaggatccggtgctgctagcctgtgagcacagtttttgtcgcgcatgtttagcacgcagatggggcactccccctgctactggcaccgaggcctctccgacagcctgtccctgttgtggccttccttgccccaggaggagcttgcgctcaaacgtcaggctcgcagtcgaggtccgtatttctagggagcttagggagaagctagctgagcccggagcccgtgccggaagacgaagggggggtcggatccccacgatgggctgcttggatttacccggagaggacatgcgtaaaacttggcgccgattcgaggtcccaacatccaagtcgtctaacagcgaagatgacctacccgaggactaccctgtagtgaagaagatgctacaccggttaactgccgatctcacgctcgaccctggcacagcccatcgacgcctattgatctctgccgacagaagatctgtgcagctcgctccacccggaacaccagcacccccagacggcccaaagaggttcgaccagctgcccgcagtgctcggggcacagggatttggtgccggtaggcactgctgggaagtggaaaccgccgacgccgcatcttgtcgggatagctccggagaagacgccgacgacgaggaatcccactatgccgttggggctgccggagagtccgtacaacgcaaggggtgcgctccagggccactaggcgaacgcatctttcccctcttttgcacctgcgaccccagggctccccttagaatcgtgccagctgagtcatag

SEQ ID NO: 239313 - DNA, 756 bp, synthetic construct
  misc_feature 1..756: note = Description of Artificial Sequence: Synthetic coding sequence
  source 1..756: mol_type = other DNA
atgtggtggcgggacctcacccgtctgcggttgtggcttaagcgcgaggctattccaggggaggggagaaaagccgcaaaagtgaatgccggagttggagagaagggcatttacactgcttcctcacggggaggccctcctagtgcacgctctaaagctgtcacagtggtcgctgaaggggcagcgtccagaagttggctgtcaatggatgctcctgaactgggccctggcctggtcgaacgcctcgaacagctcgccacctgtcccctgtgcggaggtagtttcgaagatccagtgttactggcctgcgaacacagcttctgtcgtgcctgcctcgctcggagatggggcacgcccccagcaacgggaacagaagctagccctactgcctgcccctgttgtggtcttccctgcccgagacgctctctgcgatccaacgtccggttggctgtcgaggtacgcatcagcagagagctgctgtttggcggaggaatcccgcatagctttctcggcactcactcccacgcacattgcagatcaataaactctaatccgcacttccggcctaagatcatgagacctcatctagtttcaacattcccaagaccgtgcagcaaaccgaatccttttcttccatctggatcacagaaccttttgagtcccacggccactaccgttttgcctgacttctctcactcaaatcactctcgacccgcaatggggaatagacccagtccctcagtacttgttaagtag

SEQ ID NO: 239314 - DNA, 756 bp, synthetic construct
  misc_feature 1..756: note = Description of Artificial Sequence: Synthetic coding sequence
  source 1..756: mol_type = other DNA
atgtggtggcgggatctgacccgcctgagactgtggctcaagcgtgaagcaatccctggcgaaggcaggaaggcagccaaggtcaatgcaggagtaggcgaaaaaggaatttacactgctagctctcgcggaggccctccaagcgctcgaagcaaagcggttactgttgtggctgagggagcggcttctcggtcctggttgagcatggatgcaccagagctcggaccgggtcttgtggaacgcctggagcaactcgcaacatgccccctgtgtggtggcagttttgaggaccccgtgctactggcgtgcgagcactccttctgcagagcctgtcttgctaggcgttggggcacaccgccagcgaccggaactgaggccagtcccaccgcctgtccatgctgtgggctaccttgccctaggaggagcttgaggtccaacgtgcgcctggctgtggaggtgcgaatctcaagggagttactctttggaggagggattccccacagttttcttggcacccactcacatgcccattgtaggagcattaatagtaacccacactttcggcctaaaatcatgaggccccatctggtctcaactttcccgagaccctgtagcaagcctaaccccttcctgccctccggtagtcagaacctcctatctcccaccgcaacaacagttttgccagatttctcacactcaaaccatagtagaccggcaatggggaatagaccctcgccctcagtgcttgtgaaatag

SEQ ID NO: 239315 - DNA, 756 bp, synthetic construct
  misc_feature 1..756: note = Description of Artificial Sequence: Synthetic coding sequence
  source 1..756: mol_type = other DNA
atgtggtggagggacctcactaggctgaggctgtggctgaaacgggaggccattccaggcgagggaagaaaggcagcaaaggtgaacgctggcgtgggcgagaaagggatttacaccgcctctagcaggggcggaccacctagtgcacgctccaaggccgtgacagtggtagcagaaggggcagcgtctaggagttggctgagtatggatgcgcctgagctgggccctggactggtggaacggctcgaacaactggctacgtgcccactgtgcggcggaagcttcgaagatcctgtcctgttagcttgtgagcattctttttgtcgtgcatgcctggccaggcgctggggcaccccaccagcaactggcaccgaagcaagtcccacggcatgcccgtgttgtggcctgccgtgcccacgacgaagcctccgaagtaatgtcagactggctgtggaagtccgaatctctagggaactccttttcggcggtggtattcctcattcatttctgggaacgcactcacacgcccattgtagatccattaacagcaatccccatttcagaccaaaaatcatgcgcccacatctggtaagcaccttcccacgcccttgcagcaagcccaacccctttctcccaagcggctcccagaatctcttgtctcctaccgccactactgtgctccccgacttcagtcacagcaaccacagcaggcccgctatgggcaaccgtccttccccctccgtcctggtgaaatag

SEQ ID NO: 239316 - DNA, 756 bp, synthetic construct
  misc_feature 1..756: note = Description of Artificial Sequence: Synthetic coding sequence
  source 1..756: mol_type = other DNA
atgtggtggagggacttgactaggctccgactgtggctgaagcgagaggcaatccccggagagggcaggaaggccgcaaaagtaaacgcaggggtcggcgaaaaagggatatataccgcctcctcgaggggcggtcccccaagtgctcgctccaaggccgtgacagtggtcgccgaaggggcagcgtctaggtcctggttgtccatggatgcacccgagctgggacctggcttagtggaacgcttagagcagctggctacgtgtcccctctgtggtggatcattcgaggaccctgtgttgctggcttgcgaacactcgttttgtcgggcatgtctggccagaagatgggggacgcctccagcaacaggtacagaggcctccccaaccgcctgcccttgctgcggcctgccttgtcctcgacgatctcttcggtctaatgtgaggctagcagtggaggtgcggattagcagggagctcctgttcgggggaggcatcccccactccttcttagggactcattcccacgctcactgcaggtcaatcaacagtaatccccatttccgtcccaagatcatgcgccctcacctcgtgtcaaccttccccaggccgtgctcaaaacctaaccctttcttgccttccgggagccaaaaccttttgtccccaacagccacaaccgtcctgccggatttttcacactccaaccactcgcgacccgctatgggcaaccggcctagtccgtctgttttggtcaagtag

SEQ ID NO: 239317 - DNA, 756 bp, synthetic construct
  misc_feature 1..756: note = Description of Artificial Sequence: Synthetic coding sequence
  source 1..756: mol_type = other DNA
atgtggtggcgggacctcacgagactgcggctgtggttaaaacgggaagccattcccggagaggggaggaaggccgctaaagtcaacgcaggcgtgggtgaaaagggaatttacactgcctcatccaggggaggtccccctagcgccagatccaaggccgtgacggtcgtggccgagggcgcagccagcaggtcatggctctccatggatgcgcctgaactgggcccaggtctggtcgagaggctcgagcagttggcaacttgccccttgtgcggtggctcattcgaagacccagtgcttctcgcgtgtgagcattctttttgcagggcttgtctggcgcgacgttgggggacaccgccagcgaccggcacagaggcatccccgacagcctgtccatgttgtggtttgccgtgccctaggcgttcactgcggagcaacgtacgcctggccgtggaggttcgcatcagccgagaattgctctttggtggcggaattccacacagtttcttgggcacacactcccacgcccactgtcgtagtatcaattctaatccacatttcaggccaaagatcatgcgtccccacctggtgtctacatttccccgaccttgctctaagccaaacccttttctgccttcaggtagtcagaacctgctcagccctactgccacaactgtgctacctgacttttcccactccaatcactcgcggccagcaatggggaaccgtcctagcccctcggtattagttaaatag

SEQ ID NO: 239318 - DNA, 756 bp, synthetic construct
  misc_feature 1..756: note = Description of Artificial Sequence: Synthetic coding sequence
  source 1..756: mol_type = other DNA
atgtggtggcgcgacctgactcgccttcggctgtggttgaagcgcgaagccatccccggagagggcagaaaagccgcaaaggtaaacgccggagttggcgaaaagggcatctatactgcctcgtctcggggaggacctcccagtgctcgatctaaagccgtcaccgttgttgctgagggagctgcttcaaggagctggctctcgatggacgctcctgagctgggcccaggcctcgtcgagcgcctggagcaactcgcaacatgtcccctgtgcggagggtcatttgaggaccctgtgctcctcgcttgcgagcacagtttctgccgggcttgcctcgcaagacggtggggtacacccccagcgactggcaccgaagccagtccaactgcatgcccatgttgcggactcccgtgtcccaggcggagtctgcgctccaacgttcgtcttgcggtggaggttagaatctctcgcgaactgttatttgggggagggatcccccatagcttccttgggacccacagccatgctcattgccggagcattaatagcaatcctcacttccgacccaaaatcatgcgaccacaccttgtcagtaccttccctcggccttgctcaaaacccaacccattcctcccatccgggtctcaaaacctgctgagcccaaccgctgccactgtcctgcccgatttcagccacagtaaccattctcgtccagccatgggtaacaggccatcccctagcgtgctggtgaagtag

SEQ ID NO: 239319 - DNA, 756 bp, synthetic construct
  misc_feature 1..756: note = Description of Artificial Sequence: Synthetic coding sequence
  source 1..756: mol_type = other DNA
atgtggtggagagatcttacaagactacggctctggctgaagagagaggcgatcccaggcgagggcaggaaggcagcaaaagtcaatgccggagtgggagagaaaggcatttatacggcaagttcccgcggtggcccaccgtccgctaggtccaaggctgtcaccgtcgtcgccgaaggcgcagcctctagatcttggctcagcatggacgcacccgagctcgggcctggcctggtggaacgcctagagcagctggccacatgcccattatgcggcggatccttcgaagatcctgttttgctggcctgcgaacattctttctgcagagcatgtctggcacgacgctgggggactcccccagccacaggtaccgaggcatccccaacagcctgcccctgctgcggccttccttgcccacgcagaagcctgaggtccaacgtaagattggctgtcgaagtccgcatctctagggagcttcttttcggtcgcggaatcccgcattccttccttggcacacatagccacgcccactgtagaagcataaactcaaatccacattttcggccaaagataatgcgcccacacctggtcagtaccttcccccatccttgttcaaaaccgaatccctttcttccttctggctcccaaaacctgcttagccccacggccacaacagtgctaccagacttttcgcattccaatcattcccggccagcgatgggtaacaggccatccccttcagtcttggtgaagtag

SEQ ID NO: 239320 - DNA, 573 bp, synthetic construct
  misc_feature 1..573: note = Description of Artificial Sequence: Synthetic coding sequence
  source 1..573: mol_type = other DNA
atgagtacccggaagcgaagaggaggagccatcaatagtcgccaggcacaaaaacgcacaagggaggcaacatccacccccgagatctctttggaggccgagcccatcgagctcgtggagaccgcaggagatgaaatagtggacctcacctgcgagagccttgagccagtcgtcgtcgacctgacacataatgattccgtggtaattgttgacgaacgcagacgtccacgcagaaacgccagaagactgccccaggatcatgccgacagttgtgtcgtttctagcgacgacgaggagttgtcacgcgatcgcgacgtttacgtcacgacacacacgccacgcaatgcacgggacgagggcgctacggggctgcggccatccggtactgtcagctgtcctatctgcatggatggatacagtgaaatcgtacaaaacgggagactgattgtgagcaccgaatgtggccacgtgttttgtagccagtgcctgagagattccctcaagaatgccaacacgtgtccgacatgtcgtaagaagattaaccacaagaggtaccatcccatctatatctag

SEQ ID NO: 239321 - DNA, 18 bp, synthetic construct
  misc_feature 1..18: note = Description of Artificial Sequence: Synthetic coding sequence
  source 1..18: mol_type = other DNA
atgagcacaagaaagtag

SEQ ID NO: 239322 - DNA, 573 bp, synthetic construct
  misc_feature 1..573: note = Description of Artificial Sequence: Synthetic coding sequence
  source 1..573: mol_type = other DNA
atgtccacgcggaagagacgaggaggagccattaattcccgtcaggcacaaaagcggactcgggaagctacaagcacgcctgagatctcattggaggctgagcctatcgagctcgtcgagacagccggagacgaaatagtagacttgacatgcgagtccttggagcccgtggtggtcgacttaactcacaacgacagtgtggtcatcgtggacgaacgcagacggcctagaaggaatgctagaagacttcctcaggaccatgccgacagttgcgttgtttctagcgacgatgaggaactgtctcgggatcgagatgtttatgtgacaacacatactccgcgaaatgcccgagatgaaggtgctacgggactgcgcccttccggtaccgtgtcctgccccatttgcatggatggatattctgaaattgtgcagaatggcagattgattgtgtctaccgagtgcgggcacgtcttttgctctcagtgtctgcgggacagcctgaagaatgctaacacttgtcccacctgccgaaagaaaatcaaccataaaaggtatcatcctatttacatttag

SEQ ID NO: 239323 - DNA, 573 bp, synthetic construct
  misc_feature 1..573: note = Description of Artificial Sequence: Synthetic coding sequence
  source 1..573: mol_type = other DNA
atgtctaccaggaaaagacgtggcggagcgataaatagtagacaggcccaaaagcggacccgagaggcaacctcaacaccagagatctccttggaggctgagcctatagagctggtggaaaccgcaggcgatgaaatcgtggatctaacttgcgaaagtttagagccagtagtcgtggacctaacacataatgacagcgtcgttatcgttgacgaacgcagaaggcctaggaggaacgcgagacggttgccccaggatcatgccgactcttgcgtcgtctcctcagatgacgaagagttgagtagggaccgggacgtgtacgtgacaacccatacgccgaggaatgccagggatgagggagccacaggacttcgcccaagcggcaccgtgagctgtcccatctgtatggatggatattctgagatcgtgcagaatggtagactgattgtatcaacggaatgcggacacgtgttttgctcccagtgtttgcgcgatagcctgaaaaacgccaacacgtgccctacttgtcgcaaaaagattaaccacaaaaggtatcatcctatttacatctag

SEQ ID NO: 239324 - DNA, 165 bp, synthetic construct
  misc_feature 1..165: note = Description of Artificial Sequence: Synthetic coding sequence
  source 1..165: mol_type = other DNA
atgtctacccggaaacggagaggcggagctatcaactctaggcaagcgcagaaacgcacacgcgaagcgacctcaacaccagaaatttctctcgaggccgagcctattgaactcgtggagacggctggtgacgagatcgtagatcttacgtgcgagagtctctag

SEQ ID NO: 239325 - DNA, 345 bp, synthetic construct
  misc_feature 1..345: note = Description of Artificial Sequence: Synthetic coding sequence
  source 1..345: mol_type = other DNA
atgtccacccgtaaacgcagaggaggtgcaattaattctcggcaagctcaaaaaaggactagagaggctacctcgacaccagagatttccctcgaggcagagccaattgagttggtggagactgccggtgatgagatagtggacctgacctgcgaaagcctcgagcccgtcgtggtggacttaacccacaatgacagtgtggttgttagtgtcggcgtgccgcaagtactctcagttgtgcctagtgcatggaccgatacccagagatcatgtaggatggatgtgagttccttccctcagaacgcggcaatgtcctcagtggcctccgcttcagtcattccttag

SEQ ID NO: 239326 - DNA, 573 bp, synthetic construct
  misc_feature 1..573: note = Description of Artificial Sequence: Synthetic coding sequence
  source 1..573: mol_type = other DNA
atgtcgacccgaaagaggcgcggaggagcaatcaatagccggcaagcccaaaagcgaacccgagaagccacgtctacccctgagatttctctcgaggccgagcccattgagctcgtggagacggccggagacgaaatcgtggacctgacttgcgaatccctggaaccggtggtcgtagatctgacacacaatgactccgtggtggtgtccgatgaacgaagaagacccagacggaatgcccgaaggctgccccaagatcatgcggacagctgcgtggtctcttctgacgacgaagagcttagcagagacagggatgtatatgtgacgacacacactcctcggaatgcacgggatgagggggctactggcctgcgacccagtggaaccgtgtcttgcccgatttgtatggatggatactctgagattgtgcagaatggcaggctcatcgtttctacagaatgtggccacgtgttctgctctcaatgtctacgagactctctcaaaaacgccaacacatgtcctacctgtaggaagaaaattaaccacaaacggtaccatcccatttacatttag

SEQ ID NO: 239327 - DNA, 342 bp, synthetic construct
  misc_feature 1..342: note = Description of Artificial Sequence: Synthetic coding sequence
  source 1..342: mol_type = other DNA
atgagcacacggaaacggagagggggagctatcaacagccgtcaggcccagaaacgaacaagggaagctacctctacaccggagattagcctcgaagcagagcccatagagttggtagaaacagctggcgacgagattgtggacttgacctgcgaatccctggaaccagtggtggttgacttgacacataatgacagcgtagtgattgtcgacggtcctcaggttctgtcagtagtgccttccgcatggacagatacacagcgtagctgtaggatggacgttagctctttccctcagaacgccgcaatgtcgtccgtggctagcgcgtccgtaatcccatag

SEQ ID NO: 239328 - DNA, 2352 bp, synthetic construct
  misc_feature 1..2352: note = Description of Artificial Sequence: Synthetic coding sequence
  source 1..2352: mol_type = other DNA
atgagcggcggacaccagctccaactggcagctctctggccttggctgctcatggctaccctccaggccggttttggcaggacgggcctagttctcgcagctgccgtggagagtgagcggtctgccgagcaaaaggccatcattagggttatacccttgaagatggaccccaccggtaagttaaatctgacactggagggcgtgttcgcaggggtcgccgagatcacaccggcagaggggaaactcatgcaatctcaccccttatacttgtgtaatgcttcagatgatgataacctagagcccggttttatatccatcgttaagctggagagcccgaggcgcgctccccgaccatgcctgagcctcgcgagcaaagcacggatggctggcgagcggggtgccagcgccgtccttttcgatatcactgaagatagagctgctgccgaacagcttcagcagccgctgggcctgacttggcctgttgtgctcatctggggaaatgatgctgaaaaattaatggagttcgtgtataagaatcagaaggcccacgtgaggatcgaactgaaggaacccccagcttggcctgattacgatgtgtggatcctcatgaccgttgtcggaaccatcttcgtcatcatcctggctagcgttctccgcattcgctgtagaccaagacatagtcgcccagaccctcttcaacaaagaaccgcatgggcgatctcacagctcgctacgcgacgctatcaggccagttgtcgtcaggctagaggcgagtggccagacagcgggtcctcgtgctccagcgcccctgtgtgcgcgatatgcctcgaggagttttctgagggtcaggagctgagagtgatctcttgcctgcacgaattccacagaaattgtgtcgacccctggctccaccagcatcggacttgtcccctatgtatgttcaacatcacggaaggggattcattctcccagagtctgggcccttccaggtcatatcaggaacctggtcgtcgtctccacttgattcggcagcacccagggcacgctcactaccatttgcctgccgcttacctgttaggacccagtaggtctgccgtggccaggcctcctaggcctggcccttttctgccttcccaagaaccaggtatgggccctaggcaccataggttccctcgagccgctcaccccagggctcccggtgaacagcagcgactggcaggtgcacagcacccttatgctcagggctggggattgtcccatctgcagagcacctcgcagcatcctgcagcatgtcctgtcccgctaaggcgcgcaagaccccctgatagcagcggttctggcgagtcctattgcactgaacgcagtggataccttgccgatggtcccgctagcgattccagttctggaccgtgtcacggtagtagctccgattcagttgttaattgtacagacatctctctgcagggcgtgcatgggtcatcaagcactttttgctcatctttaagctctgatttcgatcccctagtgtactgctctcccaaaggggacccccagagggtagacatgcagcccagcgtgacaagccgccctagaagtctagactccgtggtgcctaccggagaaactcaggtcagcagccatgtgcactaccatcggcaccgccatcaccactacaagaagcggtttcagtggcacggcagaaaacccggacccgagactggtgtcccacaaagcaggccgcctattccgaggactcagccccagcctgagccaccctcacctgatcaacaggttacccgcagcaatagtgctgctccaagcggacgcctaagcaacccgcagtgcccccgagccttgccagaacctgcgccaggtccagtcgacgcatcctcaatttgcccatctacctcctccctgttcaacttgcaaaagagctccctgtctgccaggcaccctcagcgtaaacggaggggtggcccatccgagcccacacctggatcccgcccacaggacgctacagtacatccagcctgtcagattttcccacactatacccctagcgttgcatacccatggagccccgaggcacaccccctgatttgtggcccacctgggctggacaagagattactgcctgaaaccccaggtccctgctattctaactcacagcctgtgtggttatgtctgaccccccgacagccactcgaaccgcaccctcccggtgaagggccaagcgaatggagcagtgacactgcggaagggaggccctgtccatatcctcactgccaggtactaagcgctcagccagggtcggaggaagagctcgaggaactgtgtgaacaagctgtgtag

SEQ ID NO: 239329 - DNA, 2229 bp, synthetic construct
  misc_feature 1..2229: note = Description of Artificial Sequence: Synthetic coding sequence
  source 1..2229: mol_type = other DNA
atgtcaggtggacaccagcttcagttagctgccctgtggccttggctgctgatggccactctgcaagccggattcggccgaacaggacttgtgttggcggcagccgtcgagagcgagagatccgccgagcagaaggcaatcattagggttatccccctgaaaatggatccaaccgggaagctcaacctgaccctggaaggcgtatttgccggagttgcggagatcactcctgccgagggcaagttgatgcaggctaggatggcaggggagaggggagccagcgccgtcctctttgacatcaccgaggaccgtgctgcagccgaacagctgcagcaacccctcgggctgacctggccagtggtgttaatctggggcaacgatgctgaaaagctaatggaattcgtatataaaaaccagaaggcccatgtgaggatagaactaaaggagccaccggcttggcccgattatgatgtgtggatactgatgacggttgtgggcactatctttgtaatcatcctggcaagcgtgctccggataaggtgtcggcctcggcatagccgacctgaccctcttcaacagcgcacagcatgggccatcagtcagcttgccactaggagatatcaggcctcttgccgtcaggctaggggcgagtggcctgactccgggagcagttgcagcagcgcacctgtctgtgccatctgcctcgaggaattctcagaagggcaagaactgcgtgtcatatcgtgcctccacgagttccatcggaactgcgttgacccttggttacaccagcataggacttgcccactttgtatgttcaacattaccgagggagattcatttagccagtcattgggtcccagtcgcagctatcaggagcccggtcggagactgcatctaattcgacagcaccccggacacgctcactatcacttgccagctgcttatcttctgggaccatcacgctccgctgttgcacggcctcctaggcctggccctttcctgccaagccaagagccgggaatgggacctaggcatcataggttccctcgtgccgcacatcccagggccccaggcgagcagcagagacttgcaggagcacaacacccatacgcccaaggctggggcttgtcccacctgcagagcacaagccaacatccagctgcctgccccgtgcccctcaggcgggctagaccgcctgacagtagcggctctggcgaaagttactgtacggaacgcagtggctatctcgccgacggacccgcttctgactcttcaagtgggccatgtcacggcagctcttctgattccgtagtgaactgtaccgatatttccctgcaaggcgtccacgggtcgagttccactttctgcagtagcctctctagcgatttcgacccactagtgtattgctcacctaaaggcgacccacagagagtcgatatgcaaccatctgtcacttcaagacctcgaagccttgattcagtggtgcccacaggagagacacaagtgtcctctcacgtccactaccaccgccacaggcaccatcattacaagaagcggttccagtggcatggcagaaaacctggccctgagaccggcgtaccccaaagtcggcctcctattcctcggacccagccccagcccgagccgccatcccccgaccagcaggttacgcgcagtaatagcgccgctccctctgggaggctaagcaaccctcagtgtcctcgggctctgcctgagccagcgcctggacctgtcgacgccagtagcatctgtccatcgactagtagcttgtttaatttgcagaagtcaagcttgagcgccaggcatcctcaacgaaagcgcaggggtgggccaagcgagcccacccctggctcgcggcctcaggatgcaactgtgcacccagcctgccagatcttcccacactataccccgagtgtggcctatccttggagtcccgaggcccatccactgatctgtggccctcctggactcgataaaaggctcctgcctgagacccccggaccctgttactccaactctcagcctgtgtggctctgtcttaccccaagacagcctctggagccgcatcctcctggggaaggcccttcagagtggagctcagacactgccgaggggcgtccttgtccataccctcattgccaagtcctcagcgcccaaccaggttcagaagaggaattggaggagctgtgtgagcaggcagtatag

SEQ ID NO: 239330 - DNA, 543 bp, synthetic construct
  misc_feature 1..543: note = Description of Artificial Sequence: Synthetic coding sequence
  source 1..543: mol_type = other DNA
atggctgctgcagaggaagaagatggtgggcctgaaggacccaaccgggagcgtggcggagccggagctacttttgaatgtaacatttgcttggaaacagcacgagaggccgtcgtgagcgtgtgtgggcatttatactgctggccctgcctccatcagtggttggaaacgcggcctgagcgccaggagtgtcctgtgtgtaaagccggtatctctcgggagaaagtggttcccctgtacggacggggaagtcagaaaccacaagatcctaggctaaaaactcctcctcgccctcagggacagagacctgctccggagtcccggggagggtttcagccgtttggggatacggggggtttccatttttctttcggggtaggggcattccccttcggtttctttactaccgtcttcaacgcccacgaaccattcaggagaggaacgggcgtggatctgggacagggccatcccgcatcttcgtggcaggactctctctttttgttcctcgcaattttcttttttttctggttgctgagcatttag

SEQ ID NO: 239331 - DNA, 543 bp, synthetic construct
  misc_feature 1..543: note = Description of Artificial Sequence: Synthetic coding sequence
  source 1..543: mol_type = other DNA
atggcagccgctgaggaggaagatgggggtcctgaggggccaaatagggaacgtggcggagcaggggcaaccttcgagtgcaatatatgtctggagaccgccagagaggctgtagtgagtgtatgcgggcatttgtattgctggccttgcttgcatcagtggctggagacaaggccagaacgccaggagtgccccgtctgcaaagccggtatctcacgcgagaaagtagtacctctttacggtcggggttcccagaagcctcaggaccctcgcctcaagaccccaccaaggccccagggtcagcggcctgcccctgaaagtcgtggaggcttccagcctttcggggacacgggcggatttcatttctcctttggcgttggagctttcccattcgggttctttacaactgttttcaatgcacacgaaccattccgccgtggaaccggagtggacctgggtcagggccaccctgcttccagctggcaagatagcctgttcctgttcctcgctattttttttttcttctggctgctatccatttag

SEQ ID NO: 239332 - DNA, 549 bp, synthetic construct
  misc_feature 1..549: note = Description of Artificial Sequence: Synthetic coding sequence
  source 1..549: mol_type = other DNA
atggctgccgctgaggaggaagatggtggcccagaaggcccaaacagagagagaggcggagcaggggcaacctttgaatgtaacatctgtctagaaaccgctagagaagctgtggtatctgtttgcggccacctatattgttggccatgcctgcatcaatggctggaaactcgaccagagcgtcaggaatgccctgtgtgcaaggcgggaatcagcagagagaaagtggtaccgctatatggtaggggctcccagaagccacaagacccacggttgaaaactccacctagaccacagggccagcggccagcgccagagagcagaggcggttttcagccatttggcgacacgggaggcttccatttttctttcggcgtgggagcattccctttcggatttttcaccacggtatttaacgcgcacgaacccttccgtcgcggaaccgggcctttctccacctcaccagctttcttccactacctgatcggaaatacttcgcgggagtttcggggtaggatatacaacttctggctgccaagaaacctttag

SEQ ID NO: 239333 - DNA, 543 bp, synthetic construct
  misc_feature 1..543: note = Description of Artificial Sequence: Synthetic coding sequence
  source 1..543: mol_type = other DNA
atggccgctgctgaggaagaggacgggggtccagaaggccctaaccgagaaagaggcggtgccggagccactttcgagtgtaatatctgcctcgaaaccgccagagaggcggtcgtgagcgtgtgtggtcatctgtattgttggccctgtttacaccagtggttggagactcgcccagagcgacaggagtgtcctgtctgtaaggcgggtatttctcgcgagaaggtggtgcccctgtacggaaggggatctcagaaaccccaagatccgcgtctgaaaacgcccccacgcccacagggacagaggcctgctccagagagcaggggcggtttccagccttttggagacacgggaggtttccacttctcttttggggttggagcctttccatttggcttttttacaacagtctttaacgcgcatgagcccttccgccgaggaacgggcgttgatctcggtcaggggcaccccgctagcagctggcaagatagccttttcttattcctggctatctttttttttttttggctgttaagcatttag

SEQ ID NO: 239334 - DNA, 543 bp, synthetic construct
  misc_feature 1..543: note = Description of Artificial Sequence: Synthetic coding sequence
  source 1..543: mol_type = other DNA
atggcagccgcagaagaggaggacggcggtcccgagggccctaacagggagcgcggaggtgccggtgctactttcgaatgtaacatctgtctcgagaccgcacgcgaagccgttgtgtccgtgtgtgggcacttgtactgttggccatgtctgcaccagtggctggagacaaggccagagcggcaagagtgtcctgtatgtaaagctggcatttcacgggagaaagttgtccccctttacggtagaggctcccagaagcctcaggatccccgtttgaaaactccaccgcgtccccaaggccagcggcctgctcccgagtccaggggcggattccagccattcggagatacagggggttttcacttttcgttcggcgttggagccttcccatttgggtttttcaccacagtgtttaatgcccacgagccctttaggagaggtaccggcgtggatctgggccaaggccatccagcatcctcatggcaagactctcttttcctgttcttagccatattcttcttcttttggctcctgagcatctag

SEQ ID NO: 239335 - DNA, 543 bp, synthetic construct
  misc_feature 1..543: note = Description of Artificial Sequence: Synthetic coding sequence
  source 1..543: mol_type = other DNA
atggctgccgctgaggaagaggacggaggtcccgaagggccaaatcgggagaggggcggtgccggagctaccttcgaatgtaacatctgcctggagacggctcgcgaggccgtggttagcgtgtgcggacacctgtattgctggccatgcctccaccagtggctggagactcggcctgagcgacaggaatgcccagtgtgcaaagccggaatcagccgtgaaaaagtggtcccactttacggtaggggtagccagaagcctcaggaccctcggctgaagaccccaccacgtccccaagggcagcgcccagcccctgaatccagaggaggcttccagccattcggggacactggcggattccacttttcctttggggtgggggcatttcccttcgggttctttaccaccgtgttcaacgcgcacgagcctttccgcaggggaacgggcgtcgatctcggccagggccaccccgcttcctcctggcaggacagcctcttcttgtttctggccattttcttcttcttttggctgctaagcatctag

SEQ ID NO: 239336 - DNA, 543 bp, synthetic construct
  misc_feature 1..543: note = Description of Artificial Sequence: Synthetic coding sequence
  source 1..543: mol_type = other DNA
atggccgctgcagaagaagaagatggcggacctgaaggcccaaatagggaacggggaggtgccggagcgacatttgagtgcaacatttgtctggaaaccgctagagaagccgtggtttcggtatgcgggcatctttactgctggccctgtctccaccagtggctcgaaaccaggcccgaaaggcaggagtgccccgtctgtaaggcagggatctcccgggagaaggttgttcccttgtacggcagagggagccagaagccacaagaccctcgacttaaaactcctcccagaccacaggggcagcgcccagctcctgaatctagaggaggctttcagcccttcggagacactggtggatttcatttttcctttggtgtaggcgcattcccatttggcttctttaccaccgtgtttaatgcacacgagccttttaggagagggaccggggtcgacctcgggcagggtcatccagcttctagctggcaggacagtctgttcctcttcctggccattttctttttcttttggctcttaagtatatag

SEQ ID NO: 239337 - DNA, 543 bp, synthetic construct
  misc_feature 1..543: note = Description of Artificial Sequence: Synthetic coding sequence
  source 1..543: mol_type = other DNA
atggccgcagcggaggaagaggacggcggacccgaaggcccaaaccgcgaacgtggcggtgccggagctactttcgagtgtaacatttgtctggaaacagcaagagaagcagtggtcagcgtgtgcggtcacctctattgttggccttgcctgcaccagtggctcgaaacccggcctgaaaggcaggagtgtcccgtctgtaaagcagggatctctagagagaaggtagtgccattatatgggcgtggttcccaaaaaccccaagacccgaggctgaaaactcctccccgaccgcaggggcaacgccctgccccagagagcagaggagggttccagccatttggtgacactggcggtttccacttctccttcggtgtcggtgcgtttccctttgggtttttcaccacagtgttcaacgcccatgaaccattccggagaggcacgggggtcgacttgggtcagggccaccctgcctcaagttggcaggattccctcttcttgtttctggcaattttttttttcttttggctcctctccatctag

SEQ ID NO: 239338 - DNA, 549 bp, synthetic construct
  misc_feature 1..549: note = Description of Artificial Sequence: Synthetic coding sequence
  source 1..549: mol_type = other DNA
atggccgcagcggaagaagaagacggaggtccggaaggtcctaaccgggagaggggaggggcaggggctactttcgagtgtaacatctgtctcgagactgcacgtgaagcagtggtatccgtgtgtggacatctgtactgttggccctgtctgcaccagtggctggagactcgcccagagaggcaggaatgtccggtgtgcaaagccggtatctcacgggaaaaagttgtaccactctatgggagggggtcccagaagccccaagaccctcgtctgaagactccacctcgccctcagggccaaagaccagctccggaaagccgcggagggtttcaacctttcggagatacaggcggtttccatttttcattcggggtgggggcattccccttcggatttttcacaaccgtgtttaatgcacatgagccgttccgcagaggcacaggccctttctcaaccagtcccgctttctttcattatctaattgggaacacttccagagaattccgcggaaggatctataatttttggctgccccgtaatctctag

SEQ ID NO: 239339 - DNA, 549 bp, synthetic construct
  misc_feature 1..549: note = Description of Artificial Sequence: Synthetic coding sequence
  source 1..549: mol_type = other DNA
atggctgctgctgaggaggaggatggaggacctgaaggcccaaacagagagcggggaggcgctggggctactttcgagtgtaacatttgtctggaaacggccagagaggccgtggtatctgtatgtggtcatttatattgctggccctgcttgcatcagtggcttgagactcggcctgagagacaggagtgccccgtgtgcaaggctggcatctctcgcgaaaaagtggtgcccctttatggtcgaggatcgcagaaaccccaggacccccgattaaagaccccacccaggcctcaagggcagagaccggcaccagagtctaggggagggttccaaccctttggggatacagggggattccattttagtttcggcgtgggtgccttcccatttggtttctttaccactgtgttcaatgctcacgagcctttccgcagagggactggtcctttctcaactagcccagccttcttccactacctgatagggaatacttctcgggagtttagagggcgtatctacaatttctggttgccaaggaatctgtag

SEQ ID NO: 239340 - DNA, 549 bp, synthetic construct
  misc_feature 1..549: note = Description of Artificial Sequence: Synthetic coding sequence
  source 1..549: mol_type = other DNA
atggccgctgccgaggaagaggacgggggtcctgagggccctaatagggagagggggggagctggagccacttttgagtgtaatatctgccttgaaactgccagagaggccgtggtgtccgtttgcggacacctatattgttggccgtgcctgcaccagtggttggagacgcgcccagagcggcaggaatgccctgtgtgcaaagccggaatctcacgagagaaggttgtgccactatatgggcgagggtcacaaaaaccccaggatcccaggctgaaaactccaccaaggccccagggtcagcgtcccgctcccgaaagcagagggggttttcagcccttcggagacaccgggggatttcactttagcttcggagtcggcgcattcccatttggtttctttacaaccgtattcaacgcacacgaaccttttagaagaggcacgggcccattctcaacatctccagctttcttccactatctcatcggcaacacctctcgagagtttcgcggacgcatatataatttttggttgcccagaaatctgtag

SEQ ID NO: 239341 - DNA, 549 bp, synthetic construct
  misc_feature 1..549: note = Description of Artificial Sequence: Synthetic coding sequence
  source 1..549: mol_type = other DNA
atggctgctgcggaggaagaagatggaggcccagaggggcctaacagagaaagaggcggtgccggtgcaaccttcgagtgcaacatatgcttggaaaccgccagagaggcagtagtgtctgtgtgcggacatctttactgttggccttgtctgcaccagtggctagagacacgacctgagcggcaagaatgtcccgtgtgcaaggcaggtattagtagagagaaagtggtccctttatatggtcgcggtagccagaagccacaagatccacgtctcaagactccgccacgcccacagggtcagcgaccagccccagaaagtaggggcggttttcagccatttggcgataccggcggatttcacttcagctttggtgtcggtgccttcccatttgggtttttcactaccgtttttaatgctcacgagccctttagacggggaaccggcccattctctactagcccagccttcttccattatctgattggcaacacgagccgggaattccggggacgaatttacaacttttggttgccacggaacctgtag

SEQ ID NO: 239342 - DNA, 549 bp, synthetic construct
  misc_feature 1..549: note = Description of Artificial Sequence: Synthetic coding sequence
  source 1..549: mol_type = other DNA
atggcggcagctgaggaggaggacggaggcccagagggaccgaatcgagagagggggggagccggtgcgacttttgaatgcaacatatgccttgagacggcacgggaagctgtggtgagcgtgtgtggtcacctatactgttggccttgcctgcatcagtggctggagacaaggccagaacgtcaggagtgtccagtgtgcaaagccggaatcagcagggagaaggtggtgccactctatgggaggggtagtcagaagccgcaggacccacgcctgaagacgccacccagacctcaaggacagcggcctgctcctgagtcaagaggcggttttcaaccattcggtgacacaggcggattccacttcagcttcggagtgggcgcattcccattcgggttctttactactgtctttaacgcccatgagccctttagacgtggcacagggcctttctctacaagccccgcttttttccactatttaatcggaaatacctcgcgcgaattcagagggcgtatctacaacttctggctgccacgcaacctgtag

SEQ ID NO: 239343 - DNA, 549 bp, synthetic construct
  misc_feature 1..549: note = Description of Artificial Sequence: Synthetic coding sequence
  source 1..549: mol_type = other DNA
atggccgctgccgaggaagaggacggcggaccagaggggcctaatcgcgagagaggcggtgcgggagccacatttgagtgcaatatctgtctggagactgcgcgagaagccgtggtgtcagtttgcggccatctgtactgctggccctgtcttcaccagtggctggaaacacgcccagagagacaagaatgtcccgtttgtaaggccggaatttccagggagaaagtcgtccccttatatggtagaggtagtcagaagccccaggacccacgtcttaaaactccccctcggccacagggccagcgccctgccccagagagcagagggggtttccagccgttcggagataccggtggctttcatttcagcttcggtgttggcgcattcccattcggatttttcaccactgtgtttaatgctcatgagccgttccgaagggggaccggacctttctccacctctcccgctttcttccactacctaatcggtaatacttcccgggaatttcgtggcaggatttacaatttctggctgccgcgaaacctgtag

SEQ ID NO: 239344 - DNA, 342 bp, synthetic construct
  misc_feature 1..342: note = Description of Artificial Sequence: Synthetic coding sequence
  source 1..342: mol_type = other DNA
atggccgatgtggaagacggagaagaaacctgcgctttagcctcccactccggcagtagcggcagtaagtccgggggagataagatgttttcactgaagaagtggaacgccgttgccatgtggtcctgggatgttgagtgcgacacctgcgctatttgccgagtccaggtgatggatgcatgcctccgatgccaggctgaaaacaaacaggaggattgcgtggttgtgtggggagaatgtaaccacagttttcacaactgctgcatgtccctgtgggtcaagcaaaacaacagatgtccgctgtgccaacaggattgggttgtgcaacgcatcggaaaatag

SEQ ID NO: 239345 - DNA, 273 bp, synthetic construct
  misc_feature 1..273: note = Description of Artificial Sequence: Synthetic coding sequence
  source 1..273: mol_type = other DNA
atggcggacgtggaagacggtgaagaaacatgcgcgttggcatcccacagcggcagtagtggtagtaagtccgggggtgacaagatgttctccctcaaaaagtggaacgcagtcgcaatgtggtcctgggacgtcgaatgcgacacgtgtgcaatttgtagggtgcagatgccagtcctggacgtcaaactgaaaactaataagcggactgtgctctggtccggcgagaacgtgatcatccccagcaccaccgctgcatgcccctgcggttag

SEQ ID NO: 239346 - DNA, 294 bp, synthetic construct
  misc_feature 1..294: note = Description of Artificial Sequence: Synthetic coding sequence
  source 1..294: mol_type = other DNA
atggccgatgttgaagacggggaggaaacctgtgcgctggcctcccacagtgggagctcagggtctaaatctggtggcgataaaatgtttagtctgaaaaagtggaacgcagtggcaatgtggtcatgggacgtcgaatgcgatacgtgcgccatatgccgcgtgcaagtgatggtcgtctggggcgagtgtaatcactcctttcacaattgctgcatgagcctgtgggttaaacaaaacaaccgatgcccactctgtcaacaggactgggttgtgcagcgcatcgggaagtag

SEQ ID NO: 239347 - DNA, 1875 bp, synthetic construct
  misc_feature 1..1875: note = Description of Artificial Sequence: Synthetic coding sequence
  source 1..1875: mol_type = other DNA
atggaaaactcagattcgaatgacaaaggttctggcgaccaaagtgctgctcagaggaggagccaaatggacagacttgaccgtgaggaggccttttaccagttcgttaataacctgtctgaggaagactatcgattaatgcgagacaataatttgctcggaaccccaggcgagagcaccgaagaagagctgctgaggcggttacagcagattaaggaaggacctcctcctcagaactctgacgaaaaccgtggaggtgatagttccgatgatgtatccaacggagactctatcatcgattggttgaattctgtacgccagactggaaatactacccggtcaggtcagcgaggaaatcagtcttggagggccgttagccggacgaatccgaactccggcgactttagattttcccttgaaattaacgtcaatcgcaataacggcagtcaaaactctgagaatgagaacgaaccaagtgctcggaggtcttctggcgaaaatgtggagaataactcccagagacaggtggagaaccccagatcagagagcacaagcgctcgtccctcccgcagtgaacgcaacagtacagaggccctgaccgaggtccccccaacccggggacagcgacgagccagatccaggtccccggaccaccggcgaacgcgggcaagggcagagaggtcacgctcccctttgcatccgatgtcggaaatccctaggaggtcccaccactctatttcatcccagactttcgagcatcccctggtcaacgaaactgagggctctagtaggacccgtcaccacgtgacactcaggcaacagatctcggggcctgagctgttgtccagagggctcttcgctgcgagcgggacaagaaatgccagccaaggagcaggaagtagcgacacggccgcttcaggagaatctacagggtccggccaaaggcctccgactatcgtcctggatctccaggtcaggcgggtgagacccggtgagtataggcagcgcgactcgatagcgtcccggacacgctctcgcagccagacacccaataacacagtgacatacgaatctgaacgcggaggtttccggcgaacgttcagtcgttccgaacgagcaggtgtgcgtacctatgttagcactattaggataccgattcggcgaatactaaatacagggctgtccgagaccacgtctgttgccattcagacaatgctcagacagattatgacaggattcggcgaactgtcctacttcatgtattctgactccgactcagagcccaccggaagcgtcagcaacaggaacatggagcgggctgagagcagatccggaaggggcggaagcggcggaggctcaagtagtgggtcctcttctagttccagcagcagctcgtcttcttcttcctccagctcttcctccagttcaccatcctcttcctcaggaggcgagtcctcggaaaccagctcagacctgtttgagggtagcaacgagggtagctccagttccgggtcatccggcgcacggagggaagggcgacatagagctccagtgacgttcgatgagtccggatccctgccgttcttgtcactggctcagttctttctcctgaacgaggacgatgacgaccagcccaggggtttaaccaaggagcagattgacaacctcgcgatgcggagctttggcgagaacgacgcacttaaaacctgctctgtgtgtattacagagtatacagaaggaaacaagctcaggaaactcccctgtagccacgagtatcatgttcactgcatagatcggtggttgagcgagaatagcacctgtcccatatgtcggcgagccgtcctggcatcaggcaaccgggagtccgtggtgtag

SEQ ID NO: 239348 - DNA, 1875 bp, synthetic construct
  misc_feature 1..1875: note = Description of Artificial Sequence: Synthetic coding sequence
  source 1..1875: mol_type = other DNA
atggaaaacagcgatagtaatgacaagggcagcggcgatcagagtgctgctcagagaaggtcccagatggacagattggacagagaagaggctttttatcagtttgtgaataacctttcagaagaagattataggcttatgcgggataacaacttgttaggaacacctggtgaaagtaccgaggaggaacttcttcgcaggctccagcagattaaagaaggaccaccaccccagaattctgacgagaacagaggtggcgacagttcagacgatgtgagtaatggggactccattattgattggctcaatagtgttaggcagacagggaacactacaaggagcgggcagcggggaaaccagagttggagggcagtctcacggacgaaccccaactcgggggatttcagattcagcctcgagattaatgtgaacagaaataatggctcacagaatagtgagaatgagaacgaaccctccgccaggcggagttccggagagaacgtcgagaataactctcagcggcaggttgagaacccacggtcggagtctaccagcgctcggccatcgcgaagcgaacgcaattccaccgaagccttaacggaggtgccacccactaggggccagaggagggctcgcagccggtctcctgaccaccggagaactcgagcgagagctgaacgcagtaggagtcccctgcacccaatgtccgaaattcccaggagatcccaccattctatctcaagccagaccttcgagcaccccttggtgaacgaaacggaagggtccagccgtacccgtcaccacgttaccttgcgccagcaaatttctggcccagaactgctcagccggggactctttgctgcatctggaactcggaacgcatcacaaggcgctggatcatctgatacagcagcctcaggcgagagcactgggagcggtcagcggcctccaacaatagtacttgatctccaggtgagaagagtgcgccctggggagtaccgccaacgtgactcaatcgcgtcaagaaccaggagcaggtcccagactcctaacaacactgttacttacgagagcgagcgcggtgggttcaggcgaaccttttcccgcagcgagagggctggagtgagaacttatgtcagcaccatccgaattccaattcgcagaatcctgaacacgggcctttctgaaactacttctgtggccattcagacaatgctccgacaaataatgaccggctttggagagctcagctattttatgtacagcgattcagacagcgaacctaccggcagcgtaagcaaccgaaatatggaacgggcagaaagtagaagtgggcgagggggatctggtgggggtagttctagtggctcctcttcctcttccagctcctcctcaagctcttcttcttcgtcctcttcttcctcaagcccgtcgagctcatcaggaggggagtcttcagaaacatcatctgacctgttcgagggctctaatgaaggcagcagcagcagcggctcatccggggctaggagggaaggtcgacatcgagcccctgtaacatttgatgagagtgggagcctaccttttctgagcctggcacaattttttttgctgaacgaggacgacgacgatcaacctcgcggattgaccaaagaacagatagacaatctggctatgcgcagcttcggggagaatgacgcactgaaaacgtgctccgtgtgcattaccgagtacaccgagggcaataaactccggaagttgccctgcagccacgagtaccacgtgcactgcatcgatcgctggctaagtgagaacagcacttgccccatttgcaggcgggcagtgttagcaagcggtaatagggagtcagtggtttag

SEQ ID NO: 239349 - DNA, 954 bp, synthetic construct
  misc_feature 1..954: note = Description of Artificial Sequence: Synthetic coding sequence
  source 1..954: mol_type = other DNA
tgactgcccgcaccggctgctgccttgcccggagctcctcctccgcctccaggcgttcggggttacccagccagggcgcgaggcttgcagggagccagtggtggagctcgctttccttctagcctgtctctcccggtaccgggaaagggcggatgggtggtgtcgcgcgctaagtttcccgctctcgacagttgtgagatcacgaccgcccaccctagactgtgttttgctgtgtcccccccattcagctgctcattgcccttgccctcactctttcctcattccccgctcctaggcagacctaagcgacaggccaaacccgcagccgatgaggggttttgggactgttcagtgtgcacattccggaactccgctgaggccttcaaatgttccatatgcgatgttaggaaggggactagcactcggaagcccagaatcaactcacagcttgttgctcaacaggtggcccaacagtatgctacccctcccccacccaagaaagagaagaaagaaaaagtcgagaaacaggacaaggagaaacctgagaaggataaggagatctcaccctccgtgacaaaaaaaaacacgaataagaagacaaagccgaaatccgacattttaaaggacccacctagtgaagcaaattccatccagtcagcaaatgcgacaaccaaaacttctgaaaccaaccacacctcaagacctaggctcaaaaacgtcgaccggtcaacagcacagcaattggccgtgaccgtgggcaatgtaaccgtcattatcacggactttaaagagaagacgagatctagttctacttcaagctccaccgtgacttctagcgcaggctccgagcagcagaaccagagctcatccggttcggagtcaacggacaaggggagctccagatcatccacccccaagggagacatgtctgccgtcaatgacgaatcattctag

SEQ ID NO: 239350 - DNA, 456 bp, synthetic construct
  misc_feature 1..456: note = Description of Artificial Sequence: Synthetic coding sequence
  source 1..456: mol_type = other DNA
atggattccgcagcatgcgccgcagcagctaccccggtccccgcactggccttggcgttagctccggacctggcccaggcaccacttgctcttcccggattgctgtctccaagttgtcttctgtcaagtgggcaggaggtcaatggctcagagaggggcacctgtctgtggcgcccttggctgagctccactaatgatagtcctagacagatgcggaagctggttgatctcgcagcaggaggggcaaccgcggctgaggtgaccaaagccgagtcaaagtttcaccaccctgttaggctgttctggcctaagtctagatccttcgattacctgtattctgccggtgaaatcctgctacagaacttcccagtgcaggccacgattaatctctatgaggactctgactccgaggaggaagaggaagacgaagaacaggaagacgaggaagagaaatag

SEQ ID NO: 239351 - DNA, 315 bp, synthetic construct
  misc_feature 1..315: note = Description of Artificial Sequence: Synthetic coding sequence
  source 1..315: mol_type = other DNA
atggattccgcagcttgcgccgctgcggcaactcctgtcccggctctggcattggcgttggcccctgacttggcccaagcccctctggcgttgcctggcctgctctctccctcttgtctgcttagtagcgggcaggaggtgaacggctccgaacgcctgttttggcccaagtcacgcagcttcgattatttatatagcgccggagagatcctgctacagaacttccctgtccaggccacaatcaacttgtacgaggatagcgactcagaagaggaggaggaggacgaagaacaagaggacgaggaagagaaatag

SEQ ID NO: 239352 - DNA, 213 bp, synthetic construct
  misc_feature 1..213: note = Description of Artificial Sequence: Synthetic coding sequence
  source 1..213: mol_type = other DNA
atgcccgacgggcctggtatgaccgctgccagtgggaagctgtaccagttccggcaccctgtgcgcctgttctggcctaagtcgaaatgttacgattacttgtaccaggaagcagaggctttactgaaaaatttcccaatccaggctaccatttccttttatgaagattctgactctgaggacgaaatagaagaccttacatgtgagaactag

SEQ ID NO: 239353 - DNA, 387 bp, synthetic construct
  misc_feature 1..387: note = Description of Artificial Sequence: Synthetic coding sequence
  source 1..387: mol_type = other DNA
atggaaaatgccggaggcgctgagggtacagagtccggtgcagccgcttgcgcagcgactgatggtcccactaggagggccggagcggattccggttacgccggtttctggcgtccgtgggtggacgccggtggtaaaaaagaggaggaaacgccgaatcacgcagcagaggctatgcccgatggccctggtatgaccgccgcatccgggaaactgtaccagtttcgccaccccgtccgcctcttctggccgaagtcgaagtgctatgattacctgtaccaggaagcagaggcccttctcaagaactttcctattcaagcaaccatcagtttctacgaagacagtgattctgaagacgagatcgaagatctcacttgtgagaactag

SEQ ID NO: 239354 - DNA, 444 bp, synthetic construct
  misc_feature 1..444: note = Description of Artificial Sequence: Synthetic coding sequence
  source 1..444: mol_type = other DNA
atggccgcagcagcagactcctttagtgggggaccagccggagtgcgtctccctaggtccccacccctcaaagttttggccgagcagctgcgccgtgacgcggaaggcggtccaggcgcttggcgtctgagcagggcagcggcaggacgcggacccttggatctggcagcagtctggatgcagggcagggtggtgatggctgatagaggggaagccaggctgagagatccctcaggcgattttagtgtccggggattggagcgtgtgccacgcggacgcccatgcctcgtgcccggaaagtacgtcatggtgatgggcgtggtacaagcatgcagccccgagccgtgtttgcaggcagtgaaaatgaccgatctctccgataatcccattcacgagtccatgtgggaactcgaggtggaggatttacataggaacattccgtag

SEQ ID NO: 239355 - DNA, 255 bp, synthetic construct
  misc_feature 1..255: note = Description of Artificial Sequence: Synthetic coding sequence
  source 1..255: mol_type = other DNA
atgaagcaaactcaagtgggctcattgttcagtctcggaattcggaatcctgagcccggacccgtatctgggaccgcagtgccaagacagctggcatggaaaagcggcaaatatgttatggtcatgggggtcgttcaggcttgcagccctgagccatgcctgcaggctgttaaaatgacggacctgtccgataaccctatccatgagagcatgtgggaattagaggtcgaagatctgcataggaatatcccgtag

SEQ ID NO: 239356 - DNA, 1431 bp, synthetic construct
  misc_feature 1..1431: note = Description of Artificial Sequence: Synthetic coding sequence
  source 1..1431: mol_type = other DNA
atggctaattctgcaaaagccgaggaatatgagaaaatgtcgctcgagcaggctaaagctagtgtgaatagtgaaactgaatcttccttcaacataaatgagaataccactgcgagcggcacagggttatcagaaaagacttctgtatgtagacaggtggacattgcacgcaagagaaaggaatttgaagatgatctggtgaaggaaagttcctcctgcggcaaggatacaccgtccaagaaacggaagctcgaccctgaaatcgttcccgaagagaaggattgcggcgatgccgagggaaactctaaaaagcgtaaacgcgagacagaggatgttcctaaagataagtcgagcacaggggatgggactcagaataagagaaaaatcgccttagaggatgttccggagaaacagaagaacctggaagaaggacacagttctactgtcgccgctcattataacgagcttcaggaagttggactcgaaaaacggagccagtcccgcatattctatctccggaatttcaacaactggatgaagtccgttctgattggtgagttcctggagaaggtgcgacagaaaaagaagagagacataacagttctggatctgggctgtgggaagggcggagatctcttaaagtggaagaagggacgtatcaacaagctggtctgcacggacatcgccgacgtatctgtcaagcagtgtcagcagcggtacgaagacatgaagaatagacgtgacagcgagtacatatttagcgctgaatttattactgcggattccagtaaagagctactgatcgacaagtttcgcgatccgcagatgtgctttgacatctgcagttgtcagttcgtgtgtcactactctttcgaaagttacgagcaggcagacatgatgctacggaatgcctgtgaacggctctccccgggaggatactttataggaactacgccaaatagcttcgagctgatacggaggcttgaggcttctgaaactgaatctttcgggaacgagatctataccgtgaaattccagaagaaaggtgattacccactgttcggatgtaaatacgacttcaatctcgagggcgtggtagacgtccccgaattcctcgtgtacttccctttgttgaacgaaatggcgaagaaatataatatgaagctcgtctacaagaagaccttccttgaattctacgaggagaagatcaaaaacaatgagaataagatgctccttaagcgcatgcaagccctggagccgtatcccgctaacgagagctctaagctcgtgtctgagaaagtggacgactacgagcatgccgcaaaatacatgaagaacagccaggtgcgactacccctggggaccctttcaaaatctgagtgggaggccacgtcaatctacctggtgttcgcatttgagaagcagcagtag

SEQ ID NO: 239357 - DNA, 1431 bp, synthetic construct
  misc_feature 1..1431: note = Description of Artificial Sequence: Synthetic coding sequence
  source 1..1431: mol_type = other DNA
atggcaaacagcgcgaaggctgaagaatatgaaaagatgtctttggaacaggcgaaggcatctgtaaacagcgagaccgaaagctctttcaatatcaacgagaacactactgcctctggaacgggcctgtccgagaagacgagtgtttgccgccaggtggatattgcccgaaagcggaaggagtttgaggacgacctggtgaaggagagctctagctgtggaaaagatactccaagcaagaaacggaagctggatccagagatagtccccgaagagaaggattgcggcgacgccgagggaaactctaagaagagaaagcgagagacagaagatgtcccaaaggacaaaagtagcacaggtgatggaacacaaaacaagcggaaaatagccctggaggacgttcccgagaagcagaagaacctagaggaaggccactcctccacagtggctgctcactacaacgaactgcaggaagtgggactggaaaaacgctcgcagtcacgcattttttatctccgaaacttcaataactggatgaagtccgttctcatcggcgaattcctagaaaaggtgcggcaaaaaaagaaaagagacattacagtgttagatttgggttgcggcaagggaggagacttgctgaagtggaaaaagggaagaatcaataagctcgtgtgtaccgacatcgctgatgtctctgttaaacagtgccagcagagatatgaagatatgaagaaccggagagactctgagtatattttctctgccgagttcatcactgccgacagcagcaaagaactcctgatcgataagtttcgggatccacagatgtgctttgatatctgctcctgtcaattcgtgtgccattatagctttgaaagctatgagcaggctgacatgatgctgcgaaacgcatgcgagaggctgtcacccggtggctattttattgggacgacaccaaattcctttgaactcataagaaggctggaggccagtgaaactgaatccttcggcaacgaaatctacacggtcaagtttcaaaagaaaggtgactacccgctgttcggatgcaagtatgatttcaacctcgagggagtcgtagacgtgcccgagttcctggtttactttcctctgctcaacgaaatggctaagaagtacaacatgaaactggtatataagaaaacattcctggaattctatgaggaaaaaatcaagaacaatgagaataagatgctccttaaacgaatgcaggccctggaaccctatccagctaacgagagctcaaagctggtatccgaaaaggtcgatgattatgagcacgccgcaaaatacatgaagaattctcaggttcgcctgccccttggcacccttagcaaatctgaatgggaagctactagcatctacctcgtgttcgcgtttgaaaagcagcagtag

SEQ ID NO: 239358 - DNA, 705 bp, synthetic construct
  misc_feature 1..705: note = Description of Artificial Sequence: Synthetic coding sequence
  source 1..705: mol_type = other DNA
atgaagaataggcgggactctgagtacatcttctccgctgagtttatcaccgccgatagcagtaaagagctgctgatcgataagttcagagatccacaaatgtgctttgatatttgctcatgtcagtttgtgtgtcactacagcttcgagtcatatgaacaagcagatatgatgctgcgcaacgcctgcgaacgcctttctcccggaggttacttcatcggtaccactcccaactcttttgaactgatcagacgcctggaggcgtccgaaaccgagagttttggcaacgaaatctatactgtaaaattccagaaaaaaggagactacccactcttcggctgcaagtatgactttaacttggaaggtgtagtcgacgtcccagaatttctcgtctacttcccattactgaacgagatggccaaaaagtataacatgaaacttgtctacaaaaagacattcctggaattctatgaggagaaaattaaaaacaatgagaataagatgcttctaaagagaatgcaggcactggagccctatcctgccaatgagtcatcaaaacttgtgtcggaaaaggtggacgattatgagcatgcggctaaatacatgaagaattctcaagtgagactaccgctcgggacactgtccaagtctgagtgggaagcaaccagcatctatctagtgtttgcttttgaaaagcagcaatag

SEQ ID NO: 239359 - DNA, 1431 bp, synthetic construct
  misc_feature 1..1431: note = Description of Artificial Sequence: Synthetic coding sequence
  source 1..1431: mol_type = other DNA
atggctaactcggccaaagccgaagagtatgagaagatgtcactagagcaggccaaggcatctgttaattctgagaccgagtcctccttcaacatcaacgaaaacactaccgcttcgggtacaggcctatctgagaagacgagcgtatgccggcaagttgatatcgccaggaaacgtaaagagttcgaggatgacctcgttaaggagtcatcttcctgcggaaaggacacaccgagtaaaaaaaggaagctggatcctgagattgtgcccgaggaaaaggactgcggggacgccgagggcaacagtaaaaaacgcaagagagaaacagaagacgtgcccaaagataagagtagcaccggggacggcacccaaaacaaacggaaaattgcattagaagacgtccccgaaaaacagaagaacttggaagaagggcattctagcacagtggccgcacactataatgagttacaggaagtcggattagagaaacggagtcaaagccggattttttaccttaggaacttcaacaactggatgaagtccgtcctgattggggagttcctggaaaaagtccgacagaagaagaagcgagacattacggtattggacctcggctgcggtaagggcggagatctcttgaagtggaagaagggcaggattaataaattagtgtgtaccgacatcgcagacgtgtccgtgaaacagtgtcagcagcgctacgaagacatgaaaaatagaagagacagcgagtatatctttagcgctgaatttataactgccgatagctccaaagaactgctgattgataaatttcgggatccccaaatgtgttttgatatctgcagctgccagtttgtgtgccattactcctttgaaagctacgaacaggcagacatgatgttgcgcaatgcttgcgagcggttgagccccggaggctacttcattggcaccacacccaacagttttgagctcatccgcaggctagaggcgtccgaaacagaatccttcgggaatgagatatacacagtgaaattccagaagaagggagactaccccctgtttggttgcaagtatgattttaacctcgagggtgtggttgacgtccctgaatttctggtgtattttccactgctcaacgagatggccaaaaagtataacatgaagcttgtctataagaaaacatttttggagttctacgaagagaagatcaagaataacgagaataaaatgttgcttaagaggatgcaagctctcgagccatacccggcaaacgaatcttctaagctggtctccgagaaggtcgacgactacgagcatgcagccaaatacatgaagaatagtcaggtaagactgccactgggcactctgagtaaatccgagtgggaggctacctcgatctatcttgtgttcgcctttgagaagcagcagtag

SEQ ID NO: 239360 - DNA, 390 bp, synthetic construct
  misc_feature 1..390: note = Description of Artificial Sequence: Synthetic coding sequence
  source 1..390: mol_type = other DNA
atgaagtctgttctaataggagaattcctggagaaggtgagacagaaaaagaaacgtgacatcaccgtgcttgaccttggttgcgggaaaggcggtgatctcttaaaatggaaaaaaggtcgaatcaacaaacttgtctgtactgacattgctgatgtgagtgttaagcaatgccagcaacgatatgaggacatgaaaaaccgcagggactcagaatatatcttcagtgccgagttcattacggcggatagcagtaaagaactgttgatcgacaagttccgtgatcctcagatgtgttttgatatctgcagttgtcagttcgtctgccattattccttcgagagctatgagcaggcagacatgatgctgagaaatgcctgtggaacctag

SEQ ID NO: 239361 - DNA, 468 bp, synthetic construct
  misc_feature 1..468: note = Description of Artificial Sequence: Synthetic coding sequence
  source 1..468: mol_type = other DNA
atggccccacgaacttggtgccccgcagggattttcgggctgttctgccccctgacccttgcctgttcatctctgaccattgccctgaccgactgccagcctattatacttgtgagtccgacactgtcgctttggatggtggtcagatctgtgtggatcatgcaggcctctctgttaggggagcccgaagaagtcgccctgggtccgatgggtgttgtcgccgctacacttgaagtggtcggcacccgggcaatgggggttgccggaatcatgaccgtcgacctggaaggaatggatatggatatggacgtgcccgaaacaatcatggctgaaacccgggtggtgatgacagccacgcaggaggagataacagagaccattatgacaacggaaatgagacacgcccacaatatcggagaaacctggatctcagctctcagcgaaccagtatgccatacactgagttag

SEQ ID NO: 239362 - DNA, 474 bp, synthetic construct
  misc_feature 1..474: note = Description of Artificial Sequence: Synthetic coding sequence
  source 1..474: mol_type = other DNA
atgtcctccgaggaaggcaagttatttgtgggaggcttgaactttaacaccgacgaacaggcgctggaggatcacttttcttcattcggacctataagcgaagttgttgtagtgaaggatcgggaaacccaacgctcgcgaggtttcggattcataactttcacaaatccagagcatgcctccgtcgcaatgcgggcaatgaacggcgaatcactggacggccgacagatacgcgtcgaccacgccggaaaaagcgcaaggggcacgagagggggtggcttcggcgctcatggcagaggcaggtcttatagccggggtggtggcgaccagggttacgggtcaggaaggtattatgactctcgaccaggtggttatggctacggatatgggaggtctcgcgactacaatggcaggaaccagggagggtacgataggtatagtggtgggaattatagggacaattatgataactag

SEQ ID NO: 239363 - DNA, 474 bp, synthetic construct
  misc_feature 1..474: note = Description of Artificial Sequence: Synthetic coding sequence
  source 1..474: mol_type = other DNA
atgtcttccgaagagggtaagttattcgtagggggtttaaactttaatacggacgagcaggctttggaagatcatttctcctcattcggacccatcagcgaagttgttgttgtgaaggaccgtgagacccagagatcgcgcggatttggattcatcacctttaccaatccggaacacgctagcgtggccatgagagccatgaatggtgaatcactcgatggacgccaaatcagagttgaccacgctggaaagtccgcccgtgggacccgcggaggaggctttggggcacatgggaggggtcgatcctactcccgcggtggaggggatcagggctatggaagcgggagatactatgattcacgcccaggtgggtacgggtacggctacggtcggtccagagactacaacgggcgaaaccaaggtggatatgaccggtacagtggcggtaactaccgtgacaactatgataactag

SEQ ID NO: 239364 - DNA, 510 bp, synthetic construct
  misc_feature 1..510: note = Description of Artificial Sequence: Synthetic coding sequence
  source 1..510: mol_type = other DNA
atggcccctcgcacatggtgccccgcagggatttttggccttttctgccctctgacccttgcatgttcctctctgacaatcgccctgactgattgtcaacccataatcctggtctctcctactttgagtctttggatggttgtccgcagcgtatggattatgcaagcatccctcctgggcgagcctgaggaggtagcactggggcctatgggagttgttgcagccacactggaggtggttgggacacgtgccatgggtgtggccggtattatgacagtggaccttgaaggcatggatatggatatggatgtgccggaaacaatcatggctgagacccgtgtcgtcatgacagctacccaagaggaaattactgagacaattatgactacggaaatgcgccatgcccacaacattgacacacagggcatcatttcggatcctggttccagtttccagatggctgtatttattaaagtgttcggggcagcaccaaagcatctcattttgtag

SEQ ID NO: 239365 - DNA, 2559 bp, synthetic construct
  misc_feature 1..2559: note = Description of Artificial Sequence: Synthetic coding sequence
  source 1..2559: mol_type = other DNA
atggagtatgagaggcgaggcggaagaggcgataggacaggccgttacggggcaactgacagatcacaggacgacggtggagaaaaccggtccagagaccacgattacagagatatggattaccgaagctaccctagggaatacggaagtcaggaagggaaacacgattatgacgactcatcagaagaacagtcagcggagataagggggcagctccagagtcatggagtgcaggcacgcgaggtgcgcctgatgagaaataaaagctcaggtcagtcgcgaggatttgcgtttgtagagttcagccacctccaggacgccactcgctggatggaagccaatcagcactcacttaacattcttggtcaaaaagtcagtatgcattactcagatcctaagcctaagatcaacgaggactggctgtgcaataagtgtggcgtgcagaatttcaaaagaagggaaaagtgctttaagtgcggtgtgccaaagtcagaagccgaacagaagttgcccctgggcacaagattggaccagcagaccctgccccttggcggacgggaactttcccaagggttattgcccctgccacaaccataccaggctcagggcgtgctcgcctcccaggccctgtctcagggaagcgagccttcctctgaaaacgccaatgatacaattattctgcggaacctgaacccacatagcactatggacagcatccttggcgcacttgctccatatgctgtgctgagttcaagcaacgtgcgggtgatcaaggataaacaaacccagcttaacagaggattcgcgtttatccaactaagtaccatcgaggccgcacagctgcttcagatcctccaggccctgcaccctcccctgacaatcgatggcaagacaattaacgtggaattcgcgaagggaagcaagcgcgacatggcgtctaacgaggggtctaggatatctgcagcatctgtggccagtacagccattgccgctgcacagtgggctatatcccaggcgtcacagggaggcgagggcacctgggcaacaagtgaggaaccccctgtggactactcgtattatcagcaagacgaaggctatggaaactctcaggggactgagagtagcctctatgcccatggctacctgaaggggaccaaagggcctggtatcaccgggacaaaaggagaccctaccggtgcgggacccgaggcaagcttagagcctggggctgacagcgttagcatgcaggcgttttcccgggctcagcctggcgcagccccaggcatttaccagcagtccgccgaggcttccagttcccagggcactgccgcaaattctcagagttatactattatgagcccagctgtgctgaaatctgagctgcagtcccctacacatccctcttcggcgttgcctccagccacctcccccacagcccaagagtcctattctcaatacccagtgccagacgtgagcacctaccagtacgatgagacttctggatactattatgacccccagacgggtctgtactatgaccccaattcccaatactactacaatgctcagagccagcagtacctctactgggatggagaacgtcgcacctacgtaccagcactcgagcaaagcgcggatggccataaagaaaccggggcacctagcaaagaggggaaagaaaagaaggagaagcataagacgaaaactgcacagcagatcgctaaagatatggagcgctgggcacgtagcctcaataagcaaaaagagaacttcaaaaactcatttcaaccgatttcaagtttgagggacgatgagaggcgagagagtgcgaccgcggacgctggctacgccatcttagagaaaaagggagccctcgctgagaggcagcacacatcaatggacttgcctaaactggcgagcgatgatcgtcccagtccgcctcggggactagtcgccgcatactccggggagtccgattctgaggaggagcaggagcggggaggacctgaacgagaagaaaaactgacagactggcagaaattagcatgtctgctgtgccgccgtcagttcccttccaaggaggcactcatccgacatcaacagctctccgggttgcataaacagaacctggaaattcatcggagggcacacctgtctgaaaacgagctggaagctttggaaaaaaacgatatggaacagatgaagtacagggatcgtgctgcggagcggagggagaaatacggaatcccggagcctccagagcccaagcggaggaagtacgggggaatcagcacagcctcagttgacttcgaacaaccaacccgggacgggctggggtctgacaacatcgggtctagaatgctccaggcaatggggtggaaagaaggtagtggcctcggtaggaagaaacaaggcatagtcacaccaatcgaagcccagacccgcgttcggggatccgggttaggggcacgaggctcctcatatggagttactagtacagagagctacaaagagacattgcataaaactatggtgactcgcttcaacgaggctcaatag

SEQ ID NO: 239366 - DNA, 2562 bp, synthetic construct
  misc_feature 1..2562: note = Description of Artificial Sequence: Synthetic coding sequence
  source 1..2562: mol_type = other DNA
atggagtatgagcgcagaggtggaaggggcgacagaacaggtagatatggtgctacagacagaagtcaggatgacgggggtgagaatcggtcccgcgaccatgattacagagacatggactacaggtcttatccacgagagtacggcagtcaggaaggcaagcatgactacgatgactccagtgaagaacaatctgcggaaattagagggcagctgcagtcgcacggggtccaggcaagagaagttcggttaatgcgcaataagtcgagtggacagagtaggggctttgccttcgtcgagttctcacacctccaagatgccacgaggtggatggaggcaaatcagcacagtctgaacatcttaggacaaaaggtgtccatgcattactcagatccaaagcctaagattaacgaagactggctctgcaacaaatgtggagtgcagaatttcaagcgaagagaaaagtgcttcaagtgcggagtccccaagagtgaagctgaacagaagctgccattgggaacacggctcgaccagcagacgcttccgctgggagggcgtgagttgagtcaggggctccttccgcttccccagccataccaggcccagggcgtgcttgcaagtcaggccctcagccagggtagtgagccgagcagcgagaacgcgaatgacaccatcattctacgaaacctgaacccccactctaccatggatagtattctgggtgccctggcaccttacgctgtgctctcttcctccaacgtgagggtgatcaaggataaacaaacacagctgaatagaggttttgccttcattcaactgagcacaattgtcgaggcagcccagctgcttcaaatccttcaggcactacaccccccactgaccatcgatggcaaaaccatcaatgtggagtttgcaaagggaagtaaacgggatatggcatctaacgagggttcacggataagcgccgcttctgtggccagcactgcaatcgcagcagcccagtgggccatttcacaggcctcccaggggggagaagggacctgggccactagtgaggagccacccgtggattattcctactaccagcaggatgagggatacggcaacagccagggaacagagagcagtctgtatgcccacggatatctgaagggcactaaagggcctggcatcacgggcacgaagggggaccctactggggcaggtcctgaagcctccctggaacctggcgcagactcagtctccatgcaagcttttagtcgggctcagcctggggctgctccagggatttaccagcagagcgccgaggcatccagttcccagggaacggcagccaatagtcagagctatactattatgtcccctgcagtcctcaaatctgaactgcagtctcctactcacccatctagcgcactccctcccgctaccagtccaacagcccaagaaagctacagccagtatcccgtgccagatgtgagcacgtatcaatacgacgagaccagcggatactactacgatccacaaactggcctgtactatgatcccaactcgcagtactattacaatgcgcagagtcagcagtacctctactgggatggggagcgaagaacatacgtgccggcactggagcagtctgcagacggccataaggagactggtgcaccttccaaggaaggcaaggagaagaaggaaaagcacaaaaccaagaccgcacagcaaatcgccaaggatatggagcgctgggcccgatcactcaataagcagaaagagaatttcaagaattcctttcagcccatttcctcactgcgggacgatgagcgcagagaatctgcaaccgcggacgcgggatacgcaattctggaaaaaaaaggggctttagccgagcgccagcacaccagcatggatctacccaaactggcaagtgacgataggccgtctccaccacgcggactggtggctgcttactcaggcgagagcgacagcgaggaggaacaagaacgcggtggccctgagagagaagagaagttgaccgactggcagaaactggcatgtctgctgtgtcggaggcagtttccgtcgaaggaagcactgatacggcaccagcagctgtccggtctgcacaagcagaatctcgagatacacaggcgagcccacctttcagagaacgagcttgaggcactggagaaaaacgatatggagcagatgaagtaccgggaccgcgctgcagaaaggagggaaaaatacggcattcccgagccacccgagccaaagcggagaaaatatggcggaatctctacagccagcgtggatttcgaacaacctacccgagatggcctgggcagcgataacatcggatccaggatgctgcaggccatgggctggaaggaggggtcaggactggggagaaagaagcagggaatcgtgacgcccatagaggcacagactagggtgcggggaagcggccttggggcaaggggaagctcttatggggtgacgagcactgagtcatataaagaaacgcttcataagaccatggtaacacgattcaacgaagcccagtag

SEQ ID NO: 239367 - DNA, 2793 bp, synthetic construct
  misc_feature 1..2793: note = Description of Artificial Sequence: Synthetic coding sequence
  source 1..2793: mol_type = other DNA
atggaatacgagcgtcgcggagggcgaggcgatagaactgggaggtatggagccaccgaccgttcccaggacgatggcggagagaataggagcagggatcacgactacagggacatggactaccgatcctacccccgagaatacggaagccaggagggaaaacatgactatgatgattcgtccgaggagcagagcgccgaagacagctacgaggccagccctgggagcgagactcagcgtcggagaaggcggaggcaccggcactctccaacgggcccacctggctttccccgagacggagactacagggaccaggactaccgcacagaacaaggcgaagaagaggaagaggaagaagatgaggaggaagaggaaaaggcctccaacattgtgatgctcagaatgctaccccaggctgcgacggaggacgacattcggggtcagctgcagtctcacggggtccaggccagggaagtcaggctgatgagaaacaagtcctctggacagtcaaggggttttgcatttgttgagttcagccacctgcaagacgccacacgctggatggaggcaaaccagcattcacttaatattttgggccaaaaagtctcaatgcactatagtgaccccaagcccaaaatcaacgaggactggttgtgtaacaagtgtggggttcaaaattttaagaggagagaaaagtgttttaagtgcggtgtgccaaagtccgaggccgaacagaaacttcctctgggaacacggttagaccagcagactctcccactgggaggacgcgagctgagccaaggtctactacctctgccgcagccttatcaggcacagggcgtattggcgtcacaggcgctgtctcaaggctctgagccctccagcgagaacgctaacgatacaattattttgagaaaccttaatccccactctacaatggacagcatcctaggagccttggccccttacgcagtacttagtagctcgaacgtcagggtgattaaggacaaacagacccagttgaacaggggatttgcatttatccaactatccacaatcgtcgaagccgctcagttgctgcagatcttgcaagccttacacccccctctgactatagacggaaagaccattaatgtcgagtttgccaaaggatctaagagggacatggctagcaacgaaggcagccggatatccgccgctagcgtggcaagtaccgccattgctgctgctcaatgggcaatttcacaagcaagccagggaggagagggcacttgggccaccagtgaagagccaccagtcgactattcctactaccagcaggacgaagggtacggcaattctcaaggcacggaatcttccctgtacgcccatggctatctcaagggcacgaaggggccaggcattaccggtaccaagggtgacccgaccggcgcaggcccagaggcaagcctagaaccaggcgctgattcagtgtcaatgcaggcctttagccgcgcacagccaggcgcagcacctggcatttaccaacagtcagctgaggctagctcgtcccaagggaccgcagccaactcacagagctatactataatgagccccgcagtgttgaagtccgagctgcagagcccaacgcacccttcttccgcccttcccccagcaacttcacccacagctcaggagagctattcacaatatcccgtgcccgacgtgtcaacctaccaatatgatgaaacctcaggttactactatgatcctcaaaccggcctctactacgatcccaactcacagtactactacaacgctcagagccagcaatatctatattgggatggagaacggagaacatatgtaccagccctggagcagagcgcagacggtcacaaagaaacaggggctccaagtaaagagggcaaagagaaaaaagaaaagcacaagacgaagacagctcaacagatcgctaaggacatggagaggtgggcgagaagtttgaataagcaaaaggagaattttaagaattcattccagccaatttcaagcttgagagacgacgaaagacgggagtcagccacggctgacgctggctacgctatcctggaaaagaagggggctctggccgagaggcagcatacatcgatggatttacccaaactcgcgtcagatgatcggccttctccgccaaggggcctcgtagcggcatactctggggagtcagactcagaggaggagcaggagcggggaggccctgagagggaggaaaagttgactgattggcagaagctcgcctgtttactctgtcgcagacagttcccctctaaagaagccttaattagacaccagcagctgtcagggctccacaaacaaaacctcgagatacaccgtagagctcacctctcagagaacgagctggaagcattggaaaaaaacgacatggagcagatgaagtatagggatcgcgcagccgagagacgagaaaaatacggaatccccgagccgccagaacccaaacgcagaaaatatgggggaatctccaccgcttctgttgactttgaacaacccactagggatggtctgggcagcgataacattggaagccgcatgctgcaggctatggggtggaaagagggttccggtctgggcagaaagaaacagggcattgtcacgccaatcgaagctcaaacacgcgtgcgaggcagcggtttgggcgctcggggatcttcttatggcgttacaagcacagagagttacaaagagacacttcataaaaccatggtgacgagatttaatgaggcccagtag

SEQ ID NO: 239368 - DNA, 2010 bp, synthetic construct
  misc_feature 1..2010: note = Description of Artificial Sequence: Synthetic coding sequence
  source 1..2010: mol_type = other DNA
atgaagatctttgttggaaacgtagatggcgctgacaccactccagaagaactcgccgctttatttgcaccttatggaaccgtgatgagttgcgccgttatgaaacaatttgcatttgtgcatatgagggagaacgccggagccctgcgtgccatcgaagctctccatgggcacgaactccgcccaggccgagccctcgtggtggaaatgtctcgccctagaccgctcaacacttggaagatcttcgtgggcaacgtgtctgctgcctgcactagccaagagctgcgctctcttttcgagcgaagggggagggttatcgagtgtgacgtggtcaaggactatgccttcgtgcacatggaaaaagaagccgatgccaaggcagctattgcacagctgaacggtaaagaagtgaagggaaaacggatcaatgttgaactttccactaagggtcagaagaagggaccagggttagccgtgcagagcggcgacaagaccaaaaagcctggggcaggagacaccgcgtttcctggtacaggtggattctcggctacgttcgattaccagcaggcattcggtaactcaaccggaggtttcgatggtcaggccaggcagcctacacctcccttcttcgggcgagaccggtctcccctgagacgttccccccctcgcgcaagctatgtagctccgttgactgcacagccagccacatacagagcccagccttctgtatctttgggcgcagcttatagggcccaacccagcgcgtctcttggagttggttaccggactcagccaatgaccgcgcaggctgcctcctacagggctcaaccgtcagtctctcttggggcaccataccgcggtcaattggcctccccttcaagccagagcgctgctgcttcttccttgggtccttatggtggagcccaaccaagcgccagcgccctcagcagttatggtggtcaagcggctgctgcctcatccctcaactcctacggggctcagggctcgagcctggcaagctacggcaatcagccctcctcctatggcgcacaggctgcaagcagttacggcgtgagggccgctgctagcagctataatactcaaggggctgcctcttcactaggcagttacggggctcaggccgcatcatacggcgctcaatcggccgcaagctctctggcttacggagcacaagcggcatcatacaatgcccagccttctgcgagttacaatgcgcaaagcgctccatatgcagcacaacaggcagccagctacagcagtcagcccgctgcctatgtggcacaacccgctacagccgctgcctacgccagtcagccagccgcatatgctgctcaggccacaactccaatggcgggatcatatggcgcacagccagtagtccagacccagctgaatagttatggtgcacaagccagcatgggattgagtggttcctacggtgctcagtctgctgccgcagccactggttcctacggagctgccgctgcatacggcgcacagccttcagccaccttggccgcaccgtaccgcacccagtccagcgcatccctggctgcttcctatgctgcccaacagcatcctcaggccgctgcatcatacagagggcagcctgggaatgcttacgacggagcagggcaaccatcagcagcttatctcagtatgtcccagggcgcagtggcaaatgccaacagcacacccccaccatatgagcggactcggcttagccctccgagagcttcatacgacgatccatacaaaaaagccgtcgcaatgtctaaaagatacggtagtgaccggagactggcagagctttctgattatcggcgtctctccgagagccagttgtccttccgtcgcagccctaccaagagtagtttggactataggagactcccagatgcacattccgattacgctcgctactcaggttcctataacgactacctccgggctgcccagatgcattctggttatcagcgcagaatgtag

SEQ ID NO: 239369 - DNA, 471 bp, synthetic construct
  misc_feature 1..471: note = Description of Artificial Sequence: Synthetic coding sequence
  source 1..471: mol_type = other DNA
atgaaaatcttcgttggcaatgtggacggagccgacacgacccctgaggagctggccgctttattcgcgccttatggtaccgtcatgagctgcgcagtaatgaaacaattcgcatttgtgcatatgagggaaaatgcaggcgcactgcgcgctatagaggcccttcacggccacgagttgcgacctggcagggccctggtggtggaaatgtcccgacccagaccactgaacacttggaagatttttgttggcaacgttagcgcagcgtgcacatcccaggagctgcggtcgctgtttgaaagacgtgggagggtcatcgagtgcgatgttgtgaaggactatgcctttgtgcatatggaaaaggaggcagacgctaaggcagccatcgcccagttaaacgggaaagaagtaaaggggaagagaatcaacgtagagttaagtacgaagggaatggtgcctacaggcgtgtag

SEQ ID NO: 239370 - DNA, 360 bp, synthetic construct
  misc_feature 1..360: note = Description of Artificial Sequence: Synthetic coding sequence
  source 1..360: mol_type = other DNA
atgaagatcttcgtggggaatgtcgacggagccgacaccacccctgaggagctcgctgccctgttcgcgccttacggaactgtaatgtcgtgcgccgtgatgaaacaatttgccttcgtgcacatgcgggagaacgcaggagcactgcgagccatcgaagctctccacgggcatgaactaagaccgggacgagcgctcgttgtggaaatgagcaggcccagacccctgaatacatggaagatctttgttggcaacgtctcagctgcctgtacaagtcaggagctccgtagcctttttgaaagacggggtcgggtcattgagtgcgatgtggtgaagggcatggtaccaaccggagtgtag

SEQ ID NO: 239371 - DNA, 2934 bp, synthetic construct
  misc_feature 1..2934: note = Description of Artificial Sequence: Synthetic coding sequence
  source 1..2934: mol_type = other DNA
atgcggactgcaggccgagaccctgttcctagacgttctccaagatggcgacgtgctgtgccactgtgcgagacttctgccggtcgcagagtgacccagttgcggggagatgacctgcgcagaccggctacaatgaagggcaaagaaaggtcacccgtgaaagccaagcgcagcagagggggtgaagacagtaccagccggggtgagcggtcaaaaaaacttgggggatctgggggatcaaacgggtcctctagcggaaagacagactctggaggagggtcacgaagatcactccacctcgacaagtcatcatcaaggggtgggagccgcgagtacgacacggggggaggctcatcgagtagcaggttgcattcctactccagcccaagcacaaaaaactcatctgggggaggagagagccggtcctcctcccgagggggaggtggggaatctcggtccagcggagcggctagtagtgctcctggcggaggggacggcgcagagtataagaccttaaagatatccgaactcggatcacagctgtcagacgaagccgtcgaggacgggttgtttcacgagttcaagagattcggagatgtgtccgtgaaaatttcccacctgagtggatccggctccggcgatgagagggtggcatttgtcaacttcagacggcctgaagacgccagggccgcaaaacacgccaggggacgcttagtactctatgacaggccgctgaagattgaagcggtgtatgtcagtcggaggcgatctagaagtccactggacaaggatacttacccaccttctgccagcgtagtcggagctagcgtggggggacaccggcatcctccaggcggaggagggggacagagatccctttctcctggcggagcggctctcggctaccgggattatcgcctgcagcagcttgccctcggacggctgccaccaccacctcccccaccactgcccagggatctggagagggagcgagactatcccttttacgagcgggttcgccctgcatactcacttgagcctcgagtgggtgcaggcgctggagccgctcccttccgtgaagttgacgaaataagtccagaggacgatcagcgcgcaaatcggacactcttcttgggtaacctggacataaccgttacggagtcagacctgcggagagccttcgacaggtttggggtcatcactgaagtggacatcaagaggccgtcacgcggacagacctccacttatggctttctgaaatttgaaaaccttgatatgtctcaccgtgccaaactagcgatgagtggcaaaataattattagaaatcctataaaaattggttacgggaaagctacccccacgacgcgcctgtgggtcgggggattgggtccttgggtccccctggctgccctcgcaagggagttcgatagatttggcaccattcggacaatcgactacaggaaaggcgattcatgggcgtatattcaatatgagagtttggatgcggcacatgcggcatggacacacatgagaggattccctttgggcggaccagacagaagacttcgcgtcgacttcgcggacactgagcaccgataccagcagcagtacctccaaccactccctctcacacactacgaactggtgaccgatgcttttggtcaccgggctcccgacccacttcggggagctcgcgatcggacccctcccctgctctatcgtgatcgcgacagagatttatacccggactctgactgggtgccgcctcccccacccgttagagagcgtagcaccaggacagccgctacgtccgtccctgcatacgagccgcttgactctctggatagaaggcgtgatggctggtccctggacagggatcgcggagacagggaccttcccagctcccgcgatcaacctcggaagagaagattaccagaggagtcggggggtaggcacctggacaggtcccccgaatctgaccgcccacgcaaacgccactgcgcgccttctcccgacaggtcccctgaactgtccagttctagagacaggtacaatagtgataacgataggtcaagcaggttgctgctggaaagaccgagcccaattcgagacaggagaggttccctcgagaaatctcaaggggacaagcgagaccgaaaaaatagcgcgagcgctgagcgcgatcggaaacaccgtactaccgcaccgactgaagggaagagcccactgaagaaggaggaccgaagcgacggttccgcgcctagcacttcgaccgcctcatcaaagctgaaaagcccaagccagaaacaggatgggggaacggcccctgtagcctcagcgagccccaagctgtgcctcgcatggcaggggatgttgctgctgaagaatagcaattttccgtccaacatgcacctactgcagggcgatctccaggttgcttcctccctgctggtggagggaagcactgggggaaaggtggcccagctgaagatcactcagcgattgcgacttgaccagcctaagctagatgaagtcacaagacggatcaaagttgcaggccctaatggctatgcaattttattagcggtacccggtagtagtgactctcggagctcctcctcaagtgcggcatccgacacagccacatcgactcagaggccccttcgaaatttagtaagttacctgaaacaaaagcaggcagcaggagtcatcagtctgcctgtgggtggcaataaggacaaagaaaataccggggtgttacatgccttccctccttgtgagttcagccagcaattccttgattcccccgctaaggcgctcgcaaagtccgaggaagactacctagtgatgatcatcgtgcggggattcggattccaaattggggtaaggtacgagaataaaaaacgtgaaaacttggctctgacacttctctag

SEQ ID NO: 239372 - DNA, 2673 bp, synthetic construct
  misc_feature 1..2673: note = Description of Artificial Sequence: Synthetic coding sequence
  source 1..2673: mol_type = other DNA
atgaagagacagagtgagcgggacagtagccctagtgggagaggatcaagctcttctgctaaaagacctcgcgaacgcgaacgcgaagcagaagctggaggtcgaagggccgctcacaaggccagcgggggagccaagcaccctgttccagctagagcccgtgacaagccaagaggaagcggttcaggtggcggaggccaccgagacggcagaggaacaggagacgcaaatcacagagcaagtagcggcagatcaagcgggagcggagctggaggcggaggcagaggcggtaaggctagcggtgatcccggagcaagcggaatgtccccacgggcttcacctttgcctccccctcctccccctcccggtgccgagccggcttgcccaggcagttctgccgcagccccagagtataagaccctactgatcagtagcctgagtcccgctctgccggctgaacacctggaggacagactctttcaccagttcaaaaggttcggcgaaatcagtctgaggctctctcacaccccagagttggggagagtggcctatgtgaattttcgacatccccaagacgccagagaggccaggcagcacgcacttgctaggcaacttttgctctatgaccggcctctcaaagtggagcccgtatatcttaggggaggagggggatcctcaagacgcagctccagttcctcagcagccgcttccacacctcctcctggacctccagccccagcggaccctctggggtacctccctctccacggagggtatcagtataaacagcggagcctctctccagtggcagccccaccactgagagagcctagggcacggcacgctgcagccgcttttgccttggacgctgcagcggctgcagccgtcgggctgagtcgtgagagggctttggactactatggcctgtacgacgaccggggacgaccgtatgggtatccagccgtttgtgaagaggacctgatgccggaagacgatcagagagctacacggaacctgttcatcggcaacctggaccattctgtatccgaggttgaacttagacgggcattcgaaaaatacggcatcattgaagaggtggtcatcaagagacctgctcgtggccagggcggagcatacgcattcttgaaattccagaacttagacatggctcaccgtgccaaggttgctatgtctggacgcgtgatcggcaggaatcccatcaagataggatatggtaaagcgaacccaacaacgcgcctctgggtgggcggtctaggccctaatacaagtctggctgccctggccagagaatttgatcgcttcggtagcatacgcaccatcgaccacgtcaagggagatagtttcgcatacatccagtacgaaagcttagatgctgcccaggcagcgtgcgcaaaaatgcggggatttccactggggggtcccgataggagactgagagtagacttcgccaaggccgaagaaaccaggtatcctcaacagtatcagccatcaccgttgcccgtccattatgaactactcacagacggctataccaggcaccgcaacttagacgctgatctggtgagagataggacccccccacacttgctgtattccgacagagacaggaccttcttagagggcgactggacaagcccatcaaagagctctgatcgcaggaactccctggaaggctatagtcgcagtgtgaggtccaggtccggtgagcgttggggagcagatggggatagggggctgcccaagccgtgggaggaaaggcgcaaacgccgatccctcagtagcgatagagggagaacaacccatagcccctacgaagaacgatccagaacaaagggcagcggccagcagtcggagcggggaagcgatcggaccccagaaagatcccgaaaagaaaaccactcaagcgaggggacaaaagagtcttctagcaattcattatccaatagccgccatggagcagaagaacgcggacaccatcaccaccaccacgaggcagcagacagctcacatggcaaaaaagctcgcgactctgagcgcaaccataggacgactgaggctgaacccaaaccattggaggaacctaaacatgagactaagaagctgaaaaatctctccgagtacgcacagactcttcagctggggtggaatggtttgttggtactgaaaaactcctgctttccaacttctatgcacatcctcgagggtgaccagggagttatatcttcgttgctgaaagatcatacctcgggcagcaaactcacccagctaaaaattgcccagagactccgacttgatcaaccaaagctggatgaggtcacgcgacggataaaacagggctcacccaatggctatgccgtactcttagcaacccaggcaacaccctctggactcgggacagaaggaatgcctacagtcgaaccgggactgcagcggagactgcttaggaatctggtcagctatctgaagcaaaaacaggccgcaggcgtcataagtttacctgtgggaggtagcaagggcagagacggaactggcatgctttatgcctttcctccttgcgacttctcccagcagtacctccaatcagccttaaggaccctgggaaaactcgaggaggaacacatggtaattgtcattgtgcgcgatactgcatag

SEQ ID NO: 239373 - DNA, 765 bp, synthetic construct
  misc_feature 1..765: note = Description of Artificial Sequence: Synthetic coding sequence
  source 1..765: mol_type = other DNA
atggaaacggtggtgtgccccccatgggaggagcgcagaaagaggaggtcgctgtctagtgaccggggtcggacaacccatagcccttacgaagagaggtcacgcaccaagggaagcgggcagcaaagcgagagaggttcggaccggactcccgagaggtcacgtaaggagaatcattctagcgaaggtacaaaagaatcctcgtcaaattcattgtcaaactctaggcacggagcagaggagcggggtcaccatcaccatcaccatgaggccgctgattcatcgcacggaaagaaggctcgggactcagagcgcaaccaccgcactactgaagccgaaccgaagccgctggaggagccaaagcacgagactaaaaagcttaaaaacctttccgagtatgcacagaccctgcaactcggctggaatggtctgttggtacttaaaaactcatgctttcctacttctatgcacatactcgaaggggaccagggagtcattagttccctgctgaaggaccacacatctggctctaagctcactcagctgaagattgctcagagattacgcctggaccaacctaagctggacgaagttacccgccgaatcaaacaggggagcccaaatggttacgccgtcctgcttgcaacccaggccaccccaagtggactgggaactgaaggcatgccgaccgtcgagcctggcctgcagcgtcgtttgttaaggaacttggtatcatacctcaagcagaagcaggcggctggatag

SEQ ID NO: 239374 - DNA, 636 bp, synthetic construct
  misc_feature 1..636: note = Description of Artificial Sequence: Synthetic coding sequence
  source 1..636: mol_type = other DNA
atgaagagacagtcagaaaggaatcacagaaccaccgaggctgaacctaagcccctcgaggagccaaaacatgagactaagaaactgaagaacctgtcggagtacgcccagaccctgcaactgggatggaacggactgcttgttctgaagaatagctgctttcccacaagcatgcacattttagagggcgaccagggtgttataagtagcttattgaaagatcacaccagcggcagtaaacttacccagcttaagatcgcacagaggctgcggctcgaccagcctaaactggatgaggttactagaagaattaagcagggcagtccgaatggttatgcagttttgcttgcaacacaggcgactcctagcggactggggacagagggcatgccaacagtggaacctgggttacaacgtcgcttgttaaggaatcttgtgtcttacctcaagcagaaacaggccgctggcgttatctcacttcctgtgggtggaagtaagggcagggacggtaccgggatgctgtacgcattccccccttgtgacttctcacagcagtatctgcaatctgcgctcaggacactgggaaagctggaggaggaacatatggtcatagtcatcgtaagggatacagcttag

SEQ ID NO: 239375 - DNA, 1692 bp, synthetic construct
  misc_feature 1..1692: note = Description of Artificial Sequence: Synthetic coding sequence
  source 1..1692: mol_type = other DNA
atgccagaggacgatcagcgcgctacacgaaatctgttcataggcaatctcgaccactcagtcagcgaggtggagctgcgcagggctttcgagaagtacgggatcattgaggaggtggttattaaaaggcctgctaggggtcagggtggagcatacgcatttctgaagttccagaatctcgatatggcccaccgggctaaagtggccatgtccgggagagtgattggaaggaatcccatcaaaattggatatggcaaggccaacccaactactagactatgggtgggcggtctaggacctaacacgtccctggctgccctggcccgagaattcgacaggttcgggtcaattaggaccattgatcacgttaagggtgactcctttgcctatatccaatatgaatccctagacgcagcgcaagctgcctgcgcaaaaatgagaggctttcccttggggggtcccgatcgtcgtctacgggttgacttcgctaaagccgaagagaccaggtacccccagcagtatcagccctctcctctcccggttcactatgagttgctgactgatggatacacaagacacaggaatctcgatgccgacctcgtgagggatcggactcccccacacttgctctattcagaccgagaccggaccttcttggagggagactggacctcgccgagtaaatctagtgaccgccgtaatagcctagaaggctactccaggtctgtgaggtcccgaagtggagagaggtggggcgcagacggcgacaggggcctccctaagccatgggaggaacggaggaagcgtagaagtttgagttccgaccgcggacgcacaactcactccccttacgaggaaagatcccgtacaaagggcagcgggcagcagtcagaacggggttcggatcgtaccccagagcggagtcgtaaagagaaccatagcagcgaaggcacaaaggagagctcgagcaactcactatcaaacagtcgccacggggctgaggagcgtggacaccatcaccaccaccatgaggccgctgattcatctcacggcaagaaagcaagggactcagaacgaaatcatcgaaccactgaggctgaaccaaagcctcttgaggagccaaaacatgagactaaaaaacttaagaatctgagtgaatacgcacagactttgcagttaggctggaatggcctgcttgttctgaagaactcttgcttccccacctcaatgcatattttagaaggcgatcagggagtgatatctagccttctaaaggaccacacctcgggcagcaaacttactcaactcaaaatcgcacagcgactaaggttagaccaaccaaagctcgatgaggtgaccaggcgcattaagcaggggtcaccaaatggatacgccgtgctgctggccacacaggccacgccctcgggtcttggcactgaggggatgcctacggtggagcctggtcttcagcggaggctgctgcgaaacttagtttcctatttgaagcaaaagcaagccgctggcgtgatcagcttgcccgtcggcggttcaaagggcagggatggaaccggtatgctctatgctttcccaccttgtgattttagccagcagtacctgcagtccgccttgcggacgcttgggaaactcgaagaagagcatatggtgatcgtgattgtgagggacacagcttag

SEQ ID NO: 239376 - DNA, 732 bp, synthetic construct
  misc_feature 1..732: note = Description of Artificial Sequence: Synthetic coding sequence
  source 1..732: mol_type = other DNA
atgggaagggtggggagggccggtcgtagtcagcgaactaagcagtcaaccgttctggcgcctgtaatagacctgaagagaggaggctcctcagatgatcgacaaatcgttgacaccccaccccacgtggccgcaggcctgaaggacccagtccccagcgggttttctgcaggcgaggtcctcatccccttagccgatgagtatgatccaatgtttcccaacgattacgagaaggtcgtgaaaagacagcgggaggaacggcaacgccaaagagaactggagcggcagaaagaaattgaggagcgggaaaaaaggaggaaggaccgccatgaagcctcaggattcgctcgtagaccagaccccgactctgatgaagatgaggattatgagcgtgagcgtcgcaaacgcagtatgggtggcgcagctattgctcctccaacctcgctggtcgaaaaggataaggaactacccagagatttcccttacgaggaggattctaggccacgaagtcagagcagtaaggcagccattcccccacccgtgtatgaggaacaagatcgccctaggagtccgaccgggccttcgaattctttcttagccaacatgggcggaacggtggcccacaagatcatgcagaagtacgggtttagagagggtcagggcctcggaaagcatgagcaaggactcagcaccgctctttctgttgaaaagacctcaaaacgcggagggtag

SEQ ID NO: 239377 - DNA, 1206 bp, synthetic construct
  misc_feature 1..1206: note = Description of Artificial Sequence: Synthetic coding sequence
  source 1..1206: mol_type = other DNA
atgtccctttatgatgatcttggagttgagactagcgattcgaaaaccgaagggtggtcaaaaaactttaagctgctgcagagccagcttcaggtcaaaaaggcagcactcactcaggcaaagtctcagcggaccaagcaaagcaccgtgctggcccctgtgattgatctcaagagaggcggatcgtccgatgatcggcagatcgtcgatacccctccacacgtagcagccggtctcaaggaccctgtgccctccgggttcagcgctggcgaagtccttatcccgctcgcagacgaatacgatcctatgttccccaatgactatgaaaaagtcgtcaaaagacaaagagaagagagacagcgtcagcgggagctggagcgacagaaggagatcgaagaacgcgaaaagcgacgcaaagataggcacgaggccagtgggttcgctcgtcgcccagaccccgactctgatgaggacgaggactacgagagggagcgcaggaagcggtccatgggtggcgctgcaatcgcgccacctaccagccttgtcgagaaggataaagagctgcctcgggatttcccatacgaggaggattctagacccaggtctcaaagctccaaggccgctatcccgccacccgtttatgaagagcaggatcgtcctagaagtcccaccgggccaagtaattcatttctggcaaatatgggcggaacagtagcgcataaaataatgcagaagtatggcttccgagagggtcagggcttagggaagcacgagcagggacttagcaccgcattgtccgtggaaaaaacaagcaaacggggaggaaaaataatagtaggcgatgctacggaaaaagacgcttcaaagaagtccgatagcaaccctcttaccgagatcctgaagtgtcccaccaaggtagtgttactgcgaaacatggtgggagctggagaggtagatgaggatcttgaggtggaaactaaggaggaatgcgaaaagtacggcaaagttggcaagtgtgtcattttcgagatcccgggagccccagatgatgaggcagtcaggatatttttagaatttgagcgcgttgagtccgccattaaggctgtggtcgacctgaatggcagatatttcgggggacgcgtggttaaagcgtgcttctataatttagacaagttccgcgtgctagatctcgcagaacaagtctag

SEQ ID NO: 239378 - DNA, 639 bp, synthetic construct
  misc_feature 1..639: note = Description of Artificial Sequence: Synthetic coding sequence
  source 1..639: mol_type = other DNA
atgagcttgtatgatgatttgggcgttgagacatccgactcaaagacagaagggtggagtaagaatttcaagcttctgcagtctcagctacaggtcaaaaaggcggcattgacacaggcaaaatcccagcggacaaagcagtcaacagtactcgcacctgttatcgacctcaaaagggggggatcaagcgacgacagacagatcgtagacaccccaccacatgtggccgctggcttaaaggaccccgtcccctccgggttttctgcaggcgaagttctcatcccactggccgacgaatatgatccgatgtttcccaatgactacgaaaaggtcgtgaaacgtcagcgcgaagagcgccagcggcagcgggagctggaaaggcaaaaagagatcgaggaaagagaaaaacgtaggaaggacaggcatgaggcatccggctttgcccgaagacccgacccggactccgatgaagatgaagattacgagcgggaacgcagaaaaaggtcaatgggcggtgccgctatcgcaccacccaccagccttgtggagaaggacaaggagcttccgagagattttccctatgaggaggactcaagacccaggagtcagtccagtaaggcagccatcccccctccatag

SEQ ID NO: 239379 - DNA, 666 bp, synthetic construct
  misc_feature 1..666: note = Description of Artificial Sequence: Synthetic coding sequence
  source 1..666: mol_type = other DNA
atgagcctctacgacgatttgggtgtagagacttcagattcaaagaccgaaggctggagtaagaacttcaagttattacagtcacagctgcaggtcaagaaggcggcactaacgcaggctaagtcacagcgcaccaagcagagcacggtgctggcgcctgtgatcgatcttaagagaggaggctcttcggatgataggcaaatcgtggacactccgccacacgttgccgcaggcctgaaggaccctgtcccttcaggcttcagtgctggcgaggtcctcattcctctggcagatgaatatgaccccatgtttccaaatgattatgagaaggtggtcaagcgccagagagaggaacgtcagcggcagagggagttagagcggcaaaaggaaatcgaggaacgcgaaaagcgcaaagacagacacgaggctagtggcttcgcaaggcgcccagaccctgactcggatgaggatgaagactatgagagagagagacgaaaacgaagcatggggggagccgctatcgcaccgcctacttcactcgtcgaaaaggacaaggaactcccgagagacttcccatacgaggaggactcacgccctcggtctcagtcttcaaaagccgctattcccccaccagtctatgaggagcaggataggccccgttcctag

SEQ ID NO: 239380 - DNA, 732 bp, synthetic construct
  misc_feature 1..732: note = Description of Artificial Sequence: Synthetic coding sequence
  source 1..732: mol_type = other DNA
atggggagagtgggcagagctggccgtagtcaaaggacaaaacagtcaacagtgctggctcccgtgatagacctaaaaagaggaggctcttccgacgaccggcagattgtggacaccccgccacacgtggccgctggcctgaaggaccctgttcccagcggtttctcagctggggaagtgctgattccacttgcagacgaatatgatcctatgttcccaaacgattacgagaaggtagtcaagaggcagcgggaggaacgccagcggcagcgagagctcgagcggcagaaagagatcgaagagagagagaaacgaagaaaggatcgacacgaggcctccggattcgcacgaaggcccgatcccgacagcgatgaagatgaagactacgaaagggaacgccgaaaacgtagtatgggaggagcggctattgcccctccgaccagtctcgtcgaaaaagacaaggaactcccacgtgattttccctacgaagaggattccaggccccgatcacagagttctaaggccgctatcccaccacccgtgtacgaggagcaagaccgtccacggtctccgacagggccttccaattcattcctggctaacatgggtgggacggtggcgcataagatcatgcagaagtacggtttcagggagggccagggcctggggaagcacgaacagggactgtccacagcgctgagtgtggagaagacatctaagagggggggatag

SEQ ID NO: 239381 - DNA, 1206 bp, synthetic construct
  misc_feature 1..1206: note = Description of Artificial Sequence: Synthetic coding sequence
  source 1..1206: mol_type = other DNA
atgtcactgtacgacgatttgggggtggaaaccagcgattctaagaccgaagggtggagtaaaaacttcaagctgttgcagtctcaacttcaagtcaagaaggccgctctgactcaagcaaaaagccaaaggacaaaacaatcgactgtgctcgcgcctgtgatagacctgaaacgcggagggagcagtgacgataggcagatcgtggacaccccccctcacgtcgccgctggcctgaaagacccggtcccaagtggcttctcagccggagaggtcctcatcccccttgcagatgaatacgaccctatgtttcccaatgactatgagaaagtcgttaagcgacagcgggaggagcgccaaagacaaagggagcttgaacgccagaaagagattgaggaacgagagaagcggaggaaggatcggcacgaagccagtgggttcgcccgtaggcccgatcccgacagcgacgaagatgaagattacgagagagagcggagaaagaggagcatgggcggagcggcaatcgcccctcccactagccttgttgagaaggataaagaattgcctagagatttcccctacgaagaagattctagacctcggtctcagtcctccaaggcagctattccacctccggtatacgaagagcaagatcggccaaggagccctaccggcccatccaactcattcctcgccaatatgggcggtacggtcgctcacaaaatcatgcaaaagtacgggtttcgagaaggtcagggcctgggcaagcatgagcagggcctgagtactgcattgagcgtagagaaaacatcaaaacggggtggcaaaatcattgtcggtgacgcaactgaaaaggatgcctctaagaaatccgactccaacccattgactgagatactgaagtgcccaacaaaggtggttcttttacgaaacatggttggggcaggcgaggtcgacgaggatcttgaggtggagaccaaagaagaatgcgaaaagtatggaaaggtaggtaagtgcgtgatctttgagattcctggagccccagacgatgaagctgtccgaatctttctggaatttgagcgcgttgagtccgccattaaggccgtggtggatcttaacggaagatactttggagggagagtggtgaaagcctgcttctataacctcgacaagttccgggtgttggatctagctgagcaggtgtag

SEQ ID NO: 239382 - DNA, 678 bp, synthetic construct
  misc_feature 1..678: note = Description of Artificial Sequence: Synthetic coding sequence
  source 1..678: mol_type = other DNA
taacccttggcggatgaatacgacccaatgtttccaaatgactatgagaaggtagtaaaacgccagcgagaggaacgacaacgtcagcgggagctggagcgccaaaaggaaatcgaagagcgggagaaacgaaggaaagatcgacatgaggcttctggttttgcaagacgacctgaccccgattcagacgaggatgaggattatgagagggagaggcgcaaaagatcaatgggaggggctgccatagctccccctacaagcctagttgagaaagacaaggagttacccagggacttcccatatgaagaggattctaggccacggtcccagagcagtaaagctgctatccccccaccagtctacgaagagcaagataggcctagatcccctacaggtcccagtaatagctttctggctaacatgggagggaccgtcgctcataaaattatgcaaaagtatggcttcagagagggccaggggttgggcaaacacgagcagggactgtcaacagccctcagcgtggaaaagacctcaaagcgcggtggcaaaatcattgtcggagatgcgacagagaaaggcgtctcccctgggaagagggtaacgcgtggaaagggactggcacccagtatcagcgatatggcatccttggatccacacgtgagcgcgggtggtcagtag

SEQ ID NO: 239383 - DNA, 3684 bp, synthetic construct
  misc_feature 1..3684: note = Description of Artificial Sequence: Synthetic coding sequence
  source 1..3684: mol_type = other DNA
atggtgctggcagccgctatgtctcaagatgccgacccttctggacccgaacagccggatcgcgtcgcttgtagcgtgcccggtgcacgggcatcgccagcccctagtggcccaaggggcatgcagcaacctccccctcccccacagccccctcctcctccccaggctggactacctcagatcattcagaatgctgccaagttgttagacaaaaaccctttcagcgtgagtaatccaaacccactgctgccatcacccgctagcttgcagctggctcagcttcaggcccaattgacactacatcgcctaaaactggcgcagactgcggtgacaaacaataccgccgcagcaactgtcttaaaccaagtgctgagcaaagttgctatgagtcagcctttatttaatcagctgcggcacccctccgtgatcaccgggccacatggacacgcgggagtccctcagcatgctgcagcaatcccaagtaccagattcccgtccaatgctattgccttttctcctcccagtcagactcggggtcccggaccctccatgaatctaccgaaccagcccccttccgccatggtgatgcatccctttacaggcgtgatgcctcaaacgcctggccagcctgcggtgattctcggcatcggaaagaccggccctgcaccagctaccgccggattttacgaatacggaaaagcctctagcggccagacttacggcccagagacggacggtcagccaggatttctcccttcttccgccagcacctctggttctgtgacctacgagggccattactctcatacaggacaagacggccaggcagcttttagtaaagacttttacggcccaaatagtcaaggaagccatgtagccagtggtttcccagcggaacaggctggcggactcaagagcgaggtaggccctctgctgcagggcacaaatagccaatgggagtccccacatggattctccggccaatccaagcccgacctgacagcaggaccaatgtggccaccaccccacaatcagccttatgaactctacgaccccgaggagccaaccagcgatcgaactcccccaagtttcggaggcaggctgaacaacagtaaacaggggtttatcggtgcagggcgtagagctaaggaagatcaggctctcctcagcgtccgacccttgcaggctcatgaactgaacgattttcacggtgtggcccctttacatctaccccacatctgctctatctgtgacaagaaggtcttcgatttaaaagactgggaactccacgtgaaagggaagctacacgctcaaaagtgtctggttttcagtgaaaatgcaggcattcggtgcatcttgggctctgccgaggggactctatgtgccagcccaaatagtactgcagtttacaacccggctggaaatgaagactacgcctccaacctgggcaccagctatgtgcctatcccggcaagaagctttacacagagtagccctacgtttccacttgcttcagtcggcacaacgttcgcacagcgtaagggcgcaggacgggtggtgcacatttgtaatttgcccgaggggagttgcactgaaaacgatgtcattaacctgggcctgcccttcggcaaggtgactaactacatacttatgaagtccaccaatcaggcctttctggaaatggcctataccgaagccgcacaggctatggtgcaatattatcaggaaaagagtgctgtaataaacggggaaaagctcctgattcgtatgtctaaacggtacaaagaactgcagctaaaaaagcccggtaaggcagtagcagctataattcaggatatccacagtcagagagagcgtgatatgtttagagaggctgaccgttacggcccagagaggccacggtctcggagtcctgtgtcacgtagcttaagccctcggagccacacgccgtcattcacatcttgtagctcatcccacagtccccctgggccttcaagggcagactggggaaatggacgagactcttgggagcacagtccttacgcacggagggaggaggagcgggatcccgcaccctggcgcgataacggggatgacaagcgcgatcgcatggatccctgggctcatgacagaaaacatcaccccaggcaactcgataaggcagaactcgacgaacggcctgaggggggtaggccgcacagagagaaatatcctcgctccgggtcccctaacctgccccattcagtatcttcatataaaagtcgcgaggatgggtactaccgcaaggagcccaaggccaaatgggacaaatatttgaagcaacagcaggacgctccgggtcggagccggagaaaggacgaggcaaggctgcgagagtcccgccaccctcacccagacgactctggaaaagaggacggactgggtcccaaagtgacccgcgctcccgagggcgcaaaggccaagcagaacgaaaaaaacaagactaagagaacagaccgagaccaagaaggggcagatgaccggaaggagaatacgatggcggagaatgaggctgggaaagaggaacaagagggtatggaagaatcaccccagtcagtcggcagacaggaaaaggaagcagagttcagcgaccccgagaacacccggacaaaaaaggagcaggactgggaatccgagtccgaagcagaaggagagagttggtatcctaccaacatggaagaacttgttaccgtcgacgaggtgggcgaggaagaggatttcatcgttgaacctgatatccccgagctcgaggaaattgtgcctatcgatcagaaagataaaatttgccctgaaacgtgtctttgcgtcacaactactctggatttagatctggcccaggatttcccaaaagagggcgtcaaagctgtggggaatggcgctgcagagattagcctgaaaagccctcgcgaactgccttcagcaagtacgtcttgcccctcagatatggacgtcgagatgccaggcttgaatctcgacgccgagaggaaacctgcggaatctgagacaggattgtctctcgaggacagtgattgttatgaaaaggaggcaaaaggagtggaatcaagcgatgtccacccagcccctactgtgcaacagatgagctctcctaaaccggctgaggaacgagctagacagccaagcccattcgtggacgattgtaaaacacgcggtactcccgaggacggcgcttgcgaggggtctcctctagaagaaaaagcgtcccctcctatcgaaactgacctgcagaaccaggcatgccaggaagttctgacccctgagaattcacgttatgtggagatgaagtcgctcgaagtgcgatcaccggagtacaccgaagtagagcttaagcagcccctcagccttccatcttgggagccggaggatgttttctctgaactctcgatccctttgggtgtggagtttgtcgtccccaggactggcttttattgcaaactgtgtggacttttttacacatctgaggagaccgcgaaaatgtcccactgtcgttccgcggttcactacagaaacctacagaaatacctatctcaactggctgaggaaggcctcaaggagactgagggagctgactcaccaagaccggaggacagcgggattgtgcccagatttgagcgaaaaaaactgtag

SEQ ID NO: 239384 - DNA, 3378 bp, synthetic construct
  misc_feature 1..3378: note = Description of Artificial Sequence: Synthetic coding sequence
  source 1..3378: mol_type = other DNA
atggtattggccgcagcgatgtctcaggatgcggatccaagtggcccagaacagccagatagagtggcttgctctgtgcccggagcacgggcttcaccagctccctctgggccaaggggaatgcaacagccccctcctcctccacagccaccaccgccaccacaggctggcctgccccaaatcatccagaacgccgctaagctgctggacaagaatcccttctccgtttctaacccaaaccccctgttaccgagccccgctagcctgcagctggcacagcttcaggcccaactgaccctgcatagactaaaactcgcccaaacagccgttacaaacaacactgcagcggcaacagtactgaaccaggtgctctccaaagtggcgatgtcccagcccctgttcaaccaactccgacacccttcagtgataacagggcctcacggtcatgccggtgtgccccagcatgcggcagccataccgtctactcgatttcctagtaacgcaatagctttttcaccccctagccaaaccagaggccctggtccctcgatgaacctgccaaatcagcctcccagcgccatggttatgcaccctttcactggagtgatgcctcagacccctggacagccggcagtcatcctggggatcgggaagacaggtcctgcgcctgcaacagcaggcttttatgaatacggaaaagcctcttccggacaaacttatggacctgagaccgatggtcagcctggctttcttcctagcagcgctagcacaagtggttccgtgacgtacgaagggcattactcgcacacgggtcaggacggtcaggccgcattctcaaaagacttttatggacccaactcacagggatctcatgttgcctcaggattccctgccgaacaagctggcggactgaaatctgaagtgggacccctccttcaaggcaccaactcccagtgggaaagcccacacggcttcagtggtcagagcaagcccgacctgaccgcaggcccaatgtggcctcctccacacaatcaaccctacgagttatatgatccagaagaaccaacatctgatcggactcccccatctttcggcggaagattaaataatagtaagcaaggattcatcggtgccggtcgcagagccaaagaagatcaggccctgctgtctgtacgccctctgcaagctcacgagctgaatgacttccatggagtggccccactacacttaccacatatctgttcaatttgcgacaaaaaagtgttcgacctcaaagactgggaactgcacgtgaagggcaaactgcacgcacaaaagtgtctcgtgttctccgagaacgcgggaatcaggtgtattttggggagcgcagaagggacgttatgtgcaagcccaaattctacagcagtttacaatccagccggaaatgaggactacgcctccaacctgggtacctcttacgttcctattcccgcacgctcctttacgcagagctctcccacgtttcccctggccagtgttggcaccacgttcgcccagcggaaaggtgccggaagagtcgtccacatctgtaacctgcccgaaggttcgtgcaccgaaaatgacgttatcaatctaggcttgccttttgggaaggttacgaattatatcttgatgaagagtaccaatcaggcattcctagaaatggcctatacggaggctgctcaagccatggtgcagtactatcaggaaaaaagcgctgtgatcaacggcgaaaaactcctaattcgcatgtctaagcggtacaaggagcttcagctgaaaaagcccggaaaggccgtggcagcgataattcaagacattcattcccaaagggaaagggatatgttccgggaggccgacagatatggcccagagaggccacgcagtcggagtccagtgtctcgttctctaagccccagatcacatacacccagtttcacctcctgttcctctagtcatagtccacctggtccatctagggctgactgggggaatggccgagactcctgggaacatagcccttacgccaggcgtgaggaagaacgagaccctgcaccctggcgcgataatggcgatgataaacgtgataggatggacccatgggctcacgaccggaaacatcaccctaggcagttggataaggccgagctggatgaacggccagaaggcggaaggccacatcgtgagaagtacccccgtagtgggtcacctaacttgccacactccgtaagctcctacaaaagccgggaggacggatactacaggaaggaaccgaaggccaagtgggacaaatacctcaagcagcagcaggacgctcctggacggagtcgccgtaaggatgaagcacgccttagggagagtcggcacccacaccctgatgacagtgggaaggaggacgggttaggtcccaaagtgaccagagccccagaaggtgctaaagccaagcaaaacgaaaagaataagaccaaacgtaccgaccgggatcaagagggcgcagatgaccggaaggaaaacactatggctgaaaatgaggctgggaaggaagaacaagagggcatggaggagagcccccagagtgtcggcagacaggagaaggaggccgagttctcagaccctgagaacacacgaactaaaaaagagcaggactgggagagtgaaagcgaggcagaaggggagtcatggtaccccacaaacatggaggaactggtgactgtggatgaggtgggagaggaggaggacttcatcgtcgagccagacatccccgaactggaggaaatcgtgccaatcgaccagaaagacaagatttgccccgaaacgtgcctttgcgtcaccacaacattagacctggatctggcacaggatttcccaaaagagggggtcaaggctgttggcaacggggcagctgagatttccctgaaatccccccgagaactgccgagcgcctccacgagttgtccatccgacatggatgtggaaatgcccggactgaacctggacgcagagcgcaaaccagccgaatcggagaccggtctgtctctcgaagatagtgattgctacgagaaggaggctaagggggtggaatcgtccgatgtgcacccagcccctacagtgcagcagatgtctagcccaaagccagccgaggagagagccaggcagccctctccgttcgtggatgactgcaagacccgagggacccccgaggatggcgcttgcgaggggagcccgcttgaagaaaaggcttctccacccatcgaaaccgacctgcagaaccaagcctgtcaggggtcagactctgatacacgcctggtatcggggtattcactgactcctcttgagaagacacccggaacgtggaaatag

SEQ ID NO: 239385 - DNA, 1263 bp, synthetic construct
  misc_feature 1..1263: note = Description of Artificial Sequence: Synthetic coding sequence
  source 1..1263: mol_type = other DNA
atggcgacatccctaggctcgaacacttacaacaggcagaactgggaggacgctgacttccccatcctgtgtcagacttgcctgggtgagaacccgtacatccggatgactaaagagaagtacggcaaggagtgtaagatttgcgccaggccctttactgtgtttcggtggtgccctggcgttcgaatgcggtttaagaagaccgaggtttgccaaacctgcagtaagctaaagaacgtttgccagacttgtctgctggacctggagtatggtctacctatccaggtacgggacgcaggccttagtttcaaggatgacatgcccaagtccgatgtcaacaaagagtattacacgcaaaatatggaacgcgagatttctaactcagacgggacacgaccagttgggatgctgggaaaagctactagcaccagcgatatgctgctgaaattagcccgaacgacgccatactacaagcgaaatagacctcacatttgcagcttctgggtcaagggcgagtgtaagagaggcgaagaatgtccttatcgtcacgaaaagccgactgatcccgatgatccattggcagatcagaacatcaaagataggtactacgggattaacgatccagtggccgataagctgcttaagagggcttcaacgatgccaaggcttgacccacccgaggataaaacaattactacgctttatgttggaggcttaggagacacaattaccgagaccgatctgcgcaatcatttctaccagttcggcgagattcggaccataaccgtcgttcagcgacagcagtgtgccttcatccagtttgccacacgacaagcagctgaggttgcagccgagaaatcctttaacaagctcattgtaaatggcaggagattgaacgtgaagtggggacgaagtcaggctgcgagaggaaaggaaaaggaaaaagacggaaccaccgatagtggtattaaactcgaacccgtgccaggattgcctggagcactaccaccccctccagccgcagaggaggaagcttctgcgaactacttcaatctgccaccttccggacctcctgctgtggtgaacatcgcccttccacctccacccggaattgcacctcctccacccccagggtttgggcctcacatgttccatccgatgggacctccaccaccgttcatgcgggctcccggacccattcactatccgtctcaggatccccagcggatgggagcgcatgctggtaagcactcttctccttag

SEQ ID NO: 239386 - DNA, 1116 bp, synthetic construct
  misc_feature 1..1116: note = Description of Artificial Sequence: Synthetic coding sequence
  source 1..1116: mol_type = other DNA
atggccacctcactgggcagcaacacctataacaggcagaattgggaagacgccgatttccccattttatgccagacttgcctcggcgaaaatccgtacatccggatgacgaaagaaaagtacggccttcctatccaagtaagggatgcaggtctgtctttcaaagacgatatgcctaagtcggacgtaaataaggaatactacacccagaacatggagagagagattagcaacagcgatggaaccaggccggtcggcatgctcggcaaggcaacatctacctcagacatgctgttaaagctggcccgaacgacgccctattacaaaaggaatagaccacacatttgcagtttttgggtgaaaggtgaatgcaagcgcggagaggagtgcccctatcggcatgaaaaaccgacagaccccgatgatccccttgccgatcaaaacataaaggaccggtactatgggataaatgatcccgtcgctgataaactgttgaagcgtgcctctaccatgccgaggctggatccaccagaggataagacgatcacaacactgtacgtggggggactgggcgatactattactgaaaccgacctacggaaccacttttatcagttcggagagatccggaccatcacggttgtccagcgccagcagtgcgcttttatccagttcgctacaagacaagcagcagaggtagccgcagagaagtcattcaacaaactaatcgttaatggcagacgcctgaatgtgaagtggggacgcagccaggccgctagggggaaagaaaaagagaaagacgggaccactgactcaggaattaaattagagccagtgccgggacttcccggtgctctccccccaccccctgcagccgaagaggaggcaagtgcaaattacttcaatttaccaccatctggtcctccagcagtcgtgaatatcgccctgcccccaccacccggaattgctcccccaccaccccctggattcggcccacatatgttccatcccatgggaccgccaccccctttcatgcgtgctcccggacccattcattatccaagccaggatccccaacgcatgggcgctcacgctggcaaacacagcagcccctag

SEQ ID NO: 239387 - DNA, 1116 bp, synthetic construct
  misc_feature 1..1116: note = Description of Artificial Sequence: Synthetic coding sequence
  source 1..1116: mol_type = other DNA
atggccacttcattggggtctaacacctacaaccgtcagaactgggaggatgccgattttcctatcttgtgccaaacttgcctgggtgaaaacccttatatcaggatggaacgagagaagagcggcctgccaatccaggtgagagacgcaggactgagctttaaggacgacatgccaaagtctgatgtgaacaaagaatattacacccagaatatggagcgagagataagtaattctgatggcacaagaccggtcggaatgttaggaaaagcaacttcaactagcgacatgcttctgaaactagctcggactactccatactacaagcgcaaccgcccacatatttgtagtttctgggtgaaaggggaatgcaagcgtggcgaggaatgtccctatcgacacgagaagccaactgatcccgatgatcccctggccgatcagaatattaaggatcgctactatggtataaacgatccagttgctgacaaactcctgaagcgcgcatcaacaatgccgcgattggatcctcccgaagataagaccatcactaccctgtacgtcggcggactcggggataccatcaccgaaacagacctgcggaaccatttttaccagtttggcgagatcagaaccattacagttgtacagaggcagcagtgcgccttcattcaatttgccacgaggcaggccgctgaagtggccgctgagaaatcttttaacaagttaattgtgaacggacgtcgtctcaatgtgaagtggggcagatcacaggccgctcgcggaaaggaaaaggaaaaagacggtacaacagactcaggaattaaacttgaacctgtgccgggactgccaggcgctctcccacccccaccagctgcggaggaggaagctagcgccaattatttcaatctccctccttctgggccacccgcagtcgtcaacatcgccctgccaccgcctccagggattgcccctccaccccctcctggcttcgggcctcatatgtttcatcccatggggccaccacccccattcatgagagcaccagggcctatccactacccctctcaggatccacaacgcatgggtgctcacgcaggaaagcactctagcccctag

SEQ ID NO: 239388 - DNA, 2532 bp, synthetic construct
  misc_feature 1..2532: note = Description of Artificial Sequence: Synthetic coding sequence
  source 1..2532: mol_type = other DNA
atgagtttccctccacacctgaacaggcctccgatggggatcccagcattaccccctggtatccctccacctcaatttccaggattcccccctccagtaccacccggtaccccgatgatacccgttccaatgtccatcatggctcctgcccctaccgtcctggtgccgaccgtctcaatggtggggaagcacctgggcgcacgaaaagaccaccctggcttaaaagctaaggaaaatgacgaaaactgcggacccacaaccaccgtgttcgtcggcaacatctccgagaaagcttccgacatgctgataagacagctgctggccaaatgcggccttgtgctgtcatggaaaagggtgcagggagcctctgggaagctgcaggcattcgggttttgtgagtataaggaacctgaatccaccctgagggccctgagactgctgcacgatttgcagataggagagaagaagctgctcgtgaaagtggacgcgaagaccaaagctcagctcgacgagtggaaagctaagaagaaggccagcaacggcaacgcacgccctgagacagtgactaacgacgacgaagaggccctggatgaagaaactaagcggagggaccaaatgataaagggcgctatcgaggtgttgatccgggagtattcctctgaactgaatgctcctagccaggaatctgactcgcacccccgtaaaaagaagaaggagaagaaagaagacatcttcagacgttttcctgtcgccccactaattccatatcccctgattactaaagaggacatcaacgctatcgagatggaggaggataagcgagatttgatttcccgcgagatctctaagttcagagatacgcacaagaaactggaggaagagaaaggtaaaaaagagaaggagagacaggaaatcgagaaggaacgacgagaacgagaaagggaaagggagagagaacgggagaggagagaacgtgagcgggaaagagaacgggagcgtgagagggaaaaggagaaggagagggaaagagaaagagagagagatcgggatcgagaccgcaccaaggaaagagatagagacagagatcgggaaagagaccgcgatcgcgaccgtgaaagaagcagtgatcgcaacaaggatagatctcgcagtcgcgagaaatcgcgcgacagagagcgcgaacgagaacgcgagcgggaacgagagcgggaaagggaacgggagcgcgaacgtgagcgcgagagagaacgtgagcgcgagcgagagcgcgaacgggaaaaagacaagaaaagggacagagaggaggacgaggaagatgcctatgaaaggaggaaactggagagaaagctgcgcgaaaaggaggcggcttaccaggagcgtctgaagaattgggagatcagagagaggaaaaaaacccgagaatatgagaaggaagcagaaagggaggaggagaggagacgcgagatggccaaggaggccaaaaggttgaaggaattccttgaagactacgatgatgaccgcgacgacccaaagtattaccggggatccgccctccagaagagactgagggaccgagaaaaagagatggaagctgatgagcgcgatcgaaagagagaaaaggaagagctagaggagattaggcagaggctgctggctgagggtcaccctgaccccgacgcggaactccagaggatggagcaagaggcagagcggagaagacagccgcagattaaacaagagcctgagtcggaggaggaagaggaagagaaacaagagaaggaggagaagcgagaggagcctatggaggaggaggaagagcctgagcaaaaaccctgcctaaaaccaacgttaagacctatcagttccgcgccatccgtgagcagtgcctctggcaacgccaccccaaatacccctggagatgaaagtccctgcggcattattatcccccacgaaaactcccccgatcaacagcagcctgaggagcatcggcctaaaatcgggctcagccttaagttaggagcttcaaattctccaggacagcctaacagcgtgaaacgaaaaaagctgcccgtagattcggtgttcaataagtttgaggatgaggacagcgacgacgtaccacggaaacgcaaattggtgcctctggactatggggaggatgataaaaacgctaccaagggaactgtgaataccgaggaaaagagaaagcacatcaagtccctaattgaaaagattcctaccgccaagccagaactgtttgcatatccactcgactggtcaattgtggatagtatcctgatggagcgaagaatccgcccatggataaacaagaagatcatcgaatatatcggcgaagaggaagctacacttgtcgacttcgtgtgctcaaaggttatggcacattcctctccccagagcattcttgacgacgtggcaatggttttagacgaagaagccgaagtttttattgttaagatgtggcgcctcctgatatatgagaccgaggctaagaaaattggcctggtgaagtag

SEQ ID NO: 239389 - DNA, 384 bp, synthetic construct
  misc_feature 1..384: note = Description of Artificial Sequence: Synthetic coding sequence
  source 1..384: mol_type = other DNA
atgtccttcccacctcacctcaacaggcccccaatgggcatccctgccctgcccccaggtatcccgcctccacagtttcccggttttccacctcctgtgccccctgggactcccatgatcccagtacccatgtccattatggctcccgctcccactgtcctcgtgcccactgtatcgatggtggggaagcatttaggagcaaggaaggatcatccgggtctcaaggctaaggagaatgacgaaaactgcgggccaacaactaccgtgttcgtcgggaacatctccgagaaagcgtccgatatgctgatccgccaactgctggccaagtgcggcttggtgttgagctggaagagagttcaaggggcatctggtaagttacaatag

SEQ ID NO: 239390 - DNA, 903 bp, synthetic construct
  misc_feature 1..903: note = Description of Artificial Sequence: Synthetic coding sequence
  source 1..903: mol_type = other DNA
atgtcatttccccctcacctgaaccgccctcctatgggtattccagccctccccccaggcatccccccaccccaatttcccggattcccgccacccgttccccctgggacccccatgatccccgtgcctatgtcaatcatggcccctgctccgacagtgctggtcccaacagtgtccatggttggcaagcaccttggcgctcggaaggaccaccccggtctgaaggccaaggagaatgatgagaattgcgggccaactacaaccgtcttcgtagggaatatcagcgaaaaagcttctgatatgctgataagacagcttttggcaaaatgcgggttggtgctgagctggaaacgggtccagggggcatcgggcaaactgcaggcctttgggttctgcgagtacaaggagcctgaatccactctccgcgcattacgtctgctgcacgatcttcagatcggtgagaaaaaacttctggtgaaggtagacgccaaaacgaaggcccagcttgacgagtggaaggccaagaaaaaagcttctaatggcaatgcccgaccagaaaccgtcacaaacgatgatgaggaggcccttgacgaggaaacgaagcggagggatcagatgataaaaggggctatcgaagtgcttattagagaatactcctcagaactcaatgctccttcccaggagagcgacagccatccaagaaaaaaaaaaaaggaaaagaaagaagacatattcaggcgctttccagtagcacctttgatcccatatccgctaataaccaaagaagatattaacgccatcgagatggaggaggataaaagggacctgatctcccgtgaaattagcaaatttcgtgacactcacaaggttgtgtttctaagcttccatctcatccctatctag

SEQ ID NO: 239391 - DNA, 885 bp, synthetic construct
  misc_feature 1..885: note = Description of Artificial Sequence: Synthetic coding sequence
  source 1..885: mol_type = other DNA
atgtcattcccacctcacctgaatcggccaccaatggggatcccggcactgcctccgggtatccctcccccacagtttcctggtttccccccaccggtcccacccggaacgcccatgatccctgtccccatgtccataatggcgccagctcccacggtcctcgtccccacagtgtccatggtcggaaagcacctgggcgcacggaaggaccacccgggtctgaaggccaaggagaatgacgaaaattgcggtccgaccactaccgtcttcgtcggcaatatatctgagaaagcctctgatatgttgatccgccagttgctcgcaaagtgtgggcttgtcctttcttggaagagagtacagggggcaagtggtaagctgcaggccttcggcttttgcgaatacaaggagcccgagtccactctgcgtgccctccgactactgcacgacctccagattggggagaagaaacttctggtcaaagtggatgctaaaaccaaagctcaactggatgaatggaaggcgaaaaagaaagcttcaaatggtaatgcacgacccgaaacggttacaaacgacgacgaagaggccctggacgaggagacaaaacgcagagaccaaatgattaagggtgctattgaggtcctgatccgggagtattcttccgaattgaacgccccatctcaggaatcagattcgcaccctcgcaaaaagaagaaagagaaaaaggaagatattttccgacgctttcctgtcgcaccgttgatcccgtatccactcatcaccaaagaggacattaacgcgattgagatggaggaggacaaaagagacctcatttcccgtgaaatcagcaaattccgcgacacccacaaaagatcttatggagattag

SEQ ID NO: 239392 - DNA, 2532 bp, synthetic construct
  misc_feature 1..2532: note = Description of Artificial Sequence: Synthetic coding sequence
  source 1..2532: mol_type = other DNA
atgagcttccctcctcacttaaataggcctcctatggggatccccgcacttccccctggaataccccctccacaattccccggtttccctcctcctgtccccccaggaactccaatgatacccgtgcctatgtctattatggctccagccccaacggtattagtcccaacagtttcaatggtaggcaagcatttaggagctaggaaagaccatcctgggctgaaggctaaggaaaatgatgaaaactgtggccctacaactacggttttcgtcggcaacattagtgagaaggcctcagacatgctgattaggcaactactggccaagtgtggtttggtcctatcctggaaacgtgtccaaggagctagcggcaaactgcaggcattcggcttttgcgaatataaagaacctgaatctacccttcgggcactgcgcctgcttcatgacctgcagattggggaaaagaagttgcttgtgaaggttgacgccaagacaaaggctcagcttgacgaatggaaggccaagaagaaagcctctaatggaaatgcccgtcctgagaccgtgactaacgatgatgaagaagccttggatgaagaaactaagcgcagagatcagatgattaagggcgctattgaggtcctcatccgcgagtacagctccgaattgaacgcccctagtcaggaatcggattcccatcctcgaaaaaaaaagaaggagaagaaggaagatatctttaggagatttccggtcgctccactgatcccctatcccctcatcaccaaggaagatatcaatgccatcgagatggaggaagacaaacgggacctcatttccagagagattagcaaattcagagacacccataagaagctggaggaagaaaagggtaagaaagagaaggagcgccaggaaatcgagaaagaacggagagaaagggagcgagagagggaacgcgaacgcgaacgacgcgagagagagcgagagagagagagggaacgcgaacgagaaaaggagaaggaaagagagcgcgagcgagagcgggacagagatcgggaccgcacgaaggaacgcgacagggatcgcgaccgtgaacgcgacagggatcgggatagggagaggagcagtgaccggaataaggaccgtagtcggagtcgcgagaaatccagggacagggagagagaaagagaaagggaaagagagcgtgaaagagaacgggagagagaaagggaaagagaacgcgaaagagagagagaaagggagagggaaagggaacgtgagaaggacaagaagcgcgaccgcgaggaagacgaggaagacgcttatgaacggcgtaaactggagaggaaactgcgcgagaaagaagccgcataccaagagcgactgaagaattgggaaatacgagaacggaaaaagacacgagaatatgagaaggaagctgagcgcgaggaagagcggcgtcgcgagatggcgaaggaggcgaaacggctcaaggagttcttggaggattacgatgatgatcgggatgacccaaagtattaccgtggcagtgctctccagaagcggctgagggatagggagaaagaaatggaggctgatgaacgggatagaaaaagggagaaggaagagttggaggagatccgacagcgattattggccgagggtcatcccgatcctgatgcagagctgcagcggatggagcaagaggcagagcgacggcgacagccccagataaaacaggagcccgagagcgaggaggaggaggaagaaaagcaggaaaaggaagaaaagcgcgaggaaccgatggaagaagaggaagaacccgagcagaaaccctgtctgaagccaaccttgaggccgatctcgtccgccccatccgtgagctctgcctctggcaacgctacccccaacacccctggcgatgagtctccgtgtgggatcattattccacatgaaaacagccccgatcagcagcagccagaggaacatcgacccaagatcggcctctcactgaaactcggggcatcaaacagtccgggacagcccaacagcgtgaaacgcaagaagctgccggtggacagtgtgtttaataaatttgaagacgaggacagcgacgacgtgcctcggaaaaggaaactggtacctttagactacggtgaagatgataagaatgctacaaaagggacggtgaacacagaagaaaagcgcaaacatatcaaatcattgatcgaaaagatcccaacggccaaacccgagctgttcgcctacccactggactggtcaattgtcgacagtatcttaatggaaagacgcattagaccgtggattaataaaaagattattgaatacataggggaggaagaggcaaccctcgtggatttcgtatgttctaaggtcatggcacatagttcgccacagtccattttagacgatgttgcaatggtcttagatgaggaggccgaggtctttatcgtcaaaatgtggaggctcctgatctacgagactgaggcaaaaaagatcgggctagttaagtag

SEQ ID NO: 239393 - DNA, 732 bp, synthetic construct
  misc_feature 1..732: note = Description of Artificial Sequence: Synthetic coding sequence
  source 1..732: mol_type = other DNA
atgagcttccctcctcatctgaatcgcccaccaatgggcatccctgccctcccgccaggcatcccccctccccagtttccaggattccctccacctgttcctccgggaacacctatgatcccagtgccgatgtcgataatggctcccgctccaacggtgctggtacccactgtcagcatggtaggaaaacatctcggcgcacgtaaggaccaccccggattgaaggctaaagagaacgatgagaactgtggtcctacgaccacagtgtttgttggaaatatctccgagaaagcgtctgacatgctcattaggcagctgctcgccaagtgcgggctggtcctgagctggaagagagtgcagggcgcttccgggaagcttcaggcctttggattctgtgagtacaaggagccagaatcgaccctgcgtgcattaaggttactccacgatttgcagatcggcgaaaagaagctgcttgttaaggtggacgcaaagacaaaggcgcagcttgacgagtggaaggctaaaaaaaaggcctccaacggaaacgctagaccagaaactgtgactaatgatgatgaggaagcgctagacgaggagaccaagcgtcgcgatcagatgattaaaggcgctatcgaagtgctgattcgtgaatactcatcagaactcaacgccccttctcaggagtcagattcacaccccagaaagaaaaaaaaggagaagaaggaggattag

SEQ ID NO: 239394 - DNA, 885 bp, synthetic construct
  misc_feature 1..885: note = Description of Artificial Sequence: Synthetic coding sequence
  source 1..885: mol_type = other DNA
atgagctttcccccacacttgaataggccccctatgggcattccagccctcccaccaggcatcccaccaccccaatttcccggtttccctcccccagtacctccaggaacgccaatgatcccagtgcccatgagcataatggcaccggctccaacggtcctagtcccaaccgtctcgatggtcgggaagcatcttggcgctagaaaggatcaccctggattaaaggccaaagaaaacgacgaaaattgcggcccaaccaccaccgtcttcgtggggaacataagtgagaaggctagcgatatgctaattcgacagctgcttgccaagtgcggcctggttttgagctggaaaagagtgcagggcgcaagcggcaagctgcaggcgtttggattctgtgaatataaggagccagaatcaaccctacgggctctgcggctcctgcacgatctgcagattggagagaaaaagctgctggtgaaagtggacgccaaaacaaaggcccagcttgatgaatggaaggcgaagaaaaaagcctccaatggcaatgcaagaccagagaccgtcaccaacgatgatgaagaggcactagacgaggagactaagcgtcgcgaccagatgatcaaaggagcaatcgaagtccttatccgggaatactctagcgaattaaatgccccttcccaggagtccgactcccacccacggaagaagaagaaagagaagaaggaggatatttttagaaggtttcccgtcgcccctttaatcccatatcctctcatcacaaaagaggacattaacgccattgaaatggaggaggataagagagacctgatatctagagagatctccaagttccgggacactcacaaaagaagctacggcgattag

SEQ ID NO: 239395 - DNA, 1350 bp, synthetic construct
  misc_feature 1..1350: note = Description of Artificial Sequence: Synthetic coding sequence
  source 1..1350: mol_type = other DNA
atgctcccagcagctaccgcctccctcctcggcccattgctgacggcatgcgccctgctacccttcgcacagggccagacccctaattacaccagaccagtgttcctgtgtggcggtgacgtgaagggggaatctggctacgtggccagcgagggctttcccaacctttatccacccaataaagagtgcatatggactatcactgtccccgagggccagaccgtctcccttagctttagggtcttcgatctcgagctccacccagcatgtaggtatgatgctcttgaagtgtttgctggatccggcacatccgggcagcgactgggcaggttttgcgggacattccggcctgccccactcgttgctccagggaaccaggtgaccttgagaatgaccacagacgaaggcaccggcggtagaggcttcttgctgtggtattccggtcgcgcaacatccgggacagaacatcagttctgtgggggacgactcgagaaagcgcagggaaccctgactactcctaactggccagaatcagattacccccctggcatcagctgttcctggcacatcatcgcgccaccggaccaggtgatcgccctgaccttcgagaagtttgacctggaacctgatacctattgccgctatgattcagtctctgtcttcaatggcgctgtatccgatgactctcggaggctcgggaaattttgcggtgatgctgtacccggttccattagctctgaaggaaacgagctgttagtgcagtttgtcagcgacctgagtgtgaccgcagatggctttagcgcctcctataagaccctgccccgtggcacagcaaaggagggtcaaggccctgggcctaagagaggaaccgagccaaaggtgaagctccccccaaagagccaacctcctgagaagactgaagagagcccaagcgctcctgatgctccgacctgtcctaagcaatgccgtaggaccgggacactccagagtaatttctgtgcctcatccttggtggtcacagcgaccgtgaaaagcatggtgcgcgagcctggcgagggcctggcagtcaccgttagcctcatcggagcctacaaaaccggaggcctggatctccctagtcctccaacaggggcatctttgaagttttatgtaccctgcaaacaatgcccacctatgaaaaaaggagtaagctacctcctcatgggccaggtggaagagaatcgcggacctgtgctgccacctgagtctttcgtggtcttacaccgccctaatcaagatcagattttgaccaatctgagcaagcgcaagtgcccttcacagcctgtccgcgctgcggcatcacaggattag

SEQ ID NO: 239396 - DNA, 1857 bp, synthetic construct
  misc_feature 1..1857: note = Description of Artificial Sequence: Synthetic coding sequence
  source 1..1857: mol_type = other DNA
atggctggactgaccctattcgtgggacggctgccaccttccgccaggtccgagcagctggaagaacttttttcacaggtgggcccagtaaaacagtgttttgttgtcaccgagaagggacgtactgttgctgtcgattgggcggtcgccaaggataaatataaggatacccagtcagtgagtgctattggggaggagaagtctcatgagtcaaagcatcaggaaagtgttaagaagaagggtagagaggaagaagatatggaagaagaagagaacgatgatgacgacgatgacgacgacgaggaagacggcgtgttcgacgacgaagacgaagaagaagagaatatcgaatcaaaagtcacaaagccagtccagatacaaaaacgcgcagtgaagaggcctgctccagccaagtcctccgaccattctgaagaagactctgacctggaggaatcagatagtatagatgatggtgaggaactagcccagtcggacacaagcacagaggaacaggaggacaaagccgtccaagtgagcaataaaaagaagcggaagctcccctcagacgttaacgagggcaagacggtgtttatccgtaacctttctttcgattcagaggaggaagagctcggggaactcctgcagcagttcggtgaattaaagtatgtgagaatcgtgctccaccctgataccgaacactccaagggatgcgcattcgctcagtttatgacacaggaagccgctcaaaaatgtcttcttgctgcctctccggagaatgaggccggtggcttaaaattggatggcaggcagctgaaagttgatcttgcggtgacccgagacgaggcagccaagctgcagaccacaaaggttaaaaagccaaccggcaccagaaacctttacctcgcaagagagggtctcattagggcaggtactaaagctgctgaaggagtcagcgccgctgacatggctaagagagaaagatttgaactccttaagcaccagaaactaaaggatcagaatatcttcgtcagtcgtacacggctgtgtctccataacctgccgaaggctgtcgacgataagcagctgaggaagttactgctgagcgccacttcgggagagaaaggggtgcgtatcaaggagtgccgggtgatgcgtgatctgaagggggtgcatggaaatatgaaaggccagagcctgggatatgcctttgccgaattccaggagcacgagcatgcccttaaagccttgagactgattaataacaatccagagatctttggtccactgaaaagaccgatagtggagttctctcttgaggacagacggaaactgaaaatgaaggaactacggatacagaggtccctccagaagatgcgctctaaaccggcaacaggtgagccccagaagggacagccagagcctgccaaggatcagcagcagaaggccgctcaacaccacacagaagagcagagcaaggtgccccctgaacagaaacggaaggcaggatcaacctcctggaccggcttccagacaaaagcggaggttgaacaggtcgagttacctgacggcaagaagaggagaaaggtgctagcacttccgtctcaccggggacccaagatcaggctgcgggacaagggtaaggttaagccagtgcaccctaaaaagcccaagccgcagattaaccagtggaagcaagaaaagcagcagctatcatcggaacaagtttcccggaagaaagctaagggcaacaaaaccgaaacaagatttaaccagctggtcgaacagtataagcagaaactgttggggccatcaaagggggctcctctggctaagcggagtaagtggtttgattcctag

SEQ ID NO: 239397 - DNA, 720 bp, synthetic construct
  misc_feature 1..720: note = Description of Artificial Sequence: Synthetic coding sequence
  source 1..720: mol_type = other DNA
atgcttcttcaacctgcaccatgtgcgccttctgccggattcccacgccctctggcagcaccaggtgcgatgcacggcagtcagaaggacacaacattcaccaagatctttgtgggcggactgccataccacaccacagacgcttcgctcaggaaatacttcgagggattcggagacatcgaggaggctgtggtgataaccgatcgacagaccggtaagtcaagaggttacgggtttgtgaccatggcggatagggccgcagctgagagagcctgtaaggaccctaatcctatcattgacggcagaaaagctaatgtgaacctggcatatctaggagctaagccccgatctttgcagacaggtttcgcaatcggggtgcaacagctgcatcccacactgattcaacgaacatacggcctgaccccacactatatttatcctcctgctatagtacagccaagtgtggtaatccccgcagctcctgtgcctagtctgtccagcccctatatcgagtatacccccgcttccccagcgtacgcacaatacccaccagcaacctatgaccagtatccatacgcagccagccctgccacagccgctagtttcgtcggctactcatatccagccgctgtccctcaggccttgtcggcagcggctcccgcagggacaacatttgtccaataccaggcaccacagctgcagcctgaccgcatgcagtag

SEQ ID NO: 239398 - DNA, 477 bp, synthetic construct
  misc_feature 1..477: note = Description of Artificial Sequence: Synthetic coding sequence
  source 1..477: mol_type = other DNA
atggctgaccgagcagcggcagagcgggcatgcaaggatccgaacccaatcatcgatggcaggaaggcgaatgtgaatctcgcctatttgggcgcaaaacctaggagccttcagaccggatttgccataggagtacaacagctgcacccaaccctcatccagagaacctatggactcactcctcattatatttacccaccagcgatagtgcaaccctctgtggtgatccccgctgcacctgtgccgtcgttgtcctccccttatattgaatatacacccgcatcccctgcctacgctcagtaccccccagccacgtatgaccaatacccatatgccgcatctcccgctaccgccgcttcattcgttgggtattcttatcctgccgctgtaccgcaggccctcagtgctgctgccccagctggaactacattcgtgcagtatcaggccccacaactgcaacccgaccgaatgcagtag

SEQ ID NO: 239399 - DNA, 366 bp, synthetic construct
  misc_feature 1..366: note = Description of Artificial Sequence: Synthetic coding sequence
  source 1..366: mol_type = other DNA
atgctcctgcagccagcaccctgcgccccatctgcagggttcccgagacccctggcggctcccggagctatgcatggaagtcagaaagacactaccttcaccaagatctttgtgggtgggcttccttaccatactaccgacgcatctttgcgaaagtatttcgagggttttggcgatattgaggaagctgtagtgattaccgaccgacagactggaaaatcacgtggatacggatttgttacaatggccgacagagctgccgctgagcgcgcttgtaaagatcctaaccctatcatcgacggccgaaaggcaaacgttaacctggcttatctcggcgctaaaccaaggagtctgcaaacaggctag

SEQ ID NO: 239400 - DNA, 1095 bp, synthetic construct
  misc_feature 1..1095: note = Description of Artificial Sequence: Synthetic coding sequence
  source 1..1095: mol_type = other DNA
atggtgaaactcttcattggcaacctcccaagagaagccactgaacaggagatcaggagtcttttcgagcagtatggcaaagtgctggagtgcgacatcattaaaaactacggttttgtgcacatagaagataagaccgctgctgaggatgcaatcaggaacttgcaccattacaagctccatggggtgaatataaacgtggaagcaagtaaaaacaagagtaagacatctacaaagctccacgtggggaatatttcacccacgtgcacaaataaggaattacgggctaagtttgaggagtacggtccagttattgagtgcgacattgtgaaagattatgccttcgtgcacatggagcgcgctgaggacgcggtggaggccattcgcggactagataacacagagtttcagggcaaaaggatgcacgtccaactttctaccagcagactgagaaccgcacccggaatgggggaccagtccgggtgctacaggtgtggcaaggagggccactggtctaaggagtgtcctatcgacaggtcaggaagagtggcggatttaaccgaacagtataacgagcagtatggggcagtacggacaccatacacaatgtcctacggtgactctctttactataataatgcctatggagctctggacgcctactacaaaaggtgccgcgctgctaggtcatacgaggcagtggccgctgccgcagcgtcagtttacaactatgctgagcagaccctgagtcagctcccgcaagtgcagaatacagcgatggctagtcatctgacgagtacgagtctcgatccctacgataggcacctactgccaacctcgggggcagcggcaacagccgcagccgcagccgcagcagctgccgcagtgacagctgccagtacatcgtattatggtcgggacagatctcctcttcggagggccactgcgcctgtgcccaccgtgggtgagggctacggctatggtcacgaatcagaactgagccaggcctctgcagcagctcgtaacagcttgtacgatatggcaaggtatgagcgtgagcagtacgctgatcgggcacggtactctgcgttctag

SEQ ID NO: 239401 - DNA, 1095 bp, synthetic construct
  misc_feature 1..1095: note = Description of Artificial Sequence: Synthetic coding sequence
  source 1..1095: mol_type = other DNA
atggtcaaattattcatcgggaacctaccgagagaagccactgaacaggagatacggagcctatttgagcagtatggaaaggttcttgagtgtgacattattaagaattatggattcgtgcacatcgaggataagaccgctgcagaggacgcaattcggaatcttcatcattacaaactacacggcgttaacattaatgtcgaagcttccaaaaacaagagcaagacatctaccaaactgcatgtaggcaatataagcccaacgtgtaccaataaagagttgcgtgccaagttcgaggagtatggaccggtgatcgagtgcgacattgttaaggactatgccttcgtgcacatggaacgtgccgaagacgccgtcgaagctatcaggggactggataacaccgaatttcagggcaaacggatgcatgtccaactctctacatcaaggctgagaacggcacccggtatgggtgaccaatccgggtgttatagatgtgggaaggaaggccattggtctaaggaatgtcccattgatcgaagcggcagggtggctgacctgacagagcagtacaacgaacagtatggagcagtcaggaccccgtacactatgtcttacggcgattctctgtactacaacaacgcgtatggggcattagacgcctattataagcgctgtagggctgctcgcagctacgaagctgttgctgctgccgctgcatcagtttataattacgctgaacagacactgagccaactcccccaggtgcagaacaccgccatggcaagccatctcacctccaccagtctcgacccctatgatcggcatctgctgcccacctctggcgcagcagccaccgctgccgcagccgctgccgctgcagccgctgtaacagccgcttccacgtcgtattacggcagagatagatcgcccctgagaagagccacagctcccgtacccactgtgggcgaagggtatggttacggccatgagagtgagctcagtcaggcctcagcagctgctaggaactcgctgtacgacatggcccgttacgagcgcgaacagtacgctgaccgggctagatattctgccttctag

SEQ ID NO: 239402 - DNA, 1095 bp, synthetic construct
  misc_feature 1..1095: note = Description of Artificial Sequence: Synthetic coding sequence
  source 1..1095: mol_type = other DNA
atggtgaagctgttcatcggcaatctgcctcgagaggcgactgaacaggaaatccggagcctcttcgagcaatacggcaaagtactcgagtgcgacatcattaagaattatgggtttgtacatatcgaagataaaactgccgctgaggacgctatcagaaatttacatcattacaagctgcacggggtgaacattaacgtggaggcctcgaagaataagtctaaaacctccaccaaactgcatgtgggaaacatctctccaacgtgcaccaacaaagaactgagagccaagtttgaagaatacggacctgtcattgaatgcgacatcgtgaaagactatgcttttgtccatatggaaagagcggaggacgccgtagaggctatccgcggactggacaatacagagtttcagggcaaacggatgcacgttcagctctcgacttcgcgtttacgaacggcgccaggtatgggtgatcaaagtggctgctaccgctgtggaaaggaaggtcattggtctaaggaatgccccatcgaccgcagcggcagagttgccgatctcacagagcagtataatgaacagtacggagccgtgcgcaccccgtacaccatgagctatggggatagtctctactacaacaatgcctacggagctctggacgcttattataaacgatgcagggcggcaaggagctacgaggcggttgctgctgccgctgctagtgtctataactatgccgaacagaccctgtcacagctaccccaagtccaaaacaccgccatggctagccacttgacatccacctccctcgatccctacgacaggcacctcctgcccaccagtggggctgccgcaaccgcagctgctgcagccgctgcggctgccgcagttactgctgctagtacatcctactatgggagagatcggtctcctcttcggagagccactgctcccgtgcccactgtcggcgagggatacggctatggccacgagtctgagttgtcgcaggcctccgccgctgcaaggaactcactctatgacatggccaggtatgaaagagaacaatatgcagatcgcgcacgatactccgctttctag

SEQ ID NO: 239403 - DNA, 534 bp, synthetic construct
  misc_feature 1..534: note = Description of Artificial Sequence: Synthetic coding sequence
  source 1..534: mol_type = other DNA
atggtcaaactgttcatcgggaatctaccacgggaagcaaccgagcaggagatccgatcactcttcgaacaatacggcaaagttctcgagtgcgatatcatcaagaattacgggttcgtgcatattgaagataaaacagccgctgaggacgcgattcgaaacctgcaccattataaactacatggcgtgaatattaacgtcgaagcttccaagaataaaagcaagactagcaccaagcttcacgttggaaatataagccccacatgcactaacaaagaactgagggctaaatttgaggaatatggcccagtcattgaatgcgacatagtcaaggattatgccttcgtgcacatggagcgtgctgaggatgctgtcgaggccattcggggactggacaataccgaattccagggtgaaccccctagtctgggcagaggcttaaacacacgactttgtgctgaaaacgggtggatttcaaagcggcgtgggctagtgaaaatcacagccgtggggtggctggtgatgaagaagtag

SEQ ID NO: 239404 - DNA, 534 bp, synthetic construct
  misc_feature 1..534: note = Description of Artificial Sequence: Synthetic coding sequence
  source 1..534: mol_type = other DNA
atggtgaagctgtttatcggaaaccttccccgtgaggcgaccgagcaggaaattcggtctctatttgagcagtatgggaaggtattggagtgcgatatcattaagaattacggtttcgtccacatcgaggataagaccgcagccgaggacgcgatccgaaaccttcaccattataaactgcacggggtcaacattaacgtggaagccagcaagaataagagcaaaacaagtacaaagcttcatgtgggcaacatctcacctacatgcacaaataaggagctccgcgctaagttcgaagaatatgggccagtcattgaatgtgacattgtcaaggactacgcgtttgtgcatatggaacgcgctgaggatgcagtggaggccatacgaggactggacaataccgagtttcagggggaacccccttcgcttgggagaggattgaatactcgtctgtgtgcagaaaatggatggatcagcaagcggcgtggccttgtgaagatcaccgctgtcggctggctcgtgatgaaaaagtag

SEQ ID NO: 239405 - DNA, 522 bp, synthetic construct
  misc_feature 1..522: note = Description of Artificial Sequence: Synthetic coding sequence
  source 1..522: mol_type = other DNA
atggtgaagctgtttatcgggaatcttccgagggaagcaacagaacaggagatcaggtccctttttgagcaatacggcaaggtactggagtgcgatataattaagaactacggctttgtccacattgaagataaaacagctgccgaagacgcgatccggaaccttcatcactataaacttcacggggtgaacattaatgtggaggcttccaagaacaagtctaagactagtaccaaactgcacgtagggaatatttctcctacgtgtacgaacaaagaactgcgcgctaaattcgaggaatatggacctgtgattgaatgtgatatagtgaaagactacgccttcgttcatatggaacgggctgaggatgctgtggaggctatcaggggcttggacaataccgaattccaaggcaagattacacccgtgacagaaggctattgctgctgcaacaaaggccatacatatattttcaagaattgcaacttgatactggaatctaggaagtctcgccgatgttag

SEQ ID NO: 239406 - DNA, 432 bp, synthetic construct
  misc_feature 1..432: note = Description of Artificial Sequence: Synthetic coding sequence
  source 1..432: mol_type = other DNA
atggtgaaattattcattggtaacttgccgcgtgaagccacagagcaggagatacgctcacttttcgaacagtacggtaaagtgctggaatgcgatattattaagaattacgggttcgtgcatattgaagataaaactgcggctgaagatgccattcggaacctccatcattataaactgcatggcgtcaacataaatgtagaggcttccaagaataagtccaagacgagtaccaaactgcacgtaggtaatatttccccaacatgcaccaacaaggaactgagagcaaaatttgaggaatacgggccagtaattgagtgcgatatcgtgaaggactacgcgttcgtgcacatggaaagggccgaggatgctgtggaagcaattagggggctggacaataccgagttccagggaggcatgtgcgtagggtag

SEQ ID NO: 239407 - DNA, 1443 bp, synthetic construct
  misc_feature 1..1443: note = Description of Artificial Sequence: Synthetic coding sequence
  source 1..1443: mol_type = other DNA
atggctggtgctgggcctgccccagggctacctggcgctggcggacctgtcgtccctggcccaggcgctggaatacctgggaagtctggcgaggagcgcctcaaggagatggaagcagagatggctttgttcgagcaggaagtcctgggcgctcctgttcctggcattccaacagctgtgcccgcagttcccacagtccctactgtccctactgtagaagccatgcaggtcccggctgctccggttatcaggccgatcatcgccactaacacctaccagcaagtgcagcaaaccctggaagctcgcgcagcagcagctgcaacagtggtccccccaatggtcggcggtcctccttttgtaggaccagtgggattcggaccgggtgacaggagtcaccttgatagcccggaggcacgggaggcaatgtttctacggagagctgctgtggctccccagagagctcccatcctcaggcctgccttcgtgcctcacgttctacagcgagcagattcggctttgtccagtgcggcagcgggaccaaggcctatggcactgaggccgcctcaccaagcgctggtcggaccacccctcccaggacctcctggtccacccatgatgcttcctccaatggctcgggcacctgggccaccgctggggtcaatggcagcgctgcggcctcccctggaagagccagccgcaccacgagagttagggctcggtttagggctcggcctgaaggaaaaggaagaggctgtggtggccgcagccgctggactggaggaagcatcagccgcagtcgcagtgggggcagggggtgccccagccggacctgcagtgattgggcctagcctacctctagctctggccatgccattacctgagccagagccgctacctctcccactagaagtcgtacgcggactgctgcccccactccgcattcctgagctgctgtcgctgaggcccagaccccgaccaccacggcctgagcctccccctggactgatggctctggaagtaccagagcctctgggagaggacaagaaaaaggggaaacctgagaaactgaaacgatgtatccgcacagcagcgggatcttcttgggaagacccttcattgttggagtgggacgcagacgactttcgcatcttctgtggggacctgggaaatgaggtgaatgacgatatcctggctagggccttcagcagattcccttcttttttgaaagcaaaggtgattcgggataagaggacgggtaaaaccaagggttatggcttcgtcagctttaaagatccttccgactacgttcgcgctatgagagaaatgaatggtaagtacgtcggaagtcgaccgatcaagttacggaagagcatgtggaaggatcgcaacttagacgttgtgaggaagaaacagaaggagaaaaagaagttggggctccgttag

SEQ ID NO: 239408 - DNA, 1356 bp, synthetic construct
  misc_feature 1..1356: note = Description of Artificial Sequence: Synthetic coding sequence
  source 1..1356: mol_type = other DNA
atggcaggagctggacctgccccaggcttgcctggtgccggtggtccagtggtgcctggtccaggggctggaataccaggaaaaagcggagaggagcgcttaaaagagatggaggcggagatggccttgttcgagcaggaagttcttggtgctcctgtgcctggcattccgacagccgtgcccgcagtgcccaccgttcctaccgtacccacggttgaggccatgcaagtccccgcagcgcctgtgatccgacctatcatcgctaccaacacctaccagcaggtccaacagacactggaggcacgcgcagctgctgccgcaacggtagtcccacccatggtgggtggcccaccgtttgtcggtcccgttgggtttgggcctggggacaggtctcacttggatagccctgaggccagggaggctatgtttttaaggcgcgctgccgctgggcctcgccctatggccttgcgcccaccacaccaggctctggttggacccccactgcccggaccccctggcccacccatgatgctccctcctatggcaagggccccagggcctccacttgggagcatggccgctctgcgcccacccctggaagaaccagcggctccaagggagctgggcctgggcctgggactggggttgaaggaaaaggaagaggccgtcgtagccgcagccgctgggctggaggaggccagcgctgccgtggccgtgggcgctggcggagcccctgccggtccagcggtgatcggcccatcccttcctttggccctggccatgccattgcccgagccggagcctctgccactgccactggaagtcgtacgcggtctgctgccacctttgaggatccccgaactactgtctctacggccaaggcctaggccacccagaccagagccacccccagggctcatggccctagaggtccccgaaccattgggcgaggataagaagaagggtaagcccgagaagctgaagcgctgtattcgcaccgctgccggttcatcgtgggaggatccgtctctcctggaatgggacgccgatgactttagaattttctgtggtgacttggggaatgaagtgaatgacgatatcctggctagagctttttcccgattcccaagctttctgaaagcgaaggtgatccgcgacaaacggaccgggaagaccaaagggtatggttttgtcagctttaaggacccaagtgattatgttcgagcaatgcgggaaatgaatggcaaatatgtggggtctcgcccaattaaactcagaaaaagtatgtggaaggacagaaacctagacgtcgtccggaagaagcagaaggagaagaagaaactgggactgcgctag

SEQ ID NO: 239409 - DNA, 801 bp, synthetic construct
  misc_feature 1..801: note = Description of Artificial Sequence: Synthetic coding sequence
  source 1..801: mol_type = other DNA
atgggggctgccgctgctgaggcagaccgaaccctgttcgtgggcaacctggaaacaaaagtgaccgaagaactcctattcgaactttttcatcaggccggtcctgtcatcaaggtgaagattccaaaggataaggacggaaagcccaagcagttcgcattcgtcaattttaaacatgaagtcagtgttccttacgccatgaaccttctgaacggaatcaaactgtatggtcgtccaatcaagattcagtttaggagcggctcctctcacgcacctcaagatgtgtcactgtcttatccgcagcatcatgtgggcaattcaagtccaacttccacctctccgagtagatatgagcggaccatggataatatgaccagctctgcacagatcattcagagaagttttagctcccctgaaaacttccagcggcaggctgtcatgaactcagcacttcgacagatgtcctatgggggaaagttcggttcttcacctctggatcagagtggtttttcaccttccgtgcaaagccacagtcactcctttaatcagtccagcagttcacaatggaggcaagggacaccaagtagtcaacgcaaggttagaatgaactcctatccctacctcgcagatcgccactatagcagagaacagcgatacactgaccatgggagcgaccaccattatcgaggcaaaagggacgattttttctacgaggaccgcaaccacgatgactggagccatgattacgataaccggagggactcgagcagggatgggaaatggagatccagtcgccattag

SEQ ID NO: 239410 - DNA, 525 bp, synthetic construct
  misc_feature 1..525: note = Description of Artificial Sequence: Synthetic coding sequence
  source 1..525: mol_type = other DNA
atggccgacgtgctggacctccacgaggcagggggtgaagacttcgctatggatgaagacggggatgagtcgatccacaagttaaaggaaaaagcgaaaaaacggaaggggaggggcttcggcagcgaagagggaagtcgagccagaatgagggaggattatgactcagtcgaacaggacggagatgagcccggaccgcaacgcagcgtggaaggatggatcctcttcgtaacaggcgtgcacgaagaggccactgaagaggacatccacgacaagttcgctgaatatggggagataaagaatattcaccttaacctggatagaaggacaggctaccttaaaggttatactctggtagaatacgagacctacaaggaggctcaagccgctatggaggggcttaatggccaggacctgatgggacagccaataagcgttgactggtgttttgtgcggggaccgccaaaagggaagaggcggggtgggaggcggagatcaaggtctccggacaggaggcggagatag

SEQ ID NO: 239411 - DNA, 522 bp, synthetic construct
  misc_feature 1..522: note = Description of Artificial Sequence: Synthetic coding sequence
  source 1..522: mol_type = other DNA
atggcagacgtacttgatttacacgaggccggtggagaagattttgctatggacgaagacggagacgaaagcattcataagctgaaggagaaggcgaagaagagaaagggacgcggtttcgggtctgagggctcaagggctagaatgcgtgaggactacgacagtgtggagcaggacggcgacgaacctggaccgcaaaggtcagtagaggggtggatattgtttgtcactggtgtgcatgaggaagcaacagaggaggacatacacgataagtttgccgagtacggtgagatcaaaaacatacacttaaatctggacaggcggacaggttatttaaaggggtacactcttgtcgaatatgagacatacaaggaggcacaggcggcaatggaagggctaaatggacaggacctcatgggccaacccattagtgttgactggtgcttcgttaggggacctccaaagggcaaacggaggggcggacgcagaaggtcccgcagtccagaccggagacgacggtag

SEQ ID NO: 239412 - DNA, 1179 bp, synthetic construct
  misc_feature 1..1179: note = Description of Artificial Sequence: Synthetic coding sequence
  source 1..1179: mol_type = other DNA
atggtggaggctgatagacccggtaaactctttataggcggacttaacctggagaccgacgaaaaagcgttagaggcggaatttgggaaatacgggcgtattgttgaggtgctgttaatgaaagatagagaaacaaacaagagccggggatttgcgttcgttacctttgagtcaccagcagacgccaaggccgcagcaagggacatgaatgggaagagtctggacggaaaggcaattaaggtcgcacaggctactaaacctgcattcgagagcagccggcgaggtcccccaccccctaggtcacgaggtcggcctaggttcctgcgcggaacgcgcggtggcggtggcggaccacggagatccccaagtcgtggaggacccgatgacgacggtgggtacaccgcagattttgacctgagaccctcgagagcccctatgcccatgaagcggggtccccctccccgtagggtgggaccaccacctaaaagagccgctccctcaggtccggctaggtctagtggcggaggaatgagagggagagccctggcggtgcgcggaagggacggatactctggcccacctaggcgcgagcctctcccccctcgccgtgacccatatctcgggcctagagatgaggggtactctagcagagacggctatagttcgcgcgactatcgggagcccaggggattcgctccatcccctggggagtacacccatcgagactacggccatagttcggttagggacgactgtccactgcgcggatactccgatagagatggatacggcggacgggatagagattatggggatcatctgtctaggggtagccatcgtgagcccttcgaatcctatggcgagctgcgcggtgccgctccaggtagagggacacctcccagctatggtggcggtggaaggtacgaagaatatagaggatactcacccgacgcatactctggtggaagagattcctactcctcgagctacggcaggtctgatcgatattcccgcggtcgccacagggtgggtcgaccagaccggggactatcactatccatggagcgtgggtgccctccacaacgggatagctacagccgcagtggatgccgcgttccacgaggcggtggacgattgggaggccgtttagagcggggtggtggacggagccgttattag

SEQ ID NO: 239413 - DNA, 1491 bp, synthetic construct
  misc_feature 1..1491: note = Description of Artificial Sequence: Synthetic coding sequence
  source 1..1491: mol_type = other DNA
atggtggaggccgaccatccgggaaaattgttcattggcggtctgaacagggagaccaatgaaaagatgttaaaagccgtctttggcaaacatggcccaatttcagaggtgctccttatcaaagaccgtacctccaaatcccgcggatttgcctttattaccttcgaaaacccagctgacgcaaaaaacgcagccaaagacatgaacggcaagtcactgcacggaaaggcaattaaggtagagcaggccaagaagccatcatttcagtcaggcggacgaaggagaccacccgcttcatcaagaaataggagtcctagtggcagcctacggagtgctcgcggaagcaggggcggaactaggggctggctaccctcccatgagggacatctggatgatggaggctatacaccggatttgaagatgtcctattctagagggttgatccccgtaaaacggggaccttcctccagatcaggaggcccaccacctaaaaagtcggcaccgtccgctgttgcgagaagcaattcctggatggggtctcagggaccaatgtcccaacgcagggagaattatggcgtgccacctcggagagccacaatctcttcatggcgtaacgatcgcatgtctacacgtcacgacgggtatgctactaacgacggaaatcacccttcttgccaggagacgagggattatgctcctccgtctagaggctatgcctatcgcgataacgggcacagcaatcgcgatgagcactccagtcgcggttatcgtaaccacaggtccagtagggagacgcgagactacgctccgcctagcaggggccacgcctaccgggactatggtcactcaagacgcgacgaatcatactcacggggttaccgtaatcgccgtagttcacgggagacacgggagtacgccccaccctcgaggggccatggataccgcgactacggccatagccggagacacgagtcttactcccgcggataccgaaatcacccatcatctcgggaaactcgcgattacgccccaccccaccgcgactatgcctatagggattacggtcactcttcctgggatgaacatagcagccggggttactcataccatgatggctacggtgaagccctggggagggaccactcagagcacctaagcggaagcagctaccgcgatgccctgcagagatatgggacttctcacggcgcaccccctgcaagaggtccacggatgagctatgggggaagcacttgccatgcatatagcaacacaagggatcgatatggacgctcgtgggagagttattcttcatgcggggattttcattattgtgaccgcgagcacgtctgtagaaaagatcaaagaaacccgccaagtctgggcagggtcctaccagatccaagagaagcttgcggcagcagttcttacgtggcctctatcgtggatggcggagagtcccggtccgaaaagggcgatagctccagatattag

SEQ ID NO: 239414 - DNA, 1491 bp, synthetic construct
  misc_feature 1..1491: note = Description of Artificial Sequence: Synthetic coding sequence
  source 1..1491: mol_type = other DNA
atggtcgaggcggatcatccaggcaaattgtttataggcggtctaaaccgcgaaacaaacgaaaagatgctgaaggccgtgtttggcaaacacggaccaatttctgaagtgctgctcataaaagacaggacgagtaaatcccgaggcttcgctttcataactttcgagaatccagctgacgctaaaaatgccgctaaggatatgaatggcaagtccctgcacggtaaggctattaaggtcgagcaggccaagaaaccctctttccaatcaggcggtcgaagacgacctccggctagttctcgtaatcgttccccatctgggagtctccggagcgcgagagggagcagaggcggaacacggggatggctcccgtcccacgagggacacctggatgatggcggatacacgcccgacctgaaaatgagttattcgagaggcttaataccagtgaagcggggaccctcaagcaggagcggagggcctcccccaaaaaagtcagcaccaagcgctgtggctagatcgaattcctggatggggtcacaggggcctatgtcacagcggagggaaaattacggtgtccccccaagacgcgctaccatcagcagctggcgcaacgatcgaatgagtactcgccatgatggctatgccaccaatgatggcaaccatcccagctgtcaggagacccgggattatgctccaccatctcggggttacgcctacagagacaacggacattcaaacagagacgaacacagcagccgcggttatagaaaccaccgaagctcacgcgaaaccagggactatgcacccccaagtaggggccacgcctaccgtgactatggccattctcggagagacgagtcctactcccgcggttacaggaaccggaggagtagccgggagaccagggagtacgcccctcctagccggggacatgggtacagagattacggccactcaagaaggcatgaatcctatagccggggatatagaaatcacccctctagtcgggagactcgagattatgcccctccgcatagggactatgcatatcgagattacgggcatagttcctgggacgaacacagttccagagggtattcttatcacgatggatatggcgaggcgctcggcagagaccactccgagcacctctctggatcctcttatcgagatgcactgcagcggtatggaacatctcacggtgcccctcctgcgcgtgggccacgtatgagctatggtggctctacgtgccacgcctacagcaatactcgtgatcgatatggcaggtcttgggaatcgtactccagctgcggggacttccattattgcgaccgggagcatgtctgtcgtaaagatcagaggaacccaccatccttgggacgagtgctccctgatccgagagaggcttgcgggtcctccagctacgtggctagcatcgtcgacggtggtgagtctcggtccgagaagggcgactcctcacgatactag

SEQ ID NO: 239415 - DNA, 870 bp, synthetic construct
  misc_feature 1..870: note = Description of Artificial Sequence: Synthetic coding sequence
  source 1..870: mol_type = other DNA
atgagcaccagacacgatggatacgccactaacgacggcaaccatccatcctgccaggagactagggactatgccccaccatcgagaggatatgcctacagggataatgggcacagcaatagggatgagcatagcagtcggggatatcgcaaccaccgttcttcaagagaaaccagggattacgcacccccttcgagaggccatgcctaccgcgattatggtcattccaggcgagacgaatcttactcacgcggttatcgcaaccgccgaagctctcgagagactagggagtacgcgccaccttctcgtgggcacggataccgtgactacgggcacagtcgccgacacgagagctactcccgcggatatagaaatcacccatcttccagagaaaccagggattacgcacctccccacagggactatgcttatcgcgattatggtcactcctcctgggacgagcactccagccgaggctactcttatcacgatgggtatggagaagccctgggacgggatcacagtgagcacttgtctgggagttcctaccgcgacgccttacagagatacggcacatcccacggcgctcccccagccaggggtccccgtatgtcttacgggggatctacttgtcatgcttattccaacacccgggaccggtacggacgcagctgggaaagctactcctcctgcggcgattttcactactgcgacagagaacacgtgtgtaggaaggatcagcgcaacccccctagccttgggcgtgtcctgccggatcctcgggaggcctgtgggagttcttcttatgtcgcaagtatcgtggacggaggcgaaagcagatccgaaaaaggggactcctcccgatattag

SEQ ID NO: 239416 - DNA, 1266 bp, synthetic construct
  misc_feature 1..1266: note = Description of Artificial Sequence: Synthetic coding sequence
  source 1..1266: mol_type = other DNA
atggggaagaggctcgaccaaccacaaatgtatccgcagtacacctattattatcctcattatctgcagacaaaacaatcctacgctcctgcccctcaccccatggctccacctagcccctccactaatagtagctccaataacagcagtaacaattctagcggggaacaactgtccaaaactaacctatacattcgcggactgccacccggtacaactgaccaggatctgatcaagctgtgccagccgtacggaaagatcgtgtcaacgaaagccattctcgataaaaacacgaaccaatgtaaagggtacgggtttgtggacttcgactctcccgctgccgctcaaaaagccgtggccagtctgaaggctaacggcgtgcaggcccagatggccaaacagcaggaacaagacccaaccaacttgtacatatcaaacctaccgattagcatggacgaacaggaactagagaacatgttgaagccatttggtcacgtcatctccactagaattctgagggacgccaacggcgtttccagaggggtgggctttgctcggatggagtccacagaaaaatgtgaagtggtgatacagcactttaatggtaagtaccttaagacccctcccggtattcccgctccctccgaaccgcttttatgtaaattcgctgacggcggacagaaaaaaaggcagaatcagagcaaatacactcagaacgggaggccttggccacgtgaaggagaggccggaatggccctaacgtatgaccccaccgctgccattcagaatggtttttatagtagtccctacagcatagcaaccaatagaatgattccgcaaacatcaataacgcctttcattgccgcatctccagtaagtacctatcaggtccagtctacatcatggatgcctcacccaccctatgtcatgcaacctacgggcgcagtgattacacccaccatggaccatcctatgagcatgcagccagcaaatatgatgggacccctcacgcagcaaatgaaccatcttagtttaggcaccacgggcacctacatgaccgcagccgctcccatgcaaggaacatacattccccagtacacgcccgtgccacctactgctgtgagtattgagggggtggtagccgataccagccctcaaaccgttgctccatctagtcaagacacgtctggacaacagcagcagatagcagtggacacctcaaacgagcacgccccagcttacagctaccagcagagcaaaccgtag

SEQ ID NO: 239417 - DNA, 1263 bp, synthetic construct
  misc_feature 1..1263: note = Description of Artificial Sequence: Synthetic coding sequence
  source 1..1263: mol_type = other DNA
atgggcaagcgattggatcaaccccagatgtacccacagtacacgtattactacccccactatctacagacaaagcaatcgtacgcgcctgcccctcatccaatggctcctccatctcccagcaccaactcctcttctaacaactcaagcaataactcatctggtgagcagctgtcaaagaccaatctttatatcagaggtcttccccctggtacaacagatcaggatctgattaagttgtgccagccttacggaaaaattgtgtcaaccaaagctattctcgacaaaaacacgaaccagtgcaagggctacgggttcgtagatttcgattccccagccgcagcccagaaggctgtggctagcctgaaggcgaacggcgttcaggcccaaatggctaaacagcaggaacaggatccgaccaacctgtacattagtaatctccctatatcaatggatgaacaggaattggaaaacatgctgaagcctttcggacacgtaatcagcactagaattctgcgcgatgcgaatggggtttcccgaggcgttggcttcgctcggatggagtcgaccgagaagtgtgaggtcgtgatacagcacttcaacgggaaatacctgaagacccccccaggaattcccgctcctagcgagccgctgttgtgtaaattcgccgacgggggacagaagaaacgacagaatcagtccaaatatacccagaacggcagaccctggccacgggaaggtgaggccggtatggcactcacctacgatccaacagcagccatccagaatggattctacagctccccttattctattgccactaataggatgattccacagacgtccatcaccccctttatagctgcttcccccgtgagtacgtaccaggttcagtccacctcctggatgccccacccaccttatgtgatgcagcctaccggagcagtcattactcctaccatggatcatcccatgtcaatgcaacctgccaacatgatggggccattgacacaacagatgaatcatcttagcttaggaaccacaggcacatacatgacagcagctgccccaatgcagggtacgtacataccccagtatacgccagtgccacctacagccgtgtccattgagggtgtggtggcagatacatctcctcagactgttgcccctagctcccaggacaccagcggacagcagcagcagatcgcagtcgatactagtaacgagcacgcccctgcgtatagctaccaacagagtaaatag

SEQ ID NO: 239418 - DNA, 1260 bp, synthetic construct
  misc_feature 1..1260: note = Description of Artificial Sequence: Synthetic coding sequence
  source 1..1260: mol_type = other DNA
atggggaaaagacttgatcagccgcagatgtaccctcagtatacctactactatccacactacctgcagaccaagtcctacgcccctgctccacatcctatggcgccaccctcaccatcaactaattcatcatcaaataactcatcgaacaacagctctggcgaacagctgtccaagactaatctctacattagggggctgccgccaggaacaaccgatcaagatctgattaagttgtgtcaaccatatggcaagatagtgtcaacaaaagccatcttggacaagaatactaaccagtgcaaagggtatggatttgtcgacttcgattcccctgcagcagctcagaaggcagtggcaagtctgaaagccaatggcgttcaggctcaaatggccaaacaacaagagcaggatccaactaatttgtatattagcaatcttcctatcagcatggatgaacaagagctcgaaaacatgctgaagcctttcggccacgttatttcaaccagaattcttagagacgccaacggggtttccagaggtgttggtttcgctcggatggagtccactgagaaatgcgaggtggtgattcaacacttcaatggcaagtatttgaaaacaccccctggaatccccgctcccagtgaacccctgctctgtaagttcgccgatggtggacagaaaaaacgtcagaatcagtccaagtatactcagaacggacggccatggccgcgagagggtgaagctggcatggcgttaacttatgatcccaccgctgctatacagaacggattctacagcagtccatacagcatcgctaccaatcgcatgatcccccagacaagcattacaccttttatcgctgcatccccggtctccacttaccaaggggcagtgattacccctacgatggaccacccaatgtccatgcagccagctaacatgatgggccctctgacccagcagatgaatcacctatctctcggcacaacaggaacaatacagtcgcaggaccgcattatgattctgcaccagcttctctgccagtatatgaccgcggctgctcccatgcagggcacctacatcccacagtacacccctgtaccccctaccgcagttagtattgagggcgtggtagccgacacctctccccaaaccgtggcaccttcttcacaggacacctctgggcagcagcagcagattgcagttgacacttccaatgaacacgccccagcgtacagttaccagcagagcaagccctag

SEQ ID NO: 239419 - DNA, 1314 bp, synthetic construct
  misc_feature 1..1314: note = Description of Artificial Sequence: Synthetic coding sequence
  source 1..1314: mol_type = other DNA
atggggaaacgacttgatcagccacagatgtatccacagtacacttactactatccccactacctgcaaacaaagcagtcttacgcccctgctccccatccaatggcgcctcccagcccctccactaactctagttcgaataactcttcgaacaattcctccggggaacaattgtcgaaaactaacctatatatccggggactgcctcccggtaccacggatcaggatttgatcaaactgtgtcagccttacggcaagattgtatccaccaaggctatcctcgacaagaatacaaatcaatgtaagggatatggcttcgtggactttgatagccctgccgcagcccagaaggctgtggcctctctcaaagctaatggtgtacaagcacagatggctaaacagcaagaacaggatccaactaacttgtatatatccaatctacccatatctatggacgagcaagagttagagaatatgctgaaacccttcggacatgtgatttcaacacggatcctgcgggatgcaaatggagttagtaggggtgtgggtttcgccaggatggaatctaccgagaagtgtgaggtggtgattcagcactttaatggaaagtatttgaagactccaccaggcattccagcccctagtgagccgctgctctgcaagttcgcagacggagggcaaaaaaaaagacagaaccaaagcaaatatacacagaacgggaggccttggcccagagagggagaagcagggatggccctgacgtatgacccaacggccgcaatccaaaatggtttttattcctcaccatactcaatcgccactaatcggatgatcccgcaaactagcattactccattcattgccgcatctcccgtgtctacctaccaggtgcagagcacatcttggatgccacaccctccatacgttatgcagccaaccggggcagtcatcacccctaccatggatcaccctatgagtatgcagcccgctaatatgatgggcccattgacgcagcagatgaatcacctgtctctgggcactacgggaactattcagagccaagatcggatcatgattctacaccagctgctgtgccagtatatgacagcagcggcaccaatgcagggtacttacattccgcagtatactccggtgcctcctaccgccgtcagtatagagggcgtggttgcagatacatctccacagacagtagccccaagctcccaagacacctccgggcaacagcagcagatcgcggtggacacatccaacgagcatgcacctgcttactcctaccagcagagcaagccttag

SEQ ID NO: 239420 - DNA, 1305 bp, synthetic construct
  misc_feature 1..1305: note = Description of Artificial Sequence: Synthetic coding sequence
  source 1..1305: mol_type = other DNA
atggggaagcgcttggatcaaccccagatgtatccccaatacacatactattacccccattacctgcaaaccaagcaatcttacgctccagcaccccacccaatggctcccccaagtccatcaactaacagcagctccaacaactcaagtaacaatagctcaggggaacagctgtcaaagactaacctgtacatacgtggactccctcccggtaccaccgaccaggatctcatcaaattgtgccaaccctacggaaagattgtgagtactaaggcaattctggataaaaataccaaccagtgtaaagggtacggatttgtcgacttcgactcgcccgcagcggcacagaaagccgtagctagcctgaaagccaacggggtccaggcacaaatggccaagcagcaggaacaggaccctacgaacttatatatttctaacctgccaataagcatggatgagcaggaactggagaatatgctaaagcctttcggccacgtcattagcaccaggatattgagagacgccaatggggtttcccgcggagtcggcttcgccaggatggagagcactgaaaagtgtgaggtggtcatccagcacttcaacggaaagtacctcaagacaccacctgggatcccagcgcctagcgaaccactgctttgcaaattcgcagacgggggacaaaagaagaggcagaatcagtccaagtatactcagaacgggaggccatggcccagggagggtgaggttctgaggggcaggacagtgccacgacagaacagagaggcagggatggccctgacatacgacccgacagccgcaatccaaaatggattttatagttctccatacagtatagcaaccaatagaatgattccacagacttccataacaccatttatcgccgcttccccggtgtctacttaccaagtgcaatccacttcatggatgccacatcccccatatgtgatgcagccaacaggggctgtcatcacgccaaccatggatcaccccatgtctatgcagcctgccaacatgatggggccattaacccagcagatgaaccatctatctctcgggaccacgggtacctacatgaccgcagctgcaccgatgcaagggacgtacataccccaatacacacccgtccctcccacagctgtctctattgagggtgtggtggccgacacgagccctcaaacagtcgctcccagctctcaggacacaagcgggcagcagcaacagatagctgttgatacctccaacgagcatgctccggcttattcttaccagcagagtaaaccatag

SEQ ID NO: 239421 - DNA, 1311 bp, synthetic construct
  misc_feature 1..1311: note = Description of Artificial Sequence: Synthetic coding sequence
  source 1..1311: mol_type = other DNA
atgggaaagaggctggatcagccccagatgtacccgcagtatacttattattaccctcattacctccagacaaagtcctacgcgcctgctccacacccaatggcccctccaagcccatccaccaactctagctccaataatagttcaaataattcatccggggagcagttgagcaagactaatctatatattcgcggattacccccaggaaccacagatcaggacctgataaagttgtgccaaccttatggaaaaattgtgagcacgaaagccattctggataagaacacaaaccagtgtaaggggtatggcttcgtggattttgactccccggctgccgctcagaaagctgtggcgtccctaaaagccaatggagtccaagcccagatggctaaacagcaggaacaagatcctacaaacttatatatttcaaacttgccaattagtatggatgagcaggaactcgaaaacatgctgaaaccctttggtcacgtgatctccacccgcatcctgcgggatgctaatggggtaagtcggggtgtgggatttgctcgtatggaatcaactgagaaatgcgaggtagtgatccagcattttaacggaaagtacctaaagacaccgccagggatccctgcgcctagcgaacccctattgtgtaaattcgctgatggaggtcaaaagaaacgacagaatcagtccaaatacacacagaatggcaggccatggcccagagagggagaagctggcatggccctgacctacgatcctacagctgccatccaaaacggattctattcttccccatatagtatcgcaaccaataggatgatcccacagacctcaataacacccttcatcgcggcatcacctgtctctacttaccaagtccaatctacttcttggatgcctcacccaccttacgttatgcagcccacaggagcggtaattacccctacaatggatcatccaatgtctatgcagcccgcaaatatgatgggcccactgacgcaacaaatgaatcatctgtcactgggcaccactgggacgatccagtcacaggaccgtattatgatcctgcatcaacttttgtgccagtatatgaccgcggctgcgcctatgcaggggacgtatattccccagtataccccggtgccgccaacagccgttagtatcgagggggtggtggcagacacgagtcctcaaacagtcgcaccctcaagccaggacaccagtggccagcagcaacagatcgcagtggacacttctaacgagcacgcccctgcttatagttatcaacagtcgaagccatag

SEQ ID NO: 239422 - DNA, 1302 bp, synthetic construct
  misc_feature 1..1302: note = Description of Artificial Sequence: Synthetic coding sequence
  source 1..1302: mol_type = other DNA
atgggaaagaggctggaccaaccacaaatgtaccctcagtacacatactactacccacactacctacagactaagcagtcctacgccccagcacctcaccccatggcgccacctagtcccagtacaaattcatctagtaacaattcgtcgaacaacagttcaggggagcaactgtctaagactaatctgtacattagagggctgcctccgggaaccaccgatcaggacctgattaagctatgtcaaccttacgggaagattgtcagcacaaaggctatactcgacaaaaacaccaaccagtgcaaggggtacgggtttgttgacttcgattctcccgctgcggctcagaaggccgtagcttccctcaaggccaatggtgtgcaagcccaaatggccaaacagcaggagcaggacccgacaaacctctacattagtaacctgcctatttcaatggacgagcaggagctggaaaacatgcttaaacctttcggacacgttatcagcacacggatcctcagggacgccaatggagtctcgagaggcgtggggttcgccaggatggaatcaactgagaagtgcgaagtggtaatacagcatttcaatggcaaatacctcaagacaccgcctgggatacccgcaccctcagagcctctgctttgtaaattcgcagatggtggccaaaaaaaaagacaaaatcagagtaagtacacccagaatggaagaccctggccccgagaaggagaagtgctgaggggaaggaccgtgcctcgacagaaccgtgaggcgggaatggccctaacttacgatcctactgcagcaattcagaacggattttacagctcaccatacagtattgccaccaacaggatgattccccaaactagtatcacccctttcatcgctgccagtcccgtgtccacttaccaagttcagtccacatcatggatgccccatccgccttatgtgatgcagccgacaggtgcagtgatcacaccaacaatggaccaccctatgtccatgcagcccgctaatatgatgggacctctgactcagcagatgaaccatctgagtctgggtactaccggcacctatatgactgccgcagcccctatgcagggcacatacatacctcagtacacaccggtcccccctaccgcagttagcattgagggagtagtggcggacacgtcaccccagaccgtcgccccttcttcacaggatacgtccggacagcagcagcagatcgccgtagacacctcaaacgagcacgcacctgcatactcataccagcagtcaaaatag

SEQ ID NO: 239423 - DNA, 615 bp, synthetic construct
  misc_feature 1..615: note = Description of Artificial Sequence: Synthetic coding sequence
  source 1..615: mol_type = other DNA
atgaacaatggcggaaaagccgagaaggaaaacacgcctagcgaggcaaatttgcaagaggaagaggtaaggaccctcttcgtaagtggacttccactggacattaaaccaagagagctgtatcttctgttcaggcctttcaaggggtacgaaggctcactcatcaagctcactagcaagcagcccgtgggattcgttagcttcgactccagaagcgaggcggaggctgctaaaaatgccttaaacggaattcggttcgatccagagataccccagaccctgcgccttgaatttgctaaagcaaatacgaagatggcaaagaacaaactggtcggaacacccaatccgtcaacccctctccccaacaccgttccacagtttatcgccagggaaccatatgagctgaccgtgcccgctctctacccctcctcgcctgaggtgtgggccccttaccctttatatccagcagagctggcgcctgccttgccaccgccagcattcacctacccggcttcactgcacgcccaactgtgtgagggccagactgttcggcgatcccatccacttagtgcaccatctcccgatagcgcctcccttgcttggttccctgtgtag

SEQ ID NO: 239424 - DNA, 591 bp, synthetic construct
  misc_feature 1..591: note = Description of Artificial Sequence: Synthetic coding sequence
  source 1..591: mol_type = other DNA
atgaacaatggaggcaaggctgaaaaggagaacacacctagcgaggcaaatctgcaagaagaggaagtgcgcacattgtttgtgagcgggttacctctggatattaagccaagggaactatatttacttttccgcccattcaaggggtacgagggtagtctaataaaacttacctccaagcagcctgtaggctttgttagcttcgattcacggagcgaagccgaggccgctaagaacgctctgaacgggattcgctttgatcccgagataccgcagactttgcgcctggaattcgccaaggccaacactaagatggctaaaaacaagttagtaggtacaccgaacccaagtactcctctccccaacacggtgcctcaatttatcgcgagggaaccctatgagcttactgttcctgctctctatccaagtagccccgaggtttgggccccataccccctctaccccgcagagcttgccccagcactgcctcctccagcattcacctatcctgcttcccttcatgcccagatgcggtggctcccaccatcggaggcaaccagccaggggtggaaatctcgacagttttgctag

SEQ ID NO: 239425 - DNA, 660 bp, synthetic construct
  misc_feature 1..660: note = Description of Artificial Sequence: Synthetic coding sequence
  source 1..660: mol_type = other DNA
atgaacaatggcggtaaggccgagaaggagaatacccctagtgaagcaaacctgcaagaagaagaggttcggacgttgtttgtaagtgggctgcccctcgatattaagcccagagaactttacctgctgtttcgaccctttaagggttacgaggggtccctgatcaagctgaccagtaagcagcccgttgggttcgtgtcgtttgattcacggtccgaggccgaggcagctaagaacgctctcaatgggataagattcgacccggagattccccagacactgcgcctagagttcgcaaaagctaacactaagatggctaagaacaaactggtgggaacaccaaacccgagcacacccctaccaaatacggtgccccaatttatcgctcgtgaaccctatgaactcaccgtacctgccctttatccaagcagcccggaagtgtgggctccctacccactatatcctgctgaactggctccggctttgcctccccctgccttcacatacccggcatccctccatgcacagtgtttctcccctgaggcaaagccaaacacaccagtcttctgcccgctgctgcagcagatccgtttcgtctctggcaatgtgtttgtaacgtaccaacctaccgccgatcagcaaagggagcttccgtgctag

SEQ ID NO: 239426 - DNA, 591 bp, synthetic construct
  misc_feature 1..591: note = Description of Artificial Sequence: Synthetic coding sequence
  source 1..591: mol_type = other DNA
atgaacaacggtggtaaggccgagaaagaaaatacacccagtgaagctaatctgcaggaagaagaagtgcggacattgtttgtgtcgggcctgcctcttgatatcaagccacgggaactgtatctcctgttccggccatttaaaggatatgaagggtcattgataaaactgacgtccaaacagcccgtcggtttcgtctcatttgattccaggtctgaggccgaggccgcaaagaacgcactgaacggaataaggttcgatcctgaaattcctcagacactgcgcctcgagtttgccaaagcgaatacaaagatggcaaaaaataagctggtcggaacaccgaatcctagtacacccttgccgaacactgttccccaattcattgccagggagccttacgagttaaccgttcctgctctgtatccatcatccccggaagtctgggccccttacccgctataccccgcagagctggctcccgctttgcccccacctgccttcacttaccccgcaagcctacatgcccagatgagatggctccccccatctgaggctaccagtcagggatggaaatcccggcagttctgttag

SEQ ID NO: 239427 - DNA, 462 bp, synthetic construct
  misc_feature 1..462: note = Description of Artificial Sequence: Synthetic coding sequence
  source 1..462: mol_type = other DNA
atgaataacggaggcaaagcagagaaagagaacacacccagtgaggccaatctccaggaggaagaagtgcgaacactctttgtttcaggattgcccttggacatcaagcctcgggaactgtatttactgttccgcccattcaagggctatgagggtagcctaattaaactaaccagcaaacaaccagtcgggtttgtcagcttcgatagccggtccgaagccgaggccgcaaagaatgctcttaatggaatccggttcgaccccgaaattccccagacactgagactggaatttgcgaaagccaacacaaaaatggccaagaacaaactggtgggcacaccgaacccgagcacacccctgcccaacacagtgccacagtttatcgccagggagccgttgatgcggtggctgcctccctcagaggccaccagccaaggctggaaatcccgacagttctgctag

SEQ ID NO: 239428 - DNA, 1257 bp, synthetic construct
  misc_feature 1..1257: note = Description of Artificial Sequence: Synthetic coding sequence
  source 1..1257: mol_type = other DNA
atgctagcctctcaaggagtgttgctgcacccttacggagtgcccatgatcgtccccgctgccccttatctccccggattgatacagggaaatcaggaggctgcagccgcacccgataccatggcccagccatacgccagtgcccagtttgcacctccccaaaatgggatccctgctgagtacaccgcccctcacccacatccggctcctgaatacaccggacagacaacggtgcccgaacatacactgaatctgtaccccccagcacagacacactccgaacagagtcctgcagatacatccgcgcagaccgtctctgggacagccacccagactgatgatgctgcacctaccgacgggcaaccccagacgcagcccagcgagaacactgaaaataaatcccagcctaaacgcctgcatgtgtctaatatcccatttcgctttagggaccccgacctccgccaaatgttcgggcagttcggcaaaattctcgatgtggagattatttttaatgagaggggctcgaagggttttgggtttgtgaccttcgaaaacagcgcagatgcggaccgagccagagaaaagctccacgggaccgtggtcgaagggagaaagattgaagttaataacgccacggcgagagtgatgacgaataagaaaaccgtaaatccatacacaaacgggtggaaattgaacccggtggtgggagcagtttactccccagaattctacgctggtacagttcttctgtgccaggccaatcaggaaggcagctccatgtactccgccccatccagcctggtgtacacctctgccatgcccggtttcccttatcccgcagccaccgctgcggctgcttaccggggagctcatctccgaggacggggtaggacagtctacaacacttttagagcagcggctcctccgcctcctatccctgcttacgggggagtggtatatcaggaacccgtctacgggaacaaactgctgcaagggggttacgccgcatatcggtatgcccagcccacccccgcaaccgctgctgcgtatagtgattcatacgggagagtgtacgcagccgatccatatcaccacgctctggccccagccccaacctacggcgtcggggctatgaacgccttcgctcctctgacagacgcaaagacacgaagtcacgcagatgacgtggggcttgtgttatcctcattacaggcaagcatctaccgcggagggtacaaccgcttcgccccttactag

SEQ ID NO: 239429 - DNA, 1209 bp, synthetic construct
  misc_feature 1..1209: note = Description of Artificial Sequence: Synthetic coding sequence
  source 1..1209: mol_type = other DNA
atgatagttcctgccgcaccgtatctgcccggacttattcagggaaatcaggaagctgcagctgcccctgacacgatggcacagccatatgctagcgcccaattcgcccctcctcaaaacggcataccagctgaatatacagcaccgcatccccaccctgcccctgagtacaccggccagacaactgtacctgaacacacccttaacctatatccacctgcccagactcattccgaacagagtccagccgatacctcagcccagacagtttcaggcaccgctacacagaccgacgatgccgcaccaactgatggccaaccgcagactcagcctagtgagaatacggaaaacaaatctcaaccaaagagactgcacgtatctaacattccttttcgatttcgggatcctgacctccggcagatgtttgggcagttcggaaaaattctggatgtcgagattatcttcaacgaaagagggagtaaagggttcggttttgtaaccttcgaaaactctgccgatgcagatagagcgagggagaagttacacggaacagtagtcgaggggagaaagattgaggtcaataatgctactgccagagtgatgactaacaagaagacagtgaatccatatacaaatggctggaaactgaacccagtagtgggggcagtttattcgccagagttctatgcagggaccgtgctgctctgccaggccaatcaggaaggttcttccatgtattccgctccatcctcgctcgtgtacacgtcagctatgccagggttcccgtaccctgcggcaacagcagctgcagcttaccgcggagcgcatctgcgcggacggggacgcaccgtctacaatacattcagagctgccgctccgccacccccaattcctgcgtacgggggagtcgtgtaccaagatgggttttacggggctgatatctacggcggttatgcagcttaccggtacgcacaaccaaccccggcaacagctgccgcatactcagactcctacgggagggtatacgctgcagacccgtaccatcacgcacttgccccagcaccgacctacggagtaggcgcaatgaatgcgttcgccccattgacagatgccaagacaaggagccacgccgacgacgtgggccttgtgttgagctctcttcaggccagcatctacagaggtggctacaacagatttgctccctactag

SEQ ID NO: 239430 - DNA, 1176 bp, synthetic construct
  misc_feature 1..1176: note = Description of Artificial Sequence: Synthetic coding sequence
  source 1..1176: mol_type = other DNA
atgctggcttcccagggtgtattgctgcacccttatggagtcccgatgatagttcccgcagctccttatctgcccggactcatccaggggaaccaggaggctgccgctgcccctgacactatggcccaaccatatgccagcgctcaattcgcaccaccacagaacggcattcccgctgaatacacagcacctcatcctcaccccgcaccagagtacacaggccagacgacagtgccagagcataccctgaacttatacccccctgcacaaacacactcagagcaatcgccagctgatacatcagcccagacagtatcgggcacggcaacccagacggatgacgccgcacctacagatggccagcctcagacccagccaagtgagaacactgagaataaaagtcaaccgaaaagactgcacgtttctaatatcccattccgatttcgcgacccagacctgcgacaaatgttcggccagttcgggaaaatcctggatgtggagatcattttcaacgagcgcggtagcaagggcttcgggttcgtcacctttgagaatagcgcagatgctgacagggcacgagaaaagctacatggcacagttgtcgaaggccgaaagatcgaggtaaataatgcaacggccagagtgatgacaaacaaaaaaactgttaacccttacacaaatggctggaagctaaaccctgtcgtaggtgccgtctactctccagaattctatgccgttcccggtttcccttacccagcagccacagcagcagcagcctacaggggagcccacttacgcggaaggggaagaacggtgtacaatacctttcgggctgctgcgccaccaccccctatcccagcctacgggggagttgtgtaccaggagccagtgtatggtaataaacttttgcaaggcggatacgctgcttaccgctatgcccagcctacaccagccactgcggcagcatactctgatagctatggtcgggtctacgccgctgacccataccatcacgcgctagcaccagccccaacttacggcgttggcgcaatgaacgccttcgcccctctcacagacgctaaaacgcggagccacgccgacgacgtcggcctggtgttatcatcgctacaggcatcgatctaccggggaggatacaatcggttcgctccttactag

SEQ ID NO: 239431 - DNA, 1188 bp, synthetic construct
  misc_feature 1..1188: note = Description of Artificial Sequence: Synthetic coding sequence
  source 1..1188: mol_type = other DNA
atgctcgcctctcagggagtgctcctccacccttatggggtcccaatgattgtgcctgcagcaccctaccttcctggcttgatacagggaaaccaggaggccgctgcagctccagataccatggcacaaccatacgcctccgcccagtttgcccctccccaaaatggtattcctgctgagtatactgcacctcacccacatcccgcacccgagtacaccggtcagaccacggtacctgaacatactctcaacctgtatccaccagcccagacccactccgagcagagcccagccgatacctcagctcaaacagtctccggcaccgcaacccagaccgacgacgcagcacctacagatgggcagccgcagactcagccgagcgagaatacagaaaacaagtctcagcccaaacgtctccacgtctccaacatacccttccggttccgcgatcctgaccttcgccaaatgttcggtcagttcggcaagatcctggatgtggagattatcttcaacgagcgcggaagtaagggcttcggctttgttactttcgagaattctgccgatgctgaccgtgcaagggagaaactgcatggaacagtagtggaaggcagaaaaattgaggtgaataacgccacagctagggtgatgaccaataagaaaacagtgaatccgtataccaacggctggaagctcaatcctgtcgtcggagccgtgtactcccccgaattttatgcgggtactgtcctgctctgtcaggctaatcaggaaggctcctctatgtattcagccccatccagcctcgtttataccagtgctatgccaggattcccctatccggcagcaacagctgctgccgcttaccggggagcacacctgcgcggtaggggcagaactgtgtacaatacattccgtgccgcagcgccacctccgccaatccctgcctatggcggtgtcgtttatcaggaacccgtgtatggcaacaaacttttgcagggcggttacgccgcatatcgatacgcccagccaactccagcaactgcggcagcctattccgataggaatcaatttgtgttcgtggctgccgatgaaatcagttgtaacacaagcgcagtgactgacgaattcatgctgcccaccccaacaactacccatttactccagcccccaccaaccgcactagtcccatag

SEQ ID NO: 239432 - DNA, 1179 bp, synthetic construct
  misc_feature 1..1179: note = Description of Artificial Sequence: Synthetic coding sequence
  source 1..1179: mol_type = other DNA
atgctggcttctcagggcgtcctcttgcacccttatggagttcctatgatcgtgccagctgcaccctatctaccgggtctgattcaaggaaaccaagaagccgctgccgcaccagatactatggcacagccttacgcttcagcccagtttgctccgcctcagaacggaatccctgcggaatacaccgcccctcacccacaccccgctcctgagtacaccggccagactacggtccctgaacacactctgaacttgtatcccccagcccagacccattcagaacagtctcccgcagatacatctgctcagaccgtgagcggcaccgcaactcagacagacgatgctgctccgaccgacggccaacctcagacccagccatccgaaaacactgaaaacaaaagtcagccaaagaggctccatgtttcaaacatccctttccgatttcgcgaccccgatcttcgccagatgttcggccagttcggaaaaatactagacgtggaaatcatctttaacgagcgtggctctaagggcttcggctttgtgacattcgagaatagtgccgacgccgacagggccagggagaagctacacggcactgtcgtcgaaggcagaaagatagaggtcaacaatgccaccgcaagagtcatgactaataaaaagacagtaaacccgtacaccaatggctggaagctaaaccccgtagtcggggcagtttattcccctgagttctatgccggaacggtcttattgtgccaggcaaaccaagagggatcttccatgtacagcgccccttcttccctagtttatacatccgctatgcccggttttccatatcctgctgcaacggccgcagctgcttatcggggagcccacctgcgaggcagaggcagaacagtgtacaacacctttcgtgctgctgctcctcctccacccatcccagcctacgggggagttgtataccaggagccggtgtacggaaataagctccttcaaggtggctatgctgcatacagatacgcacagcccacccccgcaactgcagccgcatactctgattcctacgggagagtctacgcagctgatccctaccaccacgcactggcgcctgctcccacatacggggtgggcgctatggcctctatctatcggggtggctataataggtttgccccatactag

SEQ ID NO: 239433 - DNA, 1194 bp, synthetic construct
  misc_feature 1..1194: note = Description of Artificial Sequence: Synthetic coding sequence
  source 1..1194: mol_type = other DNA
atgaactgtgagagggagcagttgcgcggtaaccaggaggcagccgctgcccctgatacaatggcacagccgtatgcatccgctcagttcgcaccgcctcagaacggcattccagccgaatatactgcccctcatccgcatcccgcacctgaatacactggtcaaacaacagtccctgaacataccctgaatctgtatccacctgcacaaacccattctgagcagagcccggctgataccagtgcacagactgtgtccggcactgctactcagaccgatgacgccgcacccacagatggccagcctcagacccagcccagtgaaaacaccgaaaataaaagccagcctaagaggctccatgtgtctaacatacccttcaggttccgtgatcccgatcttcgtcagatgttcgggcaatttggaaagatcctcgacgtggagataattttcaacgagaggggctctaagggttttggctttgtgacttttgagaactcagcagacgctgatcgcgcaagggagaaactacatgggaccgttgtggaaggacgcaaaattgaagtgaataacgctactgcccgagtgatgaccaacaaaaaaacagtgaatccttataccaatggctggaagctgaatcctgttgttggcgctgtctactccccggagttctatgccggaacggtccttctgtgtcaagctaaccaggagggtagcagtatgtactcggcgccaagcagcttggtgtatacctcagctatgcctggtttcccatatcctgctgccaccgctgcggctgcctatcgtggagctcatctgcgaggacggggtaggacagtctataacacctttagagctgcagcccctccacccccaatcccggcatacgggggagttgtgtaccaggatggcttttacggggctgatatatatggtgggtacgcggcttataggtacgcccagcccaccccggcaaccgccgcagcctactctgattcctacggaagggtgtatgcagccgacccctaccatcatgccttggcaccagcccctacgtacggcgtaggcgctatgaatgcattcgccccattaacagatgccaagaccagatcacacgctgatgacgtcggcctggtgctctctagccttcaggcctcaatctaccgcggaggatacaaccggttcgctccctattag

SEQ ID NO: 239434 - DNA, 1401 bp, synthetic construct
  misc_feature 1..1401: note = Description of Artificial Sequence: Synthetic coding sequence
  source 1..1401: mol_type = other DNA
atggaaactggacagaggacccacgcttccggaacgtattcatttctggatagaactcagcactccgacatcaaagcagattgcaacacatgcgtggagattgaggacaggaaagtgagccggcagcaaatgaattgcgaacgcgagcagctgagaggcaaccaggaagcggctgccgctcccgataccatggcccagccatacgcaagtgcgcagtttgcccctccacaaaatggcattcctgcagagtatacagcccctcatccccatccggctccggagtatactggtcagacaacagtcccggaacacacactgaacctttaccctcccgcacagactcattccgagcagtctcctgcagatacgagcgcgcagactgtgtccggcacagctacccaaactgatgatgctgctcctaccgacggacagccccagacacagccatcggagaacaccgaaaataagagccagcccaagcgcctccatgtgtccaacatcccctttcgattcagggacccagacttgcgccagatgttcggtcaatttgggaaaattttagatgtcgagattatctttaacgaacgaggatctaaggggtttgggttcgttactttcgagaacagcgccgatgcagatcgagcccgagagaaactgcacggcaccgtggtggagggacggaagattgaggttaataatgccaccgccagagtgatgaccaataaaaaaacagtaaatccttataccaatgggtggaaattaaatcctgtggtgggggctgtctactctcccgagttctatgccggtactgtgctgctgtgccaggccaaccaagaagggagttccatgtacagtgccccttcgagtctggtgtacacttctgccatgccaggcttcccctaccctgctgcgacagctgccgcagcataccggggtgctcacctcaggggaagaggacgcaccgtgtacaacactttccgggctgccgctccaccacccccaattccagcgtacggaggggttgtttaccaggatggattctacggggcagacatttacgggggatacgcggcttaccgatatgcacagcctactccagctaccgccgcagcatactcagatagaaaccagtttgtctttgtagctgctgatgaaatctcatgtaacacttcagcagtcactgacgagttcatgcttcccacaccgacaactacacacctgctgcaaccacccccaacggcgctagtgccttgccctaaggttcctgctcctgcacagacttccgaggaactgtcctgtactttgccgggactgtgctgccaggcagcagagaacctgactgcaagtcccccactgctgcagttcatgtttaaggtgatcgttgcccaagagaggaaatag

SEQ ID NO: 239435 - DNA, 1194 bp, synthetic construct
  misc_feature 1..1194: note = Description of Artificial Sequence: Synthetic coding sequence
  source 1..1194: mol_type = other DNA
atgaactgtgagcgcgagcagctgagagggaaccaggaggcagcagcagctccagacaccatggcacagccctatgccagtgcccagttcgcaccaccacagaacggcatacccgctgagtatactgcccctcatccccaccccgctccagagtacaccggacagactaccgtgcctgagcacaccctgaatctgtaccctcctgcacagacacactcagagcagagcccggctgatacatcagcgcagacagtatcaggcaccgcaacacagaccgatgatgccgcaccaactgatggtcagccacagacacagccttccgaaaatacagaaaacaaatctcaacctaagcgtcttcacgtgtctaatatccccttccgattcagggaccccgaccttagacagatgttcggccagtttggtaaaatcttggacgtggagatcatctttaatgaacggggatctaagggctttgggttcgtgactttcgagaactccgctgacgcagacagagcgagggagaagctgcacgggacagtggtggaaggccgtaaaattgaggttaataatgccaccgctcgcgtgatgaccaacaagaagacagtgaatccatataccaacgggtggaaactgaaccccgtggtcggcgctgtgtatagtccagaattctatgccggtacagtgctgctttgccaggccaatcaagagggtagcagtatgtacagcgccccaagcagtctggtctacacgtctgctatgccgggtttcccttatcctgcggctacagcggcagctgcctatagaggcgcacacctgagaggtcgtggtagaacagtttacaataccttcagggctgcagcgccacccccacctatacctgcctatggcggtgtagtttaccaggatgggttttatggtgcagatatctacggaggttatgcagcttatagatatgctcagcccacacccgctaccgcagctgcctacagcgactcctacggacgcgtatatgccgctgacccgtaccaccacgctctcgcacctgccccaacatacggcgtgggtgctatgaatgcattcgccccattaaccgacgccaaaacccggagtcacgccgacgatgtcggtctggtcctttccagtctgcaggcctccatttaccgcggaggctacaatcgattcgccccatactag

SEQ ID NO: 239436 - DNA, 792 bp, synthetic construct
  misc_feature 1..792: note = Description of Artificial Sequence: Synthetic coding sequence
  source 1..792: mol_type = other DNA
atgaactgcgagagagaacagcttagaggaaaccaagaagccgctgctgcacctgatacgatggcccagccctacgcctctgcgcagttcgccccaccccagaatggcattcctgccgaatacaccgctccacatcctcatcctgccccagaatataccggccagactaccgtccccgaacatactctgaatctgtaccctcccgcacagacacattctgaacagtcacccgctgacacatctgcacagaccgtatcagggacggctactcagaccgacgacgccgcacccaccgatggacagccccaaactcagccatcagaaaataccgaaaataaatctcagccgaaacgcctgcatgtcagtaatatccccttcaggttccgtgatcccgacctgagacagatgttcggccagttcggaaaaatcctagacgtagagattatttttaatgaacggggaagcaagggctttgggttcgtgacgtttgagaatagtgccgatgcggatcgcgcacgcgagaaattacacggaactgtcgtggaaggcaggaaaattgaagttaacaacgccactgctcgggtcatgaccaataagaaaaccgtcaatccttacacaaatggctggaagctgaacccggtggtaggcgcagtctattcccctgaattttacgccggaactgtattgctttgtcaggccaaccaagaagggagcagtatgtatagcgctccttcgagtcttgtctacacatcagcaatgcccggtttcccttatcccgcagccacagcttag

SEQ ID NO: 239437 - DNA, 1113 bp, synthetic construct
  misc_feature 1..1113: note = Description of Artificial Sequence: Synthetic coding sequence
  source 1..1113: mol_type = other DNA
atgaactgtgagagggaacagctgcggggaaatcaggaggcggctgctgcgcctgacacaatggctcagccatacgcttcagctcagtttgccccaccacagaatgggatcccagccgagtacaccgcccctcaccctcacccagcacccgagtacaccggccaaaccaccgtccccgaacacacattaaacctgtacccccctgctcagacacacagcgagcagtcccccgcagacaccagtgctcagactgtttcaggaactgccacacagacggatgatgcggcaccaacagacggtcaaccgcagacccaaccctccgaaaacacagagaacaagtcccagccaaaacgcctgcacgtttctaatatccccttcagatttagagatccagacctgaggcagatgttcgggcagttcggcaaaatcctggatgtggagataatcttcaatgaacgagggtctaagggtttcgggtttgtcaccttcgagaacagcgcagatgctgatcgcgcacgtgaaaagcttcatggcaccgtcgtcgaaggccgaaagatcgaagtgaataatgccactgcacgagtgatgaccaataaaaaaacggtgaatccatataccaacggctggaagctgaaccctgtggtgggggcagtgtactcccccgagttctatgcagtgccgggttttccctatcccgctgcaactgcagctgccgcatatagaggtgctcacctgcgagggagggggcgtactgtatacaatactttcagggccgctgccccacctccccctatccccgcttatggcggagtggtctaccaagacggtttctacggagccgatatctacggcggatatgccgcataccgctacgcacaacccactccggctacggccgctgcctattccgattcatatggaagagtctacgcggctgacccataccatcacgctctggcaccagccccaacatacggggtcggagccatgaatgcattcgctcccctgacagatgccaagacccgcagccatgcggatgacgttggtcttgtactgagttcactgcaggcatcaatttacaggggcggatataatagattcgcaccttactag

SEQ ID NO: 239438 - DNA, 1725 bp, synthetic construct
  misc_feature 1..1725: note = Description of Artificial Sequence: Synthetic coding sequence
  source 1..1725: mol_type = other DNA
atggcgcataataaaattccgcctcggtggctcaattgtccgcgtcgtgggcagcccgtggccggtcgcttcttacccctgaaaactatgcttggtccacggtatgactcccaagtagctgaggagaacagattccatccaagcatgttgtccaactatttaaagtccctcaaagtcaagatgggcttgttagtggacctgactaatacttcacggttctacgacaggaacgacattgagaaggagggaattaagtacataaagcttcaatgcaagggtcatggtgaatgccccactactgagaacacagagacctttatacggctgtgcgagcggttcaatgagaggaacccacccgaactgattggagtgcattgtacccatggcttcaaccgcacagggttcctgatctgtgcattcctggttgaaaaaatggactggtccattgaagcggcagttgctacattcgcccaggcaaggcctccgggtatctacaagggcgattacttgaaggaactgttcagaagatacggcgatattgaagaggccccaccaccaccattgttgcccgattggtgctttgaggacgacgaagatgaagatgaggacgaggacggaaaaaaggagtcagagccaggcagctctgctagctttggaaaacgacggaaagagcgacttaagctgggtgccatctttttggaaggggtcaccgtaaaaggtgtcacccaggttactacccaacctaagctcggggaggtgcagcaaaaatgccaccagttttgcggctgggagggtagcggatttcctggggctcagcccgtatccatggataagcagaatatcaagctgctggatctcaagccatacaaagtgagctggaaagctgacgggaccagatacatgatgctgatcgacggtacgaatgaggtgttcatgattgatcgggacaacagtgtcttccatgtgtccaatctagaatttcccttccgtaaagatctgcggatgcacctgtccaatactctcttggatggggaaatgattattgaccgcgtaaacggtcaggccgtgcctagatatcttatctatgatataatcaagttcaactcacagcctgtgggagactgcgattttaatgtgagactacaatgtattgaaagagagatcatttcaccacgacacgaaaagatgaagaccggattgatcgacaaaacgcaagagccattcagcgtgagaaataagccattcttcgacatttgcacctccaggaaaaagtacaaacccggtcgctgtgatgatattctgaaatggaaacctcctagtttaaacagtgtagattttcggttaaaaataactcggatgggcggtgagggccttttacctcagaacgtaggactgttgtacgttggaggctatgaaaggccttttgcgcagattaaagtgactaaagagctcaagcaatacgataataagatcatcgaatgtaagttcgaaaacaactcatgggtattcatgcgacagcgcactgataaaagcttcccaaatgcctataacaccgccatggccgtgtgcaacagtatctcgaaccccgtcactaaagaaatgctctttgaattcattgatagatgcacagccgctagtcagggacagaaacggaaacatcatctggatcctgacacagagctgatgcctcccccacctccaaaaagaccacgacccttaacttag

SEQ ID NO: 239439 - DNA, 1626 bp, synthetic construct
  misc_feature 1..1626: note = Description of Artificial Sequence: Synthetic coding sequence
  source 1..1626: mol_type = other DNA
atggcccataacaagatcccacctagatggttgaattgccctagaagaggccagcctgtcgccggacggttcctgcctctcaagacaatgttaggaccacgctatgactcccaggtggcggaagagaaccgatttcatccatctatgctatccaactacttaaagtctctcaaagttaaaatggggctgctggttgacctgacaaatacttctagattctatgacagaaacgacatcgaaaaagagggcattaagtatatcaaactacagtgcaagggacacggagagtgccccactaccgagaacacagagacatttataaggctatgcgagcgcttcaatgagagaaacccacccgagctaattggagtccactgtacccacggctttaatcgtacaggtttcttaatttgtgcctttctggtcgagaaaatggattggtccattgaagccgctgtggctaccttcgcacaggcccgaccgccaggcatctacaaaggggattacctaaaggaactgttcaggcggtacggggacatcgaggaggcgccaccccctccccttctgcctgattggtgctttgaggacgacgaagatgaggacgaggacgaagatgggaaaaaggagtctgaacctggatcctccgcttcttttggcaaacgcaggaaagagcggctgaaactgggcgcaatattcctcgaaggagttaccgttaagggcgtgactcaggtaactactcagcccaaactcggcgaggtccaacaaaagtgtcaccaattctgcgggtgggaaggttccgggttccctggcgcacagcctgtttccatggataagcagaacataaagctcttggatctgaaaccatacaaggtcagctggaaggcggacggtacacggtacatgatgctaattgatggcacaaatgaagtgttcatgatcgacagagacaactccgtgtttcacgttagtaatctggaattcccatttagaaaagatctcaggatgcacttgtccaatacattattggacggagagatgatcatcgatcgggttaatggccaagccgtcccacgctatctgatctacgacatcattaaatttaacagccagcccgtaggggattgcgactttaacgttaggttgcagtgtattgagagggagataattagccctcgccacgaaaagatgaagacgggactgattgataaaacacaagagcctttttcagtaagaaacaagccattcttcgatatttgtacatctcgcaaattgctagaagggaatttcgccaaagaggtgagtcatgagatggatggtttgatctttcagcctacaggaaagtataaacctggaagatgtgatgatatccttaaatggaagcccccttctttgaacagcgtggacttcaggctgaaaataaccaggatgggcggagaggggctcttaccacaaaatgtcggcctgttgtacgtcgggggatacgagagaccttttgcccaaattaaagtgtgcctattcatcttctccgtgttgtttctcgacgtgttactgtcgcgcatacaccagaatctcgccaataacaatcagcacatcaaaatatcttgtagctccacactgggcggttag

SEQ ID NO: 239440 - DNA, 1794 bp, synthetic construct
  misc_feature 1..1794: note = Description of Artificial Sequence: Synthetic coding sequence
  source 1..1794: mol_type = other DNA
atggctcacaacaagatccctccgagatggctcaactgccccagacgaggccagcctgtggcaggccgattcctgcccctgaaaactatgctggggccaagatacgattcacaggtggccgaggaaaatagattccatccctccatgttgagcaactacttaaaatctctgaaagttaaaatgggactcctcgtcgaccttactaatacctctagattctacgaccgcaacgacatcgaaaaagagggtatcaagtatatcaagctgcaatgcaagggccacggtgaatgtcctacaactgagaataccgaaacctttatcaggttgtgcgagaggttcaacgagcgtaaccccccagagctaatcggcgtgcactgcacgcatgggtttaaccgcacaggctttttgatttgcgcgttcctggtggagaagatggattggagtattgaggccgcagtggctaccttcgcccaagcccgaccgcctggtatttataaaggagactacctcaaagaattatttcgcagatatggtgacattgaggaagcccctccaccacccctgctgccagactggtgcttcgaagatgacgaggatgaagacgaggacgaggatggcaagaaagagtctgaacccggttcatctgcatccttcggtaagaggcgaaaagaacgactgaaacttggggctatttttttagaaggagtcacagttaaaggagtgactcaggtgactacccagccgaaactgggagaagtgcagcagaaatgtcaccagttctgcggatgggaggggtccgggtttccaggagcgcagcctgtgtctatggacaagcaaaatataaagctgttggacctgaaaccctacaaggtgtcatggaaggctgatggcactcgatacatgatgttgatcgatgggactaatgaggtgtttatgatagatagggataattctgtgtttcacgtgtcaaatcttgagtttccttttcgcaaagacttgaggatgcacttatctaataccctactcgatggggagatgatcatagatcgtgtgaacggacaagcggtgcctcggtacctgatctacgatattattaagtttaattcacagcccgtgggggactgcgactttaacgttagactacagtgcattgagcgggaaatcatctctcctcgccatgaaaagatgaaaaccggattaatagataaaactcaggaacctttctccgtgagaaacaagcccttcttcgacatctgcacaagtagaaaattactcgaggggaacttcgctaaggaagtgtcccacgagatggatggacttattttccagccaaccggtaagtacaagccaggtcggtgcgatgatatactcaaatggaagcctccaagtttaaacagtgttgatttccgactcaaaatcacgcggatggggggtgaggggctccttcctcagaacgtgggactgctttacgtgggaggctacgagcggccattcgctcagataaaggttacaaaggagttgaagcaatacgacaacaagattattgagtgcaaatttgaaaataacagttgggtgtttatgcgtcagcgtacggacaaatcctttcctaatgcttataataccgccatggccgtttgtaattcaatctctaaccctgtaaccaaagaaatgctgttcgagttcatcgataggtgcaccgctgcttcacaaggacagaaaaggaagcaccatctcgacccggatactgagctgatgcctcccccacctccaaagcgacctaggcctcttacctag

SEQ ID NO: 239441 - DNA, 1707 bp, synthetic construct
  misc_feature 1..1707: note = Description of Artificial Sequence: Synthetic coding sequence
  source 1..1707: mol_type = other DNA
atgttagggccacgatatgactctcaggtcgctgaggagaacagattccacccttccatgctgagcaactacctgaagtccctcaaggtaaagatgggcctgctggtggatctgacaaacacaagcaggttttatgacagaaacgacattgagaaggagggaataaaatacattaagctgcaatgtaaaggccacggcgagtgtcccaccacagagaatacggagacctttattcgcctttgcgagcgatttaacgagaggaatcccccagaactcatcggtgttcattgcactcacgggtttaaccgcaccggctttcttatttgtgcctttctggtcgaaaagatggactggtccatcgaggccgctgtcgccacctttgcgcaggccaggcccccagggatttacaaaggcgactacctaaaagagttatttcggagatatggggatatagaagaggcccctcccccacccctgttgcctgactggtgcttcgaggacgatgaagatgaagatgaagacgaggatggtaaaaaggaatccgagccgggtagctccgcctctttcggaaaacggaggaaggaacgattgaagctgggcgctattttcctggaaggcgttactgtaaaaggcgtgacacaagtgaccacccagccaaagctaggtgaggttcaacagaagtgtcaccagttctgtggatgggagggctctggcttccccggtgcccagcctgtgtcgatggacaagcagaacattaaattgctggacctcaagccctacaaggtgtcatggaaggctgacgggaccagatacatgatgctgattgacggtacgaatgaagtcttcatgattgacagagacaactcagtctttcacgtgtctaatcttgagtttccctttaggaaagacctacggatgcacctgagcaacaccttgctcgatggtgaaatgattatcgatcgcgttaatggccaggcggttcccaggtatctaatctacgacatcatcaaatttaactcgcagccagtaggcgactgtgattttaatgtgcgcttacagtgtatagaacgagagattatctctccgaggcacgaaaagatgaaaactggcctgatcgataaaacccaagagccattttccgtgcggaacaagccctttttcgatatatgcacgtcacgcaagctgctggaaggcaacttcgctaaggaggtcagccatgagatggacggtctgatcttccagccaacaggaaaatataagcctgggagatgcgatgatatcctgaagtggaaacccccttcactgaattccgtagattttagactgaagatcacccggatggggggtgaaggcctcttgccgcagaacgtaggattgctatacgtgggaggctacgagagaccttttgctcagatcaaggtgaccaaggaactcaaacagtatgataacaaaattatcgaatgcaagtttgagaacaactcttgggtgttcatgaggcagagaaccgacaaatctttcccaaatgcatataatacagctatggccgtgtgtaacagcattagcaatccggttacaaaggaaatgttgtttgaatttattgaccgatgcacagccgctagtcaaggacaaaagcgtaaacaccacctggaccccgacactgaattgatgccgccaccaccccctaaacgtccgagaccgctgacctag

SEQ ID NO: 239442 - DNA, 1545 bp, synthetic construct
  misc_feature 1..1545: note = Description of Artificial Sequence: Synthetic coding sequence
  source 1..1545: mol_type = other DNA
atgggcctgctggtggacctgacaaatacttctaggttttacgatcgaaacgacatcgagaaagaaggtattaagtacattaaactccagtgcaaggggcacggcgaatgtcccactaccgagaacacagagacatttatacggctctgcgagaggtttaatgaacggaaccccccagaactgatcggagtgcattgtacccacggttttaaccggactgggttccttatttgcgctttcctggttgaaaagatggactggtccattgaggcagccgttgctacctttgcacaggcacgcccacccggaatttataagggagactatttgaaagagctgtttcgccgttatggcgacattgaagaggcgcctccacctcctctactgcctgattggtgcttcgaggacgatgaagacgaggacgaggatgaggacggaaaaaaggagtctgagccgggtagctccgcatcctttggtaaacgaaggaaagaacggctgaagctgggggcaattttccttgagggggtgaccgtgaagggggtgactcaagtgacaacacagccaaagctcggtgaggtccaacagaaatgccaccaattttgcggttgggaaggatcgggattcccaggggctcaaccagtgtccatggataagcagaatataaaactcttagacctcaagccatataaggttagctggaaagctgacggcacaaggtatatgatgcttatagatggcactaatgaagtttttatgattgatagggataacagtgtctttcatgttagcaaccttgagtttccgtttcgcaaggatcttcggatgcacctgagcaataccctgttagacggggaaatgatcatcgatagggtcaacggacaagctgttcctcgttatttgatatatgacatcataaaatttaactcccagcctgtgggtgactgtgactttaacgttaggttgcagtgtattgaacgcgaaattatttcccctcgtcatgagaaaatgaaaacggggctcatcgataagacccaggagccattttccgtgcgcaataagcccttcttcgacatctgcacctccaggaagaagtacaaacctgggcgatgtgatgacattcttaagtggaaaccaccatctttaaactctgtcgactttaggctgaaaataacccgcatggggggtgagggcctcctgcctcaaaacgtcggtttactctatgtagggggatacgaacgacctttcgcccagatcaaggtaaccaaagaacttaaacagtacgataacaagatcatcgaatgtaaatttgaaaataacagctgggttttcatgagacagagaacagataaaagtttccccaacgcctataataccgcaatggccgtctgcaactctatctcaaaccctgtgaccaaggagatgctattcgagttcatagaccgctgtactgctgcatcacagggtcaaaagagaaaacaccatttggaccccgacacagagcttatgccccctccaccacctaaacgcccacggccactgacatag

SEQ ID NO: 239443 - DNA, 1263 bp, synthetic construct
  misc_feature 1..1263: note = Description of Artificial Sequence: Synthetic coding sequence
  source 1..1263: mol_type = other DNA
atggccgctctcgtcagaccggcacggtttgtggtccgccctttgctacaagtcgtacaagcctgggatctggatgccagacgctgggtcagagcccttagacgaagtcctgtcaaggttgtgtttccctctggggaagtcgttgaacagaagcgagcccctggcaaacagcccagaaaggccccatccgaggcaagcgctcaggaacagcgcgagaagcaacctcttgaagaatccgcttcacgcgctccttcaacttgggaggagagtggcttacgatatgacaaggcttatccgggagacagacgcctatcatccgtgatgaccattgtcaaatctagaccctttagagaaaagcaggggaagatcttgctggaagggaggcgattaatcagtgacgctcttaaggccggtgcagttcctaagatgttcttctttagccgcctggagtatttgaaagagctgcctgtggataaattaaagggcgtttcacttattaaggtgaaattcgaagatattaaagattggtctgatctggtgacccctcagggtataatgggtatctttgcaaaaccggatcacgtgaaaatgacgtacccaaagacccaattgcaacatagcttgcccctcctgctcatctgtgacaacctgagggatccaggtaatctgggcaccatcctcagaagcgccgcaggtgccggatgtagtaaggtgttgctgacaaagggctgcgtagacgcgtgggaacccaaagtgctgagagcaggcatgggcgcacactttagaatgcctattattaacaatctggagtgggagacggtaccaaattatctgccgcctgacacaagggtgtacgtggcagacaattgtgggctgtatgcacaggcggagatgagtaacaaagcctccgaccacgggtgggtgtgcgaccagagggtgatgaaattccacaaatacgaggaggaggaggacgtggaaacaggtgccagccaggactggctacctcacgtggaggttcagtcttatgacagcgattggacagaagcaccagcggctgtcgtgatcggaggggagacctatggagtctcgctagagagcctccagcttgcagagtctactgggggtaagagactcctgattcctgtggtccctggggtggactccctcaatagtgcaatggccgcaagcattctgctcttcgaaggtaagcgccagctccgcggtcgcgcagaggatttgtcccgcgatcggagttatcactag

SEQ ID NO: 239444 - DNA, 4182 bp, synthetic construct
  misc_feature 1..4182: note = Description of Artificial Sequence: Synthetic coding sequence
  source 1..4182: mol_type = other DNA
atgttgagccgcccaaagcctggcgagagtgaggtggatctgctgcactttcagtcgcaatttctggcagctggagcagctcccgctgtacagctcgtaaaaaagggcaaccgcggtgggggtgacgctaacagtgaccggcctccacttcaggaccatagagatgtggtgatgctggacaatctgcccgacctccctcccgctctggtcccatcccctcctaagagggcaaggccgtcacctgggcactgcctcccagaagatgaggaccccgaagaaaggctgcgccgtcatgatcagcacatcaccgccgtgctcactaaaattatcgaacgggacactagtagcgtggcggtgaacctccccgtcccatcgggggtggccttccctgcggttttccttcgttccagggatacccagggcaagtctgcaacaagcgggaagcgttctatctttgcacaggagattgcagcgagacgaatagcagaagcaaaggggccatcggtgggagaggtggtgccaaacgttggaccacccgagggtgcagttacctgtgaaacacccacccccaggaaccaaggctgccagctacctggaagttctcactcatttcaaggccctaacctggtgaccgggaagggattacgtgatcaagaggccgaacaggaggcccagacaatacatgaagaaaacattgccagactccaggccatggcccctgaggagatcttgcaggaacagcagcgtctgctggctcaactcgacccaagcttagtggcattcctgagatcccactcacacacacaggagcaaaccggcgagaccgcttctgaagaacaacgtccaggaggcccaagtgcaaacgtaaccaaagaggagcccctgatgtccgcctttgcatccgagcccagaaagcgcgacaaactcgaacctgaagcccctgcattggctctcccagtcaccccccagaaggagtggcttcatatggacaccgtggagctcgagaagctccactggacgcaagatctgccgccagtacgtcggcaacagacgcaggagagaatgcaggctagatttagtttacagggggaacttctggcccctgatgtagacctgccaactcaccttggtttgcaccatcatggggaggaagctgaacgggcaggctactcattacaagaactgtttcatctcactcggagccaggtgtctcagcagagagccttggcattacatgtattagcccaggtcatctcacgcgctcaggctggtgaattcggtgacagattagccggaagtgtgctaagtctgctgcttgacgccggattcttgttcctcctgaggttttctttagatgacagagttgacggggtcatcgccacagccattagagcacttcgggctctcctcgtggcccctggagatgaggaactgctggattccaccttctcctggtaccatggagccctgacgttccccctaatgccatcccaagaggacaaggaggatgaggatgaggatgaagaatgcccagctgggaaggcaaagagaaagagcccggaagaagaatcacgccctcctcctgacttagcaagacacgacgttattaaagggctgctggccacttctctactcccaaggctcagatacgtacttgaggtgacctacccaggtccagcagtggtgctcgatattttggctgtgctcatccgtttggcccgacattcgcttgaatccgccacccgcgtgctcgagtgtcctagattgatcgaaacaattgtcagagaatttcttccaacctcttggagcccagtcggcgctgggccaaccccgagcctctacaaagttccctgcgccaccgcaatgaagctccttagagtcctcgcgagcgccggtagaaacatagcggcacggttgctaagtagttttgaccttaggtctaggctctgtagaatcattgctgaggcaccccaggagctggctttgccccctgaagaagctgaaatgctctctaccgaggccctacgtctttgggccgtggctgcaagctacggtcaaggaggatatctgtatcgagagctgtatccagtcttaatgagagctctgcaggtcgtgccacgagagctcagcacccatccacctcagccgttatccatgcagcgcatagccagtctgttgactctgcttacacagctgacgttggccgctggttccactccagccgagacaattagcgacagtgccgaggcttccctgtcagctactccaagccttgtgacttggacacaggtgagcggacttcagcctctggtcgagccatgcttgaggcaaacacttaagttattatcaagaccagagatgtggcgggcagtggggcctgtccccgtggcctgcctgttgtttttaggtgcttattatcaggcttggtctcagcaaccctctagttgtcccgaggattggctgcaggatatgcagaggctctccgaagaactcctgctgccacttctaagccagcccacgctgggttcactgtgggatagtctgaggcattgctccttgctgtgcaatcctctgagctgcgtccccgcacttgaggcaccgccttcactggtgtcgctgggctgttccgggggttgcccgaggttgagtcttgcgggatctgcttctccctttccttttttgactgccctgcttagcctgctgaataccctggcccagatacataaaggattgtgtgggcaactggctgcgatcttggctgcccctggcttacagaattattttctccaatgtgtggctcctggggcagccccacaccttactccctttagtgcctgggcgctgcgccatgagtaccatttgcagtatttggcactggcactggcccaaaaagcagctgcactgcagccactgcccgcaacccacgcggcactgtaccatggtatggcccttgcgcttctaagcagattgctccctggttccgaatatttgacgcacgaacttctgctctcttgtgtgtttcgattggagttcttgcccgagcgcacatctggcggacccgaggcggctgacttcagtgatcagcttagtctcgggagttctcgcgtgcccaggtgtggacagggaaccctgcttgcacaggcgtgccaggatttgccatcaatccggaattgttatctaactcattgcagtccagcgcgtgcaagcctactggcttcgcaggcccttcatcgaggtgaactgcaaagagtgccaacattactgcttcctatgcccaccgaaccattgttgccgaccgattggccattcctccctttgattaggttgtatcaccgagccagtgacacaccatccggactcagtcccactgacacaatgggcacagctatgcgcgtgctgcaatgggtgcttgtgctggaatcctggcggccacaggctttgtgggccgtacccccagccgctagactggctagacttatgtgcgtgtttcttgtggactctgagctcttcagagagtctccagtgcagcacttagtggccgctctgctggctcagctgtgccagcctcaggtattgcccaacctgaatttagactgtcgactccctggtttgacttcattcccagacctatatgccaatttcctggaccattttgaggccgtctctttcggcgatcacctgttcggcgctcttgtgcttctcccgctccagcgacgctttagtgtaactttgagactggcactgttcggtgaacacgtgggagcactgcgggctctgtctcttcccctcacgcagctgccagtctcactggaatgttatactgtgcccccagaagataatttagcgctgctacaactgtacttcaggactctggttaccggcgctcttaggcctcgatggtgccccgtgctttatgccgtggcagttgctcacgtcaactctttcatctttagccaggacccacagtcatccgacgaggtcaaagccgcaaggcgttctatgctgcagaagacttggctactcgcagacgaaggactacgtcagcatctgctccattacaagttgccaaattcgacactgccagagggattcgagctgtatagccagttgcccccactaagacaacactacttgcagcgcttgacatcaaccgtcctacagaacggagtaagcgagacatag

SEQ ID NO: 239445 - DNA, 1839 bp, synthetic construct
  misc_feature 1..1839: note = Description of Artificial Sequence: Synthetic coding sequence
  source 1..1839: mol_type = other DNA
atggccgactttgccggtccaagctcagccggtaggaaggctggagctccccgatgctccaggaaggcagcagggacaaagcagacctcaactctcaaacaagaagacgcttccaaaaggaaagccgagttggaagccgctgtgaggaaaaagattgagttcgagcgtaaggccctacacattgtagagcagctgcttgaggaaaacattacggaggagttccttatggagtgcggacggttcattaccccggctcactattccgacgtagtggatgagcggtcaattgtcaaattgtgcggatatccgctgtgccaaaaaaaactgggcattgtccctaagcagaaatacaagatctctactaagacaaataaggtttatgacatcactgagcgcaagtctttttgttcaaacttttgttaccaagcatccaaattctttgaggcccagattccgaagactcctgtatgggtacgtgaggaagagagacaccctgacttccaattgctgaaagaagaacaaagtgggcacagcggtgaggaagtgcaactgtgttctaaggccatcaagacatcggatatcgacaacccctcacacttcgagaaacaatacgaatcatcctcttctagcacgcactcagactcgtcctcagataatgagcaggatttcgtctcttccattttgcccggaaatcgtcctaatagtacgaatatccggccacagctccaccagaagtcaatcatgaaaaaaaaggcagggcacaaagccaactccaaacacaaggataaagagcagaccgttgtcgatgtgactgagcagctgggggactgtaagcttgacagtcaggagaaggatgccacctgcgaactgccactgcaaaaggttaatacgcagtcatcttcgaactctacacttcctgaacgactgaaggcctcggaaaactcagaaagtgagtatagtcggtcagagatcacgcttgtggggatcagcaagaaatccgcagaacactttaaaaggaagttcgccaaatctaatcaagtgtcaagaagcgtgtctagttccgtccaggtgtgccctgaagtgggcaaacgcaacttgctaaaagttctgaaagagactctaatcgaatggaagactgaggagacattgcgttttctgtatggccaaaattacgcttctgtttgccttaaacctgaggctagccttgtgaaagaggaattggatgaggacgatattatctcagaccctgactctcatttccctgcctggagggagtcgcagaacagcctcgacgagagtctcccatttcgtggcagcggcacagcgatcaagccactgccgtcctatgaaaacctcaagaaggagacagaaaaactgaacctaagaattcgcgaattctaccgaggaaggtacgtgctcggggaggaaaccacaaagtctcaggactcagaggagcacgacagcacttttcccctcatcgatagtagttctcagaaccagatcaggaaaaggatcgtcctggaaaagctaagcaaggttctgcctggcctattggttccactgcagattaccctgggcgacatctacactcagttaaagaacctggtcaggacattcagactcactaaccggaacatcatccataagcccgctgagtggacactgatagccatggtcctgctgagcttactaactccaatcctgggcattcagaaacactctcaggaaggaatggtctttacaagattcctggatacactgctggaagagctccacctgaagaacgaagacctcgagtcgctaactataatttttcgcacgagctgcctgcctgagtag

SEQ ID NO: 239446 - DNA, 1755 bp, synthetic construct
  misc_feature 1..1755: note = Description of Artificial Sequence: Synthetic coding sequence
  source 1..1755: mol_type = other DNA
atggccgactttgctggccctagcagtgcgggacggaaggccggagctccgagatgctctagaaaagctgctgggacgaagcaaacttcaacacttaagcaggaagacgcctctaaaagaaaagcagaattagaggccgcagtgaggaagaagattgagttcgagaggaaggcgctgcatatcgtcgagcagctgttggaggagaatataaccgaggaatttctcatggaatgcgggcgattcattacccccgctcactactctgacgtggtggatgagagaagtattgtaaagttatgtggttatcccttgtgtcaaaagaaactcgggattgttcccaaacagaagtataagatttccactaaaactaacaaggtctacgacatcaccgaacggaagtctttctgtagtaatttctgttaccaagcctccaaatttttcgaagctcaaattcctaagacccccgtgtgggtgcgggaagaagagagacacccagattttcagctgctgaaggaggagcaaagcggccacagtggcgaggaagtgcagctatgttccaaggcaatcaaaacctcggatattgacaaccccagccacttcgagaaacagtacgagagctcttcatctagcacccactcggattcttcgtccgacaacgagcaggactttgtgtcatccatactgcccggtaacagaccaaattccacgaacatccggcctcagctccatcagaagtcaatcatgaaaaagaaagccggacacaaagccaatagcaaacataaggacaaggaacaaacagtcgtggatgtgaccgaacagctgggggattgcaaactggactctcaggagaaggacgctacttgcgaattacccttacagaaagtgaatacacagagcagttccaactcaactttacctgaaaggttaaaagcatccgagaatagcgaatctgagtattctagatccgagatcaccctggtgggaatttctaagaagagtgccgagcactttaagcgcaaattcgccaagagcaaccaagttagccgatcagtgtctagcagtgtgcaagtgtgccctgaggttggtaagaggaaccttcttaaggtgctgaaggaaaccctgatcgaatggaaaactgaggagaccttgcgtttcctttacggccaaaactacgcgagcgtctgtctaaaacccgaagcctctttagtgaaggaagaactcgatgaagatgacatcatctctgaccctgacagccacttccccgcatggagggaatcccagaatagtttggatgaaagtttgcctttcagaggcagcggaacagcaatcaaacctctgcccagttatgagaatcttaagaaggagacagagaaactgaacctaagaattagggagttctaccgtgggaggtacgtcctgggcgaagagacgacaaagtcgcaagattccgaagagcacgactcaacgtttcccctgatcgactcctccagccaaaaccagataaggaagcgcatcgtgctcgaaaagctcagtaaagtgttacccggactgttggtccctctccagattactctaggggacatttatacgcagctaaagaatctcgttcgcacttttaggctaactaatagaaacataatccacaagcccgcagagtggaccctcattgctatggtcctactgtccttcttgctcaatgtaaagactaggatcaaaaccttcatgatgatctattttcatctcatgaatagctag

SEQ ID NO: 239447 - DNA, 1998 bp, synthetic construct
  misc_feature 1..1998: note = Description of Artificial Sequence: Synthetic coding sequence
  source 1..1998: mol_type = other DNA
atgacaagtgcaaacaaggctatcgagctacagcttcaggtcaaacagaacgctgaagaactccaggattttatgcgtgatctcgagaattgggagaaagacatcaagcagaaagatatggaactgaggcgccaaaacggagtgccagaggagaatctcccgcctatccggaatggaaactttagaaagaaaaagaagggaaaggccaaggagtcctctaaaaaaacgcgcgaagagaatacgaaaaaccggatcaaaagctatgactacgaagcatgggccaagctggacgttgatcgaattctcgatgagctggataaggacgatagcactcatgagagcctgtctcaagaaagcgaaagtgaggaagacggtatccacgtcgactcccagaaggcactggtcctgaaggagaaaggtaataagtattttaaacagggtaagtatgatgaggccattgactgttatactaaaggaatggacgccgatccatacaaccccgtgttaccgaccaaccgggcttctgcatatttccgtcttaaaaagttcgctgtggccgagtctgactgtaacctggcggtcgccctgaacagatcttatactaaggcatatagcagacgtggtgcagccaggtttgccctccagaaactggaagaagccaagaaggattacgagcgcgtcctagaattagagcctaataactttgaagccacaaacgaattacgcaagatatcccaggccttggcctccaaggaaaactcttaccctaaggaagccgatatcgtgatcaaaagcacggaaggcgagcgcaagcagatagaagcacagcagaacaagcagcaggcaatatcagaaaaagaccgtgggaatgggttcttcaaggaaggaaaatatgagagagcaatcgagtgctacacaagggggatagccgctgatggtgctaacgcactgctgccggctaaccgggcaatggcttacctaaagatacagaagtacgaggaggcagagaaagattgcacccaggccatcctgctcgacggaagttactctaaggcgtttgcccgtagggggacagcaagaacattccttggcaaactcaacgaggccaagcaggactttgagaccgtgttgctgctggaacctggaaataaacaggccgtgactgagctttctaagattaagaaggaactgatcgagaaaggccactgggatgacgtcttcctggactccactcaaaggcagaacgtcgtcaaaccaattgacaacccccctcatccagggtcaacaaagccactgaaaaaggtgatcatcgaagagacagggaacctcattcagaccatagatgttccagatagcacaacggcagcagccccagagaataaccccattaatttagccaatgtaatcgccgctacaggaaccaccagtaaaaagaattcttcccaagacgacttgttcccaacatccgacactcccagagcaaaagtactgaagattgaagaggtgtcggatacgtcgtccttacagccacaggcttctctgaagcaggacgtctgccagagctacagtgagaagatgcctattgagattgagcagaagcccgctcagttcgctacaactgtgctccctccaataccggcaaactcatttcagctggagagtgatttccgtcagctgaaaagctctcctgatatgctttaccagtaccttaagcaaatagaaccatcactctatcccaaactgtttcaaaagaatttggatccggatgtgtttaaccagattgtgaagatcctgcacgacttttatatcgagaaggagaaacctctgctgattttcgagatcctccaaaggctgtcagaattaaagaggttcgacatggctgtgatgttcatgagcgagactgagaaaaagattgccagagcactgtttaatcatattgataaatctgggctcaaggactcaagcgtcgaagagctgaagaaacgttatgggggatag

SEQ ID NO: 239448 - DNA, 1896 bp, synthetic construct
  misc_feature 1..1896: note = Description of Artificial Sequence: Synthetic coding sequence
  source 1..1896: mol_type = other DNA
atgacctccgctaataaagccatcgagctccagctgcaggtgaaacagaacgcagaggaactgcaggacttcatgcgggacctggagaactgggagaaggatattaagcaaaaagatatggagctaagaaggcaaaacggcgtgcctgaagagaatctgcctccaatcaggaatggtaatttccgtaagaaaaaaaaaggaaaagccaaagagagttctaaaaagactagagaggagaatacaaagaatcggattaagagttatgattacgaggcctgggccaagctcgatgtggaccggattcttgacgagttggataaggatgacagcactcacgaatcactcagccaggagagtgaaagtgaggaagacggcatccacgtggatagtcaaaaagcactcgttttgaaagagaaaggaaataaatactttaagcagggcaagtacgacgaagccattgattgctataccaaaggaatggacgcggacccttacaaccccgttctgcctactaatagggcctcagcctattttaggctgaagaaatttgctgtcgctgagtcggattgcaacttagcggtagccctgaacagatcctacaccaaagcctattcgcggaggggggctgccagattcgcccttcagaagctcgaggaggccaaaaaagattatgaacgtgttctggaactggaaccgaacaattttgaggcgaccaatgagctgcgtaagatatctcaggccctggccagtaaagaaaactcctatcctaaagaagctgatattgtgatcaagtcaaccgaaggggaaagaaagcagatcgaagctcagcagaacaagcagcaggcaatttccgagaaagatcgaggtaatgggttcttcaaggagggaaaatatgagcgtgccatcgagtgttacacacgagggatcgcagcagatggtgccaacgccttactgcctgctaacagggcaatggcttatctgaaaatccagaagtacgaggaagcagaaaaggactgcacccaggccattcttttggatggatcatactctaaggcctttgctcgacgaggtacagcacggacctttctgggcaaactgaacgaagcaaagcaggatttcgagacggtgctgctgctggaaccgggaaacaaacaagctgtgaccgaactgagcaaaatcaaaaaaaaacctctgaagaaggtgataatcgaggagacagggaacctgattcagaccattgacgtgccagatagcaccacggccgctgctcctgagaataatccgattaacctggcaaacgtcattgccgcaaccggtactacatcaaagaaaaacagctctcaggacgatttatttcccactagcgatacaccacgcgcaaaggtgctcaagatcgaggaagtgtctgatacctccagtttgcagccgcaggcttccctgaaacaggatgtatgccagagttattctgagaaaatgccaattgagattgagcaaaagcccgcacagtttgctaccactgtcctacctcctattcccgcaaattcattccagttagaaagtgacttcagacagctaaagagctcgccagatatgctgtaccagtacctgaaacagatcgaacccagcctgtaccccaaattgttccagaagaatcttgatcccgacgtgtttaatcagatagttaagatacttcatgatttttacattgaaaaggaaaaaccgctgttgatcttcgaaatcctccagagactctctgagttgaagcgctttgacatggccgttatgttcatgtccgagacagaaaagaagatagcccgtgccctgtttaatcatatcgacaagtctggcttgaaagactcctcagtggaagagctgaagaaaagatacggaggctag

SEQ ID NO: 239449 - DNA, 1521 bp, synthetic construct
  misc_feature 1..1521: note = Description of Artificial Sequence: Synthetic coding sequence
  source 1..1521: mol_type = other DNA
atggacgccgatccctacaatccggtactccctactaatcgcgcatcggcatacttcaggttgaaaaaatttgccgttgctgagtctgattgtaatcttgccgtggcacttaatcgctcttacacaaaggcctattcccgcaggggagcagctcggttcgcgctccagaagctggaagaggccaagaaggattatgagcgggtattagagctggagccgaataatttcgaagcaacaaatgaacttcgcaaaatctcccaggccttggcaagcaaggaaaattcctatccaaaggaggccgatatagtgattaaatccacagagggggagcggaaacagatcgaagctcagcaaaacaagcagcaagccattagtgagaaggatcggggtaacgggttttttaaggaaggtaagtatgaaagagcaatcgagtgttacactaggggcattgctgcggatggcgcaaacgcccttctgccagccaatcgcgctatggcgtatttgaagatccagaaatatgaagaagccgaaaaagattgcacacaagccatcttgctcgatggatcctacagcaaagcatttgcgagaagaggaacagctaggacattcttaggcaaactcaatgaggctaaacaggacttcgagactgtgctccttcttgaacccggaaacaaacaggcagtgacggagctgagtaaaattaaaaaggagctcattgagaagggacactgggatgatgtcttcctcgattcaacacagcggcagaacgtggttaagcccatagataatccgccacaccctgggtccaccaagcccttaaaaaaggttatcattgaagaaaccggtaacctcatccagaccattgacgtgcccgactccaccacagccgcagcccctgaaaataacccgataaacttggctaacgttatcgccgctacgggaactacatcgaaaaaaaatagttcccaagacgacctattcccaacatccgacaccccacgggctaaagtcctgaaaatcgaggaagtgtccgatactagttctctgcagcctcaggcttcgttgaaacaagacgtttgccaatcctatagcgagaaaatgccaattgagattgagcaaaaacccgcacagtttgctaccacagtgctgcccccaatccccgctaattcattccaacttgaaagcgactttagacaactgaagagcagccccgacatgctataccagtatctgaaacagatcgaaccctcactatatccgaagttgtttcagaagaaccttgaccccgatgttttcaatcaaatcgtcaagatacttcacgacttctatattgagaaggagaaaccattgctgatctttgaaatcctgcagagactgtccgagctcaagcgctttgatatggccgttatgtttatgagtgaaacagagaagaaaattgcacgcgctctcttcaaccacatagacaagagcggactgaaagattcttctgtggaagagttgaaaaagcgttacgggggatag

SEQ ID NO: 239450 - DNA, 4820 bp, synthetic construct
  misc_feature 1..4820: note = Description of Artificial Sequence: Synthetic coding sequence
  source 1..4820: mol_type = other DNA
atgatcgctgaacccgcacatttctacctgttcggcctcatctgtctgtgttcgggctcacgcctcaggcaggaggattttccaccacgcatcgtggaacaccctagtgacttgatcgtctcgaagggtgaacctgctaccctgaattgtaaggccgagggacgtccaacacctacaattgagtggtataaaggaggcgagcgggtcgaaacggacaaggatgaccccagatcacacaggatgctgctgccaagcgggtccctgttcttcctaaggattgtccacggaagaaaatcccgccctgacgagggggtgtatgtgtgcgttgccaggaactatctgggtgaggccgtctcgcacaatgccagtttggaagtggctattttacgggacgacttcagacagaacccctccgacgtaatggtggctgtcggggaaccagccgttatggaatgccagcctccacgagggcatccagaacccacaatctcatggaaaaaggatggctctccactagacgacaaagacgagcggatcactatcagggggggaaaactgatgatcacctacaccagaaagtcagacgcagggaaatacgtatgtgtcggcacaaacatggtgggggagagagagtccgaggttgctgaacttaccgtcctggaacggccatcttttgtaaaaaggccatcgaatcttgctgtcacagtagatgatagcgctgaatttaaatgtgaggccaggggagatcccgtgccaaccgtacgctggcgaaaggacgacggagaactgcccaagtctcgttacgaaatccgggacgaccatacgctgaagattcggaaagttaccgctggggacatgggttcttacacttgtgtggctgaaaacatggtaggtaaagccgaagctagcgccacattaaccgttcaggctccgtctgagcctcctcatttcgtcgtaaagccaagggatcaggttgtggcgctgggaaggacagtgacattccagtgcgaagcaaccggaaacccccaacccgctattttctggaggcgggagggctcccagaacttgctattctcatatcagcccccacagtcatcatcgcggttcagcgtgtcccagactggtgatttaacgataaccaacgtacaaagaagcgatgtgggttactatatatgccaaacactgaacgtcgctggtagcattatcaccaaggcctacttggaggtgactgatgtgatcgcagacaggcctccccctgttatcaggcagggaccggtcaatcagacagtggctgtcgacggcaccttcgtcctgagttgtgtcgccactggatcgcccgttcccacaattctgtggcggaaggatggggtgctggtaagcacacaagacagtaggatcaagcagcttgagaacggagtcctccagatacggtatgccaaactcggcgatacaggtcgctatacatgcatagccagtaccccgtccggagaggctacatggagcgcttacatagaggtccaagaatttggggtgcccgtgcagcctccaagaccaaccgaccctaatctgattccttccgcccctagcaaacctgaggtcaccgatgtgtctaggaacaccgtgaccttgagctggcaacccaaccttaattccggtgccactcccaccagttacattatagaggctttctcacacgcaagcgggtcctcctggcagaccgtcgcggagaatgttaagacagaaacctccgcaatcaagggactaaagcccaacgcaatttacttgttccttgtgagagctgccaatgcatacggaatctctgaccccagccaaatctctgatccagtcaagacccaggatgttctcccaacatctcagggggtcgatcacaagcaagtgcagagagaattagggaatgcagtcctgcatctccacaatcccactgtgttatccagtagttccattgaggtgcactggacggtagaccagcagtctcagtacattcaaggctataaaatactgtacagaccttctggggctaaccatggtgaatccgactggctggtgtttgaagtgcgaactcctgcaaagaattcagtcgtgattccagatctgcgcaagggcgtcaattatgagataaaggctcggccattttttaatgaattccaaggtgctgattccgagataaagttcgctaaaaccttggaggaggcgccttctgcgccaccacaaggtgtcactgttagtaagaacgatggaaatggaacagctattctggtatcatggcagcctcctccggaagacacccagaatggaatggtgcaggaatacaaagtctggtgcctgggaaatgaaactaggtaccacattaataagaccgtggacgggagcacatttagcgtggtgatcccttttcttgtgcctggaatcagatactcagtggaagtggcagctagcacaggagctggatcaggggtcaaatctgaaccccaattcatccagctagacgcacacggaaatcccgtgtcccccgaggaccaggtgagtctcgcacagcaaatttcagacgtggtgaaacagccagcgttcatcgcaggaatcggggcagcttgctggataatcctcatggttttttccatttggctgtataggcaccgcaagaagcggaacgggctcacgagcacgtacgcagggataaggaaggtgacgtatcagaggggaggcgaggccgtgtccagtggaggacggcctggcttgctgaacatctctgaacctgcagcgcagccctggttggcagacacttggcctaacactggtaataatcacaatgactgttccattagttgctgcaccgctgggaatgggaactccgactcaaacctaaccacctattccaggcctgctgattgcatagcaaactataacaaccagctcgataacaaacagacaaatctcatgctacctgaatcgactgtgtacggggacgtggaccttagcaacaaaatcaatgaaatgaaaacctttaactccccaaatctgaaagacggcaggttcgtgaatccatcaggccagcccacgccctacgctacgactcaactgatccaaagtaatctttccaacaatatgaacaacggttccggagattctggggaaaaacactggaaacccctcggccagcagaagcaggaagtcgcgcctgtccaatataatattgtcgaacaaaacaaacttaacaaagattaccgggctaacgacaccgtgccgccaactatcccatataatcagtcttacgatcaaaacactggcggaagttacaattcaagtgaccgcggatcgagcacgtccggaagccagggtcataaaaagggcgcacggacgcccaaagttcccaaacagggaggtatgaattgggcagatctcctgccaccccctcccgctcatcccccaccgcactctaattctgaagaatacaatatctcggtggacgagtcttatgaccaagaaatgccctgccctgtccctccagccagaatgtacctgcagcaggacgagctcgaggaggaggaggacgaacggggacccacccctcctgttcgcggagccgcaagtagcccagccgcagtgtcctacagccatcagtcgacggccactctgacaccatcccctcaggaagagttgcaacctatgctccaagattgcccagaagagacgggccatatgcagcaccagcccgacagacggcgtcagccggtctctccaccaccgccaccgcgtccgatctccccccctcatacttatgggtacatctccggaccgttagttagcgacatggataccgacgcgcctgaggaggaggaggacgaagcagatatggaggtggcaaaaatgcagacgcgtagactactactccgcggattagagcagacgccggctagctctgtaggagatttggagtctagtgtgacgggcagcatgatcaacggttggggatccgcaagcgaggaggataacatatcaagtgggcgaagctcagtgtcctcatccgacgggtcctttttcacagatgctgacttcgcccaggcagttgccgctgccgctgagtatgcgggactcaaagtggccagacgacagatgcaggatgctgcaggtcggagacactttcacgcctctcaatgcccacggcctacctctcctgttagcacagattcgaacatgagtgcggctgtgatgcagaaaactcggcctgctaaaaagttgaaacatcagccaggccatctgcgtagagaaacgtacacagacgacctccctcctccacctgtgcctccccctgcgatcaagagccctaccgcacagtcaaagactcagctcgaggtaagacccgtagtcgtgcccaaactgccttccatggatgctcgtaccgaccgcagcagtgacaggaagggttcctcctacaagggacgagaggttctggacggcaggcaggtagtggatatgcgcaccaatccaggggaccccagagaagcacaggagcagcagaacgacggcaagggaaggggcaacaaagccgctaagcgcgatttgcctccagcaaagacccacctgatccaagaggacattctcccctattgccgcccaacgtttccaaccagcaataatcctcgggacccaagctcatcatcgtccatgtcctcccggggatctggtagccgtcagagggagcaggcgaacgttggcagaaggaacattgccgagatgcaggtgttggggggttatgagcgcggtgaagacaacaatgaggagcttgaagagacagagtcata

SEQ ID NO: 239451 - DNA, 4968 bp, synthetic construct
  misc_feature 1..4968: note = Description of Artificial Sequence: Synthetic coding sequence
  source 1..4968: mol_type = other DNA
atgaaatggaagcatgttccgttcctggtcatgatcagcctgcttagcctgtcacctaatcatctttttctggctcaattaatccctgatcctgaggacgtggaaagaggcaatgaccacgggacacccatcccaaccagcgataatgatgacaatagccttggctatactggaagtcggctgaggcaggaggatttccctccccgtatcgtcgagcacccatcagacttaatcgtgtccaagggtgagcccgcaaccctgaactgtaaagcagagggccgtccaacacctacaatagagtggtacaaagggggtgaacgtgtggagacggataaggatgacccacggtcacatagaatgctgctgccctctggctccctgtttttcttgcggattgtacacggtcgcaagtcaagaccagacgagggcgtgtatgtctgcgtggctcgcaactacctcggtgaagctgtgagccacaacgcttcgctggaagtcgcaatcctccgcgatgattttaggcaaaatccctccgacgttatggtggctgtaggtgaacctgccgtaatggagtgccagcctccacgcggtcatccagagcccactatctcttggaagaaggacggctctcccttggacgacaaggatgagcgcataacgatccgaggtggaaagctgatgatcacctacacaagaaaatcagacgccggtaaatatgtttgcgtgggcactaatatggttggtgagagggagagcgaagtagcggagctcacagttctggaaaggccctcattcgttaaacgccctagcaatctcgccgttactgtggacgattcagccgaattcaaatgtgaggccaggggtgaccctgtgcccaccgtgaggtggcgtaaggatgatggagagctgccaaagtccaggtacgagattcgcgatgatcatacattaaagatacgtaaggtaacagcgggagatatggggtcgtatacctgtgttgccgaaaatatggtgggcaaagccgaggcgtctgcgacactcactgtgcaggaaccaccacacttcgtagtgaagcctcgagatcaagtggtagctctgggtagaaccgtcactttccagtgtgaggccaccggtaatccccagcctgcaattttttggagacgcgagggtagtcagaaccttctgttctcgtatcagccgcctcagtctagctctaggttttccgtatcccagacgggagatctcactatcaccaacgttcagcgttctgacgttgggtattatatttgccagactctgaatgtggcaggttctatcattactaaggcctacctggaagttactgacgtgattgcagatcggcctcctccagttattcggcaaggacctgttaaccagaccgtggctgtcgatggcacctttgtgctttcgtgcgtcgctacaggctcccctgttccgactatcctgtggcgcaaagatggagttctagtatcaacccaggacagccggataaagcaactggaaaatggcgtcctgcagattagatacgccaagctgggggacaccgggaggtatacctgtatcgctagcaccccatctggtgaggctacatggagtgcatatatcgaggtgcagggcaaagtcaacgaattcggtgttccagtgcagcccccacgtcccactgacccaaatctgatcccttccgctcccagtaagccggaagtcaccgatgtgtcccggaacacagtgaccctttcttggcagcctaacctgaatagtggggctaccccaacttcttatattatcgaggcattctcccatgcatctggcagctcctggcagaccgtggccgagaatgtcaagaccgagactagcgcaatcaaggggctgaagccaaatgccatatacctgttcctagtgcgagccgctaatgcctacggcatcagcgatccctctcagatcagtgaccctgtgaagacccaggatgttctgcccacatcccagggggtggatcacaagcaggtgcagagagagctcgggaacgccgtgctgcatctacataatccaacagtgctgtcctcttcttccatcgaggtgcattggaccgtggaccagcagagccaatacattcagggatataagattctttatcggccatctggggcaaatcacggcgaatctgactggttagtgttcgaggtgagaacacccgctaagaactccgtggtgattcccgatctgagaaaaggcgtgaactacgagattaaagccagaccattttttaatgagtttcaaggagcagactcagagattaaattcgcaaaaaccttggaagaggccccatctgcccctccacagggagtcaccgtgtcaaaaaatgatggtaacggtaccgccatcttggtatcctggcaaccgcctcccgaagatactcaaaatggcatggtacaggagtacaaagtgtggtgcctcggaaacgagactcggtatcatattaataagaccgtggatggctccacttttagcgtggttattccttttctcgtgccaggcattcggtactcggttgaagttgcagccagcaccggggctggatcaggcgtgaagtcagaacctcagttcattcaactggacgctcacggcaaccctgttagtcctgaggatcaggtgtctcttgcccagcagatttctgatgttgtcaaacagccagcgttcatcgctggaatcggtgctgcttgttggatcatccttatggtgttttcaatctggctttatcgtcacaggaagaagcgaaatgggctgacgagcacatacgccggaattagaaaagtgccctccttcaccttcacaccgaccgtgacctatcagcgtggtggggaggcagtgagctcggggggacggccaggcctcttgaacattagcgaaccagctgcacaaccatggctagccgatacctggcctaacacaggtaataaccataacgactgctcaatatcatgctgcacagccggtaatggcaacagcgattccaatctgacgacctactcccgccctgcagactgcatcgcaaactataataaccagctggacaataaacaaactaacctgatgctgcctgaatcaaccgtgtacggagatgttgatctcagcaacaagattaatgaaatgaaaacgtttaatagtcctaacctgaaggacgggaggtttgtcaacccgagtggccagcctacgccctacgctaccacccagctgattcagagcaatctgagcaataacatgaataatggatccggtgatagtggcgaaaagcattggaaaccactgggccagcagaaacaggaggtggctccagttcagtataacatcgtcgagcagaataaactgaacaaggactacagggcaaatgacactgttccgcctaccatcccttataaccagtcctacgaccagaatacaggcggttcgtataatagctctgaccggggaagtagcacttccggttcccagggacacaaaaaaggcgcacgcactcctaaggtgccaaaacagggaggtatgaattgggctgatctcctgcccccaccacctgctcatccaccgccacattctaactctgaggagtacaatatttctgtggatgagtcatacgatcaggaaatgccttgtcctgtacctcctgcgagaatgtacttgcagcaggatgagctggaagaggaggaggacgagcgcggtccgacacccccagtacgcggagctgcttcatcgccagcggcagtgtcctattcccatcagagcaccgccactctgacccctagcccacaggaggaacttcaacccatgctgcaggattgccctgaagagaccggccacatgcagcatcaaccagacaggcggcgacagccggttagcccacccccaccccctaggccgattagcccccctcacacatacgggtatatctcaggccctctggtatctgacatggataccgacgctcctgaagaagaggaagacgaggccgatatggaagtcgcaaagatgcaaacccgtaggttactgctgcgcggactggaacagaccccagcgtctagcgtcggggatttggagtcttctgtgacaggctcaatgataaacggctgggggtccgcatcagaagaagacaacatctcctcgggacggtcctcagttagttccagcgatgggagtttcttcaccgatgcagattttgcgcaggctgtcgctgcagccgcagagtacgccggactcaaggtggctagacggcagatgcaggacgcggctgggcgtaggcactttcacgcaagccagtgcccaaggcccacttcccccgtcagcaccgattctaatatgagtgccgcagtgatgcagaagacaaggcccgcaaagaagctgaagcaccagcccggtcatttacgtcgtgaaacctacaccgacgacctgccacctccccctgttcctccccctgcgatcaagagccctaccgcccagtccaagactcaattggaagttcgaccagtggtagtgcccaagctgccctctatggacgccaggacagatcggagctccgacagaaaggggtcaagttataaaggtagagaggttttagatggacggcaggtggtcgatatgaggacaaaccccggtgatcccagagaggcccaggaacagcagaatgatgggaaaggcagaggtaataaggccgcaaaacgtgacctcccacccgctaagacacatctgattcaagaggatatactgccctactgtcgtcccacttttcctaccagtaacaatcctagggacccttcctcatcctcctccatgagcagccgcggtagcggctcccgtcagagagaacaggcgaacgtgggccgtaggaacattgcagagatgcaggtcttaggtggatatgagagaggagaggataacaacgaagagctggaggagccctcctcctag

SEQ ID NO: 239452 - DNA, 4838 bp, synthetic construct
  misc_feature 1..4838: note = Description of Artificial Sequence: Synthetic coding sequence
  source 1..4838: mol_type = other DNA
atgatcgccgaaccagcccacttctatctctttgggctcatctgtctctgctcaggctcacgactgcgccaggaggactttccgcctcgcatcgtggaacaccctagtgatctgatcgtgagcaagggcgaacctgcaactctgaattgcaaagcggagggccgacccactcccacaatcgaatggtataagggaggggagcgagtggagaccgataaagacgacccacgcagtcatcgtatgctcctgcctagtgggagtctttttttcttaaggatcgtgcacggacgtaagtccagacctgacgagggagtctacgtctgtgtggcaagaaattacttaggcgaggcagtaagtcataacgcaagtctggaagtcgcaatactgcgtgacgactttaggcagaatcctagcgacgtgatggtcgccgtaggcgagccagcggtgatggaatgccaacctcctcggggtcacccagagccaacgatcagttggaagaaggacggaagtcctttagacgataaggatgaacgaattaccatcaggggaggcaaactcatgattacttatacccggaagtctgatgccggaaaatacgtgtgcgtcgggaccaacatggtgggtgaacgggagtctgaagtggcagaactcaccgttttggagcgcccttcctttgtcaagcgcccttctaatttagcggtcactgtggacgatagcgctgaattcaaatgcgaggccagaggcgacccagtgcccaccgtgcgctggcgaaaagatgacggcgaactgcccaaatccagatacgaaatccgggacgaccacacgcttaagattcgcaaagtgactgcaggagacatgggaagctacacatgcgtggctgaaaacatggttggcaaagctgaggcctccgctactctgactgttcaagagcccccacacttcgttgtgaagccgcgtgaccaggtggtcgccctcggacgcactgttaccttccagtgcgaagccaccgggaaccctcagcccgcaatcttttggcggagggaaggcagccagaatctgttattttcttatcagccacctcagagctcctctaggttcagtgtgtctcagactggagacctcacaatcaccaatgtgcagaggtccgatgtcggttactacatctgtcagactttgaatgtcgccggatcgattatcaccaaagcatacctggaagtgaccgatgtcattgccgataggcccccacccgtgatacgccagggcccagtcaatcagactgttgcagtggatggtacatttgtgctctcttgcgttgccacagggtcaccagttccgaccattctgtggcggaaagatggtgttctcgtctccacgcaggactcccggataaagcagctggagaatggagttttacaaattcgttatgccaagttgggtgacaccgggcgttacacctgcatagcctcgacgccctctggcgaggccacctggtctgcgtatatcgaagtccaggaatttggcgtacccgtccagcccccacgccctaccgatcccaacctgattccctctgcgccatctaagccagaagtaacagatgtgtctcggaacacggtgacactctcttggcaaccgaatctgaatagcggagccacaccaacctcatatatcattgaagcatttagccatgcttcagggagctcatggcagacagtggcggaaaacgtgaaaaccgagacctcggccattaagggactgaagcccaacgctatttatcttttcttggttcgcgctgcgaacgcatacggaatcagcgacccttctcagatctcagacccagtcaaaacacaggatgtgctgcccacaagccagggggtcgatcataagcaggtgcagcgcgaacttgggaacgccgttcttcacttgcacaaccctacagtgctgagctccagctcgatcgaagtccattggacagtggatcagcagagccaatacattcagggatataagatcctctatcggccttctggcgcaaaccacggagagagtgactggctggtgtttgaagttcggactcccgctaaaaactctgtagttatccctgacctgcgcaaaggagtgaactacgagatcaaggcccgtccctttttcaatgagtttcagggcgcagattctgagataaaatttgctaaaactctggaggaggcaccgagtgcaccaccgcagggcgtaacggtatcgaagaatgacggcaatggaactgccattttggtgagctggcaacccccacctgaggatactcagaatggaatggtgcaggaatacaaagtctggtgtctgggtaacgaaactcgctaccacatcaataaaaccgtcgatggctccacattttcagtggtgatccctttcttggtgcccggtattcgctactccgtggaagtcgccgcatccacaggggctggatctggcgtgaaaagtgagcctcagttcattcagcttgacgctcatggcaaccccgtctcaccagaagaccaggtgagtctcgcccagcagatctccgatgttgttaaacagccggctttcattgctgggataggggcagcatgctggatcatacttatggtgtttagtatatggttataccgccatcgtaaaaagcgcaacggcctgactagcacctacgccggtatcaggaaggtaccatcctttacttttactcccacagtgacatatcagaggggtggtgaggcggtgtcaagcggcggtcgccctggcctgctaaacatcagtgagccagcggctcagccctggctggcggacacctggccgaacacaggcaacaatcacaacgactgcagcatctcctgttgtacggccggaaacggcaattcggactctaatttgacaacctatagcagacccgctgactgtattgcaaactataataaccaactggataataaacagaccaacctcatgttacctgaatctacagtgtacggtgacgtcgacctcagcaataaaatcaacgaaatgaaaaccttcaatagccctaatttgaaggatggcaggtttgtcaatcctagcggtcagcccactccatatgctaccacgcaactcattcagtctaacctcagcaataacatgaataatggcagtggtgactcaggggagaagcactggaaaccgctagggcagcagaagcaggaagtcgcccctgtgcaatacaatatcgtggaacagaataaactgaacaaggattaccgtgccaacgataccgtgcccccaacgattccttataaccagtcatacgatcagaataccgggggaagctacaacagttccgacaggggtagttccacatcagggagccagggccataagaaaggcgcaaggacaccgaaagtacccaaacaagggggtatgaactgggcggatttgttgccgccaccgcctgcccatcccccaccgcattctaactccgaagagtacaatataagcgtcgacgaaagctatgatcaagagatgccttgccccgtgccacctgccagaatgtacttacagcaggatgagctggaggaagaggaagacgagagaggccctacgcctcccgtccggggtgcagcctcttctcctgcagccgttagttatagtcaccagagtacagcaaccctaaccccatctccccaagaagagctgcagcccatgctgcaagattgccctgaggagaccggccacatgcaacaccagccagaccggaggaggcaaccagtgtcccccccacctcctcccaggcccatttcgccccctcacacttatggttatattagtgggccactggtctctgacatggacacagacgcccctgaggaagaggaggacgaagcggacatggaagtggcaaagatgcagactcgccgtctcttactgagaggtctggagcaaacgcccgcttcctcagttggggaccttgaatctagtgtcacaggatcaatgatcaatggatggggatcagcatcggaggaggataatatcagctccgggaggtcctctgtgagcagcagtgatggctctttcttcactgatgcggatttcgcccaagctgttgcagccgctgccgaatacgccggattaaaagttgccagaaggcaaatgcaggacgccgcaggcagaaggcacttccatgccagtcaatgcccacggccaaccagccctgtgagtaccgactccaacatgtcggctgcggtcatgcagaaaactcgtcctgccaagaagctcaagcaccagccaggccatctacgccgagagacttacactgacgatttaccaccaccacccgtgccaccccctgcaatcaagagtcccacagcccagtctaagacacaactggaagttcgtcccgtggtcgtgcctaaactgccctctatggatgccagaactgacaggtctagcgatagaaagggatcatcttataaaggcagggaggtcctcgacgggagacaggtggttgacatgaggacaaaccctggggaccctcgggaagcacaggagcagcaaaatgatgggaaagggagagggaataaagcagccaagagggatctgccaccagcaaagactcaccttatccaggaggatatcctcccctactgccgtccaacatttcctacgtccaataacccacgggatcccagctcttcctcgtcaatgtcatctcgagggagcggaagtcgacagagggaacaagccaacgtggggaggcggaacatcgctgagatgcaggttctcggaggctacgaacggggtgaagataacaatgaggagcttgaagaaacagaatccta

SEQ ID NO: 239453 - DNA, 4955 bp, synthetic construct
  misc_feature 1..4955: note = Description of Artificial Sequence: Synthetic coding sequence
  source 1..4955: mol_type = other DNA
atgaagtggaaacacgtccctttcttggtgatgatctccctgctgtcactgtctcctaatcatctcttcctggcccagctgatccccgatccagaagatgtggaaagaggaaatgatcacgggacacccataccgacctccgataacgacgacaattcattgggatataccggatccaggttacggcaggaagacttccctccccgtatcgttgaacatccttcagacctgatagtttctaaaggggagcccgctacattaaactgtaaagccgaaggaagaccgacacccacaatcgagtggtacaagggcggagagcgcgtcgaaactgacaaggacgaccctagatcccaccgcatgctactgcccagtggctccctttttttccttcggatcgtgcacggtcgaaaaagcaggcctgacgagggggtctatgtgtgtgtggcaagaaactacctgggcgaggccgtcagccacaatgcaagtcttgaagtggccatcttgcgagacgactttagacagaacccctctgatgtgatggtcgcagttggggaacctgccgtaatggagtgccagcctccacggggtcatcccgaacccacaataagctggaaaaaggatggtagtccgctagacgataaagacgagaggataacaattagaggaggaaagctgatgatcacttatacgcgtaagagcgacgccggaaagtacgtgtgcgtcggaaccaacatggtgggagagcgcgaatccgaggtagcagagctcactgtactcgagcggccttcttttgttaagagaccatcaaacctggctgtgactgtggatgattcagctgaattcaaatgcgaggctcggggagatccggtgccaaccgtaagatggagaaaagacgatggggaattgcccaagtcccggtatgagatcagagatgatcacacccttaagattagaaaggtcaccgccggagatatgggttcttacacatgcgtcgcagagaatatggtgggcaaagcagaggctagcgccacactgaccgttcaagagccacctcatttcgtcgtcaaaccaagagaccaagtcgtagccctagggcgaaccgtcaccttccagtgtgaagctacagggaacccacagccagctatattttggcgtagagagggctcgcaaaacctactgtttagctaccagccaccacagtcctcctctcgattttccgtatcccaaacaggggatctaacaatcaccaatgtacagaggtctgatgtgggatactatatctgccagacccttaatgtggccggatctataatcaccaaagcatatctcgaagtaactgatgtaattgccgaccggccacctcccgtcattaggcaaggccctgtcaaccagactgtagccgtggatgggacctttgtgctttcttgcgtggccaccggctcgcccgtgccaaccattctgtggagaaaagacggcgtgctggtttctacccaggactcaagaattaaacagctggagaatggtgtactccaaattagatacgcgaaactcggcgacactggtcggtacacctgcatcgcttctaccccctctggcgaagccacctggtctgcatatatagaggttcaggagtttggcgtacctgtgcagccgccacgccctaccgatccaaatctgattccctcagcaccatcgaaacctgaggttacagatgtcagccggaatactgtcacgctgtcttggcaaccaaatctgaactcgggggcaacgcctacgtcatatattattgaggcatttagccatgccagtggttcttcctggcaaacagtggcagagaacgtcaagaccgagacaagtgcgattaagggactgaagcccaacgccatttacttattcctcgtccgcgcagcaaacgcatatgggatttccgacccaagtcagattagtgatcctgtgaaaactcaagacgttctcccaacctctcagggggtggatcacaaacaagttcaacgtgaactcggaaatgcagttctccacctacataatcctaccgtgctgtccagttcatccatagaagtccactggactgtggaccaacagtcacagtatatccagggttataaaatactgtatcgaccatcaggcgcaaaccacggtgagtctgactggttggtgttcgaggtgcgaaccccagcaaagaattccgtagttataccagacctcaggaagggcgtgaactacgagataaaagccagaccatttttcaatgagttccagggcgcagatagtgaaataaaatttgctaaaacattggaagaggctccaagtgcacccccacagggcgttactgtgagtaagaacgatggtaacggcacggctattttggtgtcttggcagcccccacccgaagacacgcagaatgggatggtccaggagtataaggtatggtgcctcggtaacgagacaagatatcatataaacaagactgtcgatggcagtacattctctgtggtgatcccgttcctcgtgccaggtattcgatactctgtcgaagtggccgctagtacaggggctgggtcaggagtaaaatctgaacctcagtttatccagcttgacgcacatggaaacccagtgtcccccgaagatcaggtgagcctcgctcaacagatttctgacgtggtaaagcagcctgcgttcatcgctggcataggcgcagcatgttggatcatactgatggtcttcagcatctggctctaccgacatagaaaaaagcgtaacggcttaacttctacctatgctggaatccggaaggttccctcatttacattcacacccaccgtcacctatcagagggggggagaagctgttagctctggcggtcgcccaggcttacttaatataagtgagcctgctgcacaaccttggctggccgatacctggcctaacaccggaaacaatcacaatgactgcagcatctcctgttgtacagccggaaacggcaactctgactcaaatttgaccacgtattccaggcccgcagactgcatagctaactataataatcagctcgacaacaaacaaaccaatctgatgctcccagaatccaccgtgtatggggatgtagatctgtcaaataaaattaatgaaatgaagactttcaattcacccaatctcaaagacggtcgcttcgtgaatcctagtggccaacccaccccctatgcaacaacgcagctgattcagagtaacctctcgaacaacatgaacaacgggtccggggattctggtgaaaaacactggaaacccctggggcagcagaaacaggaggttgccccagtgcagtataatatagtggagcagaataaactaaataaggattaccgcgcaaatgatactgtgccacctactattccatataatcaatcctacgatcagaacacaggcggatcttataatagttctgacaggggctcttctacgtccggatcccagggtcacaaaaaaggcgcaaggactcctaaggtcccaaaacagggtggaatgaactgggcggacctgctccctcctccaccggctcacccccctcctcacagcaattccgaggagtataatatctcagtggatgagtcatacgaccaagaaatgccgtgccccgtgcctcccgcaaggatgtacctgcagcaggacgagctggaagaagaggaggatgagcgcggacctacaccacccgtacgcggagccgcatctagtcccgcagcagtgtcctatagccatcagtctaccgcaaccctgaccccctcacctcaggaggaattgcaacctatgcttcaagactgccccgaggagactggtcacatgcagcaccaaccagaccggagacgtcagcctgtctctcccccacctcctcccaggccgatctctcctccccacacctacgggtatatctctgggcctctggtcagcgacatggataccgacgctcccgaggaggaggaggatgaagctgacatggaggtggctaaaatgcagactcggcgactcctgttgcggggactggaacagacccctgctagtagcgtgggagacctcgagagtagtgtaacaggttccatgatcaacgggtggggttctgccagcgaggaagataatatctcctctggaagaagctccgtttcctcctccgacgggtcctttttcactgacgcagatttcgcccaagcagtggctgcggcagctgagtatgccggtctgaaggtagcaaggagacagatgcaggacgccgcagggaggcgccatttccacgcatcccagtgccccaggcctacaagtcccgtgtctacggactccaacatgtctgccgctgtgatgcaaaaaacacgccctgcgaagaagcttaagcatcagcccggacacctgcggagagaaacctatacggacgacctgcctccccctcctgtgcccccacccgctattaagagtccgaccgctcagtccaaaacacagttagaggtgaggcccgtcgtggtgcccaaactgccttccatggacgcaaggacggacagatcctccgatcgcaagggtagctcatacaaaggaagggaagtactggatgggaggcaggttgtcgacatgaggacaaacccaggcgatccacgcgaggcccaggagcagcagaacgacggaaagggtcggggtaacaaggcagcaaaacgggacctgcctccagcaaaaacccatctcatccaggaggatatcctgccatactgtaggcccactttcccgacttccaacaacccacgtgatccttcgtcaagcagctccatgtctagtagagggagcggctctagacagcgcgaacaggcaaacgtagggaggaggaatatcgccgaaatgcaggttctggggggttacgagcggggagaagacaataacgaggagctagaagagacagagtccta

SEQ ID NO: 239454 - DNA, 4656 bp, synthetic construct
  misc_feature 1..4656: note = Description of Artificial Sequence: Synthetic coding sequence
  source 1..4656: mol_type = other DNA
atgatcgcggagcccgctcacttttatttgtttggactgatatgcctgtgttctggatctaggcttaggcaagaggactttccacctcgtattgttgaacaccctagcgacctgatcgttagcaagggcgagcccgctaccctcaactgcaaagccgagggccgacccacacccaccatagagtggtataaagggggagagagggtcgagaccgacaaagacgatcctcggtcacaccgtatgcttctgccaagtgggagtttgttcttccttcgaatagttcatggtcggaagagcagacccgacgaaggggtgtatgtttgtgttgcacgcaactaccttggcgaggccgtttcacacaacgccagtcttgaagtcgctattcttcgggacgattttcggcagaatcccagcgatgttatggtggccgttggcgagcctgctgtcatggagtgccaaccgccaaggggccatcccgagcctactatcagctggaaaaaggacggtagccctctggacgataaagacgaacgcatcacaattcggggaggcaagctgatgatcacatacacaaggaaaagtgacgccggaaaatacgtatgtgttggcaccaacatggtcggggagcgagaatcagaggttgcggaattaacagtgttggaacggccttctttcgtgaaaaggccctctaacctcgcggtgaccgtggatgacagtgccgaattcaaatgtgaggcccgaggcgaccccgtgcctacggttcgttggcgaaaggacgacggcgagttgccgaaatcccgatatgagatacgagatgaccacaccctcaagatccggaaagtgacggctggagacatgggctcgtatacgtgtgtggccgaaaatatggtcggtaaagcggaagcctcagccacgcttaccgtgcaagtgggatcagaaccaccacacttcgtcgtcaaacctcgcgaccaggtggtggccctcggtagaactgtgactttccaatgcgaggccactggcaatccgcagccggcaatcttctggagaagggaaggctctcagaacctgctcttcagctatcagccaccacagtctagctctcggttctcagttagccaaacgggtgatctgaccattaccaatgtccagaggtcggatgtagggtactatatttgccagactcttaacgtagctggctctattattactaaggcctacctggaggtcaccgatgtgattgcagatcggccacctcccgtgatccgccagggacccgtcaaccagactgtggccgtggatggtacatttgtgctgtcctgcgtggccactgggagtcctgtccccaccatcctgtggcgtaaagatggcgtgctggtgtctacccaggattctagaattaagcaactcgaaaacggcgtgctccagattcgctacgccaaattgggggacactggcaggtacacttgcatagccagtactccttccggggaagctacatggtcagcttacattgaagtgcaggaatttggcgtaccagtccagccccctagacccaccgaccccaacctgattccatccgcaccctccaagcccgaggtgactgatgtctctaggaatacagtgacgctgtcatggcagcctaacctcaactctggggcaacaccaacttcttatattatcgaagcctttagccacgcgtctggatcctcctggcagaccgtcgccgagaatgtcaagactgagacaagcgcgattaaaggccttaagcccaatgccatttacctatttctggtgagagcggcaaatgcctatgggatctccgacccttctcagatttctgatccagtgaaaactcaggatgtccttccgacttcccagggggtggaccacaagcaggtgcaacgggaactgggaaacgcagtcctacatctccacaaccctaccgtattgtcatcttcatctatcgaagtgcattggaccgtggatcagcagagccaatatattcagggctacaagatcctttatcgcccatcaggtgcaaatcacggtgaaagcgactggctggtgtttgaagtgcgcactccagctaaaaacagtgtggttatacccgacctgcggaagggagtgaattacgaaatcaaggccagaccgtttttcaacgagtttcagggggcagattcagagatcaagttcgcaaagaccctcgaggaagcgccaagcgcccctccacagggggtcaccgtttccaaaaacgatgggaacgggacggctattctggtctcctggcagcctccccctgaggacacccaaaacggcatggttcaagaatataaagtgtggtgcctggggaacgagactcggtaccacattaacaaaacagtggacggctccactttctccgtggtgattcccttcttggttccgggtatccggtattccgtggaggtcgcagcttccacaggggcaggctccggtgtgaaatcagagcctcaatttatccaactggacgcacatggtaatccagttagccccgaagaccaggtgtcactggcgcagcagatcagcgacgtggtaaagcagcccgcttttatcgccggaatcggagcggcatgttggatcatattaatggtgttcagcatctggctgtataggcatcgcaaaaagaggaacggcctgacatctacttatgccggtattcgtaaggtgacctaccagaggggaggagaagccgtgagttctggtgggaggcccggacttctaaatatatccgagcccgctgctcagccatggctcgccgacacatggcccaacacagggaacaaccacaacgactgctcaatcagctgttgcacagcaggaaatggtaattctgattccaatctaacgacctacagcagaccagggcagcctacaccctacgctaccactcagctgattcaatctaatttgtccaacaacatgaacaacggtagtggtgattccggggaaaagcattggaagccactggggcagcagaagcaagaggtggctccagttcagtacaatatcgtggaacagaacaagctgaacaaggattatagggctaacgacacggtccctccgacaatcccatacaatcagtcttacgaccagaacaccggcggttcctataactcaagcgatagaggttctagcaccagcggcagtcaaggacataagaaaggcgcaagaaccccaaaagttcccaagcaagggggtatgaattgggcagatctgctccctcctccaccagctcaccctccaccacattcaaactctgaagagtataacatttccgtggatgaaagctacgatcaggagatgccgtgccctgtaccgccagcccgaatgtacctacagcaggacgagctggaagaagaagaggatgagaggggcccaacaccaccagtgcggggagctgctagcagccccgcagctgtgagttacagccaccagtccacagccacgctcaccccttccccccaggaggaactccagccgatgctacaggactgtcctgaggagaccgggcacatgcaacaccagccagaccggcgaaggcagccagtgagcccaccaccccctcccaggcctatatctcctccccatacctatgggtacatttccggcccactggtgtccgacatggacaccgatgctccagaagaggaggaggacgaggctgacatggaagtggccaagatgcagactcgcaggctgcttttgcggggtctggaacagactcccgctagttcggtgggggacctggagtccagtgtcacggggagcatgattaacggctggggctctgcatccgaagaagacaacattagcagcggccgaagtagtgtgagttcttcagacggttctttttttacagacgcagacttcgcccaagcagttgctgcagcggcagagtacgctgggctcaaggtcgcacggcgtcaaatgcaagatgcagccggacgtcgccactttcatgcttcccagtgccctcggcctacctccccagtgagcacggactcaaatatgagcgctgcagtaatgcagaagactcggcctgccaagaagctgaaacatcagcccggacacctgaggagagagacctacaccgacgatctgcctccgcctccagttcccccaccggcaatcaagtcccctacagcccagtcaaagacccaactcgaagtgaggcctgtagtcgtaccaaagctgccttcaatggatgccaggacagacaggtccagcgaccgtaaaggcagtagctacaagggcagggaggtccttgatggccgtcaggtcgttgatatgaggacaaaccctggcgatcctagagaagcacaagagcaacaaaatgacggaaaggggaggggcaataaagctgccaaacgcgacttgcccccagccaaaacacatctgatccaggaggatattctgccatattgtaggccgacattcccgacctccaacaatcctagagatccatcatcttcttccagcatgagttcgaggggttctgggtcccgccagagagagcaggcaaatgtgggtagacggaatattgcagagatgcaagttctgggcggatacgagaggggcgaagataataacgaagagctggaggagacagaatcgtag

SEQ ID NO: 239455 - DNA, 4821 bp, synthetic construct
  misc_feature 1..4821: note = Description of Artificial Sequence: Synthetic coding sequence
  source 1..4821: mol_type = other DNA
atgatagcagagcctgcccacttttacttgtttggccttatctgcttgtgtagtggatctagactgaggcaggaggacttccctccacgaattgtggagcacccttctgatcttatcgtgtcaaagggggagccagccactctgaactgtaaagcagagggacggccaactcctacaattgagtggtataagggtggcgaaagagttgaaaccgataaagacgatccacgaagccatcgaatgcttctgccctccgggagcctgtttttcctgagaatcgtgcacgggaggaagtcacgccctgatgagggggtgtatgtttgcgtggctcggaattatctcggagaagctgtgtcgcacaatgctagcctggaggtggccatccttcgcgatgacttcaggcagaatccttcagatgttatggtcgcagtgggggaacccgcagtaatggaatgtcagcctccacggggacatcccgaacccaccattagctggaagaaggacgggtcacccttagacgacaaggacgagagaatcacaataagggggggaaagctgatgatcacctacacccggaaaagcgatgctggaaagtacgtgtgcgtcggaacaaacatggtgggcgaacgtgagtccgaggttgccgagctcacagtgttagaacgaccatcctttgtaaaacgtccctctaatctcgcggtaaccgtggatgatagcgccgaatttaaatgtgaagcacgcggtgaccctgtgcctacagtgcgctggcgtaaagatgacggggagttgccgaaatctcggtacgagatacgggatgatcacacactgaaaatcagaaaagtcacggcaggagatatgggatcctacacatgtgtggctgaaaatatggtgggcaaggcagaggctagtgctacactaaccgtccaggtgggcagcgagccacctcacttcgtggtgaagccacgtgaccaggtggtggccctgggacgaacagtcacttttcagtgtgaggcgactggcaacccgcaacctgccattttttggagacgtgaagggtcccaaaatctgctgttctcctaccaacccccacagtctagcagcaggttctctgttagccagaccggcgatcttacaatcaccaatgtgcaacggtccgacgttggatactatatttgtcaaacgctcaacgtcgccggtagcatcattaccaaggcttacctggaagtgacggatgtgattgcagatcggcctcccccagtgattagacagggacccgtgaaccagactgtggcagtggatggtacgttcgttctctcgtgtgttgcgactgggagccccgttccaactattctgtggcgtaaggacggcgtgctggtaagtacccaggattcccgaataaaacagctcgaaaacggcgtgctgcagatcaggtacgctaaactgggcgacaccggcaggtacacatgcatcgccagtactccctctggtgaggccacttggtcggcatacattgaggttcaagagttcggggttccagtgcagcccccacggcctacagatcctaacctcataccttccgctccctctaagcctgaagttactgacgtctcaagaaataccgtcacattaagctggcagccaaatctgaactcaggcgcaacccccacaagctatattattgaggccttctctcatgcatcaggatcctcatggcaaactgtggccgaaaacgtcaagaccgaaacttccgccatcaaaggcttgaaaccgaacgctatttacctttttctggtgcgcgcagccaatgcctatgggattagtgatccgtctcaaatcagcgatccggtcaagactcaagacgtcctccccacctctcagggcgtggatcacaagcaagtccagagggaactgggaaatgccgttctgcacctgcataaccctaccgttctgagctcatcctctatagaggtgcactggacagtggaccagcagagccaatatatccaggggtataagatcctctaccgcccatccggagccaatcacggcgagtctgactggctggtgtttgaagtgagaacaccagctaaaaactccgttgtgatcccggacctgcgaaagggagttaactatgaaattaaggcaaggccttttttcaacgaattccaaggcgctgatagtgaaattaagttcgccaagaccttagaggaagccccatctgctccaccccagggtgttactgtaagcaaaaacgacgggaatgggactgccatattagtgtcatggcagccccctccggaggacacgcagaacgggatggtgcaagaatacaaggtgtggtgcttaggaaacgaaacgcgttaccacatcaacaaaaccgtcgatggcagtacttttagcgtcgtgataccatttctcgtaccaggcatcaggtatagtgtggaagttgcggcatcaacaggggcaggctctggcgttaagtcggagccacagtttatacaattagacgcccacggaaatccggtctcccccgaggatcaggtgtccctggcccagcagatcagcgatgtggtgaaacaacctgcttttatcgccggtatcggcgcagcatgctggattattcttatggtgtttagcatctggctgtataggcatcgaaagaagcgcaatggactcacctctacttacgctggcataaggaaggtgacctatcagcgcggaggtgaagcagtgtctagcggcggacgtcctggcttactcaacattagcgagcccgctgcccaaccctggctagcagatacttggcctaacacaggaaacaaccacaatgactgttctatttcctgttgtactgcaggaaacggtaactccgactccaacctcaccacatattcgcgaccagcggattgcatcgcaaactataacaaccaattggataataagcaaacaaacctcatgcttccagagtccactgtgtatggcgatgtggatctcagcaataaaatcaatgaaatgaagaccttcaacagccctaacttgaaggatggcagatttgtgaacccctctggtcagccaactccgtatgccacaactcagttgatacaatcaaatctgagcaacaacatgaacaatgggagcggggattctggggaaaaacattggaagcccttaggacagcagaagcaagaggtggcccctgtgcagtacaatatcgtggagcaaaataagcttaacaaggactatagagccaacgacactgtacctcctaccattccatacaaccagtcgtatgatcaaaataccggcggttcatacaactcgagtgatcgcggaagctccacttctggaagccaggggcacaagaaaggcgctcggacaccaaaagtacctaaacaggggggaatgaactgggccgacctactgcctcctcctcctgcgcacccacctcctcacagtaactccgaggaatataacatcagtgtggacgagagctacgatcaggagatgccgtgtccggtgccgccagccaggatgtacctccagcaagatgagcttgaagaagaggaggacgagcggggtccaacacccccagtgcgaggtgccgcttcgtcacctgccgctgtctcctatagccaccagtctaccgctactctgactccctccccccaggaggaactccagcccatgttgcaggactgtccagaagaaacaggacacatgcagcatcagccagataggcgtcgacagccggtcagcccccctccccctcctaggccaatctctcctccgcatacttacgggtatatctcgggaccattggtaagcgacatggacactgacgccccagaagaggaggaagacgaggcggacatggaagttgccaaaatgcagacccggagattactgctacgtggccttgagcagactccagcgagcagtgttggcgacctggagtctagtgttactggatccatgatcaacggctggggttccgcttctgaagaggacaacatttcctcaggtagaagtagcgttagttcaagcgatggaagtttcttcaccgacgccgacttcgctcaggcagttgcagcagctgctgaatacgccggacttaaggtggctcggaggcaaatgcaggacgccgcaggcaggagacactttcacgcctcccagtgcccaagaccaacttctcctgtgtctactgatagtaacatgagtgccgcagttatgcaaaagaccagacccgctaaaaaactgaaacaccagccgggtcacctccggagggaaacctacaccgacgacctcccaccaccccctgttccgcctccggctatcaagtctccaaccgcacagagcaagactcagctggaagtgcgacccgtggtcgttccaaagctaccatccatggatgcgaggactgaccgaagttccgacagaaaaggaagttcttacaagggcagagaggtcctcgacggtagacaagtagtggatatgcggacgaaccccggtgacccacgtgaggcacaggagcagcagaacgatggcaaaggccgagggaataaagccgctaaaagagatttgcctccagccaaaacgcacctcatccaggaagacatcctcccttattgtcgccctaccttccctacttcaaacaatcccagagaccctagctcctctagttcgatgtcaagcaggggttccgggagccgccaacgagagcaagctaacgtgggcaggcgcaatatagcagagatgcaggtgcttggcggatatgaaaggggggaggacaacaacgaagagctggaggaaaccgaatcatag

SEQ ID NO: 239456 - DNA, 3213 bp, synthetic construct
  misc_feature 1..3213: note = Description of Artificial Sequence: Synthetic coding sequence
  source 1..3213: mol_type = other DNA
atggcgagaaggcatgagagagtgacaaggcggatgtggacctgggctccaggtttgctgatgatgactgtggtcttttggggccaccagggaaatggccagggacagggaagcagactccgccaggaggatttcccccctcgaattgttgaacatccatctgatgttatagtttccaagggtgagccaactactctcaattgcaaggccgagggcaggccaaccccaaccatcgaatggtataaggacggcgagcgagtagagacggacaaggatgatcctcgcagtcatcggatgcttcttccctcgggatctctgttctttttgcgaatcgtgcatgggcgaagatctaaacccgatgagggctcgtatgtatgtgtcgcaaggaactacctgggcgaggctgtcagcaggaatgccagtctggaagttgctctgttgcgagacgacttccgccagaacccaactgacgtagtggtggcagctggcgagcccgcaatacttgaatgtcagcctcccagaggccatccagagcctacgatctactggaaaaaggacaaggttcgaatcgatgacaaggaagagaggataagtatcaggggaggtaaactgatgatttcaaatacacggaaatccgacgcagggatgtacacatgcgtcggtaccaacatggtcggcgaaagagactccgatcctgcggagttgacagtcttcgagcgcccaacatttctgaggcggcctatcaaccaggtggtgctcgaggaagaggcagtggaattccgttgccaagtgcagggcgacccacagcctactgtccggtggaagaaggatgacgcggacctgcctaggggtaggtatgacattaaggatgattacacgttaaggattaagaaaacgatgtctacagatgaaggtacatatatgtgcattgccgaaaaccgcgtcgggaaaatggaagcctctgctacactcaccgttagaggcggagtgatcgcaccaccccagtttgttgtgaggccaagggatcagatcgtagcacaaggtcggactgtcacatttccctgtgaaactaaggggaatccccagcccgcagtgttctggcagaaggaggggtcccagaacctcttatttcctaaccagccccagcaacctaattctcggtgctccgtcagccccacaggtgatctgacgatcacgaacatccagaggagcgatgccggatattacatctgtcaagccctgaccgtggccggatcaatcttggccaaggcccagttagaagtgactgatgtgttaaccgacaggccaccacccattattctccagggccctgcgaatcagacactcgcagtggatggcacagcgcttctgaaatgtaaggcaaccggtgatcccctgccagtgatttcttggctaaaggagggtttcacatttcccggtcgtgacccacgagctaccattcaggaacaggggaccttacaaattaaaaacctgagaatcagtgacacagggacctatacctgtgtggcaacctcttcttctggagaaaccagttggtctgcagtgctggacgtgaccgaatccggcgctaccatcagcaaaaattatgatttgagtgacctgcccggtcctccctcaaagcctcaggtgaccgacgtcacaaaaaattcagtgaccctcagttggcaaccagggacccctggcaccctgcccgcttccgcctatatcatagaagccttctctcagagcgtgtcaaacagctggcagacggtggcaaatcatgtgaaaaccactctgtatacagtccgagggttaaggcccaatactatttatctttttatggtgcgagctataaacccccagggcctctccgacccctccccaatgtccgaccccgtcagaacacaggacatctcacccccagcacagggggttgaccaccgtcaagtgcagaaagagctgggtgacgttctggttaggctgcacaatcccgtggtgctgacacccaccaccgttcaggtcacctggaccgtggatcggcagcctcagttcatccaggggtatagagtgatgtaccgccagaccagtgggctccaggctacatcttcctggcagaacctcgatgcaaaggtgccaaccgagagatcagctgtgttggtaaacctgaagaagggagttacctacgaaatcaaggtgcgcccatactttaacgagttccagggcatggattcagagagcaagaccgtccggactacagaggaggcgccttcagcccctcctcagagtgtcacagtgttgacagtgggttcatataactccacttccattagcgtctcatgggatccacctccacctgaccatcaaaacggaatcatccaagaatacaaaatttggtgtcttgggaatgaaacaaggtttcatatcaacaagactgtagacgccgctataaggtccgtgatcattggcggactattcccaggtatccagtatagggtcgaagtcgcggcaagcaccagcgccggtgtcggagtgaagtcagagccacagcccattatcatagggagacgaaatgaggtggtcattacagagaataataacagcattaccgagcagattactgacgtcgtaaaacaacccgcattcatagccggtatcgggggtgcatgctgggttatattgatggggttctccatatggctgtactggagacggaagaagcgaaaagggctgtccaattacgcagtcacatttcagagaggcgacggaggtctcatgtcaaatgggtccaggcccggtctcttgaatgcgggtgacccatcctatccctggctcgccgactcgtggcccgctacttctctccctgtcaataattctaacagcggaccaaatgagatcggtaacttcgggagaggcgacgtactgcctcccgtccccggacaaggagacaagactgccacaatgctctctgatggcgctatctacagctcaatcgattttaccaccaaaacatcgtataacagttcctcccaaatcactcaggctaccccgtacgcaactacacagatcctacactctaattcaattcacgagcttgccgtcgatctgcccgacccacagtggaagtcatccatccagcagaagaccgatctgatgggattcggctacagccttcctgatcaaaataaaggcaacaacggggagtctggaagctag

SEQ ID NO: 239457 - DNA, 1713 bp, synthetic construct
  misc_feature 1..1713: note = Description of Artificial Sequence: Synthetic coding sequence
  source 1..1713: mol_type = other DNA
atgtcgacagacgagggaacttatatgtgcatcgctgaaaaccgtgtcggtaaaatggaggcctcggcgaccctgactgtgcggggtggggtcatcgcacctcctcagttcgtagtccgccctcgcgaccagatcgttgcacagggcaggacagtcacattcccttgtgagaccaagggcaatccccagcctgcagtgttctggcagaaggaaggctcccagaacctgttattccccaatcagccacagcagcccaatagccgatgttccgtgtctcccaccggagatctgacaatcaccaatattcagagaagcgacgcgggatactacatctgtcaagctctcactgtggccggatccatcttggctaaagcacagttggaggtcacggatgtcctgaccgacaggcccccacctattattctgcaaggccctgctaatcaaaccctggccgtcgacggcactgccctgctgaaatgcaaggcgaccggggacccgttgccggtgattagttggcttaaggagggcttcacctttcctggcagagaccccagggcaactatacaagaacaggggactctgcagatcaagaacttgcgcatcagtgacacaggaacctatacatgcgtggcaacgtcaagctctggggagacatcttggtctgccgtgctggatgttaccgagtctggcgctactattagcaagaactacgacctgtccgatctgcccggtccaccctcaaaacctcaggttaccgatgtgaccaaaaacagcgtgacgctttcatggcagcctgggaccccagggacactgcccgcttctgcatatattattgaggcgttctcccaaagtgtgagcaattcctggcagacagtggctaaccatgttaagaccactctctatactgttcgcggactgcgaccgaacactatttacctgtttatggttcgggctatcaacccgcaggggctgagcgacccctcccccatgtcagatccagtccggacccaagatatctccccgccagctcagggtgttgatcatcggcaagtccagaaggagctgggcgacgtgttagttcggttacataacccggttgtgctgacccccaccacagtgcaggtcacttggaccgtcgatcgccagccacagtttatccaaggctaccgagtaatgtaccgccagacatcgggcttacaggctactagttcttggcagaacctggatgcaaaagtgccaacggaacggtctgcagtcctggtgaatctcaaaaagggcgtgacctacgagattaaagtgaggccctatttcaatgaattccaggggatggattcagagtcaaaaaccgtccgtactactgaagaggccccatcggctccccctcagtccgtgacagtcctaactgtcggctcttataactcaacctcaatcagcgtgagctgggatcccccacctcccgatcatcagaacggtatcatacaggaatacaagatctggtgcctcgggaatgagacaaggtttcatatcaacaagaccgtggatgcagctataaggagcgtaattataggcggactcttccctggcatccaataccgggtcgaggtggctgcgtctacctccgccggtgtgggcgtcaaatcagagcctcagcccaacaacaccggataccctatttgtcacgatacagatctggcctttcagcaacacacttag

SEQ ID NO: 239458 - DNA, 4185 bp, synthetic construct
  misc_feature 1..4185: note = Description of Artificial Sequence: Synthetic coding sequence
  source 1..4185: mol_type = other DNA
atggccagaagacacgagcgggtgaccaggcgtatgtggacgtgggcaccgggtttattgatgatgacagtggtgttctgggggcatcagggcaatggacaggggcagggatcacggctgcggcaggaggatttccctccgaggatagttgagcaccccagtgatgttatagtcagtaaaggggagcccacaaccctcaattgtaaggccgaaggacggcctactcctacaatcgaatggtacaaagacggagaaagggtcgagactgacaaagatgacccgaggtcacatagaatgctgctgccttctgggagtctgtttttcctacgcattgtgcacggcagacggtccaagcctgatgaaggaagctacgtgtgtgtcgcccgaaactacctgggggaagccgttagtaggaacgcaagcctggaggtggccctcctccgcgatgattttcgacagaacccgactgatgtggttgtggcagcaggggaacccgctattctggaatgtcagccaccaaggggccaccccgaacctaccatctattggaaaaaagataaagtcaggattgatgataaggaggaacggatcagcattagaggcggaaagttgatgattagcaatactaggaagtctgacgccggtatgtacacttgtgtgggtacaaacatggttggggaacgggattcagaccccgcagaactgacagtctttgaacggcctaccttcctcagacgcccaattaaccaggtcgtgttggaggaagaggctgtcgagttcagatgccaggtccaaggtgatcctcagccgacggtgaggtggaaaaaagacgacgccgatctgccaagagggagatacgatattaaagatgactatactctacggattaaaaagacaatgtccaccgacgagggaacttatatgtgcatcgccgagaaccgggtgggcaagatggaggcatcggcaaccctaacggtgcgggcacctccccagttcgtcgtccgcccaagagaccagatagtcgcccagggcagaacagttaccttcccctgcgagactaagggtaatccgcagccagccgtgttttggcaaaaggaggggagccagaacctcctgtttcctaaccagccccagcagccaaatagccgctgttctgtaagccccacaggcgacctcaccatcaccaatattcagcggagcgacgccggttactacatatgtcaggctctgactgtcgcagggtccatactggccaaggcacaactggaagtgactgacgttttgacagatcggcctccgccaataatattacagggtcccgctaatcagaccctggccgtggacggtaccgctctgctcaagtgcaaagctactggggaccccctgccagtaatcagctggttaaaggaaggatttactttccccggacgggaccccagagccaccatccaagagcagggtactctgcagataaaaaacttacggatcagcgacacaggcacatatacgtgtgttgcaaccagtagctcgggagaaacaagttggagcgcagtgttggatgtgacggagtctggcgcaactatcagcaaaaattacgacttgagtgatcttccgggtccaccttccaaaccccaggtaacagacgttaccaagaactccgtcactctgtcttggcagccaggcacccccggaaccctgcccgcaagcgcctacataattgaagcattctcccagtccgtctcgaattcgtggcagaccgtggcaaaccatgtgaagactacactgtatactgtgcggggattgaggccgaacacaatttatctctttatggtgagggccattaatccacaaggcctgtcggatccctctccgatgagtgatcctgtacgaacacaggatattagtccccctgctcagggcgtggaccacagacaagtccaaaaagaattgggtgacgtgctggtgcggctgcacaatcctgttgttctcacccccacaactgtgcaggtgacttggactgtggacaggcagccccagttcatccagggttacagagtgatgtatcgacagacatcaggtctgcaagcaacgagttcgtggcaaaacctggatgcgaaagtgccgacggagagaagcgctgtgctcgtgaatctgaagaaaggcgtaacatatgaaattaaagtgcgaccctactttaacgagttccaggggatggattccgagtctaagacggtccggaccaccgaggaggccccttccgctcctcctcagtccgtgaccgtgctgacagtcgggtcctataatagcacttccatctccgtatcttgggatccaccaccccctgaccaccagaacggcattatacaggaatacaaaatttggtgcctggggaacgagaccagattccacattaacaaaactgttgacgccgcaatccgaagcgtgatcataggcggactctttcccggaatccaatacagggtcgaagtcgccgctagtacctccgccggagtcggggtgaaaagtgaaccccagccaatcataattggcagacgcaatgaagttgtgatcacagaaaataacaactccattaccgaacagataaccgatgtcgttaaacagcctgcctttatcgctgggatcggaggagcttgttgggttatcctgatggggttttccatttggctttattggcggagaaagaagcgaaagggactgagcaattacgccgtgactttccagcgaggagacggcggattaatgagtaatgggtcacgccctggtcttcttaatgctggtgatccgtcttacccgtggttagctgactcctggcctgccacttctctgccagtgaacaattccaacagcggaccaaatgaaataggcaacttcgggcgtggtgacgtgcttcctcctgtaccaggccagggcgataaaaccgcgaccatgttgagcgacggagctatctattcttctattgattttactactaaaaccagctacaatagttcaagtcagataacacaagccaccccttatgccaccacacagatactccattccaacagcattcatgaattagcagtggatttaccggacccacagtggaaatcctctatccagcaaaagactgacctaatgggatttgggtactccctcccagatcaaaataagggtaacaacggcggtaaagggggtaaaaaaaagaaaaacaagaactctagcaagccgcaaaaaaacaatggctcaacttgggcaaacgtgccactccccccacctcctgtacagcctttacctggtacagagttggagcattacgcggttgaacagcaggagaatgggtacgactcagacagttggtgtccaccattgccagtccagacctatcttcaccaggggctggaggatgagctggaagaagacgatgacagggtccccacacctccagtgagaggtgtggcctcctcccctgccatttcgttcgggcagcagtcaacagctactctcactccttcgccacgggaggagatgcaacccatgcttcaagcccacttggacgagctgacaagagcctatcagtttgatattgcgaaacagacctggcacatacagtcaaataaccagccaccacaaccacccgtgccaccgctgggatacgtgtcaggggcattgatttcagatctcgaaacagacgtagccgatgatgatgccgacgatgaggaggaggcactggagatcccgaggccgctgcgggctctggaccagactccagggtcttccatggacaatctggattcatccgtgactggaaaagcctttactagtagtcaacggccaagaccaacctcaccctttagcacagacagtaacaccagcgcagcgctctcccagtctcagagacccagacctacaaaaaagcacaagggaggaagaatggatcaacagcctgccttgcctcatcgcagggaggggatgaccgacgaggaggctcttgtgccatattccaagcccagtttccctagccccggtggacattcatcctcagggaccgcttccagcaaagggagcacggggcctagaaaaaccgaggtgctgagggccggacaccaacgtaacgcctccgatcttctggatatcggatatatgggcagcaattcccaaggccagtttacaggcgaactatag

SEQ ID NO: 239459 - DNA, 4137 bp, synthetic construct
  misc_feature 1..4137: note = Description of Artificial Sequence: Synthetic coding sequence
  source 1..4137: mol_type = other DNA
atgtccttgttgatgttcactcagttattgctgtgcgggtttctctatgtacgggtcgatggttcccgtttgagacaggaggatttccctccaaggattgtggagcacccctccgatgtcattgtgtccaaaggagaacccaccacccttaattgtaaggccgagggacgccctacacccaccatcgagtggtacaaagacggtgaacgagtggagactgacaaggacgatccccgttcccataggatgctgttgcccagcggtagtctcttcttcctgcggatcgtccacggcagaaggtcaaaaccagatgaaggctcttatgtctgtgttgccaggaattatcttggtgaggctgtgtcccgtaatgcatctctggaggttgccctgctgagggatgacttcaggcagaacccaaccgatgtggttgtcgcagccggtgagcccgctatattggagtgtcaacccccacggggacatccggagcccaccatctactggaaaaaggacaaggtgcgaatcgatgataaggaggagcggattagtatccgcggaggaaagctgatgatcagtaacaccaggaaatcagatgccggaatgtatacttgcgtgggcaccaatatggtgggcgaacgagattctgatccagcagagttaacggtgttcgagcgccctactttcctgcgtaggcccataaaccaagtcgttctggaggaagaagcggtggagtttcgatgccaggtgcaaggagaccctcagccaactgtccggtggaagaaagacgacgctgatctgccacggggtcgctatgacatcaaagatgattatactcttaggattaaaaaaacgatgtccaccgacgaggggacatacatgtgtatcgctgagaaccgcgtgggcaagatggaagcctctgccacactcacagtccgcgcacctccacaattcgtagtccgccctcgagatcagattgtggcccagggtcgcacagtcactttcccctgtgagacaaaggggaacccccaacctgctgtgttttggcagaaggagggaagccaaaacctcctgtttcctaaccagccacagcagccaaattcccgatgcagtgtgtcaccaaccggggatttaactatcacgaatatccagagatctgatgccggttactatatctgccaagcactgacggtggcaggaagcatactggcaaaggcacaacttgaggttaccgatgttctgaccgaccgacctcctccgatcatccttcaaggaccggcaaatcagaccctggccgtcgatggtacggctttgctgaaatgtaaggccaccggcgaccccctccccgttatctcatggctgaaggaagggtttaccttccccggacgggacccacgagctactattcaggaacaagggacactccagattaaaaatctgcgaatttctgatactgggacctacacttgcgtcgccacctcaagttctggcgagacctcgtggtcagctgtcctggatgtgaccgaatctggggctacaatcagcaagaactacgacttatcagacctgccaggcccaccaagcaaacctcaggtgacggatgtgaccaagaactctgttactcttagctggcagcccggaaccccagggacactgccagccagtgcttacatcattgaagccttctcccagtccgttagcaattcctggcagactgtggcgaatcatgtgaagaccaccttatacaccgtgcgcggactgagacctaacacaatttacctgtttatggtgagggcgattaacccacagggcctgagtgacccaagccctatgtctgaccccgtaagaacgcaggacatttcaccgccagcgcagggagttgatcaccgacaagtgcagaaggaattaggtgatgtcctcgtccgacttcacaacccggtcgtgctgacaccaaccacagtgcaggtaacttggactgtggaccgacagccgcagtttatacagggctatcgggttatgtatcggcagacatccgggcttcaagccacatcctcttggcagaaccttgatgcaaaagtccctactgaacgatctgccgtattggtgaatctgaagaagggtgtgacttacgaaattaaggtgcgcccttatttcaatgagttccaggggatggactccgagtctaagacggtgagaacgaccgaagaagcgccaagtgctccaccacaaagcgttacagttctgaccgtgggttcctacaattccaccagcatctcagtttcatgggatcccccaccacccgatcatcagaatggcattatccaggaatataaaatttggtgcctaggcaacgaaacccgttttcacatcaataagactgtcgatgctgccattcgctcagtgattattggcggactctttcctggaattcagtatagggttgaggtagccgcaagcaccagcgccggagtgggggtcaaaagcgaacctcagcctattattattggccgaaggaacgaagtcgttataaccgagaacaataattccatcactgaacaaatcacggacgtcgtgaagcaaccggcatttatcgcgggaattgggggagcttgttgggtgatactgatgggcttttcgatctggctgtactggaggaggaagaaaaggaaggggctgagtaattacgcagttacattccagcgaggcgatggcggtctgatgtcgaacggctcgaggcctggcctgctgaatgccggagacccttcatacccttggctagccgactcctggccagcaacatccctgccagtgaacaatagcaattccggcccaaatgaaataggaaacttcggcaggggtgacgtgttgcccccagtgccaggccagggtgacaagaccgcaacgatgctgtctgatggggctatatatagctccattgacttcaccacgaagacatcgtataacagcagcagccagatcacccaggcaactccttatgccactacacagatcctacactctaactcaatccatgagctggcagttgacttaccagacccacagtggaagagttcaatccagcaaaagaccgatctaatggggttcgggtacagcctcccagatcagaacaagggaaataacggtggtaaaggcggaaagaagaaaaaaaataaaaatagttcaaaaccccaaaaaaacaacgggagtacctgggccaacgtgcctcttcccccaccccctgtgcagcccttacctggaactgagctggagcactacgccgtcgaacagcaggaaaacggctatgatagcgacagctggtgcccccctttgccggtgcagacttacctgcaccagggcttggaagacgagttggaggaagacgacgaccgagttccgacacctcctgttcgtggagtggcttccagtccagcaatctcattcggacagcagtcaaccgcaacattgaccccgagccctagggaagaaatgcagcctatgctccaggcacatttggacgaattaacacgggcatatcagttcgacatcgctaaacagacctggcatatccagtccaacaaccagccccctcagcccccagttccccctcttggttatgtgtcgggcgctctgatctcagacctggaaactgacgtggccgacgatgatgcagacgacgaggaggaagcgctggagattcctcggcctctgcgggcactggaccagacaccgggaagttctatggataatctggattcctccgttactggcaaggcttttacttctagccagcgcccacggcctaccagtcccttttcgacggatagcaatacgtcagcagccctgtcccagtcccagaggccaaggcccacgaaaaaacacaagggaggaagaatggatcagcagcccgcattaccacacaggcgcgaggggatgaccgacgaggaagcactggtgccatattcaaagccaagcttcccttctcctggaggacattcctcaagcggaacagcttcaagcaaagggtcaactggacccagaaaaacagaagtgctcagagctgggcatcagagaaacgcatccgaccttctggacatcgggtatatgggcagcaactcacagggtcagtttacgggcgaattgtag

SEQ ID NO: 239460 - DNA, 4185 bp, synthetic construct
  misc_feature 1..4185: note = Description of Artificial Sequence: Synthetic coding sequence
  source 1..4185: mol_type = other DNA
atggctaggagacacgagcgagtgacgcgacgcatgtggacatgggcacctgggctactgatgatgaccgtcgtgttctggggacatcaagggaatgggcaaggacaagggtcaagactgcgtcaggaggatttcccacccaggatagtggagcacccctccgatgttattgtcagcaagggcgagcccacaaccctcaattgcaaagctgagggcagacccactccgactatagaatggtacaaagatggcgaacgcgttgaaaccgataaagacgacccgaggagtcatcgaatgctcctaccatcgggttctctgttctttttgcgaatcgtccacggcaggcgtagcaaacccgacgaaggcagttatgtatgtgtggcccgaaattacctcggagaggcagtatccaggaacgcttcactggaggtggcgctgctgcgggatgattttcgccagaatcccacagacgtggtggtcgccgctggcgagcccgctatcctggaatgccagcccccacgcggacacccagagccaaccatctattggaagaaggataaagtgcgaattgacgacaaagaggagcggatttccattcgaggtggtaagctgatgatctccaacacacgtaaaagcgatgccggaatgtatacttgcgtgggcacaaacatggtgggggaacgggatagcgaccctgccgaactcacagtcttcgagcggccaaccttcctgaggaggccaatcaaccaggtagtgctggaagaagaggccgtggagttccggtgccaggttcagggtgacccacaacccactgtcagatggaagaaggacgacgcagatctccctcgcggtcgttacgatattaaagacgactataccctgcgaatcaagaagactatgtcaacagatgaggggacctacatgtgcattgctgaaaatagagtcggaaagatggaagccagcgctaccctcaccgtgcgggctccccctcagtttgtcgtgcggccacgggaccaaattgtggcgcagggaaggacagtcactttcccttgtgagaccaagggtaacccccaacctgcggttttctggcagaaagagggatcccagaacctgctcttccccaaccagccacagcagcccaattctaggtgtagcgtctccccaacgggagaccttaccatcactaacatccagagatcagacgctggttactacatttgccaagccctcacggttgcgggtagtattctcgcaaaagctcaactggaagtgacagatgtgctgacagatagacctccgccaatcatcctgcaggggccagctaaccagacactagcagtggatggaacagccctgctgaaatgcaaagccaccggcgacccgctgcctgtcatctcgtggctgaaggagggttttactttccccggtcgcgatcccagagctacgattcaggagcagggtaccctgcaaattaagaatttgagaattagtgacacaggcacctacacctgtgtggccacctcttctagcggggagaccagctggtcagccgtactggacgtgaccgagagcggggctacaatttccaaaaattacgacctgtcagacctgccgggaccaccctccaaaccacaggtgaccgatgtcaccaagaactcagtcacactatcctggcagcctggaactcctggcactctccctgccagcgcatacatcatcgaagctttcagtcagtccgtgagcaacagttggcagaccgtcgccaaccacgtgaaaaccacactttatactgtgcgcggattaaggcctaatacgatctaccttttcatggtgagggccatcaacccacaggggctcagcgaccccagccccatgtctgatcctgttagaacccaggacatctcccctcccgcacagggcgtcgaccatcgacaggtgcagaaggagctaggcgatgtgctggtcagacttcataatcctgtggttcttacgcccaccaccgtgcaggtcacgtggacagtggatcgtcagccgcagtttattcagggatatagggtaatgtaccggcagacctcagggctgcaggctacctcgtcatggcagaacctggacgccaaagtgcccacagagagatccgccgtgctcgtgaacttgaagaaaggcgtcacatatgaaatcaaagtgagaccctacttcaatgagttccaaggcatggactctgagagcaaaaccgtgaggaccacagaagaggccccatccgcccctcctcagtcagttacagtacttacagtcggctcttacaacagtacatctattagcgtgtcctgggacccgcctcccccagatcaccagaacggaatcatccaggaatacaaaatctggtgtctgggcaatgaaacccgctttcacatcaacaaaaccgtggatgcagccatcaggagtgtgattattggaggacttttcccaggcattcagtaccgcgtggaagtggctgccagtacatccgctggagtgggtgtaaagagcgagccccagcccatcattatagggcgacggaacgaagtggtgattaccgagaacaataactccataacagaacagattacggacgtggttaaacagcctgcattcatcgcgggaatcggaggggcttgttgggtgattctgatgggattttccatctggttgtattggagacgcaaaaagcggaagggcttatccaattacgccgtcaccttccaaaggggcgacggaggactcatgagcaacggatcaagaccgggactactgaacgccggtgacccctcatatccctggctggccgacagctggcccgcaacttccctgcccgtaaacaacagtaactccgggcctaacgagatcggcaatttcgggaggggcgatgtgctgccacccgtgccgggacagggcgataagacggctacaatgttgagcgatggtgccatttacagttctattgacttcactaccaagacaagttataactccagtagtcagattacacaagctaccccatatgccactacacagatcctccactctaattctattcacgagcttgccgttgatctcccagatcctcagtggaaaagtagtattcagcagaagactgacctgatggggttcggatactccctcccagatcagaataagggaaataatgggggaaagggagggaaaaagaagaagaataagaattcctccaaaccacaaaagaacaatggtagcacctgggctaacgtccctctgcctccgccaccggttcagcccctgcctggtaccgagctagagcactatgctgttgagcagcaagaaaatggttatgactccgattcttggtgtcctcctctgcctgtgcaaacctatctgcaccaggggttggaggacgaattagaagaagacgatgacagggttccaactccacctgtccgtggcgtggcctccagtcctgctatctctttcggccagcagtctacagcaacactgactccctcgccaagagaagagatgcaaccaatgctacaagctcatctggacgagctgactcgcgcataccagttcgatatagcaaaacagacatggcatatccagagtaataaccagcccccacagcccccagtgccccctctcggttatgtctcaggtgccctgatctctgatcttgagacagacgtggccgacgacgacgccgatgacgaggaagaggcactcgaaattccgaggcctctgcgagccttagatcagacacctggtagcagcatggacaacctggactcttccgttaccggaaaagccttcacctcctcgcagaggcccaggcccactagccccttctcaaccgattccaacacctctgctgccctttctcagagtcagcgacctcgacctactaaaaagcacaagggtggtcggatggatcagcagccggcacttcctcatcggagagaggggatgacagacgaagaagctttagtgccttattccaaaccttcttttccatcccctggagggcacagctcttcaggtacagcctcttccaaagggtccactggcccaaggaaaaccgaggtgcttagggccggacaccagaggaacgcaagcgacctcctggatattggctacatggggtctaattctcagggtcaatttaccggcgaactgtag

SEQ ID NO: 239461 - DNA, 4161 bp, synthetic construct
  misc_feature 1..4161: note = Description of Artificial Sequence: Synthetic coding sequence
  source 1..4161: mol_type = other DNA
atgttgcgctaccttctgaaaacactgttgcagatgaacttgttcgcagattcactggctggcgacatctccaacagcagtgaactgctgctggggtttaactcatccttagccgcactgaatcatacacttctccctcccggtgacccttcactcaatgggtccagagtgggacctgaggatgccatgccgcgaatcgtggagcagccacccgatttattggtttctaggggagagccagccactctcccatgtcgagcagaagggaggcctcgacctaacatcgaatggtacaaaaatggcgcacgcgtagctactgtacgagaggaccccagggcacacaggctccttctgccttccggagcactgtttttcccgagaatagtgcacggccgaagagccaggcctgatgagggcgtttatacttgtgtggctaggaactatctcggagcagccgcttctcgaaatgcctctctcgaagtcgcagttttgcgcgacgattttaggcagagcccgggtaacgtcgttgtggcggtgggagagccggcagtgctggagtgcgtgccgccacgcggacaccctgagcccagcgttagctggcgcaaggacggagccagattaaaggaggaggagggacggatcactattcgcggagggaaactgatgatgagtcacacgctcaaatcagacgcgggaatgtatgtgtgtgtagcttctaacatggccggagagcgtgaaagcgctgctgcagaggtgatggtactcgaaaggccctcattcctacgcagacccgttaaccaagtcgtgctcgcagacgccccagtgacatttctgtgtgaggtcaagggcgaccctcctccgagacttcggtggcgaaaagaggacggagagctgccaacaggaagatatgagatccgaagtgaccattcgctgtggattggccatgtgtcagcggaggatgaaggtacttacacgtgtgtggctgaaaacagcgtcggcagagctgaagcctcgggatcattgagcgtgcatgtgcccccacagctggtcacacagccgcaagaccaaatggcagctccaggagagagcgtggcctttcagtgtgagacaaagggaaatccccctcctgccatcttttggcagaaggaggggagtcaggtgctattgttccctagtcagtccctgcagcctactggccgtttctctgtgagtccaagggggcagctcaacatcacggcagtccaacgtggggatgcgggatactacgtttgccaagctgttagcgtcgccggtagtatactggctaaggcactgctggaaataaagggggcaagtctcgacggtctgccaccagtgatactccagggccctgccaaccagactcttgtactgggtagctcagtgtggcttccctgcagggtcaccggaaacccacagcccagtgtcagatggaagaaagacggccagtggcttcaaggggatgacctgcagttcaaaaccatggcgaacggaaccctgtacattgctaatgtacaagagatggatatgggtttttactcctgcgtcgctaaaagcagcaccggagaagcaacctggtcaggatggctgaaaatgcgtgaagattggggagtgtcacctgacccaccaacagagccatcttcacccccaggcgctccaagtcagccagtcgtgaccgagataactaaaaatagcattaccctaacttggaagcccaacccccagaccggtgcagccgtgacatcctacgttatcgaagcattttctccagctgccggtaatacctggagaacggtggcagacggagtccaactggagactcacactgtgagtgggcttcagcctaacacaatttacttgttcctggttcgggcagtcggcgcttggggactgagcgaaccctcaccagtgagcgagcccgtgcgtactcaggatagctccccttctcggccagttgaagatccctggcggggtcagcagggactggctgaggtggcggtcaggctgcaggaaccaattgtgttagggccacgcacactccaggtgagttggacagtagatggcccagtccagctagtgcagggtttccgcgtgtcctggcgagtagccggtccagagggcggatcgtggacgatgctggatctgcagagcccctcccagcagtctactgtgctccgagggctcccgcctggaacccagattcagatcaaagtgcaagcacagggacaagaaggactcggtgccgagagcctgtctgtcactcgcagcatccccgaggaagcacctagcggacccccacagggggtcgccgtcgctcttggaggcgatggaaacagctccatcacagtatcatgggagccccctttgccatcacaacagaacggtgtcatcacggagtaccagatctggtgcctgggcaatgaatctaggtttcacctcaaccggtctgctgctggctgggctagatcggctatgctaagagggctggtgcccggtcttttatacagaactctagtcgcagctgccacatcagctggtgtaggcgtgccaagcgctccagtgctggtccagctccccagtccgccagatctcgagccgggactggaagtcggagcaggattggccgtccgcctggccagagtgctaagggaacccgcatttttagctgggagtggagcggcatgcggagccctgttgctcgggctctgtgctgcgttgtactggagacggaaacagcgtaaggaactaagccattacactgcgagcttcgcctacacgccggctgtctctttcccccactcagaaggtctttctggtgcgtcttccaggccccctatgggccttggcccagctccctattcttggctcgccgactcttggccacatccgtctcgatctccttccgcccaggaacccagaggcagctgttgcccttcgaatccggatcctgatgatcgatactacaatgaggctgggatatctctgtaccttgcgcagactgcaaggggcaccgccgcaccgggtgaaggtcccgtttacagtaccattgatcccgcaggcgaggagctgcagacattccacggaggcttcccacagcacccatcaggcgacttgggcccatggagccagtacgccccacccgagtggtcccaaggtgactctggggcaaaagggggtaaagtaaaacttttaggaaagccggtgcagatgccaagccttaactggccagaggccctgcctccaccacctccctcatgcgagttgagctgcctggaggggccagaggaggagctcgagggctcatcagagcccgaggagtggtgcccaccaatgccagaaaggtcccacctcaccgagcctagctcctctggagggtgcctggtgaccccatcaaggcgtgaaacccctagccctacaccatcttacggacagcagtccacggcaacattgacgcccagtccacccgacccgcctcagcctcctaccgacatgcctcatctccaccagatgcctaggagggttccgctcggcccttccagtcccctttctgtgagtcagccaatgctggggattcgcgaggcccgtcccgcaggactgggggctggacccgctgcctcacctcacctcagcccatctcccgctcctagcaccgcgagctcagcccctggccgaacgtggcagggcaacggcgaaatgactccccctctccaaggacccagagcccgttttcgcaaaaaaccaaaagcactgccgtaccggcgagagaattctcccggagacttgccacccccaccactgccccctcccgaggaggaggcctcctgggcactcgaactgcgcgcagcaggatctatgtcttcactcgaacgcgagaggtctggcgagcggaaggccgtgcaggcagtgccactggctgctcaaagggtcctgcacccggatgaagaggcttggctgccctattccaggccctcttttctgagcaggggacaaggcacgagtacatgctcgaccgccggatccaacagttccagaggcagctcatcaagccggggaagtcgaggaccgggtaggagcaggtcccgatcccagagccggtctcagtcccaacgccctggtcagaaacgccgagaggagcccagatag

SEQ ID NO: 239462 - DNA, 4095 bp, synthetic construct
  misc_feature 1..4095: note = Description of Artificial Sequence: Synthetic coding sequence
  source 1..4095: mol_type = other DNA
atggagcggcctgaggacagtctgtcactctggagtctcaatttgtcaccccagttcccatgcttgaatgcactgcgccatcccctgagccccggatctagagtgggcccagaggacgcgatgccccgtattgtggagcaaccaccagacctgctcgtgagcagaggtgaaccagccactctgccctgtcgcgcagagggtcgtccccgacctaatatagaatggtacaagaacggcgctcgcgttgcaaccgtgcgcgaggaccctcgggctcacaggttgttgctcccaagtggcgcactgttttttcctagaattgtgcatgggagaagagctcgccctgatgaaggagtctacacctgtgtggctagaaattacctaggagccgctgcaagcagaaatgcatcgcttgaagttgcggtgctgagagatgactttcgtcagtcacctgggaatgtggtcgtagccgtgggagagccagctgtactcgagtgcgtgcctccccgtggccaccccgagcctagcgtctcctggaggaaggatggcgcacgattaaaggaggaagaagggcgtatcacaatcagaggcggtaaactgatgatgtcccatactctgaagtctgacgccggaatgtatgtgtgtgtcgcctcaaatatggcaggcgaaagggagtctgccgctgctgaagtaatggtgttggagagacccagcttcctcagaaggccggtaaaccaagtggtattggcagacgcaccggttacatttctgtgcgaagtcaaaggtgaccctccgcctagattacggtggcgcaaagaagacggtgaactgcctactggcagatatgagattcgctcagaccactcgctgtggatcggccacgtgagtgcggaagacgagggcacgtatacatgcgtcgcagaaaactcagtgggacgagctgaggcctccggctcactctccgtgcacgtacctcctcagctggtgacccagcctcaggatcaaatggccgcacccggtgagtccgtggctttccagtgtgaaaccaaaggcaatccacctccagcgattttttggcagaaagagggctcccaggttcttctgttcccttcccagtctttgcaaccaacaggcagattctccgtgtcccccagggggcagttgaatatcaccgcggtgcagcggggagacgctggctattatgtatgccaggctgttagcgtcgccggatccatccttgctaaagccttactggaaatcaagggagcctccctcgatggtcttcctcccgtcatcctccaggggcctgcaaaccagacactcgttctcggctcgtcggtgtggctcccatgtagggtcacaggcaacccccaaccaagcgtgaggtggaagaaggacggacagtggctccagggtgacgatcttcaattcaaaactatggctaatggtaccctttacattgcaaatgtgcaggagatggacatgggtttttacagttgcgtggccaagagcagcaccggggaagccacttggtccgggtggttaaaaatgagagaggactggggggtcagccccgaccccccaacagagccaagctcaccaccaggagctccctcacagccagtagttactgagattaccaagaattcgatcacactgacttggaaacctaatccccagaccggggcagctgtcaccagttacgtcattgaggccttttctcccgctgctggaaatacctggaggaccgttgcggatggcgtgcagctggaaacccacacagtgtccggcttgcagccgaatacaatttacctcttcttggttcgggctgtgggcgcatggggtctttcagaaccgtctcccgtgtctgagccggtgagaacacaggacagctctcctagcaggcctgtggaggacccatggaggggtcagcaagggcttgccgaagtggccgtacggctgcaggagccgatagtcctgggcccacgcacactgcaggtgtcttggaccgttgatggccctgtgcagctggttcagggcttccgcgtgagctggcgcgtcgcaggtccagagggtggaagttggacaatgttggacctacaatcgcccagtcaacagtcaactgttctcaggggtctccctccgggtacacagatacagatcaaggtgcaggcacaaggccaggaggggctgggcgctgagagcctgtccgtgactcgcagtatacccgaagaagcaccctctgggcctccgcagggcgttgcagtcgcattgggtggtgacggcaattccagcattactgtgtcctgggagcccccactgcccagccaacagaacggcgtgattaccgaataccagatttggtgcctgggaaacgagtcccggttccacctcaaccgttccgccgctggctgggcacggtctgctatgctccggggactcgtccccggtttgctctatcgaaccctcgttgccgcagcaacttcggcgggagtgggggtcccctcagcgccagtcctcgtgcagcttccgagccctccagacctggagcccggactggaagtgggagccggacttgccgtccgcctggctagagtcctgagagagccagcatttctggccggtagcggcgctgcttgtggcgctttgcttcttggactctgcgccgcactttattggagacgtaaacagagaaaggagctcagtcactataccgcaagctttgcttacacacctgccgttagttttccacatagcgagggtttgagcggcgctagctcacggcctcctatgggtctcggacctgcaccatattcttggttggcagacagctggcctcacccaagccggagtccgagcgcgcaggaacctcgcggatcatgctgcccctcaaatcccgatcccgacgatcgatattataacgaagctggaattagcttgtatcttgcccagactgctcggggtaccgctgcaccaggcgagggtccggtttatagtactatcgatccagccggagaggagctgcagaccttccacggaggttttcctcagcacccctccggagatctggggccttggtctcaatatgcccctcccgaatggtcgcagggcgatagcggcgctaagggagggaaagtgaaactgcttgggaagcccgtccaaatgccaagccttaattggcctgaagctttgccgccaccaccgccttcttgtgagctgagctgcctggaagggccagaggaagagcttgaaggatcgagcgagccagaagagtggtgccctcctatgcctgaaagaagccacctgaccgagccaagtagctcgggcggatgcctcgtgacaccttccagacgcgaaacgcccagcccaactccttcttatgggcaacaatctaccgccacattaaccccctccccacctgacccacctcagccacccacagacatgccacatctgcatcaaatgccccgacgcgtacctctagggccatcttcccccttgtccgtttcacagcccatgctggggatccgcgaggctagacccgcagggctcggagctggcccagccgctagcccacacctgagcccgtcaccagcaccttccacggcctctagcgcgccaggaagaacctggcagggcaacggtgagatgacacccccactgcaagggccaagggcaaggtttcggaaaaagccaaaagccctgccatatcgcagagaaaatagcccaggggacctgcctccgcctcccctccccccaccagaggaggaggccagctgggcactcgagcttagggcagcgggaagcatgtccagcctggaaagggaacgcagtggcgagcggaaagctgtgcaggctgtccccttagccgctcagagggtgcttcaccctgacgaagaagcttggcttccgtactcccgacccagttttctgtccagaggccaagggacaagtacctgctctacagcaggctcgaatagctccagaggcagctctagtagccgcggtagccggggtcctggacgctctcgatccagaagtcagagccggtctcagagtcagcggcctggacagaagaggagggaagaaccgaggtag

SEQ ID NO: 239463 - DNA, 450 bp, synthetic construct
  misc_feature 1..450: note = Description of Artificial Sequence: Synthetic coding sequence
  source 1..450: mol_type = other DNA
atgacaccccctctccaagggcctcgggcaaggttccggaaaaagcccaaggccttaccataccgacgggagaatagcccgggtgacctgcccccacccccactcccccctccagaggaggaagcctcatgggctcttgagcttcgggctgctggttctatgtcatctcttgagagagaaagaagcggcgagcgaaaagccgttcaagcggtgccactcgctgcacagcgcgtcctccatcccgatgaagaggcatggctcccatatagtaggccttcgtttctgagtagaggacagggtacatctacgtgcagtaccgccggttctaattcctctagagggagttccagctcccgaggttcacggggtcctggcagatcacggtcgagatcccagtcccgaagtcagtcccagaggccagggcaaaagcgacgcgaagaaccccgatag

SEQ ID NO: 239464 - DNA, 3024 bp, synthetic construct
  misc_feature 1..3024: note = Description of Artificial Sequence: Synthetic coding sequence
  source 1..3024: mol_type = other DNA
atggggtctggcggagatagtctgctggggggtaggggctccctgcctctgctcctcctgctgatcatgggaggaatggcccaagactctccccctcagatcctcgtgcacccacaggaccagcttttccagggtccaggcccagccaggatgtcatgtcaggcctccggacagccccctcccaccatacggtggctcctaaacggtcagcccctgtccatggtgccccctgatcctcaccacctcctgcccgacggaacgctcctacttctgcagcccccagccagaggccatgctcacgatggtcaggcgctctctactgatctgggggtgtacacctgtgaagcttctaacagactgggtactgccgtcagtcggggagcaagactatcagtggcggtactaagagaggattttcagatccagccgcgtgatatggtggcagtggttggagagcagttcacgctggaatgtggaccaccctgggggcaccctgagcctactgttagttggtggaaggatggaaaacctttagctctgcaaccaggcaggcatactgtgtccgggggatccctcctcatggcgagagcagaaaaatcagacgagggaacttacatgtgtgtcgcgactaactccgctggtcaccgggagagccgcgctgcacgggttagtatacaggagccgcaggactatacggagcccgtggagctcctcgcagtccgcattcagcttgagaatgtgacgctgctgaatcccgatcctgccgaagggcctaaaccaaggcccgctgtgtggttgtcatggaaggtcagtggcccagcggctccggcacagtcttataccgcactgtttaggacccagacagcccctggcggacagggcgcaccttgggccgaagagttgttagccggatggcaatctgccgagctgggcggtctccactggggccaggactatgagtttaaggtgagacccagcagcggacgcgctagagggccagacagcaacgttctgctcctgcggctgcccgaaaaagtacccagcgcaccaccccaggaagtaaccttgaaacctgggaatgggaccgtattcgtgtcctgggtcccgcctcctgcggagaaccacaacggtattattcgtgggtatcaggtatggagtttgggcaacacgagtttacccccagccaactggaccgttgtgggtgagcagacacagcttgaaatagccacccacatgcccggttcgtactgcgttcaggtggcggctgtcacaggagcgggtgctggtgagcccagccgacctgtctgcctgctcttggagcaggcaatggagagggcaactcaggagcccagcgagcacggcccatggacgctcgaacagctccgcgctaccttgaaaaggccagaagtcattgctacctgcggggtagcgctatggctgctcctgttgggaacagctgtatgcatacaccgtcggaggagggcccgtgtgcatcttggacccggattgtaccgatatacatccgaggacgccattcttaaacacaggatggatcactctgatagtcaatggttggccgatacatggcgatctacatctggaagccgggatttgagctctagctctagcctgagcagccgcctaggcgctgacgctcgggatcctctggattgccggcgttcactgttgagttgggattctagatctccaggggtgcctctgttgcctgacacgagcactttttatggttcactgattgccgaactgccttccagtactcccgctcgtccaagccctcaagtgcctgcggtccgccgactccctccgcaactggcccagctttcttccccgtgttcctcctccgattctctgtgctcacgtcgaggcctgagcagtcccagattgagcttggcacctgccgaggcctggaaagccaaaaaaaaacaggaattgcaacatgcaaattcaagccccttgctgaggggaagtcactcattggagctgagagcctgcgagttgggtaaccgtggcagtaagaacttgtcacagtcaccaggcgctgtgccacaggccctggtagcctggagagcacttggtcctaaacttttatcttccagcaacgagctcgtaactcgtcatttaccccctgccccactgtttccccacgaaacacccccaacacagtcccagcagacccagcctcccgtagcgccacaagccccatcaagtatccttcttcccgctgctccaatccctatattgtccccgtgctctccgcctagccctcaggccagcagcctgtctggcccttctcctgcgtcaagccggctgtcatcatcgtccctgtcatccttaggcgaggaccaggacagcgtgttgacccctgaagaagttgcactctgcctggaactctccgaaggagaggagactcccagaaatagcgtctctcccatgccaagagctcccagtccacctacaacctacgggtatatcagtgtgcccaccgcctctgagtttaccgatatgggacgcactggcggaggcgtaggaccaaagggaggagttttgctgtgcccccctaggccatgcctgactccaactcctagcgaagggtcactggctaatggatggggctccgcctcagaagacaatgcagccagcgccagggcatcacttgtcagcagtagtgacggctctttcctggccgacgcccacttcgccagggccctggcggtggctgtggatagctttggcttcggcctcgaaccccgagaggctgattgcgtcttcatagatgcctcttccccaccatcaccacgagatgagatcttcctaacaccaaacctgtccctgccattatgggaatggcgcccagactggcttgaggacatggaagtcagtcacactcaaaggttaggtcgaggaatgcctccatggccacccgattcacagattagttcccagagatctcaactccactgccgcatgcctaaagccggtgccagcccagtggattactcttag

SEQ ID NO: 239465 - DNA, 2106 bp, synthetic construct
  misc_feature 1..2106: note = Description of Artificial Sequence: Synthetic coding sequence
  source 1..2106: mol_type = other DNA
atgggtagcgggggtgacagcctgctcggcggtcggggaagcctgcccttactgcttttacttatcatggtccttagagaggacttccagatccaaccacgcgacatggtggcggtggtcggggagcagtttacgctggagtgcggtccgccatggggacaccctgagcccacagtttcctggtggaaggatgggaagcccttggctctccagcccggtcgccataccgttagtggcggaagcttgctgatggccagggccgagaagtcagatgagggaacatatatgtgcgtggccacgaatagtgcaggccatcgagaaagcagagcggctagggtcagcatccaggagcctcaggattataccgagccagtcgagttactggccgtgcgcatccagctggagaacgtgaccttgctgaacccagatccagcagaggggccaaagcccaggccggcagtttggctgagctggaaagtgagcgggccagcagcccctgcacagtcctacacagcgttgtttcggactcagacagcgcctgggggacagggagctccctgggccgaagaactgctggcaggctggcagagcgcagaacttgggggactccattggggacaggattacgagttcaaagttagaccttccagcgggcgagccaggggaccagattccaacgtgctgctgctacgcttgcccgagaaagtcccctctgcaccaccgcaggaagtcacactgaaacccggaaatggtaccgtgttcgtcagttgggtgcccccaccagcagagaaccataatggcatcattcgcggataccaagtgtggagtcttggcaatacttctctgccgccagctaactggactgtcgtgggggaacagacacagctcgaaatcgctacacatatgccagggagttattgtgtacaagtagctgctgtcacaggcgcaggtgccggtgaaccatctcggccagtctgcctgctattagagcaagcaatggaaagggccacacaggagccctcagagcacggtccctggaccctagagcagctcagagccaccctgaaacgacctgaggtgatcgccacctgtggcgtggctctgtggctgctccttctcgggactgccgtctgtatccaccgcagacgcagagcccgtgtccatcttggacccggactgtacagatatactagcgaggatgccatcctaaaacaccgcatggaccattccgactcacaatggttagcagatacctggagatccacatccgggagcagggacctttcatcgtcctcttccctcagcagtagattaggagctgacgctcgggatccgctggattgtcggaggtctctactttcatgggactcccgttcccctggggtcccgctccttcctgatactagtaccttttacgggtcactgatcgccgaactccccagttcaacccccgctcgcccatccccccaggtgcccgcagtcagacgcctaccccctcagctggcacagttaagttcaccctgcagttccagcgacagcctttgtagtcgccgtggtctgtcatctccacggctatccttggcaccagctgaggcatggaaagctaaaaagaagcaggagctgcaacatgccaactccagtccccttctacgaggtagtcactccctggagctgcgcgcttgtgaactcgggaaccggggtagcaagaacctgtctcagagtccgggagccgtgccacaggctcttgtcgcgtggagagctctcgggcctaagcttctgtcctcgtccaacgagctcgtcacacgccatctgccccctgcaccattgtttccacacgagacgccccctacacaaagccagcaaactcagcctccggttgctcctcaggccccaagcagcattcttctgcctgcagcgcctatccctattctgtccccgtgttcaccccctagtcctcaggccagtagccttagcggacctagcccggctagctctcgtctgtctagcagcagccttagcagcctgggggaggatcaggacagcgttctgacacccgaagaagtcgctctgtgcctggagctgagcgagggtgaggagaccccatag

SEQ ID NO: 239466 - DNA, 2589 bp, synthetic construct
  misc_feature 1..2589: note = Description of Artificial Sequence: Synthetic coding sequence
  source 1..2589: mol_type = other DNA
atggtggcagtggtcggcgagcagtttaccctcgagtgtggccctccatgggggcaccctgagccaactgttagttggtggaaagacggaaaacccctggctctccaacccggtagacatacagtgagcggaggtagcttgctgatggccagagcagagaaatccgacgaagggacttacatgtgtgtggccacgaatagcgcgggacacagggaaagtagagctgcacgagtttccattcaggagccacaggattacactgagcctgtcgaactgctcgcagttcgcatccagttggaaaacgtgacactgctgaatccagacccagcagaaggaccaaagcccagacctgccgtgtggctgtcgtggaaagtctcaggaccggctgctcccgcacagtcatacaccgccctatttcggactcagacagcacctggcggacagggcgcaccttgggcagaggagttattggccggatggcagagtgctgagctgggcggtctacattgggggcaggattatgagttcaaggtgaggccatcaagcggcagggctcgcggacccgacagcaatgtgctgttgttgcgattaccagaaaaagtgcccagcgcccctccacaggaagttactcttaaacctggaaatggaacggtgtttgtgtcctgggtaccccctccagcagagaaccataacgggatcatccgcggttaccaggtgtggagcctcggcaatacctctcttcctcctgctaattggaccgtagtgggtgagcagacccagctcgagattgcgacgcacatgcctggatcgtactgtgtacaggtggctgcagtgaccggagccggtgctggggaaccgagcaggcctgtttgcctcctgctggaacaggcaatggaacgcgcaacccaagaaccttctgaacacggcccatggacactggaacagctcagagctacccttaagagaccagaggtcatcgctacttgtggcgtcgcactatggctgttacttctcggtaccgcggtatgcattcatcgacggagaagggctcgcgttcatctgggacctgggctgtatcggtatacaagcgaggacgccattctaaaacaccgcatggaccacagtgacagccaatggttggctgacacttggcgcagcaccagcggctcaagagacctctcgagctcgagctctctgtcttcgaggcttggggctgatgctagggaccccctcgattgtagaagaagcctgctgtcgtgggattcccggtcgccaggggtgccgcttcttccagatacgagtactttttatggcagcttgatagctgagctgccttcctcaacacctgccaggccttctcctcaggtgcccgcagtgagaagactccccccacaactggcgcagctgagttccccctgtagtagctcagacagcctgtgctccaggcgaggcctctcgtcacccaggctgtcactggccccagctgaggcttggaaagccaagaagaaacaggaactccaacacgccaacagttctcctttgctccggggatcacatagtctggagctccgcgcatgtgagctagggaaccgcggaagcaagaacctgtctcagtcccctggtgctgttccacaggctctggtggcatggcgtgcgcttggaccgaaactgttatcttccagcaacgaactggtaacgcgtcatctcccgccagcccctctctttccacatgagacaccgcctacacagtctcagcaaactcagcccccagtagctccacaggccccttcatccatcttgttacccgctgctccaatccccatcttgtccccgtgctcacccccatcaccacaggcgtcttccctgtcaggcccatcacctgcttcctcacgcctgagctccagtagcctctcttctctgggtgaagatcaagacagtgttctcaccccggaagaggtcgctctctgtttggagctgagtgagggcgaagaaactcccagaaatagcgtatccccgatgcctagagccccttctccacccacaacatacgggtatatttcggtgcccaccgctagtgaattcaccgacatggggcgaactggagggggtgtaggcccaaagggcggagtgctgctgtgtcccccaaggccttgccttaccccaacgcccagtgagggctccctggcgaacggctggggatctgcttctgaagataatgccgctagtgccagagccagtctggtcagctcgtcagacggtagcttcctagcagatgctcacttcgcacgggctcttgcagtcgcagttgactccttcggctttggtctcgaacctagggaggccgactgcgtatttatagatgcatcatctcccccttcacccagagacgaaattttcctgactccaaatctcagcctgccgctttgggaatggcgccctgattggctggaagacatggaggtctctcacacacagagactgggccgtggaatgcccccttggccgccagatagccagatttctagccagcggagtcagctgcactgccgcatgcccaaagccggtgccagtccagttgattactcctag

SEQ ID NO: 239467 - DNA, 3708 bp, synthetic construct
  misc_feature 1..3708: note = Description of Artificial Sequence: Synthetic coding sequence
  source 1..3708: mol_type = other DNA
atgtccggccctactgacgagaccgccggagacctgcccgtgaaggacacagggcttaatctgtttggcatgggaggcctgcaggaaacaagcacgactcgcaccatgaaatccagacaggcagtttcacgtgtgtcccgcgaggaactggaagaccgattcctgagactgcacgatgagaacattctgctcaaacagcatgccagaaaacaggaagataaaatcaagcggatggctaccaagctcatccgcctggtaaacgataaaaagaggtatgagcgcgtggggggaggacctaaaaggctcggccgtgatgtggagatggaggagatgattgaacagttgcaggaaaaggttcacgagctcgagaagcaaaatgagaccttaaaaaaccgtcttatctccgctaagcagcagctgcaaacccagggctatagacaaaccccctataacaatgtgcagtcaaggatcaataccggcagacgtaaggctaacgagaacgcaggactacaggagtgccctaggaagggtataaaatttcaagacgccgacgttgccgaaacaccccatcccatgttcactaaatatggaaactccctcttagaagaggcccgtggcgaaatcagaaacctggaaaatgtgatccagtctcagagggggcaaatcgaggaactggagcacctggctgaaatattgaaaacgcagctaaggagaaaagagaatgaaatagagctttcactcctgcaactacgggagcagcaggcaaccgaccaacggagcaatatcagggacaacgttgaaatgataaaactgcataagcagctagttgaaaaatcaaacgcgctgtctgctatggagggaaagttcatccagctgcaggagaagcaacgaacattacgaatatcacatgatgcactgatggcaaacggagacgagctgaatatgcaattgaaggaacagagacttaagtgctgctctctagagaaacagctgcacagcatgaaattttccgaacgcagaatagaggagctgcaggataggattaacgacctggagaaagaaagggaactgctaaaggagaactacgacaagctttacgacagtgcattctcagccgcacatgaagagcaatggaagctcaaggagcagcagcttaaagtgcaaattgcacaattagagaccgcccttaagagcgacctgactgacaagaccgaaattttggatcgactaaagacagaacgcgaccaaaacgagaagttggtccaagagaaccgcgaattgcagctccagtatttagaacagaaacagcagctggatgagcttaaaaaacgaatcaaattgtataatcaagagaatgacattaatgctgacgagctttcggaggcgctgctgctgatcaaagcgcagaaagaacagaaaaatggtgaccttagttttttagtgaaggtcgatagcgaaataaataaagacttggagcggtccatgagggagctacaggcaactcacgccgaaacagtgcaggaactggagaagaccaggaacatgctcatcatgcaacacaaaatcaataaggattatcagatggaggttgaagcagtaacaagaaaaatggagaatcttcagcaggactatgagctaaaggtggagcagtacgtccacttgcttgatattcgcgcagcacggatccacaaattggaggcccagttgaaagatatcgcttacgggacaaaacagtacaaatttaaaccagagatcatgcctgatgatagcgttgacgagttcgatgagactatacacctggagaggggcgagaatttgttcgagatccacatcaataaggtgaccttcagctccgaagtgctgcaagcctccggagacaaagagccggtaaccttctgtacatacgccttttatgacttcgagctccagacaactccagtggtacgtggtctacatcctgaatacaacttcacgtcacagtatctggtgcacgttaatgacctgttcctgcaatacattcaaaaaaacaccatcacccttgaggtccaccaagcctactccaccgaatatgaaaccattgccgcatgtcaacttaagttccacgaaattcttgagaagtcaggacgaattttctgtacagcgtcattgatcggcacaaaaggtgatatcccaaacttcgggactgtagagtactggtttcgactgcgagtccccatggaccaggcaattagattatacagggagagggctaaggccttagggtatattacgtctaattttaagggccctgaacatatgcagagtctgtcccagcaggctccaaagaccgctcagctctcatcgactgatagtacggacggaaacttaaacgaattgcacattaccatccgatgctgtaatcatctgcagagtcgggctagccacctccaaccccacccatacgtggtgtacaagttcttcgactttgccgaccacgacacagccatcatcccgtccagtaatgatcctcaatttgatgaccacatgtatttccccgtccccatgaacatggatttggaccgctacctcaaaagtgagtctctgtctttctatgtctttgatgactctgacacccaggagaacatttatattggaaaagtaaacgttccactcatatctctggcccacgacaggtgtattagcgggatttttgagctgaccgaccaccaaaaacaccctgcgggaactattcatgttatcctgaagtggaagttcgcttacctccccccatcgggtagcattacaactgaggatctcgggaatttcatccgctccgaagaaccagaagttgttcagcgcctccctcccgcatccagcgtgtcaaccttggtgctggcacctcggccaaagcccaggcagcgactcacccctgtagataagaaagtctctttcgtggacattatgccgcaccagtccgatgtttcacaggagggttcggtagacgaggtgaaagagaataccgagaagatgcaacagggaaaagacgacgtgtctctgctatcagaaggacaactggccgaacagagtttggcaagcagtgaagacgaaactgagattaccgaagacttggaacctgaggttgaggaagacatgtctgcttccgattcagacgattgcattatccccggtcctatctctaagaacataaagcaaccatccgagaagattaggatcgaaatcatcgccttgagtcttaatgactcacaggtgacgatggatgacaccattcagcgcctctttgtagagtgccggttctatagcttgcccgctgaagagacccccgtgagtctgccaaaacctaaaagcggccagtgggtctactacaactattctaatgtgatttatgtcgacaaggaaaataacaaggccaagcgggacatcctaaaagcaatattacaaaagcaggaaatgccaaaccgttctctgaggttcacagtggtttcagacccgccagaagatgagcaagacctggaatgcgaagacataggagtggcccacgtggacctggctgacatgtttcaggaaggaagggatctcattgagcagaacatcgacgttttcgatgcaagggcagacggagagggcataggaaaactgagggtgacggtggaggccctgcacgccctccagtccgtgtacaaacagtatcgcgacgatttagaagcttag

SEQ ID NO: 239468 - DNA, 3948 bp, synthetic construct
  misc_feature 1..3948: note = Description of Artificial Sequence: Synthetic coding sequence
  source 1..3948: mol_type = other DNA
atgagtggccctactgacgagaccgccggtgaccttcctgtgaaggatactggactgaacctgtttgggatgggcggtctgcaagaaacaagcactaccagaaccatgaagtctaggcaggctgttagccgggtcagcagagaggagttggaagacagattcttgaggttgcacgacgagaacattctgctgaagcaacatgctagaaaacaagaggacaagattaagcgaatggccactaaactcattcggctggtcaacgacaagaaacgatatgagagggtgggaggcggtcctaaacgactggggagggacgtcgaaatggaagaaatgatagagcagctccaggagaaagtgcacgaactggaaaagcagaatgagacccttaaaaaccggctcatttccgctaagcagcagctgcagacgcagggctaccggcagacaccttacaataacgttcaatcaagaatcaacaccggacggaggaaagccaatgaaaacgctgggctccaggaatgcccccgaaaggggattaagttccaagatgctgacgtggccgagacgcctcatcccatgtttaccaagtacgggaactcactgttagaggaagcaaggggtgagataaggaatctggagaacgtaatccaatctcaaagaggccagatcgaagagctggagcatctggccgaaatcctgaagacgcagttgcggagaaaagagaatgagatcgagttgagcttgctgcagctacgcgagcaacaggcaactgatcagaggtccaatatccgcgataacgttgaaatgatcaaacttcataagcagttagtggagaaaagcaatgctctgtcagctatggagggtaagttcatccagcttcaggagaagcagagaactctgcggatctctcatgacgccttgatggccaacggagacgagctgaacatgcaactgaaggaacagcggctcaagtgctgtagcttagagaagcaacttcacagcatgaagttctcagagaggcgaatcgaagagctacaggaccggattaacgacttggagaaggagcgcgaactgctaaaggagaactatgataaactctacgacagcgctttctccgcagcgcacgaagagcagtggaagctgaaggagcagcagctcaaggttcaaatcgcacaacttgaaacggccctgaagtcagacctcaccgacaaaacagagatactagaccgattgaaaacagagcgcgatcaaaatgaaaagctcgtacaggagaacagagagctgcagctgcaatacctggaacagaagcaacaactggacgagctgaagaaaagaattaaactatacaaccaagagaatgatatcaacgctgatgaattgtccgaagcccttctgctgatcaaagctcaaaaagagcagaagaacggggatctctcattcctggtcaaagtggactccgagatcaacaaagaccttgaaaggagtatgcgagagcttcaggcaacacacgcagaaacagttcaggagctcgagaagacccgcaatatgctaatcatgcagcacaagattaataaggactatcaaatggaggtcgaagctgtgactcggaaaatggaaaatctacaacaagattatgagctgaaagtggaacagtatgtccaccttcttgatattagggcagcaaggattcataaactggaggctcagctgaaagatatcgcatatggcacgaagcaatacaagttcaagcccgaaattatgcctgacgactccgtggatgaattcgatgagacaatccacctggagcggggagaaaatctgttcgagatccacattaacaaagtcaccttttcgtcagaagtgctgcaggcaagtggagacaaggagccagtaacgttctgtacctatgccttctacgacttcgagctacagacaactcctgtcgtgagaggactgcatccagagtacaactttacatcccagtatctggtccacgtgaatgatcttttcctccaatatatacagaagaataccattactctagaggtccaccaggcgtatagtaccgaatacgagacgatcgcagcctgccagttgaagttccatgagatcctcgaaaagtccggacgaatcttctgcaccgcgagtcttattggcacaaagggcgacattcctaacttcggcacagtcgagtattggttccgcctgcgagtgcccatggatcaggcgattcgcctgtacagagaaagggcaaaagcactggggtacataactagcaacttcaagggtcccgaacacatgcagagcctatcccagcaggcccctaagacagcccaactttccagcactgactctacagatggaaatcttaatgagcttcacatcacaattcgctgctgtaaccatttgcagagtagagctagccacctccagccacatccatatgtcgtgtacaagttcttcgattttgctgaccacgatacagccatcatcccatctagcaatgatccccagttcgatgaccacatgtacttccctgtgccaatgaacatggacttagacaggtatctgaaaagcgagtcattgagtttttacgtgttcgacgattctgacacccaggagaacatctacattggaaaggtgaacgtgcccctgatttcattggcacacgaccgttgcatttcgggcatctttgagctgacggatcaccagaagcatccagccggaaccattcacgtgatccttaagtggaagttcgcttacttgccccctagcggatctatcaccaccgaggatctggggaattttattcgaagcgaagagcccgaagtcgtgcagcgtctgccccctgcctcctcagtgagcaccctggtgctcgctccccgtcccaaacccagacaacgcctgactcctgtggacaaaaaagtaagcttcgtggatatcatgccgcaccagtcagacgaaacctcaccgccacctgaagaccgtaaagaaataagccctgaagttgagcatatccccgagatcgaaataaacatgcttactgtgccacatgtgcctaaggtgtctcaggaaggatccgtggacgaggtgaaagagaacactgaaaagatgcagcaagggaaggacgacgtcagtctcctgagcgaaggccagctggccgaacagagcctcgcatcgtctgaggacgagacagaaattacagaagatctcgagcctgaggtggaggaagacatgagcgcatccgattccgacgactgtatcattcccggtcccatctctaagaatatcaagcagagtctggctctgtcccctggcctcggttgctcatctgcaatcagcgcccattgtaattttcgccttcccggaagctccgactttccggcatcggcgtcccaggtggatgggattaccggcgcttgtcatcacactcagccgagcgagaagatcaggatcgaaatcattgcgctgtcgctgaatgactcccaggttactatggatgacacgatacaaaggctgttcgtggagtgtcgcttctactccctcccggcagaggagaccccagtgtctctaccgaagccaaaatcaggccagtgggtttattacaactattccaatgtgatatacgtagacaaagaaaataacaaagcaaaacgggatatcttgaaggctatcttgcaaaagcaagagatgcctaaccgaagtttaagatttacggtggtgtctgatccccctgaggacgagcaggaccttgagtgcgaggacataggagtggcacatgtggaccttgccgatatgttccaggaaggcagagatctgatagagcaaaacatcgatgtattcgacgctcgcgctgatggtgagggcattggcaaattaagggtgaccgtagaggcgctgcacgcactccagtccgtgtataagcagtaccgtgatgacctagaggcatag

SEQ ID NO: 239469 - DNA, 1956 bp, synthetic construct
  misc_feature 1..1956: note = Description of Artificial Sequence: Synthetic coding sequence
  source 1..1956: mol_type = other DNA
atggccgctcccctgctgcatactagattacccggagacgccgcagcaagttctagcgcagtaaaaaagttgggggcatctaggactgggattagtaacatgagggcccttgaaaatgacttcttcaatagtccaccccgtaaaactgttcgctttggcggaacagtaaccgaggtgcttttgaagtataaaaaaggcgaaacaaatgacttcgagcttctgaagaaccagctcctcgatcccgacatcaaggatgatcagatcatcaactggttactggagttccgctcctcaatcatgtacctcacgaaggattttgagcagctcataagtatcatactcaggctcccctggctgaaccggagccaaaccgtcgtggaggagtatctggctttcctcggtaacctggtgtccgcacagacagtattcctgcgcccttgtttaagtatgatcgcttcgcatttcgtccccccacgagtgatcatcaaagaaggggacgtggacgtgtctgattctgatgacgaggacgacaatctaccagccaattttgacacctgccacagggccctgcaaattatcgctcggtatgtgcccagtactccctggttccttatgccaatcttagttgagaaatttccctttgtccgcaagtcagaacgcacacttgagtgttacgttcataatttgctgcggatatctgtgtacttccctactctcagacacgaaatactcgaacttataatcgaaaagcttttgaaacttgatgtgaatgccagcaggcagggcattgaagatgcggaggagaccgccacccaaacttgcggaggcaccgattcaaccgaaggactatttaatatggacgaagatgaggagaccgagcacgaaaccaaggccggtcctgaaaggctcgatcaaatggtgcaccctgtggcagagagactggacatcctcatgtccctcgtcctgtcctatatgaaggatgtctgctacgtcgatggaaaagttgataatggcaagacgaaggacttgtacagagacctcataaacatcttcgataagctgctcttgcccacgcatgcttcatgccacgttcagtttttcatgttctatttgtgttcttttaagcttggcttcgccgaggcgtttttggagcacctctggaagaaacttcaagatccatcaaaccccgcaatcattcgccaggcagctggcaactatattggctcatttctggcccgtgctaaatttataccactgatcacagtgaagagctgcctggaccttcttgtcaactggctgcacatttacttgaacaatcaagattctgggactaaagccttttgcgacgtcgcactgcatggtcccttttactccgcctgtcaagccgtcttttataccttcgtgttccggcataagcagttgctgtctgggaacctcaaagagggcttgcaatatctccaaagcctcaactttgaaagaatcgtgatgtctcagttgaaccctctgaagatctgtctgccaagtgttgtgaatttctttgcagccatcaccaataagtaccagctggttttttgttataccatcatcgagcgtaacaatagacaaatgctgccggttattcggtccactgccggtggagatagtgtgcagatctgtacaaatccactagacactttctttccttttgacccttgtgtgcttaagcggagcaaaaaatttatcgaccctatctaccaggtctgggaagacatgtccgctgaggaactgcaggaatttaaaaagcccatgaagaaggacatcgtcgaggacgaagacgacgatttcttaaagggagaggtacctcagaacgacacggtaatcggcattacgccttcctccttcgacacgcacttccgatcaccttcgagctcggtgggctcgcctccagtcttatatatgcaaccctcccccctctag

SEQ ID NO: 239470 - DNA, 1857 bp, synthetic construct
  misc_feature 1..1857: note = Description of Artificial Sequence: Synthetic coding sequence
  source 1..1857: mol_type = other DNA
atgcgtgctttggagaacgatttcttcaactctcctcccagaaagacagtacgtttcgggggtaccgtgactgaggttctcctcaaatacaagaaaggcgagactaatgatttcgagctgttgaagaaccaactgcttgaccccgacataaaagacgatcagatcatcaactggttactggagttccgatcctccattatgtatctgactaaggactttgaacagctgatctccattatccttcgcctcccctggctcaacagatcacagactgtcgtcgaagaatatctcgccttcttaggaaacttagttagcgcacagactgtttttctgagaccttgcttaagtatgatagcctcccatttcgtcccccctcgcgttattattaaggaaggagacgtcgatgtgtcagatagcgacgatgaggacgataacctaccagccaatttcgacacctgtcatagggcgctgcaaatcatcgcccgatacgtcccttcaactccttggtttctgatgcccatcctggtggagaagttcccttttgttaggaaatcagagcggaccctcgaatgttacgtacacaacctgctacgcatttcagtgtacttccccactctgaggcatgaaattctggagcttatcatcgagaagcttctgaaactggatgtcaatgcttccaggcaagggatagaggacgcagaggagaccgcaactcagacatgcggcggaaccgattctacagagggcctgttcaacatggacgaagacgaagaaactgaacacgagaccaaagcaggtcccgagcggcttgatcaaatggtgcatccggtggccgaaagactggatattttaatgtccctggtgctttcttatatgaaggacgtgtgctatgttgacgggaaagttgacaacgggaagaccaaagacctctacagagatctgataaacatcttcgataagctgttactgcctacccacgcatcctgccatgtacagttcttcatgttctatctttgctcgttcaaactgggctttgctgaagcttttctggagcacctatggaaaaagctacaagatccctcaaatcccgctatcatcagacaggccgcaggaaattacataggaagctttctcgctcgtgctaaattcatcccgctcataacagtaaaatcatgtctagatcttctggtgaactggttacacatttacctaaacaatcaggactccggcaccaaagccttctgtgatgtcgctctgcatgggcctttctattccgcgtgccaagctgttttctacactttcgtgttccggcacaagcaactacttagcggcaacctgaaagagggactccagtatttgcagagtctaaattttgaacgaattgttatgtcccagttgaatcccttgaaaatctgtttgccctccgttgtgaatttctttgccgcaattaccaataaatatcagttagtgttctgttataccatcatcgagagaaacaaccggcagatgttgcccgtcatcagatctaccgctggaggggattccgtccaaatttgtactaatcccctcgacacattctttcccttcgacccatgtgtgctgaagcgaagcaagaaattcattgatcctatttatcaggtgtgggaagatatgagcgccgaagagctccaggaattcaaaaagcctatgaagaaggatatcgtggaggatgaagacgatgactttctcaaaggagaggtcccacaaaatgacacggtgatcgggattaccccctcatccttcgatacccattttagatctccatcctccagcgtcgggagtcccccagtcttgtatatgcagccaagcccactttag

SEQ ID NO: 239471 - DNA, 1866 bp, synthetic construct
  misc_feature 1..1866: note = Description of Artificial Sequence: Synthetic coding sequence
  source 1..1866: mol_type = other DNA
atggcggcacctcttcttcacacgagacttcccggagacgcagccgcatccagttcggctgtgaaaaagctgggtgcctcccggaccggcattagcaacatgcgggctttggagaacgacttcttcaattcccccccaagaaagactgtgagattcggcggaactgtgacggaggttctgctgaagtataagaaaggagagaccaatgatttcgaactgcttaaaaatcagctgctggaccctgacatcaaacggttgccatggctgaacagaagccagacagtggttgaagagtatctggcattccttggaaacctcgtcagtgcacagacggtgttcctacggccatgtctcagcatgatagcatcacatttcgtacccccaagagtcattataaaagagggcgatgtcgatgtgagcgacagtgatgatgaggacgataatctgccagcaaatttcgatacctgtcatagggcgttacagattatagcgaggtacgtgccaagtacaccttggtttttgatgccaattctggttgaaaagtttccattcgttcgaaagtcagagagaacgttggagtgctacgttcacaacctactgcgaatctccgtgtatttccccacactcaggcatgagatcctcgaactcatcatcgaaaaacttctcaaattggatgtcaacgccagcagacagggaattgaggacgctgaggagactgctacacaaacctgcggaggcacagatagcactgaaggcctgtttaacatggatgaggacgaagagaccgagcatgaaacaaaggcaggccctgagaggctcgaccagatggtgcatcctgtggctgaaagactggacatcctgatgtcattagttctgtcttacatgaaggacgtgtgctacgtggatgggaaggtggacaacggaaaaacaaaagatctatatcgggacctgataaatattttcgataaactgttattacctacccatgcctcatgccatgtgcagttctttatgttctacctgtgtagttttaaattgggcttcgctgaggcttttttggaacatttatggaaaaagttgcaggatccgagcaatcccgctattatccgccaggccgctggtaattacatcggctcgtttctggccagagctaaatttatccctttaattactgtgaagtcttgcctggatctcctcgtgaattggttgcacatctacctgaacaaccaggatagcggtacaaaagcattctgcgatgtggctcttcacggcccattctactcggcctgtcaggctgttttctacaccttcgttttccgacacaagcagctgcttagcggcaacctaaaggaaggtcttcaatatctgcaatctcttaactttgaacggattgtgatgtctcagctcaatccacttaagatttgtttacccagcgttgtcaatttttttgcagccattaccaacaagtaccagctggtcttctgttacaccattatagaacggaacaaccgccagatgctaccggtgattaggtctactgctggaggcgacagtgtccagatttgtaccaatccactggacacattctttcccttcgacccttgtgtgctcaagagatccaagaagtttattgaccccatctatcaggtctgggaggatatgagtgcagaggaattacaggagtttaaaaaacctatgaagaaggacatcgtagaagacgaagacgacgattttctgaaaggcgaagtcccacaaaatgatacagtgattggtatcacaccttcatcatttgacacacacttcaggtctccaagctcgagcgtcggctcccctcctgtgctttatatgcagcctagccccctctag

SEQ ID NO: 239472 - DNA, 1410 bp, synthetic construct
  misc_feature 1..1410: note = Description of Artificial Sequence: Synthetic coding sequence
  source 1..1410: mol_type = other DNA
atgatcgccagccattttgtgccccctcgggtcattatcaaggagggcgacgtcgacgtatcggattctgatgacgaagatgataacctgcctgccaacttcgacacatgtcatcgtgccttgcagataatcgcacgctacgttccttccactccttggtttctgatgcccattctcgtggagaaatttccattcgtcagaaaaagtgagcggacactcgtaaacgcaagccgccaggggatcgaagatgctgaggagacggcaacgcagacttgcggcggaactgattcaacagagggcttatttaatatggatgaagacgaggagacagagcatgagaccaaagcaggtcctgagagactcgaccagatggtccaccctgtggctgaacgcctcgacattctgatgtccctagtgctgagctatatgaaggacgtgtgttacgtggacggtaaagttgacaacgggaagacgaaggacctctacagagacctgataaatattttcgataaactgctgctgcccactcacgcttcttgccacgtgcagttctttatgttctatctgtgctcatttaagctagggtttgcggaggcctttctcgaacacttatggaagaagctgcaggatccaagtaatccagccattatcagacaggccgcagggaattacattggttctttcttggcacgcgctaaatttatcccactcattacagtgaaaagttgcctggatctcctagtgaactggctgcatatctaccttaacaatcaggacagtgggacaaaggctttctgcgatgtggcgcttcacggccctttttatagtgcctgccaagccgttttttacacctttgtattccggcacaagcaactgcttagtggcaatcttaaggagggactccagtatcttcaatcgctcaactttgagcgcatcgttatgtcccaactcaacccgctgaaaatatgcctccctagtgtagtgaattttttcgcagccatcactaataaataccagcttgtattctgctataccatcattgagagaaacaaccggcagatgttacctgttatcaggtctacagcaggaggtgactctgttcagatatgtacaaacccactggacacgttcttcccctttgacccctgcgtgctcaaaagaagtaaaaagttcatagatccgatctatcaggtgtgggaggacatgtctgccgaggaactgcaagagttcaagaagccaatgaagaaagatatcgttgaagatgaagatgatgactttctcaagggtgaggtgcctcagaatgacaccgtgataggcataaccccgagtagcttcgatactcacttccggagtccatcatcttcggttggcagccctccagtcctgtatatgcaacccagtcccctttag

SEQ ID NO: 239473 - DNA, 792 bp, synthetic construct
  misc_feature 1..792: note = Description of Artificial Sequence: Synthetic coding sequence
  source 1..792: mol_type = other DNA
atgcgactgggcttgtgcgtggttgcgctggtactgtcatggactcatctcacaatcagttccagaggaattaaaggcaaacggcagagacgcattagcgctgaaggcagccaggcatgcgccaagggctgcgaactgtgctcagaagttaatgggtgcctaaagtgtagcccaaaactttttattctgctggaaagaaacgacatacgccaggttggagtttgtcttccgtcatgccctcccggttactttgacgcacggaacccggatatgaataaatgcattaaatgtaagattgaacactgtgaagcctgcttctcccacaatttctgcaccaagtgcaaggaaggtctgtatttacacaagggaagatgttacccagcgtgccccgagggcagttcggcagctaacggcaccatggagtgttcgagtccagcccaatgtgagatgtcagagtggagcccttggggcccatgctccaagaagcagcagttatgcggttttcggagaggctccgaagagcgaacgcgcagagtgttacatgcccctgtgggcgaccatgccgcatgctctgataccaaagagacaaggaggtgcaccgtgcggcgagtaccttgccctgagggccagaagcgcaggaaaggtggccagggcagacgggagaatgcaaatcgaaatttggcacggaaggaaagtaaggaagcaggcgcagggtctcgccgtagaaaaggccaacaacaacagcagcagcagggcacagttggcccattaactagtgccggtcctgcatag

SEQ ID NO: 239474 - DNA, 792 bp, synthetic construct
  misc_feature 1..792: note = Description of Artificial Sequence: Synthetic coding sequence
  source 1..792: mol_type = other DNA
atgcggctggggctttgcgtggtcgctcttgtgctgagctggactcatctgactatctctagtcgtggtatcaaagggaaaaggcagaggcgcatcagtgctgagggatctcaggcctgtgctaagggttgtgagttatgcagtgaagtaaacggatgtttgaagtgtagtccgaagctgttcatcttgttagaacgcaatgatatccggcaggtgggcgtgtgcctacccagctgcccccctggatactttgacgcaaggaatcctgatatgaacaaatgcataaagtgtaagattgagcactgcgaagcctgtttcagccataatttctgcacgaaatgcaaggaaggcttgtacctccacaagggccgttgttaccctgcctgtcccgaagggtcttccgccgctaatggcactatggagtgcagcagtcccgcacagtgcgagatgtcggaatggtcaccgtggggtccatgcagcaaaaaacaacaactctgcgggttcaggagagggagcgaagaacgaaccaggcgggtgttacatgcacctgtcggcgatcacgccgcatgcagtgatacgaaagagaccagaaggtgtaccgtgaggcgcgtgccttgccctgagggacagaagaggaggaagggaggtcagggtcggagggagaacgcgaacagaaatttggctaggaaagaaagcaaagaggctggggcagggtcccgccgaagaaagggtcagcagcagcaacagcagcagggcaccgttggcccattaacctccgcaggacctgcttag

SEQ ID NO: 239475 - DNA, 792 bp, synthetic construct
  misc_feature 1..792: note = Description of Artificial Sequence: Synthetic coding sequence
  source 1..792: mol_type = other DNA
atgagactgggtttgtgcgtagtggctttggttctctcttggacccacctgacaattagcagccgaggtatcaagggaaagcgacagagacgaataagcgcagagggatcacaggcgtgcgcgaagggctgcgagctttgtagcgaagtgaacggctgtcttaagtgcagtcctaagctgtttattctgctggagcgaaacgatattaggcaggtgggcgtctgccttccttcctgtccacccggatatttcgatgcaaggaatcccgatatgaacaaatgcattaaatgcaaaatcgaacactgcgaagcatgctttagccataatttctgcacaaagtgcaaggagggactgtatctacataaagggcgatgctacccggcatgcccagagggctcaagcgccgctaacgggactatggagtgtagcagtcccgctcagtgtgaaatgagcgaatggtcaccttggggcccttgcagcaagaaacaacagctctgcggcttccgcagaggatcagaagaacggaccagacgggtcctgcacgcaccagttggagatcatgcagcttgttctgataccaaagagacccggcgatgtacagttcggagagtgccatgcccagaaggccagaagaggaggaagggtggccagggccgacgagaaaatgccaacaggaatcttgctcgaaaggaaagtaaggaagcaggcgcaggaagcaggcggaggaaaggccagcaacagcagcaacagcaagggactgtgggacccctgacctctgctggacccgcatag

SEQ ID NO: 239476 - DNA, 603 bp, synthetic construct
  misc_feature 1..603: note = Description of Artificial Sequence: Synthetic coding sequence
  source 1..603: mol_type = other DNA
atgagactgggactgtgcgttgtagccctggtgctttcctggacacaccttaccattagcagtagaggcattaaaggtaagagacagcgcagaattagcgctgaaggatcacaggcttgcgcgaaaggctgcgaactttgtagtgaagtaaacgggtgtcttaaatgttcccctaaactctttatcttgttagaacgtaacgatatccgacaggttggcgtatgtctgccaagctgcccaccagggtatttcgacgctaggaaccccgacatgaacaaatgcattaagtgtaagatcgaacactgcgaggcctgttttagccacaacttctgtaccaaatgtaaagaaggtttatacctccacaagggacggtgctacccagcatgcccagaaggcagttccgctgcgaacggtaccatggagtgttctagccctggtcagaaacggagaaaggggggtcagggccgacgagagaacgccaaccggaatctggccagaaaagagtccaaagaggctggagctggatccagaagaagaaaagggcagcagcaacagcaacaacaggggacggtaggccctctgacaagcgccggtcctgcctag

SEQ ID NO: 239477 - DNA, 711 bp, synthetic construct
  misc_feature 1..711: note = Description of Artificial Sequence: Synthetic coding sequence
  source 1..711: mol_type = other DNA
atgatatttcgggtgagtgctgagggcagccaggcatgcgctaaggggtgcgagctttgcagcgaagtgaacggctgcctgaagtgctctcctaagctgttcattctcctggagcgtaacgacatccggcaggtcggtgtctgtttgccgtcctgtccacctggatattttgacgccaggaatccagacatgaataagtgcattaaatgtaagatagagcattgcgaggcttgttttagccataatttctgtactaagtgtaaagagggattgtacctacataaggggagatgttaccctgcgtgtcccgagggctcttccgcagccaatgggactatggagtgttcctcaccagcccagtgtgagatgtctgagtggagtccttggggtccctgcagtaaaaagcagcagctgtgcggattcagaagagggagcgaagaacggactagacgggtgctccacgcccctgttggggatcatgccgcttgctctgacacaaaggaaacacggagatgcacagtacggcgtgtaccatgtccggaaggacagaaaagacgaaagggagggcaaggtagaagagagaacgctaatcgtaatctcgcacggaaagagagtaaggaggctggagccggttctaggaggagaaagggtcagcagcagcagcaacagcagggaacagtcgggcctttgacatcagcaggcccagcctag

SEQ ID NO: 239478 - DNA, 732 bp, synthetic construct
  misc_feature 1..732: note = Description of Artificial Sequence: Synthetic coding sequence
  source 1..732: mol_type = other DNA
atgcagttccgtctcttctctttcgccctcattatcctgaactgtatggactactcccattgtcaggggaatcgatggaggcgcagtaaacgcgcatcttatgtctctaatcctatatgtaagggctgcctgtcatgctccaaggataacgggtgttctcgctgccaacagaagctcttcttttttctgcgccgtgagggcatgcggcaatacggggaatgtctgcacagctgtcccagcggttattacgggcatcgagcccctgacatgaaccggtgcgccaggtgcaggattgagaattgcgacagctgctttagcaaggatttttgtacaaagtgtaaagtcggtttttatctccaccgaggcagatgcttcgacgaatgccccgatgggtttgcacctctggaagagacaatggagtgtgtagaggggtgtgaggtggggcactggtccgagtggggtacctgcagccgcaataatcgcacatgtggattcaaatggggattggagacgaggactaggcaaatcgtgaaaaagcctgttaaggatactatcctctgccccacaatcgctgaatctaggagatgtaaaatgaccatgaggcattgcccagggggtaaacgcactcccaaggcgaaggagaaaaggaacaaaaagaagaagagaaagctgatcgaacgcgcacaagagcagcattccgtctttctggcaactgatcgggctaatcagtag

SEQ ID NO: 239479 - DNA, 540 bp, synthetic construct
  misc_feature 1..540: note = Description of Artificial Sequence: Synthetic coding sequence
  source 1..540: mol_type = other DNA
atgcaattcagactgttcagcttcgcattgattatactaaattgtatggactattctcactgtcagggaaatcgctggcgcaggagcaagcgaggctgtcgcatcgagaattgcgatagttgcttcagcaaagacttctgcacgaaatgcaaggtgggtttttacctgcaccggggtcgatgtttcgacgaatgcccggatggatttgcccctctggaggaaacaatggagtgcgtagggtgtgaggtcggtcattggagtgagtggggcacctgttcccgaaacaatcggacgtgcgggttcaagtggggacttgaaacgcgcacgcggcaaattgttaaaaagcctgttaaagatacaatcctgtgccccactattgcagaatcaaggcgatgcaagatgacgatgcgacattgccccggaggaaagcgcacaccaaaggctaaagagaagaggaataagaaaaaaaaacgaaagttgattgagagagcccaagaacagcactcggtattcttggctactgatcgggctaatcagtag

SEQ ID NO: 239480 - DNA, 540 bp, synthetic construct
  misc_feature 1..540: note = Description of Artificial Sequence: Synthetic coding sequence
  source 1..540: mol_type = other DNA
atgcagtttagactcttctctttcgctcttattattctgaattgtatggattattcccattgtcagggtaacagatggaggcgtagtaagcgtggctgtagaatcgagaattgcgattcatgtttttccaaagatttctgcaccaagtgtaaagtcgggttttacctccaccgcggaagatgttttgatgagtgtcccgatgggttcgcccctctggaagagaccatggaatgcgtaggctgcgaggtgggacactggagcgagtgggggacctgttcccgcaataaccggacatgcggattcaagtgggggctcgaaactcggactagacagattgtgaaaaagccggtgaaagataccattctgtgtccaactatcgccgagagccggagatgtaagatgactatgcgccattgcccaggtggcaagcgcactcccaaagcaaaggagaagcgaaacaaaaaaaagaagcgcaaactcatcgaacgcgctcaggaacagcacagcgtgttccttgcaacagaccgcgctaaccagtag

SEQ ID NO: 239481 - DNA, 531 bp, synthetic construct
  misc_feature 1..531: note = Description of Artificial Sequence: Synthetic coding sequence
  source 1..531: mol_type = other DNA
atgcgccaatacggagagtgcctgcactcttgccccagcgggtactacgggcatcgagccccagacatgaatagatgcgccaggtgtagaatcgagaactgcgattcttgcttctccaaggatttctgtaccaaatgcaaggttggcttctatctacacagggggaggtgttttgacgaatgcccagatggattcgctcctctggaagagacaatggaatgtgtggaaggctgtgaagtgggccactggtcagaatggggaacttgcagcaggaacaacagaacatgcggctttaagtggggcttagagacccggactcggcagattgtgaaaaagcctgtgaaggacactatcttatgtcccacaattgcagagtctcgccgatgtaagatgactatgaggcattgccctgggggtaagagaacacccaaagcaaaggagaaacgcaataagaaaaaaaagagaaagctgattgagcgcgctcaagaacaacacagcgtgtttttggccactgaccgggcaaaccaatag

SEQ ID NO: 239482 - DNA, 507 bp, synthetic construct
  misc_feature 1..507: note = Description of Artificial Sequence: Synthetic coding sequence
  source 1..507: mol_type = other DNA
atgagacagtatggcgagtgtttgcattcatgtccctccggatattacggacacagagctcctgacatgaatagatgtgctcgatgtaggattgaaaattgcgacagctgcttctctaaagatttttgtacaaagtgcaaagtggggttttacttacaccgtggaagatgtttcgacgaatgccccgacggtttcgccccattggaagaaactatggaatgcgtggagggatgcgaagttgggcattggtcagaatggggcacttgcagcagaaacaatagaacatgtgggtttaaatgggggctagagacccgcacccgacaaatcgtcaagaaacccgttaaagacacaatcctctgcccaacgattgccgagtcacgccgatgtaaaatgactatgcgacactgccccggtggcaagcggacccctaaggccaaagaaaagagaaacaagaagaaaaaacggaagctgattgaacgggctcaggaacagcattccgtcttctag

SEQ ID NO: 239483 - DNA, 270 bp, synthetic construct
  misc_feature 1..270: note = Description of Artificial Sequence: Synthetic coding sequence
  source 1..270: mol_type = other DNA
atgcgacagtatggcgagtgtctgcactcgtgcccctcaggctattacgggcatagggcacctgatatgaacagatgcgccaggtgtaggatcgaaaattgtgatagctgtttctccaaggatttctgtactaagtgtaaagtcggtttttacctgcaccggggtcggtgcttcgatgagtgtccagacggatttgcaccccttgaagagaccatggaatgcgtggaaggctgcgaggtcgggcactggagcgaatggggaacatgctag

SEQ ID NO: 239484 - DNA, 366 bp, synthetic construct
  misc_feature 1..366: note = Description of Artificial Sequence: Synthetic coding sequence
  source 1..366: mol_type = other DNA
atgcagtttaggctcttcagcttcgctttaattatactgaactgtatggactatagtcactgtcagggcaataggtggaggagatcgaagagagccagctacgtgtcaaacccaatatgtaagggctgcctcagctgcagcaaggacaatggttgctcaagatgccaacagaagctcttttttttcttgaggcgggaaggcatgagacagtatggagaatgtctgcattcctgcccaagcgggtattatggtcaccgcgctccagacatgaaccggtgcgccagatgtaggatcgagaattgtgatagttgtttcagtaaggacttttgtacaaaatgcaaggttggattctatttgcacaggtag

SEQ ID NO: 239485 - DNA, 234 bp, synthetic construct
  misc_feature 1..234: note = Description of Artificial Sequence: Synthetic coding sequence
  source 1..234: mol_type = other DNA
atgcagttcaggctgttctcattcgccttgattattttgaactgcatggactattctcactgtcaaggcaatcgttggcgacggagcaaaagggccagctatgtatcaaaccccatttgtaaaggatgtttgtcgtgtagtaaggataacggatgctcacgctgtcagcagaaactgtttttcttcctcagacgagaaggcatgcgacagtacggcgagtgtctacatagctag

SEQ ID NO: 239486 - DNA, 1410 bp, synthetic construct
  misc_feature 1..1410: note = Description of Artificial Sequence: Synthetic coding sequence
  source 1..1410: mol_type = other DNA
atggccttcctcatgcacttgttggtgtgcgtcttcgggatgggaagctgggtgacaatcaacggtctgtgggtcgaacttccactcttggtaatggagctccccgaaggatggtatttacctagttacctcaccgtagtgattcaactggccaacataggaccccttctggtcaccctgctgcatcactttaggcccagttgtctcagcgaggttccgatcatcttcacactcttaggggtggggacagtaacgtgtataatattcgctttcctgtggaatatgacatcatgggtactggacggacatcacagtatagcattcctagtcctcactttctttctggctctagtcgattgtacttctagcgttacgtttcttccattcatgtccaggctaccgacctattatctcacaactttcttcgtgggggaagggctgtcaggactgctgccagccctcgtagcactggcccagggatccgggctcaccacctgtgtgaacgtgactgagatttcagacagcgtgcctagtcctgtcccaactagggagaccgatattgcacagggagttcctcgcgctctcgtttcagccttgccaggaatggaggccccactgagccacctcgagtcgcgctatttgcccgctcatttctcacccctggtgttcttcctactcctcagtatcatgatggcctgctgtctggttgcctttttcgtactgcagcgccagccccgatgctgggaggcctcagtcgaagatttgttgaatgatcaagtgactctgcattcaatccgaccccgagaagaaaatgaccttggcccagcaggcaccgtggattccagccagggccagggctatcttgaagagaaggccgcaccttgttgccctgctcacctcgcgttcatatacacactcgtcgctttcgtgaacgctcttacaaatggcatgttgccctctgtgcagacttacagttgtctctcatacggcccagtggcctatcatctggctgccaccctatcaatcgttgccaaccccctcgcctccttagtttccatgtttctcccgaatcgaagcctgcttttcctgggcgtgctgtccgtgctcggtacttgctttgggggatataacatggccatggccgtgatgtcaccctgtcccctgctgcagggacactggggcggtgaggtactcattgtggcgtcttgggttcttttttctggctgtctgtcatatgttaaggtgatgctgggggtcgttctcagggacctctccagatcagctctcttatggtgcggagcagcggtccaactgggcagtctgctgggagctctcctgatgtttcccctggtgaatgtcctgcgtctgttcagctccgcagatttttgtaatctgcattgtccagcctag

SEQ ID NO: 239487 - DNA, 519 bp, synthetic construct
  misc_feature 1..519: note = Description of Artificial Sequence: Synthetic coding sequence
  source 1..519: mol_type = other DNA
atgcgtgccccactgtgcctcctactcctcgttgctcatgctgtggacatgctggccctgaaccgtagaaagaagcaagtcgggacaggactcgggggtaattgtaccggatgcattatttgcagcgaagagaatggttgtagtacatgtcagcagcgcctcttcttgttcatccgtagggagggcatcaggcagtacgggaagtgtttgcacgattgccccccaggttactttggcattaggggccaagaagtgaaccggtgtaagaaatgcggagctacctgcgaaagctgtttttctcaggatttttgcattaggtgcaaacggcagttttacctttacaagggaaaatgtttgccaacctgcccgcctggcactctcgcacaccagaacactagggagtgtcaggaacgaagtcccggacagaaaaaggggaggaaggataggaggcccaggaaagaccgcaagttggataggcgcttagatgtgcgacccaggcagccaggattgcaaccctag

SEQ ID NO: 239488 - DNA, 2133 bp, synthetic construct
  misc_feature 1..2133: note = Description of Artificial Sequence: Synthetic coding sequence
  source 1..2133: mol_type = other DNA
atgagaggcaggctgtgtgtgggacgggcagccgcagccgcagccgcagtcgcagttcccctggcaggaggacaagaggggtcaccagggggtggaagaagaggtagccggggaacaaccatggtgaaaaagagaaagggcagagtcgtcatcgactcagatacagaggactcaggctcagacgagaatctcgatcaggagctgctgagcctggccaaacgaaaacgaagcgatagtgaggagaaggaaccccctgtcagccaacctgctgcttcaagcgactccgagacgagcgattctgacgacgaatggaccttcgggagcaataaaaacaaaaagaaggggaaggcgcgaaagatcgaaaagaaggggactatgaagaaacaggctaacaagaccgcctccagtggatcttctgacaaggacagtagcgcagagtcttctgctcccgaagaaggagaagtcagcgactccgacagcaatagttctagttcctcttctgactctgatagctcgtcagaggatgaggaatttcatgacggatatggggaagatctgatgggagacgaggaagaccgagccagactggaacaaatgaccgagaaagagagagagcaagagctcttcaaccggatcgaaaaacgggaggtgcttaagcgcagatttgaaattaaaaaaaaactcaaaaccgccaagaagaaggagaaaaaggagaagaagaaaaagcaggaagaagagcaagagaagaagaaattgacccagattcaggaatcccaggtgacctcccacaataaggagagaagatccaaaagggacgagaagcttgacaaaaagtcccaggctatggaggagcttaaagccgaaagggaaaaacgtaagaatcgcacggctgaattgcttgccaaaaagcagcctctgaaaacctccgaggtgtacagcgacgacgaggaggaagaggaagatgataaatcctcagagaagtcagaccgcagttcgcggacttcatccagcgacgaggaggaagaaaaggaagaaatccctcccaagagtcagccagtttcacttccagaggagctgaatagggtgcgcctcagcagacataaattggaaagatggtgtcatatgcccttctttgctaagacggtcaccggctgcttcgtacgcattggcatcggcaaccacaacagcaagccagtttatcgcgtcgcagaaattacaggagtagtggaaacggccaaggtttaccaactcggtggcacccgtactaataagggactccaactgagacatggaaatgaccaacgagtgtttagactggagtttgtatccaatcaggagttcactgaaagtgaattcatgaaatggaaagaagccatgttcagcgctggaatgcaactgcccacccttgacgaaatcaacaaaaaggaattaagcataaaagaggcacttaattataagttcaacgaccaagacatagaggaaatcgtgaaggagaaggaacgctttcgtaaggcacccccaaactacgcaatgaagaaaacacagctgcttaaagagaaggccatggcagaggatctcggcgatcaagacaaagcaaagcaaatacaggaccaacttaatgaattagaggaaagggctgaggcactggataggcagcggactaagaatatctctgcgatttcatacatcaaccagcgaaacagagaatggaatattgtagagtcagagaaagccctcgtggccgaaagccacaacatgaagaatcaacagatggacccctttacacgtagacagtgcaagccaaccatagtgtccaactccagggatccagccgtgcaagccgcaatactagctcagctgaacgcgaaatatggaagcggagtactccccgacgctcctaaggagatgtcaaagggacagggtaaggataaagacttgaacagtaaatccgcgtctgacctctccgaggacttgtttaaagtacacgacttcgatgtgaaaatagaccttcaagttccgtcgtccgaatcaaaagcactcgccatcacctccaaagctcctcctgctaaggatggcgcacccaggcgatcgttaaacttggaagactataagaagcggaggggtctgatatag

SEQ ID NO: 239489 - DNA, 4551 bp, synthetic construct
  misc_feature 1..4551: note = Description of Artificial Sequence: Synthetic coding sequence
  source 1..4551: mol_type = other DNA
atggatagcccccctaagctgaccggagaaaccctgattgtgcaccatattcccctggtccactgccaggtacctgatcgacagtgttgtggaggcgcagggggtggagggggaagcacaaggccgaatcctttttgccctccagagctcgggattacacagcctgatcaggatctgggccaggccgacagcctgctatttagtagccttcactccacgcccggaggcacagctagatccatagatagcacaaagtctaggtcccgcgatggtcgaggcccaggagcacctaagaggcacaaccccttcttgttacaggaaggggtgggggagcctggtcttggcgacctgtatgatgatagcatcggggactcagccacccaacaatcctttcatctccacggtacaggacagccaaattttcacctttcaagtttccagctgcccccaagtggacctcgggtaggcagaccctggggtaccactcggtcccgcgctggggtggtggaggggcaggagcaagagccagtgatgacgctggacactcagcagtgcgggacaagccactgttgccgcccagaactggaggctgagaccatggagctcgatgagtgcggcggtcctggcggaagtggcagcggaggaggggcaagcgacacctcagggttttcctttgatcaagagtggaaattgtctagtgatgagtctccacgcaacccaggatgcagtggcagcggagatcagcactgccggtgctcatctacatcctcccagagtgaggccgcagatcagtctatgggttacgtgtccgattctagctgtaactccagcgacggggtgcttgttacgttcagtaccctgtacaacaaaatgcacggaaccccgcgtgcaaatttgaacagcgcgcctcaaagctgctccgattctagcttctgttctcactcagaccccggagcattctacctggacctgcagccaagcccattcgagtctaagatgtcgtacgaatcccatcacccagagagtggtggccgagaggggggttacggctgcccacatgcatcaagtcccgaactggacgcgaactgtaactcctacagaccgcactgtgaaccttgcccagccgtcgcagatctaaccgcctgcttccagtcccaggctagacttgtcgtggcaacccaaaattactacaagctggtgacctgtgatctgtctagccagagctccccctccccagcgggaagttccataacgagctgttcagaagagcacaccaaaataagtcccccaccaggtcctggcccagacccagggcctagccagccctcagaatattatctgtttcagaaaccggaggtgcagccggaggaacaagaggcggtgagctccagcacccaggccgctgcagccgtgggccctactgtgttagaaggacaagtgtacacgaacacctcccccccaaacctcagcacaggacggcagaggagccgatcatacgacaggagtttacagaggtcgccccctgtgaggctcggcagtctggagcggatgctgagctgccccgtcagactgtcagaagggcctgctgccatggccggacccggatcacctcccaggcgggtcacctcgttcgctgagctggcaaagggcagaaagaaaactgggggttctggtagtccccctttgcgcgtttccgtgggggactcatcccaggagttctccccaattcaggaggctcagcaggaccgcggtgcaccactggacgaagggacctgttgctcccactccctgcctccaatgccattgggacccggaatggaccttttggggcctgatccatcccccccttggtctacccaagtgtgtcagggaccacactcctctgaaatgccacctgcaggactgagggcaaccgggcagggccctctcgcccagctaatggaccccggacccgctcttcccggtagccccgctaacagccacactcaacgcgatgcgagggctagggctgatggtggtgggaccgagtccaggcctgtcctcaggtactccaaggaacagaggccaaccacactgcctatccaaccttttgtgttccagcaccactttccaaaacagcttgccaaagcaagagctcttcactccctcagccagctctattccctgtctggttgctccaggactcagcaaccggctcccctagccgctccagccgctcaggtcagtgtacctgctccatcgggggaacctcaggccagcaccccacgggctaccggcaggggcgctcgcaaggctgggagtgagcctgagacatcacggccatccccgttaggcagctattctcctatacgatccgttggaccttttggcccatccactgatagttccgcttctacttcttgctctcctcccccagaacagcccaccgcgaccgagagcttgcccccttggagccactcgtgccctagcgcggtgcgacctgctacttcccagcagcctcaaaaggaggaccagaagattttaaccctaacagaataccgacttcacggaaccggttctctgccccctttgggctcctggcgatcagggctgagtcgggctgaatccctggccaggggaggcggtgagggaagcatggccacaaggcctagcaacgctaaccacctctcaccccaggccctcaaatggcgcgaataccggcgtaagaaccctctgggaccgccaggtctctccggttctctggatcgcagatctcaggaggcccgtctggcgcgacgcaacccaattttcgagtttccaggttccctctctgcagccagccatctgaattgtagactgaatggacaggctgtcaaacctctgccattgacatgcccagacttccaagaccctttcagcctcacagaaaagcctcctgctgagttctgcctgtcaccagatgggtcctccgaagccatctccattgaccttctccaaaaaaaagggctcgtcaaagcggtgaacatcgcagtggatctcatagtggctcacttcggtacctcaagggatccgggagttaaggccaagctaggtaattccagtgttagtcccaacgttggccatctagtgcttaaatacctctgcccagcggtgcgtgctgtcctggaggacggtctaaaagctttcgtgctggatgttataattggccagcgaaagaacatgccgtggtcagtggtagaggcgagtactcagctggggccaagtacaaaagttctgcacggcctgtataataaggtcagtcagttcccagaactcacttcccacacgatgagatttaacgcatttatcctgggtctgcttaacataaggtctctcgaattttggtttaaccacctgtacaaccatgaggacattatccagacccactatcaaccatggggcttcctgagtgcggcacacactgtatgcccgggattatttgaggaattgctactgttgctccagccactggctttgcttcccttctccctggaccttttgtttcagcacaggctgctgcaaagtggccagcaacagaggcagcacaaggagttgctgcgagttagccaggatttactattaagcgcccactccactttgcaactcgcaagagccagaggccaggaagggcctggcgacgtcgatcgcgcagcacaaggagagcgggtaaaaggcgtaggtgcgtcggaagggggtgaagaggaggaggaggaggaagagacggaggaggtagcagaagctgccggtgggtccggcagagcacggtgggctcggggaggccaagccggatggtggtatcagctcatgcagtcatcccaggtgtatatcgacggcagcatagaggggtcaagatttcctcggggatcttccaactcttcatcagagaaaaaaaagggggctggaggtggtggcccaccacaagctccaccccctagagaaggagtagtggagggggcagaagcgtgcccagcatccgaggaagcgttgggaagggaaaggggatggccgttttggatgggaagtccccctgattccgtcttagccgaattacgcagatctcgggaacgtgagggccctgctgcttctccagcagaaaatgaggagggtgcaagtgaaccaagcccaggtggtatcaaatggggacacttgtttggcagccgtaaagctcagcgtgaggcaagacctacaaatcggctgccttccgactggctaagcctcgacaaaagtatgttccagctcgtggcacaaactgtcgggtccaggagggagcccgagcccaaggagagcctgcaggagcctcatagcccagcccttccaagcagccctccctgcgaggtccaggcactgtgccatcacctcgcgacgggacctggccagctgagctttcacaagggggacattctgcgagtgttaggaagagcaggtggcgattggctgagatgtagcaggggacccgacagcggcttggtgcctctcgcctacgtcacactgacgccgactccaagccctacacccggaagcagccagaactag

SEQ ID NO: 239490 - DNA, 4551 bp, synthetic construct
  misc_feature 1..4551: note = Description of Artificial Sequence: Synthetic coding sequence
  source 1..4551: mol_type = other DNA
atggacagtcctccgaaactcactggtgaaactctgattgtgcaccacataccactcgtgcactgtcaggtgccggaccgtcaatgttgtgggggagccggaggagggggaggttcgactaggccgaaccccttctgcccaccggagttgggtataacccagcctgatcaggatctgggccaagcagacagtttgttgttttcctcattgcattccactcctggcggaactgccagatcgattgactctacaaagagtaggtctagggacgggaggggcccaggggcacctaaaagacataatccgttcctgctgcaggaaggcgtgggcgagcccggtttgggcgatttatacgatgatagtatcggtgacagtgccactcagcaatcgtttcacctccacgggactggccaaccgaattttcaccttagtagcttccagctgccaccttccgggcctcgtgtaggtcgtccatggggcaccacccggtcaagagctggggttgtggaaggccaggaacaggaacccgtgatgacacttgatacacagcagtgtgggactagccactgttgtcgcccagagctggaagccgagacaatggagctcgatgaatgcggaggccctgggggaagtggctctggtggtggcgcaagtgacacttccggattcagcttcgatcaagaatggaagctcagtagcgatgaaagtcctcggaacccaggctgcagtggcagcggggaccagcattgtcgatgcagctcaaccagctctcagagcgaggcagccgatcagagtatgggctacgtgagcgacagtagctgcaattcctccgatggcgtgctggtgacgttctccaccctgtataataagatgcatggaactcccagggccaacctcaattctgccccacagagctgtagcgacagctccttctgttcccacagtgatcctggagccttttacctggacctgcagcccagtcccttcgagtcgaagatgagctatgaatcgcatcaccccgaatccggagggagagagggcggatatgggtgcccacatgcctcctccccggagctagacgccaattgcaattcatatcgcccacattgtgagccgtgccctgccgttgccgatctgacagcttgtttccagtcgcaggccaggctggttgtagctacacaaaattactacaaattggtgacctgtgatctaagtagccaaagctcaccttctccagccggtagctccatcacctcctgctccgaagagcacacgaaaatttcaccacctcccggaccgggacccgaccctgggccaagccagcctagcgagtattacctattccaaaaacctgaagtacagcctgaagaacaagaggctgtgtctagcagcacgcaggcggctgctgcagtgggtcccacagtacttgagggacaggtttatactaatacttctccaccaaacctgagcacgggccgtcagcgaagccggagctacgaccgaagcctgcagcgctcaccccctgtgaggcttgggtcgctcgagaggatgctctcatgtcccgtgaggctgtcagaggggccagcggcaatggccggacccggatcaccccctcggagagtgacgtcgttcgccgagttggctaaaggaaggaagaagacaggtggtagcggctctcctcctttgcgcgtgagcgttggtgattcgagtcaggaattttctcccattcaagaggcacaacaggatagaggggcaccactggatgagggtacatgttgctcccacagcctgccacctatgccactcgggccaggtatggacttgctgggcccagatccatcccctccttggtccactcaggtctgtcagggtccccattccagcgagatgccgcctgcaggtcttcgcgctaccgggcagggccctttggcacagctgatggatcctggccctgcactccccggaagtcctgctaatagtcacacacaaagagacgctagggccagggccgacggagggggaactgagtccaggcctgtgcttcgatattcaaaagagcagcgaccaacaaccctacccatccagcctttcgtgttccagcaccactttcccaaacagttggccaaggccagggctttacatagtctgagtcagctgtactccctgtcgggctgcagtagaactcagcagcccgctcctcttgcggctcccgcagcccaggtaagtgtcccggcaccctcaggcgaaccccaagcatctacacctcgggcaaccggacgaggcgctcgtaaggccggaagcgagcccgaaaccagtcgacctagccccctggggagctacagtcccatccgcagtgtgggcccatttggtccctcaactgactcgagtgcatctacaagctgctccccacccccagagcagccgaccgccaccgaatccttgcccccttggagtcacagttgtcccagcgctgtgagacctgccacctcacagcagccccagaaagaggatcagaaaatcctcacattaaccgagtacagactgcacggaaccgggtccctgcccccactgggaagctggagatcgggactctccagagccgaaagcctggctcgcggaggcggtgagggctcaatggcaaccagaccttcaaacgccaaccaccttagtccacaggccctgaaatggagggagtatcgacggaaaaacccacttggcccacccggtctgagcgggagcctagaccgcaggtcacaggaagcacgcctggccagacgaaatcccatattcgagttccctgggagcttgtcggccgctagtcatctgaactgtagactcaatgggcaggctgtcaaacctctacctctcacttgcccggactttcaggatccgttcagcctgactgaaaagcctccagctgagttttgtctctctcctgacggaagttctgaggcaatctctatcgacctgctgcaaaagaaagggctggtaaaggctgttaatattgcagtggacctgattgtcgcgcactttggaaccagcagagaccctggcgtgaaggctaagttgggtaattcgagcgtgagcccaaatgtggggcacctggtcctgaaatatctctgcccagcggtacgcgctgtactagaagatggattgaaggcctttgtacttgatgtcatcataggccagaggaaaaatatgccgtggtccgttgtggaggcctctacacagttgggccctagcaccaaggttttacacgggctttataataaggtcagtcaatttccagagctgacctcgcacaccatgcgattcaatgctttcatcctcgggctgctcaatatacgcagtctagagttctggttcaatcatctgtataatcacgaagatattattcaaacccactatcagccatgggggtttctgtccgccgcacacaccgtctgtccgggactgttcgaggagctcttgctgctcctccagcctttggctctgctgcctttcagtctggatctcctgtttcaacatcgcttattacaatccggacagcagcagcgacagcacaaagaactgctccgagttagccaggacctgcttctgtccgcacacagcaccttgcagctcgcaagagccaggggccaagagggacctggagacgttgatagggccgcacagggcgaacgagttaagggcgtcggggcttctgaagggggagaggaggaggaagaggaggaggaaaccgaggaggtggcagaagcggcagggggtagcgggcgtgcaaggtgggccagaggcggacaggcaggctggtggtatcagcttatgcagtcgagccaggtatacatcgatggaagtatagagggtagtcggttcccgagaggttcttctaacagcagtagcgagaagaaaaaaggtgctggaggcggagggcctccccaagctccaccaccccgtgaaggggtggttgaaggtgccgaggcatgtcccgcatccgaagaagctctcggccgagaaagagggtggcccttctggatgggatcaccaccagactcagttttggcagagctgagacggtcccgagaaagagaggggcctgctgcgtcaccagcagagaacgaggagggagcctcagagcccagcccagggggtattaagtggggtcacctgttcggatcgagaaaggcccagcgggaggctcgcccaactaatagactgccaagcgactggctgtcccttgataaatctatgtttcagctcgtggctcagaccgttgggagcagacgcgagcctgagccaaaggaaagtctgcaagaaccacattccccggctctgccgagctctccaccctgcgaagtgcaagccctttgtcaccacctggccaccggccctggacagctgtcctttcacaaaggggacattctcagagtcttgggaagggccggtggcgattggctacgctgttctagagggcctgacagtggtttagtgcctttggcttatgtgacactgacacccacaccgagccccaccccaggatcctcccagaattag

SEQ ID NO: 239491 - DNA, 2775 bp, synthetic construct
  misc_feature 1..2775: note = Description of Artificial Sequence: Synthetic coding sequence
  source 1..2775: mol_type = other DNA
atggactctcctcctaagctgaccggagagactctcatagtgcaccatatacctcttgtgcactgtcaagtgccggatcgccagtgctgcgggggtgctggcggtggtggcggtagcaccaggcctaacccattttgtcctcctgaactcgggattacccagcccgaccaggatctcggtcaagcggattcactgttattctcttcactgcacagtactcccggaggcacagctcgctcaattgatagcactaaatctcgatctcgcgacggcaggggtcccggagctccaaagaggcacaatccattcctactgcaagagggggtaggagaacctggcctcggcgacttgtacgatgactcaattggtgattcggcgacgcagcaatcgtttcacctccacggtacagggcagccaaattttcacctcagcagcttccaactgcctccctccgggccaagagtgggcagaccctggggaacaacccggagcagagcaggagtcgttgaggggcaggagcaggaaccagtgatgacccttgacacacaacagtgcggaacatcacactgctgccgaccggaactggaagccgagacaatggaactggatgaatgcggaggtccgggagggtcaggtagcgggggtggagcctccgatacatccgggttctcttttgatcaagaatggaagctttcttcagacgagtctccaagaaaccctgggtgtagcggttccggagaccagcactgcaggtgtagcagcactagctcacagagcgaggcggctgatcagagcatgggatacgtgtctgattcgagctgcaattcaagcgacggagtgctcgtcacatttagcactctctacaacaaaatgcacggcacccctagggccaatttaaacagtgcccctcaatcatgtagcgattccagtttctgtagccactcagaccctggagccttctacctagacctccagcctagcccgttcgaaagtaagatgtcatacgaatctcaccaccccgagagcgggggtcgagagggcggatatggctgcccgcacgctagttccccggagctagacgccaattgcaatagctatcgaccccactgtgagccatgtcccgctgtggcagatctgaccgcctgtttccaatctcaggctcgtctcgtggttgcaactcagaactactataagctcgtgacctgcgatctgagcagccagtcctcgccctcccctgccggaagttcgatcacatcttgcagtgaagaacacacgaagatttctccccctcctggccctggacctgatccagggccttctcagccctccgagtactatctgtttcagaagccggaggtccaacccgaagagcaggaggcagtgtcatcttctacccaggcggcagccgcagtggggcctactgtgttggaaggacaggtgtatactaacaccagtccgcctaatctgtccactgggcgtcagcggtccagatcttacgataggtccctgcagagaagcccacctgtgagactgggctccctggagcgcatgctctcttgccccgtgcgcctcagcgagggcccagccgctatggccggtccaggcagtcctcccagaagggtaacaagcttcgccgagctggctaagggaaggaagaagactgggggttctggatcaccccctcttcgggtgagcgttggagatagctcccaggaatttagcccgattcaggaggctcagcaggatagaggggctcctctcgacgaaggaacatgttgctcgcattcactcccacccatgccactagggccaggaatggacctgctgggtcccgacccgagccctccatggtccacccaggtatgccagggccctcactcttccgaaatgcctccagctggacttagggccacgggccagggtccgctggcccagctcatggacccaggacctgccctgcccggatcacctgccaactcccatacacagcgcgatgcaagagcccgagccgacggcggaggcactgaatctcggcctgtcctgaggtacagcaaggagcagcggcctacgacactgccaatacaaccttttgtgttccagcatcacttcccaaaacagctcgcaaaagcacgagccctgcattccttgtcccagctttactccctctccggttgctctcggacccagcaaccagccccattggccgctccagcggcacaggtgagtgtgcctgctccgtctggagagccccaggcctctacccccagagctaccggacgtggcgcacgcaaagcagggtcggagcccgaaacttctcgtcctagccctctgggatcatacagccctatccgatcggtcggtccctttggcccaagtaccgactcttcggcaagcacatcttgtagtcccccaccagaacagcccacggcaaccgagtccctccccccatggtcccacagctgccccagcgcagtgcgccctgccacttcacagcagccacaaaaggaagatcagaaaatcttgactctgaccgaatatcggctgcacggtactggaagcctcccacccctgggttcttggcgttctgggctttctcgagccgagtcactggccagagggggaggcgaggggagcatggccacaagaccttccaatgctaatcatctatccccgcaagctctcaaatggagagaatataggaggaagaatccactggggcctccaggcttgtcgggctctctagatcgcagaagccaagaagccagaacaggctag

SEQ ID NO: 239492 - DNA, 591 bp, synthetic construct
  misc_feature 1..591: note = Description of Artificial Sequence: Synthetic coding sequence
  source 1..591: mol_type = other DNA
atgtcgatgctgcgcctccagaagagactcgcctcgtccgttcttcggtgtggcaagaagaaggtttggttggatcctaatgagacaaacgagattgctaacgccaacagccgccagcaaattcgtaaactcattaaggacggactgatcatccgtaagcctgtgacagtccactctagggctaggtgccgcaagaacaccctggccagacgcaaaggaagacatatggggattgggaagaggaaaggaaccgcaaacgcacgcatgccagagaaggttacctggatgagaaggatgcggatactgcggaggcttttaagaaggtatagggagtcaaaaaaaatcgaccggcacatgtaccatagcctgtatctcaaggtgaaaggtaacgtgttcaaaaataagcggatcttgatggagcatattcacaaactaaaggcagataaggctaggaagaaactgctcgccgatcaggcggaagctaggcggagcaaaactaaagaagcaaggaaaagacgcgaggagagattgcaggctaagaaggaggaaatcatcaagaccttgagcaaggaggaggagactaaaaagtag

SEQ ID NO: 239493 - DNA, 1341 bp, synthetic construct
  misc_feature 1..1341: note = Description of Artificial Sequence: Synthetic coding sequence
  source 1..1341: mol_type = other DNA
atggaagcgtcattcgtccagaccactatggccctcgggctgagtagtaagaaagcgagttcaagaaacgtggccgttgagcggaaaaatctgatcacagtatgcaggttctccgtgaaaacgctgcttgagaagtatacagcagagccaatcgacgattcgtccgaggaattcgttaatttcgcggcaatcctagaacagattctctcccaccgatttaaggcttgtgccccagctggaccagtgtcctggttttcctctgatggtcagcgcggattttgggactatatccgtcttgcctgtagtaaagtaccaaacaattgtgtgtcttccatagaaaatatggaaaacatttcaactgcacgggctaaagggagagcctggattcgtgtggccctcatggaaaaacgcatgtctgagtatatcaccacagccctccgcgacactcgcacgaccagacgattttacgacagcggtgccatcatgctccgagacgaggccaccatcctcaccggtatgttgattggcctctccgccattgattttagcttctgtttgaagggcgaagtccttgatggaaaaacacctgtggtgatagattatactccgtatctgaagttcacacaaagttatgactacctaacggacgaagaagagcgacactctgcagaatcttcaacctcagaggataatagtccggagcatccctacctgccgctagtgaccgatgaggattcctggtacagcaagtggcacaaaatggaacagaaattcagaatcgtttatgcacagaagggctatcttgaggagctcgtgcgcctgcgggagagccagctgaaggacctcgaggccgaaaataggcggttgcaactgcaactggaggaggccgcagctcagaatcagcgcgagaagagggaactggagggggtgattttggagctgcaggagcagctgacagggctcattccaagtgaccacgccccactcgcccaaggtagcaaagaactcaccactcctctcgtgaaccaatggccgagcttggggactcttaacggggcagagggggcatccaacagcaagctctacagaaggcacagcttcatgtccaccgaaccactctccgctgaggcgtccctgtcgtccgactctcaacggctcggcgaggggacccgagacgaggagccctggggcccaatcggcaaagatccaacacctagcatgctgggtctatgcggaagtctggccagcattccctcctgtaagtctctggcatccttcaaatccaacgaatgtcttgtgagtgattcccctgaaggctctcctgccctcagcccctcctag

SEQ ID NO: 239494 - DNA, 1371 bp, synthetic construct
  misc_feature 1..1371: note = Description of Artificial Sequence: Synthetic coding sequence
  source 1..1371: mol_type = other DNA
atgaaaatcgaagaggttaagtctaccacaaaaacacaaaggatcgcctcccacagccacgtaaaaggattaggtctggacgagtcgggcctggctaagcaagcggcatctgggttggtaggacaagagaacgcacgggaggcatgtggcgtcatcgtcgaactgatcaagtccaaaaagatggctggtagagctgtgctgttggctggccctcctgggacagggaagaccgcactagcactagcaattgcccaggagcttggcagcaaggtccctttctgccctatggtaggctctgaagtctactccacagagatcaagaaaactgaagtgcttatggaaaatttccgcagggcaatcggcctgaggattaaagagaccaaggaagtgtacgagggggaggtcactgagctgacaccctgcgagactgagaatccaatggggggatatgggaagacaatctcccacgtgataatcggactgaagaccgcaaagggtacgaaacaactcaagttagacccgagtatttttgagtcacttcagaaggagcgtgtcgaggctggagacgtgatttacatcgaggccaacagcggagcagtgaagcgccagggcagatgcgatacatacgctacagagttcgatctagaggccgaagagtacgtgccactcccaaagggagacgtgcacaaaaagaaggagatcattcaggacgtgacactacatgatctggacgtagcaaacgctcggcctcagggaggacaagacattctaagtatgatgggccagttaatgaagccaaagaagactgagataacagacaagctgagaggcgagattaacaaggtcgtaaacaagtatatcgatcaagggattgccgagctcgtgccaggcgtgctgttcgtcgatgaagttcacatgcttgacatcgaatgtttcacatacctccaccgggcactggagtcctccatagctccgatcgtgatcttcgcctctaatcgcggtaactgcgtgatccgaggcacagaggatatcacctctccacatggaatccctctggatctattagatcgcgtgatgatcataagaacaatgctgtataccccccaggaaatgaaacaaattattaagatcagggctcagaccgagggtatcaatatctcagaagaggctttgaaccatttaggagaaattgggacaaaaacaaccctgcgctattcagttcaattactgacacctgccaacctgcttgcgaagataaacggcaaggactcaatcgagaaagaacatgtggaggagatttctgaacttttctatgacgccaaaagcagtgccaagatccttgccgaccagcaggataaatatatgaagtag

SEQ ID NO: 239495 - DNA, 1161 bp, synthetic construct
  misc_feature 1..1161: note = Description of Artificial Sequence: Synthetic coding sequence
  source 1..1161: mol_type = other DNA
atgaaaattgaagaggtgaaaagcaccactaagacacagcggatcgctagtcacagccatgtgaagggattaggcctcgacgagtctggactggcaaaacaggccgcatctggcctcgtgggacaggagaacgccagagaggcctgcggagtcatcgtggagctgattaagagcaaaaagatggccggaagggcagtcctgctggccggaccccctggcaccgggaagacggcactagccctggccattgcccaggaattaggcagtaaggtcccgttctgcccaatggtggggtcagaggtttattccacagagatcaagaaaacggaagtcctaatggaaaatttccgtcgggctattgggctgcgtatcaaagaaactaaggaagtctacgagggagaggttaccgagcttacgccgtgcgagactgagaatcccatgggaggctacggcaagacgatctcacatgtgatcataggattgaaaaccgccaaagggacgaagcagttgaagttagatccatcaatcttcgagtcccttcaaaaggagcgggttgaggccggtgatgttatctatatagaagcgaattctggagcagtgaaacgccaagggagatgtgacacctatgctacagaatttgatttggaggccgaggaatatgtgccacttccaaaaggggacgttcacaaaaaaaaagagatcatccaggacgtgactctgcacgatctagacgttgcaaatgcccgtccccagggaggacaggacattctcagtatgatggggcagctaatgaagccaaagaaaacagaaattaccgacaagctgaggggggaaattaataaggttgtgaacaagtacattgatcaaggcatcgccgaactggtgccaggcgtactttttgttgatgaagtacacatgctggatattgaatgctttacttacctgcatagagcgctcgagtcatcgatcgcgcctatagtgatctttgcaagcaatagagggaactgtgtcatacggggaaccgaagatatcactagcccccacgggattccattggatcttctggaccgcgtgatgattatccggactatgctgtataccccgcaggagatgaagcaggtccttagtgctgcagctgacccaggtcaattagcctgctag

SEQ ID NO: 239496 - DNA, 2502 bp, synthetic construct
  misc_feature 1..2502: note = Description of Artificial Sequence: Synthetic coding sequence
  source 1..2502: mol_type = other DNA
atggacgtcgtggaccccgacatcttcaatcgggacccacgagaccattacgatctgctccagcgactcggcggaggcacttatggagaagtcttcaaggccagggataaggtatctggcgatcttgtggcgctgaagatggttaagatggaaccagatgatgacgtgtccaccctccagaaggagattctgatcctcaagacttgtaggcatgccaatatcgtcgcgtaccacgggtcttacctgtggttacagaaactgtggatatgcatggagttctgtggcgctggcagcctgcaggacatctatcaggttacaggcagcctgtctgagctgcagatctcatatgtctgcagggaggtacttcagggtcttgcataccttcatagccagaaaaaaattcatagagatattaaaggagccaacatcctcattaacgacgcgggtgaagttcgcctagctgactttggcatctcggcccagatcggggcaacacttgcaagacgcctgagtttcatcggcacaccctattggatggccccagaggtcgccgcagtcgccttgaagggaggctacaacgagctctgcgacatttggagtctgggcatcacagccattgaacttgctgagttgcaaccacctctgttcgacgttcacccactgagagtgctgttcctgatgacaaaatctgggtaccagcctcccaggctgaaggagaaaggaaaatggtcggctgctttccacaattttatcaaggtgacgctcactaaaagtcctaaaaaaagacccagcgcaaccaaaatgctctcacaccagctggtgtcccaacccggactcaaccggggtttgatcctagatttgctggacaagctgaagaaccccggaaagggtccctcaataggtgacattgaagatgaggaacccgaactgccaccggcaatccctcggcgaattcgaagcacacaccgcagcagttccctgggtattccagatgcggattgctgtcggagacacatggagttcaggaaattgcgcggtatggagacccgaccgcctgctaataccgctagattacaacccccacgagacctcagaagctcctcccctcgaaagcagctcagcgagagtagcgacgatgattacgatgatgtggacattcctacaccagccgaggacaccccacccccactgcccccaaagcctaaattccgcagtcctagcgatgagggtcccggtagcatgggtgatgacggccagctgtctcctggtgttttagtacgatgcgcatcgggtccccctcctaactcccctcgacccggaccacctcccagtacgtcctctccccacctgacggctcattcagaaccgagcttgtggaacccccctagccgggagctcgacaagccccctctgctacctcccaaaaaagaaaagatgaagaggaagggctgcgctctgctggtcaagctgtttaatggctgcccacttcggatccattccacagctgcgtggacacatccctcaacaaaagatcagcacctgttactaggggcagaggagggtatcttcatactgaacaggaacgaccaggaggcaacactcgagatgctctttccctcaaggaccacatgggtgtacagtattaataacgtgctgatgtccttgtccggcaagacacctcatctgtactcccactcaatccttggccttttagaacgaaaggaaactcgggctgggaacccaatcgcccacatcagccctcataggctgttggcaaggaaaaacatggtctctactaagatccaggatacaaagggatgccgggcatgttgcgttgcagagggtgcctctagtggcggacctttcctttgcggcgcactggaaacttctgtggttctgctacagtggtaccagccaatgaacaagtttctgctggttcgacaggtactcttcccacttccaactccacttagcgtgttcgccctgttgacaggcccaggtagtgagttgccagccgtctgtatcggcgtgagccctgggcgtcctggtaagtctgtcctgttccacacggtgcggttcggcgcactctcgtgctggcttggggagatgtcaacagaacaccggggtcctgtgcaggtcacccaggtcgaagaagacatggtgatggttctgatggacggtagcgtgaaactggtcacacccgagggctctccagtgcgcggacttaggacacccgagataccaatgactgaggccgtggaagccgtggccatggttggtgggcaactccaagccttctggaaacatggggtccaggtgtgggcactgggtagcgatcaactccttcaggaacttagggacccgacactaacatttcgactgctggggagtccacgcctggagtgctccggaaccatttctccccattgtaatctcctcctgccaggttccagtaattccccagcctccgccagccgcgtcgccggaatcactggactctag

SEQ ID NO: 239497 - DNA, 1257 bp, synthetic construct
  misc_feature 1..1257: note = Description of Artificial Sequence: Synthetic coding sequence
  source 1..1257: mol_type = other DNA
atggttggacagctcgcggcaaggagagcggcaggggtcgtactggagatgattcgggaagggaagattgccggacgcgcagtcctcatagccggtcagcctggcaccgggaaaaccgctatcgccatgggcatggctcaggctctcgggcctgacacccccttcactgcgatcgccggatccgagattttcagtttggagatgtcaaagactgaagcccttactcaggcgtttagaagaagcatcggagtcagaattaaggaagagactgaaatcatcgagggcgaggtggttgagatccagatcgatcggcctgctacggggaccggttctaaggttggtaagctgacgctcaagaccaccgagatggagacaatctatgacttgggcactaagatgattgaaagtctcacaaaagacaaagtgcaggccggtgatgtgatcactattgacaaggctaccggcaaaatatccaaattgggcagaagctttactcgcgcacgcgattacgatgcgatggggtcccagaccaaatttgttcagtgtcctgacggcgagctgcagaagcgcaaggaagtggtacataccgtgagcctccatgaaatcgacgtcatcaatagccggacccagggcttccttgcactgttttctggcgatacaggcgaaatcaaaagcgaggtgagggaacagattaacgccaaggttgcagagtggcgggaagaaggaaaggccgagatcattccaggggtcctattcatcgatgaagtccacatgctcgatatcgagtccttcagctttttaaacagagcccttgagagcgatatggcccctgtactaatcatggccacaaacaggggcatcacccggattagaggaacaagctatcagtcaccgcacggtattcccattgatcttctcgaccgcttgttgatcgtctccacaacgccctacagcgaaaaggacaccaaacagattttacgtataagatgcgaggaagaggatgtcgagatgtctgaggatgcctacacagtactgacccggatcgggttggaaactagccttcggtatgcgatccagctgattacagctgcttcccttgtatgcaggaaaaggaaagggactgaggtgcaagtagacgacatcaagagagtgtattctctgtttttagacgagtcaaggagcacccaatacatgaaagaatatcaggacgctttcttgtttaacgaactcaagggcgagaccatggatactagctag

SEQ ID NO: 239498 - DNA, 1392 bp, synthetic construct
  misc_feature 1..1392: note = Description of Artificial Sequence: Synthetic coding sequence
  source 1..1392: mol_type = other DNA
atggctaccgttaccgcgaccactaaggtgcctgaaattcgcgacgtcaccaggattgagcgcattggagcccacagccacatccgtggcttgggcttggacgacgccctcgagcctagacaggcgagtcaaggaatggtgggccaactcgcggcacgcagggccgcaggagtggtgctggagatgatcagagagggcaaaatcgcgggtcgggctgtgcttatcgccggtcagccgggaaccggtaaaacagccatcgcaatgggcatggctcaggctttgggaccagatacaccctttacggctatcgcagggtcagagatattttcactggagatgagcaaaacggaggccttgacacaggcctttcgtcgctccatcggcgtgcggataaaggaagagaccgagatcatcgagggtgaagtggtggaaattcagattgatcggcctgccactggaactggttctaaggtaggaaaactcaccttgaagactaccgaaatggagaccatctatgacctgggcactaaaatgatcgaatcccttaccaaggataaagtacaggctggcgacgtcattaccatagataaggcaaccggtaagatttcgaaactgggacggagttttacacgcgctcgtgattacgatgccatgggctcccagaccaaatttgtgcaatgcccagatggcgaactacagaagaggaaggaggtcgtgcatactgtgtccttacacgagatcgatgtcattaactcccggacccagggcttcctggccctgttttccggtgacactggggaaatcaagtccgaggtgcgagaacagatcaacgccaaggtggcagaatggcgcgaggagggcaaagcagaaatcattcccggagtgctcttcatagatgaagtgcatatgctcgatattgagtctttttccttcttgaacagggccctggagtctgatatggctcccgtcctgatcatggcaaccaatcgcggtataaccagaattcgcggtacatcctatcagtcccctcacgggatcccgattgaccttctagacagactactgatcgtctcaacgacaccttacagtgagaaagatacaaaacaaattcttcgcataagatgtgaggaagaggacgtggagatgtccgaggacgcctacacagttctgactcgcatcggtctggaaactagccttcggtacgctatacagcttataacagctgcttctctggtgtgccgaaagcgcaaaggtacggaagtgcaggttgacgacattaagcgagtctacagtcttttcctcgacgaaagccggtcaacccagtatatgaaagagtatcaagatgcttttttgttcaacgagctgaaaggggagacaatggatacgtcctag

SEQ ID NO: 239499 - DNA, 15102 bp, synthetic construct
  misc_feature 1..15102: note = Description of Artificial Sequence: Synthetic coding sequence
  source 1..15102: mol_type = other DNA
atgggggacgctgagggcgaggacgaggtccaatttctgaggactgatgacgaggtggtgttgcagtgttccgcaaccgtgttgaaggagcagctcaagttgtgcctggcagcggaaggcttcgggaaccggctgtgctttctggagcccaccagcaacgctcagaacgtgcctccagacctggcaatctgctgtttcgtgctggagcagtctctgtcagtgagggccctccaagagatgttagctaatacggtcgaggcaggcgtggaaagttcccaaggcggtgggcatcgcactctcttgtacgggcacgctatactgctacgacatgcacactcccgaatgtacctgtcctgtttgaccacctccagatcaatgacagataagctggctttcgacgtgggcctgcaagaagatgccacaggcgaagcttgctggtggacaatgcaccctgctagtaaacagcgatccgagggagagaaagttagggtcggcgacgacattattcttgtatcagtatcttcggagcggtatctccatctttctaccgccagcggcgagctccaagtggacgcttccttcatgcagaccctctggaatatgaatccgatctgttcaagatgtgaggaaggttttgtaacaggcggtcatgtgctgcgtctatttcacggccatatggatgagtgcttgaccataagccccgctgattccgatgaccagagaaggctcgtctactatgagggaggtgcagtctgtacccacgctcgcagcctttggcggctagaacctctgcgtataagttggtctggaagtcatctcagatggggacagccactaagagtacgccacgtcaccacaggccagtacctggccctgacagaagaccagggcctcgtggtggtggacgcatctaaggctcacactaaagccacgagtttttgttttaggatctctaaagagaaattagacgtagcacccaagcgcgatgttgagggcatgggcccaccggaaattaaatacggtgaatccctgtgctttgtacagcatgtcgcatccgggctgtggctgacatacgcagcccctgaccctaaagctttgcggttgggcgtcctgaagaaaaaggccatgctgcatcaggaagggcacatggatgacgccctctcactgaccaggtgccagcaggaagagtcacaggccgcacgcatgattcactctacgaacggcttatataaccagttcattaagagcttagactcattcagtggaaagccacgaggatccgggcctcctgctggcaccgccctgcctattgaaggggtgatcctgagcctacaggacctgatcatctactttgagcccccttccgaggacctgcagcacgaggagaagcagagcaaattacggtccctacgcaaccgtcagtctttgtttcaagaggagggaatgctttcaatggtcctcaattgcatcgatcgattaaatgtctatacaactgccgcacacttcgcagagttcgctggagaggaggccgcagagagctggaaggagattgtaaacttgctctatgagcttctggcctccttaatacggggaaatcggtcaaattgtgctttgttcagcacaaacctcgactggctcgttagcaagcttgatagactggaagcatcttccggtatcctggaggtattgtactgtgtgctgatagagagccctgaggtgctgaatattatccaggagaaccacatcaaatctattatttccttgcttgataagcacgggaggaaccataaagtcttggacgtactctgctcactgtgcgtgtgcaatggagtggctgtgcggagtaatcaggaccttatcaccgagaacttgctgcctgggagggagctgctactgcagacaaatttaattaactatgttaccagcattcgcccaaacattttcgtcggaagggctgaaggtaccacccagtacagtaagtggtatttcgaagtcatggttgatgaggtgactcccttcttaactgctcaggcaactcaccttagagttggttgggctctgactgagggatataccccttatccaggggctggggagggttgggggggaaacggagtcggggacgacttatactcgtacggattcgatgggctgcatctctggacgggacatgtggccaggcctgtgacctcccccggtcagcacctgcttgccccagaggatgttatcagttgctgtcttgatctatccgttcccagcataagcttcaggatcaacggatgtccggtgcagggtgtgtttgagagcttcaacctcgatggcctattttttccagtggtatccttcagcgccggtgtgaaggtgcgctttctcctgggaggaagacacggagaattcaagttcttgccaccccctggttacgccccatgccacgaagcagtcctgccaagagaacggctgcacttggagcctattaaggaatatcgccgagaaggccctcgaggtccacacctggtaggtccctctaggtgtctgtcgcacactgattttgtcccatgccccgtggacaccgtgcaaatcgtccttcccccacacctggaacgcattcgcgaaaagcttgcagagaatatccatgagctgtgggccttaaccaggatagaacagggctggacatacggccctgtgagggatgacaataaaagattgcatccatgcctggtggacttccactcccttccagaaccggaacgcaactataacctccaaatgtctggtgagactctgaagaccctcctcgctctaggatgtcacgtggggatggcggatgagaaggcagaggacaacctgaaaaagaccaaacttcctaaaacatatatgatgagcaacggatataaacccgctcccctggatctgtctcacgtgagacttactccagcacaaactacactcgtggacaggcttgccgagaacggccataacgtgtgggccagggatcgggtaggacaagggtggtcttactcggccgtccaagacattcctgccagaaggaatcccagactcgtcccctatcgcctgctggatgaggccactaaacggtcgaacagagattcactgtgtcaggcagtcagaactttgctcggctatgggtacaacatagagcccccagatcaggagccctctcaggtcgagaaccagtcccgctgcgacagagtccgcatctttcgcgcagaaaagagttataccgtgcagtccggccgatggtacttcgaatttgaggcagtcacaacaggagaaatgcgagtcggatgggcgcgtccggagctgaggcctgacgtcgagctgggcgctgatgagcttgcatacgtcttcaatggacatagaggccagcggtggcaccttggctccgaaccgtttgggagaccgtggcagccaggtgatgttgttggctgcatgattgacctgacggagaatacaataatctttaccttaaatggtgaggttctgatgtcagacagcggcagtgagaccgcattccgcgaaatcgagataggcgatggcttccttcctgtatgctccctcggacctggacaggtcgggcatctaaaccttgggcaggacgtgtctagcttacggttctttgccatatgtggcctgcaggagggtttcgaaccatttgctatcaacatgcagaggccggtgacaacctggttctctaaggggttaccccaatttgagcccgtgcctcttgagcatcctcattacgaagtgagcagagtggatggcacggtcgacaccccaccttgcctacgattaacgcaccgcacttggggctctcagaatagcttggtcgaaatgctgtttctgcggctttcactgcctgttcagtttcatcagcacttccggtgtactgctggagctactcccctggccccacccggactgcagcccccagcagaggatgaggcgagggccgctgagccagaccccgactatgaaaaccttcgccgtagcgccggaggctggtctgaggcagaaaacgggaaagagggcacagccaaggagggcgctcctggcggaacacctcaagccggaggcgaggcccagccggctcgagcagaaaacgagaaggatgccaccacagaaaagaataagaaaaggggtttcctttttaaagccaagaaggtcgccatgatgacgcagcctccagcaaccccaaccttgcctcgactgccccatgacgtggttccagccgataatcgggatgatccagagattatactgaataccacaacatactattacagtgttcgggtgtttgcaggacaggagcccagttgcgtgtgggctggctgggtgacacccgattatcaccaacacgatatgtcatttgatctgtccaaggtgcgcgtggtaactgtcacaatgggtgatgaacaaggtaatgtgcacagctccctgaagtgctcaaattgctacatggtttggggaggagacttcgtgagccctgggcagcagggcaggatctcacatacagatctcgtcattggttgccttgtggatttggccaccggcctgatgacctttacagccaacggcaaggaaagcaacacgttcttccaggttgagccaaacaccaaactgttccccgcagtgttcgtgctgccgacccaccagaacgtgatccagttcgagctggggaagcagaagaatataatgcccttgtcagccgcaatgtttcagtccgagagaaaaaatcctgcccctcagtgtccccctagacttgaaatgcaaatgctcatgcctgtgtcctggtcccgaatgccaaaccacttccttcaggtggagactcggagggctggagagaggctgggttgggctgtgcagtgccaagagcctctcaccatgatggccttgcatatacccgaggagaatcgttgcatggacatcttagagctctcagagagactggacctgcagcgtttccattcccacacactgagattataccgggcagtctgcgcacttggcaacaatagggtcgcccacgcactttgtagccatgtagatcaagcccagctgctccacgctctggaggacgcccacctccccggacccctgcgggctggatactacgatttactgatttcaatccatctggaatcagcttgcagaagtcgtcggagcatgttgtctgagtacattgtgcccctcactccagagacacgcgctataacactctttccaccaggcaggtccaccgagaatggacaccccaggcacggtctgcccggtgtaggggtcacaaccagtctccggcctccccaccatttttcacctccatgctttgtggctgcactgccagccgctggggctgcagaagcccctgcgagacttagcccggcaattccactggaggccctgagagacaaagctctccggatgctgggcgaagctgtgcgggacggtggtcaacatgcacgcgatccggttggaggctcagtggaattccagtttgtacctgtcctgaagctcgtgagtactctgcttgtcatgggaatctttggggacgaggacgtgaagcagatcctgaagatgatcgaacccgaggtgtttacagaggaggaagaggaggaagacgaggaggaagaaggcgaggaagaggacgaggaagagaaggaggaagacgaagaggaaactgcccaggagaaggaggacgaagagaaggaggaagaagaggcggctgagggggagaaggaagaagggctggaggaaggtctcctgcaaatgaagcttccagaatccgtcaagctgcagatgtgccacttgctcgaatatttttgcgaccaggagctccagcaccgcgttgagtctctcgcagcattcgccgagaggtacgtggacaaactgcaggccaaccaaaggtcacggtacgggctcctgataaaagctttcagcatgaccgccgctgaaacagctaggaggaccagagagttcagatcccctccccaggagcagatcaatatgctcctccaatttaaggacggaaccgacgaggaggattgtcctctgcccgaggaaattcgacaggatctgctggactttcaccaggatctgctcgcccattgtggaatccagctggacggagaggaagaagagcccgaagaggagactactctgggcagtaggcttatgtctctgctggaaaaagtgaggctggtgaaaaagaaggaggaaaaacccgaggaggagaggtctgctgaggagagcaaacccaggtctttgcaggagctagttagtcacatggttgtgcgctgggcgcaggaggacttcgttcaatctcctgaactcgtccgcgctatgttctccctgctacaccgccagtatgatggcctgggcgagcttcttagggccctcccacgcgcttataccatctccccatcctctgtcgaggacactatgagcctgctggagtgcttagggcagatccgctccctcctgatagttcaaatggggcctcaggaggagaacctgatgatccagtcaatcggaaacataatgaacaataaagtcttttaccagcacccaaacttaatgcgggctctcgggatgcatgaaacagttatggaggtgatggtgaacgttctaggagggggagagtcaaaagaaataagatttccgaagatggtgacttcatgttgtagattcctctgctatttctgccgaatatctcggcagaaccagcggtctatgttcgaccacttatcttaccttcttgaaaactctggaatcgggttggggatgcaagggagtacgcccctagacgtggccgctgcctccgtgatcgataacaatgagctcgcgctggcactgcaagagcaggatttggagaaagtggtctcatatcttgcaggatgcggtctgcagagttgccccatgttggttgcaaagggctacccagatattgggtggaacccttgtgggggagaaaggtatttggactttttgcgcttcgcagtgtttgtaaatggtgagtctgtggaagagaatgcaaacgtcgtagtgaggctgcttattcggaaacctgagtgtttcggaccggcacttcgtggagaaggcggtagtgggctgcttgctgccattgaggaagccattaggatttccgaagaccccgctagagacgggcctggtattcggcgtgatcggagaagggagcatttcggtgaagaaccacctgaagaaaacagggtgcacctgggtcatgcgattatgtccttttacgccgcactcattgatcttttagggaggtgtgcacccgagatgcatcttatccaggctggaaagggggaggcccttcgcatccgcgctattctgcggagtctggtacctctggaggatttagttggcatcatctccctgccgctgcagatccctactcttggcaaagacggagcattagtgcaaccgaagatgtcagccagcttcgtacccgatcataaagcgtctatggtgctgttcctggatcgcgtgtacggcatcgagaaccaggacttcttgctgcacgtactggacgttggattcctgccagacatgagggcagcggcttccttagatacagccacgtttagtacaaccgaaatggcattggcgctaaacaggtatctgtgcttggcagtactgcctctgatcactaaatgcgcccctctgtttgccggaactgaacaccgtgccattatggtggattcgatgttgcacaccgtctatagactgagcaggggacggagcttgaccaaggctcaaagagatgttatcgaggattgcttgatgtcactgtgcagatacatcaggccctcaatgctgcagcacctcctccgcaggctggtgttcgacgttccaattttgaacgaattcgcgaagatgcccctgaagttgttgactaaccattacgaacgctgttggaagtactattgtttaccaacagggtgggctaacttcggcgtgacttccgaagaagagttgcacctcactagaaaactattctggggcatttttgattcattggcccataagaagtacgaccctgaactgtaccgaatggccatgccttgcctgtgtgccattgcaggcgctctacctcctgattatgtcgacgcttcttattcatcaaaagccgagaaaaaagccactgtggatgcagagggtaactttgatcctaggccggttgagacactgaacgtcatcatcccggagaagctcgatagttttattaacaagtttgccgaatacacgcacgagaaatgggcattcgacaagatacagaataattggtcctacggtgagaatatcgacgaggagctcaagacacatccgatgctgcgcccttacaaaaccttctccgaaaaagacaaagagatctaccgatggccgatcaaggagtccctgaaggctatgatcgcatgggagtggaccattgagaaggctcgagagggagaagaagaaaagaccgagaaaaagaagacacgcaagatcagccagtctgctcagacctatgatccgagggaaggatacaacccccagccacctgacctgagcgccgtcacgcttagcagagagttgcaggcgatggctgaacaattggctgagaattaccacaatacatggggcagaaaaaaaaagcaggaactggaagcaaagggaggcggaacccaccccctgctagtcccctacgatactttgacagccaaggagaaagccagggaccgcgaaaaggcccaggagctgctgaaattccttcagatgaacgggtatgctgtgacccggggattgaaagatatggagctggactccagcagcatcgagaagagattcgcatttgggtttttacaacagctgctgcgttggatggatattagccaggagtttatagcccaccttgaagcggttgtttcttccgggcgagtagagaagagccctcacgaacaagagatcaagttttttgccaaaatattactgccattgataaatcagtactttactaaccattgtctgtacttcctttcaaccccggcaaaagtcctgggcagcggcggacacgcctcaaacaaggaaaaggaaatgatcacctccctgttctgcaagcttgcagctcttgtgcggcaccgggtgtccctttttggcacagacgccccagctgtagtgaactgccttcacatccttgctaggagtctggacgccaggacggtgatgaagagtggcccagaaatcgtgaaggctgggttacggagcttctttgagagtgcgtccgaagacatcgaaaagatggtagagaacttgcgattgggcaaggtttcccaggcaagaacccaagtgaaaggggtcggacaaaacctcacatatactaccgtagcactgctgccagtgctcaccactcttttccagcacatcgctcaacatcagttcggagacgacgtcattctagatgacgtacaggtaagttgttaccgaactctttgttctatctactctctgggtaccacaaaaaacacatacgttgagaaattaagaccagcccttggtgagtgtctggcccgtcttgccgcagctatgcccgttgctttcctcgagcctcagctcaacgaatacaacgcttgttcagtctatacgacgaagtccccacgagagcgggcaatcctcggactgccgaacagcgtcgaagagatgtgtccggacatacctgtgctggagcgattgatggcggacatcggcggattggccgagtctggggcacgatacactgaaatgcctcacgtgattgagattacgctgcccatgctctgcagctacctgcccagatggtgggagagaggcccagaagctccgccaagcgccctccctgctggagctcctccaccctgcaccgccgtgacgtccgaccacttgaattccttactcggtaatatcttgcgaattattgtcaataacctcggtatcgacgaggcgtcttggatgaaaaggcttgcagtgttcgctcagccaatcgtcagtcgtgccaggcctgaactcctgcaaagccattttatccctaccatcgggagattgagaaaaagggcgggaaaagtagtgagtgaagaagaacagttgcggctcgaggcaaaagctgaagcccaggaaggcgagttgctcgtcagggatgagttctcagtgctctgcagggacctgtacgcattatatccacttctgatccgttacgtagacaataatagggctcagtggctgacggagcctaacccatctgccgaagagttatttaggatggttggcgagatctttatctattggagcaaatcacacaattttaagcgggaggagcagaatttcgtcgtccaaaatgaaatcaacaacatgtcattccttacggccgacaacaagtctaaaatggcaaaatcagggggatccgatcaggagagaactaaaaaaaagcgcagaggtgatagatattccgtccagacaagtctgatagttgctaccctcaagaaaatgctgccaattgggctaaatatgtgtgcgccaacagaccaggatctcataaccctcgctaagaccagatacgccttaaaggacacagacgaggaggtgagagagttcctacacaacaatctgcacctccagggcaaggttgagggatccccctctctgcgctggcaaatggccctgtatcggggtgtccctgggagagaagaagacgcagacgatcctgagaaaatagttagaagggtccaggaagtgtccgcggtgctttactatttggaccaaaccgaacatccttataaatctaagaaagctgtgtggcacaagctcctgtctaaacagagacgacgggcagtagttgcgtgctttagaatgacacctctgtacaatctccccactcatagggcatgtaacatgttcctggaatcatataaagctgcatggattctgacagaagaccattcatttgaggaccgcatgattgatgatctctctaaggccggagagcaggaggaggaggaagaggaagtcgaggagaaaaaacctgaccccctccaccagcttgtactgcacttctccagaactgcgctgaccgaaaagtccaaattggatgaggactacctctatatggcctatgctgatattatggctaaaagctgtcacctagaggaagggggagagaacggagaggcagaggaagaggtcgaagtgtctttcgaagagaagcagatggaaaaacagcggttattgtatcagcaggctagattacatacacggggtgccgctgaaatggtattacagatgatttcagcctgtaagggggagaccggagccatggtatcatcaacacttaaactgggcatctctattcttaacggtggtaatgccgaggttcaacagaagatgctcgactatctgaaagataagaaggaagtaggatttttccagtcaatccaagcgctgatgcagacatgctctgtgctcgacctcaacgcttttgaacgacagaacaaggcagagggcttaggcatggtgaacgaagacgggaccgtaattaatcgacagaacggagaaaaagtgatggctgacgatgaattcacacaggacctgtttcggtttctacagttattatgcgaggggcacaacaacgattttcagaactacctccgcactcagacaggaaatacgaccaccatcaatatcattatttgcacggtggattacctgcttagattacaggaaagtatatcggacttctattggtactacagcggcaaagacgtcattgaagaacaagggaaacgaaatttttccaaagccatgtctgttgcgaagcaagtgttcaacagcctcactgagtacatccagggcccatgcactggcaaccagcagagcctagctcattctagattgtgggatgctgtggtgggctttctgcatgttttcgcccacatgatgatgaagctcgctcaggattcaagccaaattgaacttctgaaagagttgctggacctgcagaaggatatggtggtgatgttgcttagcctcttggaaggaaatgtggtgaacggtatgatcgctcggcagatggtagacatgctggttgagtcttctagcaacgtggaaatgatccttaaattctttgatatgttcctaaaactgaaggatatagttggctccgaggctttccaggattatgtgacagatcccagaggcttgatatcgaaaaaagattttcagaaggctatggatagccagaagcagttcagcgggccagagatccagtttctgctaagttgttccgaggccgacgagaatgaaatgataaattgcgaggagtttgcaaaccggttccaggagcctgccagggatattggtttcaatgtcgccgttctactgaccaacctgagcgaacatgttcctcatgaccctcggttacacaatttcttagagctggcagaaagtattctcgagtactttaggccctatctgggcagaatcgaaataatgggggcttcacgccgaatcgaacgaatttactttgagatttccgagactaatagagcacagtgggaaatgcctcaggtgaaggagtccaaaagacagttcatttttgacgtcgtcaatgaggggggtgaagcagagaaaatggaactctttgtgagtttctgcgaggacacaattttcgagatgcagatagccgcacagatcagcgaacccgagggggaacctgagaccgatgaagacgaaggagcaggggctgccgaggccggagccgagggtgccgaagaaggagcagccggactggagggcaccgcagcaaccgcagcagctggtgctacagcgagggtggtagccgctgccggtcgcgctctaagaggcctgtcgtaccggagtttacggaggagagtacgcagactgcgacggcttaccgccagagaggccgctacagccgttgcagccttactttgggcagctgtgaccagggccggagcagccggtgctggtgcagccgctggcgctctggggctgctatggggttccctttttggtggaggactagtggagggcgctaaaaaagtaaccgtcaccgaactacttgccggaatgcctgatcctacctcagacgaggtgcacggagagcaacccgctgggccaggcggagatgccgacggcgaaggggcaagtgagggagccggtgatgccgctgagggcgcaggtgacgaagaggaagctgttcacgaggcaggccctggtggtgccgacggcgctgtcgcagtgactgatgggggacccttcaggcccgagggagctggcggactcggagatatgggcgatacgacccccgcagagcctccaacccccgagggcagtcccatcctcaagcgaaagctcggtgtggatggggtggaagaggaactgcccccagagccagagccagagcccgaaccagaactcgaacctgagaaggccgacgcggaaaatggcgagaaggaagaagtaccagaacccacaccggagccgcctaagaagcaggctccccctagcccaccaccaaagaaagaagaggctggaggggaattctggggggaacttgaggtacagcgggttaagttcctcaattatctgagcagaaacttttacacacttcgatttctagctctgtttcttgcatttgccatcaatttcatcctactattctacaaggtgagtgattcgcctcctggcgaagacgacatggaaggctctgctgccggtgatgtgtccggggcaggttctggcggatcgtccggatggggcctgggtgctggcgaagaggctgagggtgacgaggacgaaaatatggtgtactatttccttgaagagtctacaggatacatggaaccagctcttcgctgcctgtccttgctacacacgttggttgccttcctttgtattatcggatacaactgtttgaaggttcccctcgtgatttttaagagagaaaaggagctcgcgcgaaagttagagttcgatggtctgtatattaccgaacaacctgaggacgatgacgtaaagggccagtgggacaggctagtgttgaacactccaagcttccctagcaattattgggacaaattcgtgaaaagaaaggtactcgacaaacatggtgacatatatggccgtgagcgcatagccgagcttctcggcatggacctagccaccctggaaattactgctcataacgagcgaaagcctaacccgcctccgggacttctgacgtggctgatgtcgatcgacgtcaagtaccagatttggaaatttggcgtgatcttcaccgacaattcctttctgtatcttggttggtatatggtcatgagcctccttggacattacaacaatttcttctttgcggcacatcttctggacatcgctatgggtgtgaagaccctgaggaccatattgagttccgtcacgcacaatggcaaacagctggtgatgactgtcggcctgctggcagtggtggtgtatctgtacacagtggtcgcattcaacttctttcgaaaattttataacaaaagtgaggatgaagacgagccggatatgaagtgcgacgatatgatgacttgctatctgttccacatgtatgtcggcgtaagggccggagggggaatcggcgatgagattgaggaccctgccggtgatgaatacgagctctaccgagtggtattcgatatcacattcttcttcttcgtgattgttatcttgctagccatcatccaggggctgattatagatgctttcggcgagctgcgcgatcagcaggagcaggtgaaggaggatatggagacaaaatgcttcatatgcggcattgggtcagattactttgataccacaccccatggcttcgagactcatactctcgaggaacataatctcgctaattatatgttttttctcatgtatcttatcaacaaggatgaaacagagcatacaggccaggagagttacgtgtggaagatgtatcaggagcgctgctgggacttctttcccgctggtgattgcttcaggaaacagtacgaggaccagctgtcataa

SEQ ID NO: 239500 - DNA, 15117 bp, synthetic construct
  misc_feature 1..15117: note = Description of Artificial Sequence: Synthetic coding sequence
  source 1..15117: mol_type = other DNA
atgggcgatgccgagggagaggacgaggttcagtttctgcggacagacgatgaggttgtgctacaatgcagcgctacagtactcaaggaacagttgaaactctgcctcgccgctgaaggcttcggcaaccggctctgctttctggaaccaacttctaacgctcagaacgtcccgcctgatctggcaatttgctgtttcgtccttgaacagtcactgtctgtccgcgcactgcaggagatgctcgctaacaccgtggaggccggtgtagaaagcagccagggaggtggccacaggactcttttgtacggtcacgccatcctgttgaggcatgcgcattcaagaatgtacctttcttgcttgaccacaagcagatctatgaccgacaagctcgcatttgatgtgggtctgcaagaagatgccactggcgaggcatgttggtggacaatgcacccagcctcaaagcagaggagcgagggagagaaggtacgggtgggagacgacatcatactggtcagcgtctccagcgaacgctacctgcacctgtcaactgctagtggcgaactgcaggtagacgcttccttcatgcagacgttatggaatatgaatcctatttgctccaggtgcgaggaaggttttgtgacaggtgggcacgtcctgcgtctgtttcacggtcacatggatgagtgcctaacaatctcacccgcagattccgatgatcagcgccgactcgtttattatgaagggggagcagtctgtacacatgcacgctcactctggcggctagagcctttgaggatttcctggtcaggatcccatctgaggtggggtcagcctctacgcgtgaggcacgtgacaaccggacagtatctagcactgaccgaggaccaaggactagtcgtcgtggacgcttctaaggcccataccaaagctacatctttctgctttagaatctcaaaagaaaagctggatgtcgcacccaaacgagatgtcgaaggaatggggcctccagaaattaaatacggagaatctctgtgctttgtgcagcatgtcgcaagtggattatggctgacttacgccgcacccgacccaaaagccctccgcctaggagtccttaagaagaaggcgatgctgcaccaagagggccacatggacgatgccctctcgcttactcgctgccaacaggaggagtcccaggctgccaggatgatccattccactaatggcctttacaaccaattcattaagagcctcgattcctttagtggcaagcccaggggttctggacctccagccggaactgcccttcccatcgagggggtaatcctttccctgcaggatctgatcatctattttgaaccaccgtcagaagatctccaacacgaagaaaagcaaagtaagttgagaagtctgcgcaaccgccagtcactattccaggaggaaggcatgctgtcaatggtactcaattgtatcgatcgtttgaacgtgtacactaccgctgcccatttcgctgaatttgcaggagaagaagcagccgaaagctggaaggagatcgtgaacctgctgtacgaactcctcgccagccttattagagggaaccggagcaattgtgcactatttagcacaaaccttgattggctcgtgtctaagctggacaggttggaggcttctagtggcattctggaggtactttactgtgtgttaatcgagtcgccagaagtgctgaatatcattcaagagaaccacattaagagcattattagcttacttgacaagcacggccgaaatcataaagtcttggatgttttatgcagcttgtgtgtttgtaatggagtggcagtcaggtcgaaccaggatttgatcaccgagaacctgcttccaggtcgcgagctactgctacagactaatttaattaactacgtcacttccatcaggcctaacatattcgtcggcagggccgagggaacaacccagtattcgaaatggtactttgaggtcatggtcgacgaggtcaccccgtttctgacagcgcaggccacacatctgcgcgtgggctgggcacttacagaaggctacaccccatatccaggagctggggagggctggggtggaaacggcgttggggatgacctgtatagctatggtttcgatggtctgcatctgtggacaggacatgtggcacggcctgttacttcccctggtcaacacttactagcccctgaggacgtcatttcctgctgccttgacttgtccgttccgagcatcagtttccgcattaacggctgtcctgtgcagggagtgtttgagagcttcaacctggatggcctgttcttcccagtggtgtctttttctgccggtgtcaaggtgcgcttcctcctgggaggccgacatggtgagttcaagttcctaccaccccctggttatgcaccctgtcatgaagcagtcctccctcgtgagcgattacatctggagcctattaaagagtacagaagagaggggcctcggggacctcacctcgtaggaccatcaagatgcctttcccatacagattttgtgccatgcccggtggatactgtgcaaattgtcctccccccacacctggagcgcattcgggagaagctagcagagaatattcacgagctatgggctctaacccgaatagagcagggatggacttacggccctgtacgcgatgataataagcgccttcatccctgcctggtggactttcactcgctgccggagccagagcggaattataatctgcaaatgagcggcgagacgctgaaaaccttgctggcccttggctgccacgtgggcatggctgatgagaaagctgaggacaacttgaagaagacaaaactgccaaaaacctatatgatgagtaacggctacaagccagcccctttagacctctctcacgtgcgcctcactcccgcacagacaacactggtcgataggcttgccgagaatggccacaatgtctgggcgagggatcgtgtgggccagggatggtcatactccgccgtgcaggatatcccagccaggcgtaatccgaggcttgtcccctaccgactccttgatgaggccacaaaaagaagcaacagggattccttgtgtcaggcagtccggacacttttaggatatggctacaacatagagccacccgaccaggaaccctcccaggtggaaaatcaaagccgctgtgacagggtgaggatcttcagggcagaaaagagttacaccgtgcagagtgggagatggtactttgagtttgaggccgttacgaccggcgagatgcgggtgggctgggctagaccagagttgcgacccgacgtcgaactgggagccgacgagctggcatatgtcttcaatggccacaggggccagcgctggcacttggggtcagagccctttgggaggccttggcagcctggcgacgttgttgggtgcatgattgacttaactgagaacaccatcatctttacattgaacggcgaggtgctgatgtcagacagcggtagtgagactgctttccgcgaaattgaaatcggtgatggttttctaccggtgtgcagtctgggaccaggccaggtcggccacctgaacttaggacaggacgtctcctctctcaggttcttcgctatctgcggtctgcaggaagggtttgaaccctttgctataaacatgcagagaccagtcactacatggttcagtaagggcctcccacaatttgagcctgtgcctttggaacaccctcactacgaggtgtctcgggttgatgggactgtcgacacacctccttgtctgcgcctgacccacagaacctggggctcccagaacagtcttgtggagatgctgtttctgagactcagcttgcccgtccagtttcaccagcactttcgctgcaccgccggagccaccccgctagctccacctggcctccagccaccggctgaggacgaggccagagccgctgaacctgatcctgactatgaaaacctgaggcgtagcgctggagggtggtctgaagcagaaaacggaaaggagggcaccgcaaaagaaggggctccaggcggtaccccccaggccggtggggaggcccagcctgctcgggcagagaatgagaaggatgccacaactgagaagaacaagaaacgaggcttcctgtttaaggctaaaaaggtggctatgatgacacagccacccgcaactccaacactcccgagactcccccacgacgtcgtaccggcagataacagagacgatcctgaaattatcctgaatacgaccacctactactattcagtcagagtgttcgctggtcaagagcctagctgcgtctgggctggatgggtgacccctgattaccaccaacatgatatgtcatttgacctctccaaggtcagggtggtgaccgtaaccatgggggatgaacagggaaatgttcacagttccctaaaatgttccaactgttacatggtgtggggaggggactttgtgagccctgggcagcaaggtaggatctcacacaccgatctcgtcatcggatgcctggtggacctggcaactgggctaatgacctttacggccaacggtaaggaatccaatacgttttttcaggtcgaaccgaataccaaattgttccccgctgtcttcgtgcttcctacccatcaaaacgtgattcagttcgagctggggaagcagaagaacatcatgccattatccgctgcaatgttccagtctgaacgcaagaacccagccccacaatgtccccctagattggagatgcagatgctgatgcctgtgtcttggtctaggatgccgaatcacttcctccaggtcgagacccggcgtgcaggtgaaagactcggatgggctgtccaatgccaggaaccgcttaccatgatggcactgcatattccagaagagaatcgttgcatggacatactggagctgtccgagcgtctggacttgcaaagattccactcgcatacactgcggctctatcgcgctgtgtgtgccctggggaacaacagggtcgcacacgctctctgtagccatgtggatcaagcgcagctgcttcacgcgctggaagacgcacatctcccaggacccttgcgtgccggttactacgacctgctcatctctattcacctggagtccgcgtgcagatcgcgtagatcaatgttgtctgagtacatagtaccactaacccctgagacacgagctatcaccctgtttccacccggacgaagtaccgaaaacggccacccacggcacgggctgcctggggtgggcgtgactaccagcctgcgtcctcctcaccacttcagcccaccctgcttcgtggccgcacttccagccgcaggcgctgctgaggcaccagccagattgtctcctgccattcccctagaggctttgagggacaaagccttgagaatgctgggagaggccgtacgggatggaggtcagcatgcaagagatccagttggcggatccgttgaattccagttcgttcccgttctcaagctcgtgagcaccctgctggtgatggggattttcggcgacgaggatgtgaaacagattctcaagatgattgagcccgaggtgtttactgaagaagaggaggaagaggacgaagaggaggagggagaggaagaagatgaagaagagaaggaggaggacgaggaggaaacagctcaggagaaagaggacgaggagaaggaggaggaagaagcagctgagggggaaaaggaggaaggcctagaggagggtctgctgcaaatgaagctgcctgagtctgtgaaacttcagatgtgccaccttctagagtatttctgcgatcaagagctgcagcatcgtgtggagtctctcgccgcatttgctgaaaggtatgtcgataaactccaggctaatcagaggtctcgctatggtctcctgatcaaagctttctccatgaccgcggcagagacagccaggcggacccgagagttccggagcccgcctcaggagcaaatcaacatgctgttgcagttcaaggatggaactgacgaagaggactgtccactacctgaagagatccgccaggacctcctcgactttcatcaagatctgctcgcgcactgcggaattcagctggatggggaggaagaggagcctgaggaagagacgaccctggggagccgtctgatgagcctactggagaaggtccgattagtaaagaagaaggaggagaagcccgaagaggaaagaagtgccgaggaatctaaacccagaagcctacaggaattggtgtcccatatggtggtccgctgggctcaggaggatttcgtacagagtcctgagctggtgagagccatgttttcactgttacatcggcagtacgatggactgggagagctactgcgggctctccctagagcctacaccatctctccttcctccgtcgaagacacaatgtctctcttggagtgtctcggccagattagaagcttgctgatcgttcagatgggccctcaggaggaaaacttaatgattcagtccatcggaaacatcatgaacaacaaagttttttaccagcatcccaacctgatgagagctctggggatgcacgagacggtaatggaagttatggttaatgttctagggggtggggaatcaaaggagatcagatttccaaaaatggtgaccagttgttgtcgctttttatgttacttctgccggatctctcgccagaatcagcggtctatgttcgaccacctatcttatctgctcgagaattccggaattgggctgggtatgcaaggaagtactcccttggatgtggctgcagcaagtgtaatcgacaataacgaactggcactggccttgcaagagcaggatctggagaaggtagtctcctacctcgctgggtgcgggttgcagtcttgtcctatgctcgtcgctaaaggatatccagacattggatggaacccttgcggaggcgaaagatatctggatttccttcgatttgctgtgttcgttaatggggagtctgtcgaggaaaacgccaacgtagtcgtgaggctcctcattcggaagcctgaatgtttcggacctgctctgagaggggaaggcggttccgggctgttggccgcaatcgaggaggctattcggatcagtgaggaccccgcacgggatggccctggtatccggcgtgaccgaagaagggagcactttggcgaggaacctccggaagagaaccgggtccacctcggccatgcaatcatgtcgttttatgccgcacttattgatctgctaggaagatgtgcaccagaaatgcacctcatacaggcaggcaagggggaagctctacggatccgagctattctgagaagcttggtgcctctggaggatctagttggaatcatctctttacccctgcagatcccaaccctgggcaaagatggggctctggtgcagcctaagatgtctgcttcttttgtgcccgatcacaaagccagcatggtgttatttctggaccgcgtttacggcatcgagaaccaggatttccttctgcacgtgctggacgtaggctttctgccggatatgcgcgctgctgcttcccttgatacagccacctttagtactactgagatggccctcgcactgaacaggtatttgtgcctggcggtgctcccactgatcactaaatgtgcacctctattcgcgggaacggagcaccgcgcaatcatggtcgattctatgctgcataccgtctacagactgagtcgcggacggagcctgactaaagcccagcgggacgtgattgaggattgcttgatgtctctatgccggtacattcgcccaagtatgttgcagcatttgttgagacggctggtgttcgatgttccaatcctcaacgagttcgctaagatgccgctgaagttgctgacaaaccactacgaacgatgctggaaatactactgtctgcctacagggtgggcgaatttcggagtcacatcggaggaggaattgcacctcactcgcaaactgttctggggtatcttcgattcacttgctcacaagaagtatgatccagagctgtatcgtatggccatgccatgtttatgtgccattgccggtgccctaccgcctgactacgtggacgcatcctactcaagtaaggctgagaaaaaggctacggtagatgcggaaggtaatttcgaccccagacctgttgaaaccctgaatgtaattattcccgagaaattggactcctttatcaacaagtttgcagagtacacacacgagaagtgggccttcgataagatacaaaataattggagctacggggaaaacatcgatgaagaacttaaaacccacccaatgctacgaccctacaagaccttttccgagaaggataaggaaatctatcggtggcctatcaaggagtcactgaaggccatgattgcctgggaatggacgattgagaaagccagagagggcgaggaagaaaagaccgagaaaaagaaaacgagaaagatttcccagtccgcccagacgtatgaccctagggaaggatataatccccagccacccgacctctcggctgtgaccctgtccagagaactacaggcaatggccgaacagctagctgagaactatcacaacacatggggaaggaaaaagaaacaggaactggaggcaaaggggggtggaacccatcctctgctggtcccgtatgacacactgacggcaaaagaaaaggccagggaccgggaaaaggcccaagaactgctcaaattccttcagatgaatggatatgccgtgacccggggtctgaaagacatggagttagattcaagctccattgaaaagcgctttgcttttggctttctccagcagctgctgcgctggatggatatatcccaggaattcatcgcacatttagaggccgtggtttccagcggcagggttgagaaatcgccccacgaacaagagatcaaattctttgccaaaatcctgcttccactcataaatcagtactttacaaatcactgtctgtatttcttgtcaacccccgctaaggtgctgggttctggaggtcacgcgagcaacaaggagaaagaaatgataacttcgttattttgtaagctggccgcattggtccgtcacagggtgtccttgtttggtaccgacgctccggcagtggtaaattgccttcatattctggctcgatctcttgatgcgaggacggtcatgaagagcgggcctgaaatcgtaaaggcgggtttgcgcagtttcttcgaatcagcatcagaagacatcgagaagatggtggaaaatctgcgtcttggtaaagtatctcaagcccgtacccaggtcaaaggcgtgggacagaacctgacttacaccaccgttgctctactgcctgtgctgactacactttttcagcacattgctcagcatcagttcggggatgacgtgattctggatgatgtgcaggtgagctgttacaggacactgtgctctatatactcgctgggaacgactaaaaatacttatgtcgagaagctgcggccagccttgggggagtgtctcgccaggctggccgctgctatgccagtcgccttcttagagccccagctgaatgagtacaacgcatgctcagtctacacaacaaagagccctcgcgagagggctattctggggctgcccaactcggtggaggagatgtgtccagacatacccgttctggagcggctgatggctgatatcggaggattggccgagtccggcgcacgctacacagagatgccccatgtaattgagataactctccccatgctatgtagctatctgccgcgatggtgggagagaggccctgaagcacccccatccgccctcccagccggagcgccacccccttgtacagcagtgacgagcgaccatcttaattctttactgggaaacattctgcgcatcatcgtgaacaacctgggcatcgatgaagctagttggatgaaaagattagcggtgttcgcacagccaattgtctcaagagcgagacctgaactgctgcagtcacacttcatcccaactatcggccgtctcagaaagagagccggaaaagtggtcagcgaggaggagcagctgagactcgaagctaaggcagaggcacaggagggtgagctgctcgtcagggatgagttttctgttttgtgtcgggatctttacgccttatatcccctgctcatccggtacgttgacaataaccgggcacagtggttgaccgagcctaatcctagcgcggaggagctttttcggatggttggggaaatctttatctactggtctaaaagccataatttcaagcgggaagaacagaactttgtcgtccaaaatgagataaacaatatgtctttcctcacggccgacaataagagtaaaatggcaaaggccggagatatacaaagtgggggaagtgaccaagaaagaacgaaaaaaaaaagacgcggtgaccggtattctgtgcaaactagtcttatcgtcgctacactgaaaaaaatgctgccaatcggattgaacatgtgcgcaccaactgatcaggatctcatcacactggccaaaacccgctacgcgctgaaagataccgacgaagaagttcgcgaatttcttcacaataacctgcatctccagggcaaggtggagggtagcccttccctacgctggcagatggcactgtataggggtgtccccggaagggaagaggatgccgacgacccggaaaaaattgtgcgcagagtgcaagaagtgtccgccgtcctgtattacctagatcaaaccgagcacccatacaagtctaagaaagcagtatggcacaagctgttatcaaagcagcgcaggagggcagtggtggcatgtttccggatgacccccctgtataacttgcccacccaccgtgcttgtaacatgtttctggagtcctacaaagcagcgtggatacttaccgaagaccactcttttgaagacagaatgatcgatgatctctcgaaggccggagaacaggaggaggaagaagaagaagtggaggagaagaagcccgaccctcttcaccagctggtcctgcatttcagcaggactgccttgacagagaaatctaagctggacgaagactacctgtacatggcatatgcagacattatggcaaaatcttgtcacctggaggagggcggagaaaacggcgaagccgaagaagaagtagaagtttccttcgaagaaaaacagatggaaaaacagcgcctcctgtaccagcaggcacgacttcacactagaggagctgcagaaatggtgctccagatgattagtgcatgtaagggcgagactggggctatggtatcctccacactcaaattgggtattagtatactgaatggcggtaacgcggaagtccagcagaaaatgttggattacctgaaagataagaaagaagttggcttctttcagagcattcaagcattaatgcaaacatgcagcgtactggatctgaatgcattcgagagacaaaataaagccgaagggcttggcatggtgaacgaagatggcactgtgattaatcggcagaacggagaaaaggtgatggcagacgacgaattcacccaggacctctttcgtttcctgcagcttctctgtgagggccataacaacgattttcagaattatctgcggactcagacagggaacacaaccactatcaacattatcatttgtacagtggactacttgcttcgcctgcaggagtcgatatcggacttctattggtattattccggtaaagacgtgatcgaggagcagggcaaaagaaacttctcaaaggcaatgagtgtggcaaagcaggttttcaattccctcaccgagtatattcaaggaccatgcactggtaaccaacagtcactggcccactcccgactgtgggacgctgtcgtcggtttcttacacgtgtttgcccatatgatgatgaagcttgcccaggattctagccagatcgagctgttaaaggagttgcttgacctgcaaaaggacatggtggtcatgctgctgtccctcctggaaggcaacgtcgtcaatgggatgatagccaggcagatggttgatatgctcgtagaaagttcatccaatgtcgagatgattctcaagttctttgatatgtttctaaagctgaaagatatcgtgggaagtgaagctttccaagattatgtgacggaccctcgcggtttgatcagcaagaaagatttccagaaggctatggactcccagaagcagttcagcgggcctgagatccagttcctgctgtcatgttctgaagctgatgaaaatgaaatgattaattgcgaagaattcgctaaccgattccaggaacccgcaagagacatcggattcaacgtggccgtccttctgacaaatttgagtgagcatgtgccccacgatccccgactccataattttttagaattggcagaatcgattctggagtatttcagaccttatctgggcaggattgaaattatgggagcctcccgcaggatagagagaatttattttgagatcagtgagacaaacagagctcagtgggagatgcctcaggttaaagagagcaaaagacaattcatttttgatgtcgtaaacgaaggaggcgaagccgagaaaatggaacttttcgtcagcttctgcgaagacaccatctttgagatgcaaatagccgcacaaattagtgaacccgaaggcgaacccgagacagatgaagatgagggagcaggtgctgcagaggcaggggctgaaggagccgaggaaggagctgctgggctagaaggtacagccgctacagccgctgctggggcaacagccagggtggtggcagctgccggtcgggcactccgcggactgagctaccgcagtttaagaaggcgtgtgcggagacttagacgcctgacagcccgtgaagctgccaccgccgttgcagctctgttatgggccgctgtgactcgcgctggcgctgccggagctggcgctgctgctggcgctctcggactcctttggggaagccttttcggaggcggactcgtggagggagccaaaaaggtgaccgtaacggagctcctcgcaggcatgccagacccaactagcgacgaggtgcatggtgagcaaccggctggccctgggggtgacgctgacggtgagggtgcctctgaaggcgctggagatgcagctgagggtgcgggtgatgaagaggaggctgtgcacgaggctgggccagggggagcagacggagcggttgccgtaacagatggtgggccttttaggccagagggggcaggcggtctgggggatatgggcgacactaccccggctgaaccaccaacccctgagggctcccctatcctgaaacgcaagctgggagtagatggcgtggaggaggagctgcccccagaaccagagcccgagccggaacccgagttagagcctgagaaagcggacgcagagaatggcgagaaggaagaggtccctgagcctacccctgaaccacccaagaagcaagcccctccctccccccctccgaaaaaagaagaggccggaggggagttttggggggagttggaagtgcagcgggttaagtttctcaactatctgtcacgaaacttctataccttaagatttttagcgctatttctggcatttgcgattaattttatcctcctgttctacaaagtgtccgactctcctccgggtgaggatgatatggaaggctctgctgctggtgatgtgtctggagctggtagtgggggaagcagcggctggggcttgggagctggggaagaagccgagggggacgaggacgagaatatggtttattacttcctggaggaatcaacaggctacatggaaccagctctgcgctgcctatctctgctgcacacactcgtggccttcctttgcataatcgggtacaattgcctcaaggtccctttggtcattttcaagcgtgagaaggagctagctaggaagctggagttcgacggcctctacatcacagaacagcctgaagatgatgacgtcaagggtcagtgggacagactcgtacttaataccccgtccttcccaagtaattactgggataagttcgtcaagcgcaaagtgcttgacaagcacggcgacatttacggaagagaacgaattgccgagctgctgggaatggatctggctactctggagataaccgcccataatgagagaaaacctaacccaccccctggcctactgacctggctgatgtcaattgacgtgaaataccagatatggaaatttggggtcatatttaccgacaattctttcctttatctggggtggtacatggttatgagtcttctaggacactataataacttcttctttgcagcccacctactggacatcgccatgggagttaagactctgaggactatcctttcaagtgtgactcataacggcaagcagctggttatgacagtgggtctgttggccgtggtggtgtacctgtatacagtggtggccttcaatttttttagaaagttctacaacaagagtgaggatgaggatgaacccgatatgaagtgtgatgatatgatgacttgttacctgttccatatgtacgtgggcgtgcgagcagggggaggcatcggggatgagatagaagatcctgctggcgatgaatacgaactgtaccgcgtcgtttttgatatcacattcttcttttttgtcatcgttatattgctggctattatccagggcctgatcatcgatgccttcggtgagctgagagaccagcaggagcaggtgaaagaggacatggaaaccaaatgctttatttgtggaatcggtagtgactactttgacactacgccccatggcttcgagacccatacactggaagagcacaacctggctaactatatgtttttcttgatgtacctgattaataaggacgaaacagaacacaccggccaggagtcttacgtgtggaaaatgtaccaagaacgctgctgggacttcttcccggctggcgactgcttcaggaagcagtacgaggatcaactctcttaa

SEQ ID NO: 239501 - DNA, 15102 bp, synthetic construct
  misc_feature 1..15102: note = Description of Artificial Sequence: Synthetic coding sequence
  source 1..15102: mol_type = other DNA
atgggggacgctgagggcgaagatgaagtgcaattccttcgaacagacgacgaggtggttctacagtgttccgccaccgtgctgaaggagcagctgaagctgtgccttgctgccgagggtttcggcaacagattgtgtttcctggagcccacttccaatgcacagaacgtgccccctgatttggccatctgctgctttgtgttggagcagtcccttagtgtgcgggcactgcaggagatgttagctaataccgttgaggccggtgttgagagttcccaaggcggaggacatagaaccttgttgtacgggcatgccattctgttgagacacgcgcactctagaatgtacctatcttgcctgacgacatctcggtcgatgacggataagctggcttttgacgtgggtctgcaggaagatgccacaggcgaagcctgctggtggaccatgcacccggcaagcaagcagagatccgagggtgagaaggttagggtcggagatgacatcatcttggtatccgtgagctcggagaggtacttgcacctgtccaccgcttccggcgagctccaagttgatgcatcatttatgcagacattgtggaacatgaatccaatttgtagtagatgtgaggaggggtttgtcaccggtggccacgtcttgcgtttgttccacgggcatatggacgagtgtctcacaatctcccctgccgactcagatgaccaacgcagactggtgtactatgaaggaggcgctgtatgcacacacgcacgctccctttggaggctggagccactaaggatatcctggtctggatcccatcttcggtggggacaacctctgagagtccggcacgttacgactggccaatatttggccctcaccgaggaccaaggactagtcgtggtcgacgcaagtaaggcccacaccaaggccacttctttttgtttcagaatctcgaaggaaaaactcgacgtggcacctaagcgtgacgtcgaaggcatggggcctccagaaatcaaatatggagaatctctgtgctttgtgcagcacgtggcttccggtctgtggcttacatacgccgcacctgaccccaaagcactgcggctgggcgtactcaagaagaaggcaatgctacaccaggagggtcatatggatgatgcactaagcctgacccgttgccaacaggaagagagccaggctgctcggatgatacacagtaccaatggattatataaccagttcattaaaagcctggacagcttttcaggcaaaccgcgaggtagcggcccacctgcaggaaccgcgctacccattgagggggttatcctgagcttacaggacttaataatctacttcgagcccccaagcgaggacctgcagcatgaagaaaaacaaagcaagcttaggagcctcaggaaccgtcagagcctctttcaggaagaagggatgctgtccatggtgctgaattgtattgaccggttaaacgtctacaccactgctgctcacttcgccgaattcgccggagaggaagctgccgagagctggaaggagatcgtcaaccttctgtacgagctacttgcaagcctcattcggggtaatagatctaattgcgcactgttctcaaccaatctggactggttggtgtcaaagcttgatcgtctcgaagcctctagtggtattctcgaagtattgtattgcgtgctgatcgagtccccagaggtcttgaacatcatccaagaaaaccatatcaagtccataatatcactactggacaagcatggtcgaaaccataaggtgttggacgtgctgtgtagcctgtgtgtgtgtaacggcgtcgcggttcgatcgaatcaggaccttataacagaaaatttgcttccgggtcgcgagctcttattgcagacgaacctcatcaactacgtgacaagcatccggcctaatatcttcgttgggagggccgaggggacaactcagtatagcaagtggtactttgaagtcatggttgacgaggttacccctttcttaacagcacaggccactcatcttcgcgtgggatgggctcttaccgaaggatataccccgtaccccggtgcaggcgaggggtggggcggaaacggagtgggagatgacctttactcctatggcttcgatggcctccacctgtggacaggccacgttgccaggccggtgacaagcccgggtcagcacttgctggcgcctgaggacgtgatctcttgttgtcttgatttatcagtgccctccatctcattccgcatcaatgggtgccccgttcagggagttttcgagtctttcaacttggatggcctgttcttcccagttgtctctttctctgcaggcgttaaagtgaggtttctactgggtggccgacacggcgagttcaagttcctccctccgccagggtatgccccttgccatgaggctgtgctgcctcgcgaaaggcttcacctcgagcccatcaaggagtatagacgggagggccctagagggccacacctagtaggacctagtcgatgcctgagccacaccgatttcgtgccttgtccagtagatacagtgcagatagtactgccaccacatttggaacggatccgggagaaactggctgaaaatattcacgaactgtgggctttaacccggattgagcagggctggacgtatggccctgtgcgggacgataataaacgactgcatccatgtctggttgactttcactcactgcctgagcccgaaaggaactataacttgcagatgagtggcgagaccctcaaaactctgttagccctggggtgtcacgttggcatggctgatgaaaaggccgaagacaatctcaagaagacaaagctccccaagacctacatgatgtccaatggttataaacccgctcccctggacctttcccacgttagactgaccccagctcagacgacgctggtggatcgcctggccgaaaacggccataatgtttgggccagagatcgtgtagggcaggggtggagttacagcgccgttcaggatatcccagctcgtcggaatcccaggctagttccttataggctcctagacgaggcaacaaagaggtccaaccgcgattccttgtgccaagcagtcagaaccctactggggtatgggtataacattgaaccgcctgatcaggaaccatcacaggtcgagaaccaaagcagatgcgacagggttaggatcttcagggccgaaaagtcctacaccgttcagtctggccgatggtattttgagttcgaggccgtcaccacaggcgaaatgcgagtggggtgggccagacccgagctgcggccagacgtagaactcggagctgacgaattagcctacgtcttcaatgggcatcgtggccagcgttggcatttgggcagtgagccttttggcagaccatggcagcctggggatgtcgtgggctgcatgatcgacctgaccgaaaatactatcatcttcacccttaacggagaggttctgatgtcagacagcgggtctgaaaccgctttcagagaaatagagattggcgacggtttcctgcccgtttgtagcctaggcccaggacaggtgggccacctgaacctggggcaggacgtatcatccctcagattctttgccatttgtggcctgcaggagggctttgaaccatttgctatcaacatgcaacggccagtaacaacctggttctctaagggactcccacaattcgaacccgttccactcgagcacccccattacgaggtgagtcgggtggacggtacagtcgatacccccccttgtcttcgcctaacacatcgcacctgggggagccagaacagtctcgtcgaaatgcttttccttcgcctgtccctccccgtgcagttccaccagcatttccgctgtacggccggagccacacccttagccccacccggactgcagcctcccgctgaggacgaggccagagctgctgagccagatcccgattacgaaaaccttcgcagaagcgccggaggatggagtgaggcggaaaacggcaaggaaggaaccgcaaaagagggcgcaccaggcggaacaccgcaggctggcggtgaggcacagccagccagagccgaaaatgaaaaagacgccacgacagaaaagaataagaagcggggattcctgttcaaggctaagaaggtcgcgatgatgacacagcccccagctactcccactctccccagactgccccacgacgtcgtgccagctgacaatagggatgaccctgagatcatcctgaacactaccacctattactacagcgtgagagttttcgcgggtcaggagcccagttgcgtctgggccggttgggtgaccccagactaccatcagcatgatatgagttttgatctctctaaggtgcgcgtagtgaccgtcacaatgggcgatgagcaggggaacgtacattcctctcttaaatgttccaactgctacatggtttgggggggagactttgtgtctccaggacagcaggggaggatctcccacaccgacctcgttatcggatgtctggtggacctcgcaactggcctgatgacattcactgcaaatggcaaggagtctaacacttttttccaggtcgaaccaaacaccaagctgttcccagccgtgtttgttcttccaacccatcagaacgtgattcagtttgaactgggtaagcagaaaaacattatgccccttagtgcagctatgttccaatccgagaggaagaatccggcacctcaatgtccccctcgcttggagatgcagatgctgatgcccgtcagctggtctcggatgcctaatcatttcctgcaggttgagacccggagagcaggagaacgcctaggatgggcagtgcagtgtcaagagccattgactatgatggcactccacatcccagaggagaatcggtgtatggacatactggaactgagcgagcgccttgacctgcagagattccattctcataccctgcgcctctatagggctgtgtgtgccctgggcaacaatagagtcgcacacgcactgtgctcacatgtcgaccaggctcagttgctccacgcgcttgaagatgctcaccttccagggccactgcgggcaggatactacgacttactgatttctatacatctggagtcagcctgcagatcccgacggagcatgctctcggagtacattgttccactcacacccgagactagagctattaccctctttccacccggtaggtccacagaaaacgggcacccccgacatggcctgccgggagttggggtaactactagcctgcggcctccacaccacttttctccgccttgtttcgttgcagccttacctgccgctggcgctgccgaagcacccgctcgcctttctcctgccatccctctggaggccctccgcgacaaagctttgaggatgctcggagaggcagtgcgagatgggggtcagcatgccagggacccagtgggcggatctgtggagtttcagttcgtccccgttctgaagctggtttccacactgctcgttatgggcattttcggggacgaagatgtgaaacaaatcctaaagatgatcgagccagaagtctttaccgaggaagaagaggaggaggatgaagaggaagaaggcgaggaagaagacgaggaagaaaaggaagaagacgaagaggagacagcacaagagaaggaggacgaagaaaaagaagaagaagaggcagcggaaggggagaaggaagagggtttggaagagggtctgctgcagatgaaattgcctgaatccgtgaagttgcagatgtgccatctcttggaatacttctgtgatcaggagctgcaacatcgggtcgagtccttagcagcatttgccgagcggtacgtggataaacttcaggccaaccagcggagtagatatggcttactaattaaggccttctccatgaccgcagctgaaacagctcggcgaactagggaattccgctcgcccccacaagagcagattaacatgctcctgcagtttaaggacggtaccgatgaggaggattgccctttgcctgaagaaataagacaggacctgctcgacttccaccaggatctcctggcacactgtgggatccagttagatggagaggaagaagagcccgaagaagagaccacactagggtcaagactgatgtccctcctcgagaaggtgcgattggtcaaaaagaaggaagaaaaacccgaggaggagagatcagcagaggaaagcaaaccccgaagcctgcaggagctggtgtctcatatggtggtgaggtgggcccaggaggatttcgtgcagtcacccgagctggttcgggcaatgttctctctgctgcatagacagtacgacgggctgggcgagctgctgcgagcacttccaagagcatacactatttcgcccagcagcgtcgaggacaccatgagtttactggagtgtctgggccagatccggagcctgcttatagtgcaaatgggtccccaggaggaaaacctgatgatacaatctattggaaatattatgaacaataaggtcttctaccagcatcccaatctgatgcgtgcacttggcatgcacgagactgtgatggaggtaatggtcaacgtcctgggcggtggcgagtcaaaagaaatccggttccctaagatggtgacgtcctgttgcagattcctttgttatttttgcaggatctctcgtcagaaccagaggtctatgttcgatcatctcagctacttgctagaaaattccgggattggcctgggaatgcagggctctactccattagatgtggccgcagcatccgtgatagacaataatgaacttgcgcttgccttacaggaacaggatctggagaaggtagtgtcgtacctcgccggatgtggcctgcagtcgtgtccaatgctggtcgccaaaggctatcctgacattgggtggaatccctgcgggggtgaaaggtatctcgatttcttgcggtttgccgtgttcgtgaacggtgagagtgtggaagaaaacgctaatgtagtagtgagattgttaatccgaaaaccggaatgtttcgggccagccttgcgaggcgaggggggatcggggctcctcgcagcgattgaggaagcaatcagaattagcgaagatcccgcacgggacggcccaggcatacggagagatcggcgaagagagcacttcggtgaagaacctccagaagagaaccgggtacatttgggacacgccataatgtctttctacgccgcattaatagacctgctcggaagatgtgccccagagatgcacctgattcaggccggtaagggcgaagcacttagaatacgcgctatcctaaggtccttggtccctctcgaagatctcgtgggcattatctcactccccttacagattccaactttggggaaagacggcgcactggttcaacctaagatgtctgcatcttttgtgccggaccacaaggcaagtatggtgctcttcttagatcgagtgtatgggatcgaaaaccaagatttcttgctgcacgtgctggacgtgggttttctacctgacatgagggctgccgctagcctggacaccgctaccttctcaactaccgagatggcattagcacttaatcggtacctgtgtcttgccgtgctccctctaataacaaagtgcgcaccattgttcgccggtaccgaacatagagcaattatggttgactctatgctccacactgtctacagattgtccagaggcaggagcttaactaaagcccagcgggatgtaatcgaggattgcctgatgtccttgtgtcgttacatcagacctagcatgctgcaacacctgcttagaagactggtctttgatgttccaattttaaacgaattcgccaaaatgcctctgaagctccttacaaaccattacgagcggtgttggaaatattattgcctacccacggggtgggctaatttcggcgttacatcagaagaagagttgcacctgacacgcaaactgttttgggggatattcgattctttggcccacaagaaatatgaccccgagctctatagaatggccatgccgtgcttatgtgcgattgcaggtgctctgcccccagattatgtcgatgcctcttacagtagcaaggcagaaaaaaaggccacagtcgatgctgaaggaaattttgacccaaggcctgtcgagaccctcaacgtcattatccccgaaaagttggactctttcataaataaattcgcggagtatacacacgagaaatgggcatttgataagattcaaaataattggagttacggcgagaatatcgatgaagagctcaagacccaccctatgctccgaccttataagaccttttcagagaaggacaaagagatttatcgctggcccatcaaagaatcactgaaggccatgatagcttgggagtggaccatcgaaaaggccagggagggagaggaggaaaagaccgagaaaaagaaaaccaggaaaatttcccagtctgcccagacctacgaccccagagagggctataatcctcaaccaccagacctgagcgccgtgactctgtctcgagagttgcaggccatggccgaacagctcgcagagaattaccataatacatggggtcgaaagaagaagcaggaattagaagccaaaggcggaggaacacatcctctgctggttccatacgacaccttgactgcaaaggagaaagctagggacagagaaaaggcacaggagctcctcaagtttctgcagatgaacggttacgccgtaaccagaggactcaaggatatggagctggactcttcgtccattgaaaagcgctttgctttcggattcctacaacaactgcttcggtggatggatatctcccaggaatttattgcacatctcgaggcggtagtcagctctgggcgtgtcgagaagtcccctcacgagcaagaaatcaagttcttcgccaagatactcttgcctctaatcaaccagtactttactaatcattgcctgtatttcctgtctacccccgctaaggtcctgggctccggcggacatgcttctaacaaagaaaaagagatgattaccagcctgttttgcaagctcgcagccttagtgaggcatagggtctcacttttcgggactgatgcaccagccgtggtgaattgtctccatatcctggcaaggagcctggacgcacgcaccgtaatgaaatctggaccagaaatcgttaaggctggcctgcgtagcttttttgaatccgccagcgaggacatagaaaagatggtagagaacttaagactgggtaaggtgtcacaggcccgaactcaagtaaagggagtcggacagaacttgacctatacaactgttgccctgctgcccgtgctgacaacgctctttcagcacatcgctcaacatcagtttggggacgacgtgatcctggatgacgttcaggtaagttgctataggactctgtgttccatttattctttgggaacgaccaaaaacacctacgtggagaaactgagaccagctctgggagaatgcctggcccgactcgctgccgcaatgccagtagcttttctcgagccgcagctgaatgaatataatgcatgttcagtatacacgactaagagcccgagggagcgcgctatccttggcctgcctaattctgttgaggaaatgtgccctgatatacctgtgctcgaaaggcttatggcagacatagggggtcttgccgagtcaggagccagatataccgaaatgccacacgttattgagattacgttaccgatgctgtgcagctacctccctaggtggtgggagaggggccctgaggctcctccgagtgccctgcctgcgggagctccaccaccctgcactgcggtgacttcggaccaccttaatagcttattggggaatatcctccgcatcattgtgaataacctcggcatcgacgaggcatcctggatgaagagactggctgtgtttgctcagccaatagtaagcagggccagacccgaattattacagagccacttcatacccacaataggtcgactccgcaaacgcgcaggaaaagttgtgagtgaagaagagcagttgcgtttggaagcaaaagctgaggcccaggagggcgagctgctggtaagggatgagttcagtgtgttgtgccgcgatttgtacgcgctctatccactgctgatcagatatgtcgacaataatagggcccagtggctgacggaacccaacccttcagctgaggagctgtttcgcatggtgggcgagatttttatatactggtctaaatctcataacttcaagagggaggaacagaattttgtggtccagaatgaaatcaataatatgtccttcctgaccgctgataataaaagcaagatggcgaaagccggtgatatccagtccggtggcagtgatcaggagagaacaaagaaaaaacgacgaggggacagatatagcgtgcagaccagcctgatagtagccacattaaaaaagatgttgcctatcgggctgaatatgtgtgcacccaccgatcaagatctaatcacccttgccaagacaaggtatgccctcaaagacactgacgaggaggtccgcgaattcttgcataataacttgcacctgcagggtaaagttgaagggtcaccgtcactgagatggcagatggcattgtaccgtggggtgccagggagagaggaggatgctgatgatcctgagaagattgtgcgccgagtgcaggaggtatctgcagtgttgtactacctcgatcagacggagcatccgtataagagtaagaaggcagtctggcataagctgttatctaagcagagacggagggccgttgtcgcgtgttttcgcatgacccctctgtataatctgccgacacaccgcgcttgcaatatgttcctagaatcttacaaagcggcttggattctcaccgaggaccactctttcgaggacaggatgatcgacgatctgtccaaagcaggcgagcaagaagaggaagaggaggaggtggaagaaaagaaacccgaccctctgcaccagctggtcctgcacttcagcaggacagcactgaccgagaaatcgaagcttgacgaggactacctatacatggcctacgctgatatcatggccaagtcatgtcacctggaagagggcggagagaatggcgaagctgaggaggaggtggaggtgtccttcgaggaaaaacagatggagaaacaacggctgttgtatcagcaagcacgtctacacactcgcggagcggctgagatggtgctccagatgatttcggcctgtaaaggcgagaccggggcaatggtgagttcaacactgaaactcggtattagcattctgaacggaggcaacgcggaggtgcagcagaaaatgcttgattacctaaaagacaaaaaagaagtgggtttttttcagagcatccaggccctgatgcagacctgtagcgtgctggaccttaatgccttcgagcgacaaaataaagccgagggcctggggatggtaaatgaggacggaaccgtaggcgaaaaggtgatggctgatgacgaatttacacaagacctgtttcgatttctccagttgctctgtgaaggacacaataacgactttcaaaattatctgagaacccagacgggtaacacaacaacaatcaacattataatttgcactgtcgactatctcctcagactccaggaaagcatcagtgacttctattggtattattccggaaaagatgtgatcgaggaacaagggaaacgtaacttctctaaagctatgtccgttgccaaacaagtgtttaatagcttaactgagtatattcaaggtccctgcacaggaaaccaacagagtctggcgcactcacgcctgtgggatgccgtcgttggatttctgcatgtttttgcccatatgatgatgaagttagctcaggacagttcccagatcgagcttctcaaagaacttcttgacctgcagaaagatatggtggtaatgttgctgtctctcctcgagggaaacgtcgtgaacggaatgattgccagacaaatggtggacatgcttgtggaatccagcagtaacgtggagatgattttaaaattcttcgatatgtttttaaaattaaaagacattgtgggaagcgaagcgttccaagattacgtgactgaccccagaggattaatctcaaagaaagattttcagaaagccatggactcacagaagcagtttagtggccctgagattcagttcttgttgagctgctctgaagcggacgagaacgaaatgatcaattgtgaggagtttgccaatcgctttcaggaacctgcacgagacattggctttaacgttgctgtcctgctcactaacctgtcagaacacgtaccccacgacccaaggctgcacaatttcctggagctcgctgaaagcattcttgagtacttccgcccatatctgggcaggatcgagatcatgggagcttcacggcgtatcgagagaatttattttgaaatctccgagaccaaccgggctcagtgggaaatgccccaggtaaaagagagtaaacggcagtttattttcgatgtcgtcaacgaggggggagaagccgaaaaaatggagctgtttgtaagtttctgtgaggatacaatcttcgaaatgcaaatagcggctcagatcagtgagcccgagggcgaaccggagacagatgaagatgaaggagcgggagcagccgaagccggagccgagggagccgaagaaggggcagcaggacttgagggaacagctgccaccgccgctgccggagctacagcacgagtcgtggctgcggctgggagggccctgcgtggtctgtcctatcggtctctgaggcggcgagttcgtcgcctgcggagactgacggccagagaggcagcaaccgctgtggccgcattactgtgggcggctgttactcgagcaggcgctgccggagccggtgccgctgcaggagcccttggcttgctgtggggttcactgttcggtggcggtctggtggagggcgctaaaaaagtgactgtcacagaactgctcgccggtatgcccgatccaacgtctgatgaggtgcacggcgaacagcctgctggcccaggaggagatgcggacggcgagggcgcttccgagggggctggagacgccgcagagggggctggtgacgaggaggaagctgtccatgaagccggtccaggaggggctgatggtgccgtcgccgtgactgatggcggaccctttcgtcctgaaggggctggcggactcggcgatatgggcgatactaccccagccgaaccacccacccccgaaggatcccctattttaaaaaggaaactgggagtagatggcgtagaagaagagcttcccccagagcccgaaccagagcctgaaccggagctcgagccagaaaaggccgacgcagagaatggggagaaggaggaggtgccagaaccaactccagagcccccaaaaaagcaggcccctccgagtccacctccaaagaaagaggaagctggcggagaattttggggagagctggaagtgcaacgagtgaagtttctaaattacctctcccgcaacttttacacactgcgtttcctggctcttttcctcgcctttgctattaattttatccttctattttataaggtcagcgatagccctcctggggaggacgatatggagggcagtgctgcgggagacgtatcaggcgcaggcagcgggggtagtagcggttgggggttgggcgctggggaggaggcagagggggacgaggacgagaacatggtttattactttctagaggaaagcactggctatatggagcccgcacttaggtgtttgtcccttcttcataccttggtggcctttctgtgtattattgggtataattgcctgaaggtgccactcgtgatctttaagcgggagaaggaactcgcaagaaaactggagtttgacggcctttacatcaccgaacagcccgaagatgacgatgtcaagggccagtgggacaggcttgtgctgaataccccctccttcccaagcaattactgggataagtttgtcaaacgaaaggtcctggacaagcatggtgacatttatggacgggagcgcatagccgaattgcttggcatggacttggccacgctggaaatcacagcccacaatgagcggaaacccaatcctccccctggcttgcttacatggcttatgtcgatcgacgtgaaataccagatttggaagtttggagtgatttttacagataactcttttctctatcttggatggtatatggtgatgtcactactcggacattacaacaatttcttcttcgctgcacacctgctggacattgcaatgggcgtaaagaccctacgaactatcctgtcgtctgtaacccataacgggaagcaacttgtcatgactgtggggctcctggcagtcgtggtctacctatatacagtcgtggccttcaattttttccgcaagttctataataaatctgaggacgaggatgaacccgatatgaaatgtgatgatatgatgacttgttatctgttccatatgtatgtgggagtccgcgcaggcggaggcattggagacgaaattgaggatcccgcaggagatgagtatgaactgtatagagtcgtgttcgatataaccttctttttttttgtgatcgttatcctcttagcaatcatccagggactaatcattgacgcattcggggaattaagagatcagcaggagcaggtcaaggaggatatggaaaccaaatgcttcatatgcggcattgggagcgattacttcgacaccactcctcacgggtttgagacacacactctggaagaacacaatctcgctaactacatgttttttctaatgtacttaatcaacaaagacgagactgagcataccggccaggaatcatatgtttggaagatgtatcaggagaggtgttgggacttcttccctgcaggagactgctttcggaaacagtacgaggaccagctctcatag

SEQ ID NO: 239502 - DNA, 2031 bp, synthetic construct
  misc_feature 1..2031: note = Description of Artificial Sequence: Synthetic coding sequence
  source 1..2031: mol_type = other DNA
atgaaaagcggccctgaaattgtcaaggcgggtttgcgttccttttttgagtctgcttctgaggacattgaaaaaatggtggaaaatctcaggctcggtaaggtcagtcaggctaggacccaggttaagggtgtgggccagaaccttacatacaccaccgttgcactgctgcctgtacttactaccctgtttcagcacattgcccagcaccaattcggtgacgatgtgatcttggatgatgtgcaggtcagctgctaccggacactgtgttctatttattctcttgggacaacaaaaaatacatatgttgagaaactcaggcctgcccttggagagtgccttgctcgactggcggctgcaatgcctgtggcttttctcgagcctcagctcaacgagtataatgcttgttctgtgtatacaacgaagtctccccgagagcgtgcaatacttggactgcccaacagtgttgaggaaatgtgccctgatattcctgtcttggagcgtctaatggcagacattggcggtctcgctgagagtggggcacgctataccgaaatgccacacgtaatagagataacgctcccgatgctgtgttcctacctccccaggtggtgggaaagaggacctgaagcacctcccagtgccctccccgcaggagcccctcccccttgtacagccgtgaccagtgaccaccttaactccttactgggaaatatactcaggatcatcgtgaataacttgggcattgacgaggcaagctggatgaagagacttgcggtctttgctcagccgatcgtgtctcgcgctcgtcccgaacttcttcaaagccactttataccaacgatcggaaggcttcgtaagcgcgctggtaaagtggtgagtgaggaggaacaactccgactcgaagctaaggccgaggcgcaggagggggagctgctcgtccgggatgagttctcagtgttgtgccgggatctgtacgctctgtacccgcttcttattcgctacgtcgataataaccgcgctcagtggctgaccgaacccaaccccagcgctgaggagctgtttagaatggtgggcgagatttttatctactggtctaaatcccacaactttaagcgggaggaacagaatttcgtggtccagaatgaaataaacaatatgagttttttaactgccgataataagagtaaaatggcgaaagcgggtgatattcagtctggaggctctgatcaggaaagaacaaagaagaagagacgcggagatagatacagtgttcaaacaagcctgatcgtggccactttgaagaaaatgctgccgattgggcttaacatgtgtgcccctactgatcaggatttaattacactggcaaagactaggtatgctctgaaggacaccgatgaggaggtgcgggagttccttcataataacctgcacctgcaagggaaagtcgagggaagcccctccttgcggtggcagatggctctctaccggggagttcccggtcgggaagaagacgctgacgatcccgagaagattgtccggcgagtacaggaggtgagcgcggtattgtactatctcgaccagaccgaacacccgtataaatctaagaaagcggtctggcacaagctgctcagcaagcagcggagaagagctgtggtcgcctgctttcggatgacgcctctttacaacttgcctactcaccgagcctgtaatatgtttctagaatcctataaggcagcctggattctgaccgaggaccactcctttgaggaccggatgatagacgacctatccaaggctggcgagcaggaggaggaggaagaggaggtagaggagaagaagccagatcccctccaccagttggtactccattttagccggacagctctgaccgagaagtccaaactagacgaagattatttgtatatggcatatgccgacatcatggcaaagtcttgtcacctggaagaaggtggggagaatggggaggctgaagaagaagtagaagtttcattcgaggaaaaacagtag

SEQ ID NO: 239503 - DNA, 14922 bp, synthetic construct
  misc_feature 1..14922: note = Description of Artificial Sequence: Synthetic coding sequence
  source 1..14922: mol_type = other DNA
ctcgggccaagatcctcctctaataaactctcaaacaagaagatgatgaagtggttctgttcagcgccacagccaagtactaaaaacaaccgaagttacgcttggcagcagaaggatctggccacggacttcgtgagttggtcgccactgcctattccacggatgtgcccccaaacaagcccctctgcgccactgtgttggtcaagccctagcctctctgggagatgtcggagatgctggctgacgccgtggcgcaaccagaaaggccagttggatattatcaaatggtccttcggactgaagacagcccaggggggaggccaccggacgcttctgtatggtcacgcaattctgttgcggcattcctatagcgggatgtacctgtgttgcctgtccacatctaggagcagtaccgataaactggccttcgacgtgggactccaagaggacacaacaggtgaagcatgctggtggacgatacatcctgccagtaagcaacggagtgagggggaaaaagttagggtgggggatgatctgatcctcgtctctgtgagtagcgaacgctatctgcacttatcatacggaaacggatcgctgcacgtcgacgcagcctttcagcaaactctctggagcgtggcccctatatcatccggatcagaagccgcacagggttaccttatcggcggtgatgtgctgcggctactgcatggacatatggacgagtgccttaccgttcctagcggcgaacacggagaggaacagaggagaaccgtgcattacgaaggaggtgcagttagcgttcacgcacgctctttatggcgactggaaactttgcgcgtggcatggtccggatctcacattaggtgggggcagccgttccgcctccggcacgtgaccaccggaaaatatctgagcttgatggaggacaaaaacttgctcttgatggacaaagaaaaagccgatgtgaagtcaacagctttcacttttcggagcagcaaagaaaagctcgatgtgggtgtgagaaaggaagtggatgggatggggaccagtgagattaagtacggcgactcagtatgctacatccagcatgtggatacaggactgtggctgacctatcagtcggtggatgtaaagagtgtacggatgggttccattcagcggaaagcaattatgcaccatgaggggcacatggacgacggaattagcttgagccggagtcagcatgaagaaagccggaccgcgcgagttataagatctacagttttcctgttcaatcgattcatccgaggcctcgatgccctgtcgaagaaagcaaaagcttccaccgtagatcttcccatagagtccgttagtttgagtcttcaggacttgattgggtactttcatcctccggatgaacacctggagcatgaggataagcagaataggctgcgagccttgaagaaccggcaaaacttgttccaggaggagggcatgattaaccttgtactggaatgtatagataggctgcatgtctactcatcggcggctcacttcgccgacgtcgctggtcgtgaggcaggcgaatcctggaagtctattctcaattccttatacgagctgctggccgctctgattagaggtaatcgcaaaaattgcgctcagttctctggctctctggattggttgatcagtcggttggagcgattggaggctagttctggcatcctggaggtcctccattgtgtgctagtcgaatccccagaggcattgaacatcataaaggagggccatattaaaagcattattagcctcctggacaaacacgggaggaatcataaagtgctggacgtcctgtgctccctgtgcgtgtgtcacggggttgctgttcgtagcaatcagcatctgatatgcgataatttattgcccggaagagacctgctgctgcaaacccgactggtgaatcacgtttccagcatgcgccctaacattttcttaggcgtgtctgaaggctccgcccaatacaagaagtggtattatgaactgatggtagaccacactgaaccgtttgtgacagccgaggccacacacctgagagttggatgggctagcacagaagggtattctccctatcccggtgggggagaggaatggggtggtaatggtgtaggggacgatctcttttcctacggttttgacggcttgcatctctggagtggatgcattgcaaggactgtctcaagtcctaaccaacatcttctccgcacggacgacgtgatttcctgctgtctggatctgtccgcaccctcaattagttttagaatcaatggtcagcctgtgcagggaatgtttgaaaattttaacatcgatggtctcttctttccggtggtgagcttctccgccggaatcaaggttcggtttctgctcggcggaaggcatggcgaattcaagttcctcccaccgccagggtatgcgccatgctacgaggccgttttaccaaaagagaagctgaaggtcgagcactctcgggagtacaagcaggagcgaacttacacccgggacttactgggaccaaccgtgtctttgacccaggcggctttcaccccaattcctgttgatacgagccaaattgttctgccaccgcacctggaaagaatccgggagaaacttgccgaaaatattcatgagctgtgggtgatgaacaagatcgagctgggctggcagtacggcccagtccgcgacgacaacaaacgccagcacccatgtttagtggaattctccaaactacctgagcaagagcgtaactacaacctgcagatgtctttggagactcttaaaaccctgctggccctcggatgccatgttggaatctcggacgaacatgccgaagacaaggtgaagaaaatgaagctaccgaaaaattaccagctcacttcaggttataagcctgccccaatggacctgagtttcatcaaactgaccccctcccaggaagcgatggttgacaaactagccgagaatgcccataatgtctgggccagagacagaattcgccaggggtggacatatggaatccaacaggacgtcaagaatcgacgaaatcccaggttggtgccttacactctactggatgatcgcacaaagaagtcaaacaaggattctctgagggaagccgtaagaacacttctgggatatggatacaatctggaagctccggatcaggatcacgctgctcgagccgaggtgtgctcagggacaggagagcggtttcgaattttccgagctgaaaagacttatgctgttaaagcaggacggtggtacttcgagttcgagaccgttacagcaggcgatatgcgagttggttggtctcggccaggctgtcagcctgatcaggagttaggctctgatgaaagagcgttcgcctttgacggtttcaaggcacagcggtggcaccagggaaatgaacactacggacggtcatggcaagcaggagacgtggtggggtgtatggtggacatgaacgagcacacgatgatgtttacactcaatggagagattctcctcgatgactcaggctctgagctcgccttcaaggacttcgatgtgggagatggttttatacctgtgtgctcgctgggggttgcgcaggtcggtagaatgaatttcgggaaggacgtatccacattaaagtacttcacgatatgtggattgcaggagggctatgaacctttcgctgtcaacacaaatagggacattaccatgtggctgagcaagcgcctccctcaattcctgcaggtaccatcaaatcatgagcacattgaagtgacccgcatagatggaaccattgactcctcaccctgcctgaaggtgacacagaagtccttcggcagccagaattcaaatactgacatcatgttttaccgcctgtcaatgcctattgagtgcgctgaggtttttagcaaaacagttgccggtggactgcccggagccggactattcggaccaaaaaatgatctcgaggattacgatgccgattccgatttcgaagtgctgatgaagactgcacatggacatttggtcccagatagggtggacaaagacaaagaagccacaaagcccgagttcaataaccacaaagattacgcgcaggagaagccatcccgtttgaagcagcggtttttgttgcggcgtactaaacccgactactcaacgagtcatagtgctcgccttaccgaggatgtgctggccgatgacagagatgactacgattttctgatgcagacctcaacgtactactattccgtgagaattttcccaggacaggaacccgctaatgtctgggtggggtggattacttctgacttccaccaatacgacaccgggtttgatctggacagagtgaggactgtgacggtgacactcggcgatgaaaagggaaaagtgcacgagagtatcaagcgcagcaactgctacatggtctgtgcgggagagtccatgagtcctggacagggcaggaataacaatggacttgaaatcgggtgcgtggttgatgctgcgagtgggctgctgacttttattgccaatggcaaggagttgtcaacgtactaccaggtcgaaccgagcacgaagctgttcccagctgtgttcgctcaagccacgagtcccaatgtctttcaatttgaactcggacgaattaaaaatgtgatgcctctgtcagccggattgtttaaaagcgagcacaagaatcctgtgccacagtgtcctcccagattgcacgtacagtttctctcgcacgtactctggtcccgcatgcccaaccagtttcttaaagttgatgtgagccggatctctgaaagacagggctggctcgtccagtgtcttgatcccttacagttcatgtcactgcatataccagaggaaaaccgctctgttgacattttggaactgaccgagcaggaagagctgctaaaattccactaccatactttaagattatatagcgccgtgtgtgctctgggaaaccatcgggtggctcatgctctttgctcacatgtcgacgaacctcagttgctctatgccattgaaaacaagtacatgccagggttactgcgggcaggatattacgacctcttgatcgacatacacctttctagctatgctacagccagattaatgatgaacaacgaatacatcgttccaatgaccgaggagactaaaagcatcacactatttcctgacgaaaacaaaaagcatggcctccccggtattggactctcaacaagcctgaggccaaggatgcagttctcaagtccgtctttcgtgtccatatccaatgaatgctaccagtactcaccagagtttcctctggatatcctgaagtcaaaaactatccaaatgttaacagaagccgtcaaagagggctccctacatgcaagagacccagtgggcggaactacagagttcttgtttgtccccctaatcaagctgttttacactttgcttattatggggatcttccataacgaggatttgaagcacatcttgcaacttatcgagccgagcgttttcaaggaggctgctacgccagaggaagagtcagacacactggaaaaggagttaagtgtcgatgatgccaaattacagggcgctggggaggaagaggcgaaaggcggtaagagacccaaggaggggctcttgcagatgaaacttcctgagcccgtgaagcttcagatgtgccttttgctccaatatctgtgcgactgccaggtgagacatcggatcgaggccattgtagccttctccgatgactttgtggcgaaactccaggacaaccagaggtttcggtacaacgaagtgatgcaggctctcaatatgagtgcagccctgactgccagaaaaacaaaagagttccgcagtcccccacaggaacagattaacatgctactcaattttaaagacgataagtccgagtgtccctgcccagaggaaattagggaccagctgttggattttcacgaggacctcatgacccactgtgggatcgagctagatgaagatgggtcattggatgggaattccgatctcactatacggggacgtttactctctctggtggaaaaggtgacataccttaaaaagaaacaggccgaaaaacccgtcgagtccgactctaaaaagagcagcacccttcagcaactgatctccgaaacaatggtgaggtgggctcaagaaagcgtgatagaagacccagagttggtgagggccatgtttgtgctcctgcatcggcaatacgacggtattggcggtctggtaagagcgctgccaaagacctacactattaacggagtgtcagttgaggatacaattaatttgcttgcctcactcggccaaattcgttcactactctccgtccggatggggaaggaagaggaaaagttgatgattcgaggtctgggcgacattatgaataacaaagtgttttaccagcatcctaacttaatgcgggcacttggcatgcacgaaacagtgatggaggtgatggtgaatgtgctgggcggaggggaatcaaaggagatcacgtttcctaaaatggttgctaactgctgcagattcctatgttatttctgtaggatatccagacaaaaccaaaaggctatgttcgatcatttgagttacttactggaaaacagttctgtcggcctagctagtcccgcaatgaggggcagcaccccattggatgtggccgcagcctctgtcatggataataacgagctggcacttgccctgcgcgaacctgatctcgaaaaggtggtccggtatctcgccggatgtgggctgcagtcttgtcagatgctggtttcaaaaggatatccggatatcgggtggaatcccgttgagggtgaacggtatctggacttcctccgctttgcagtcttctgtaatggggagagcgttgaagaaaacgctaacgtagtagtccgcctgctgattcgtaggcccgagtgttttggccctgccctcagaggtgaaggaggcaatggcctcctggccgcaatggaggaagcaatcaaaattgcagaagatcccagtcgcgatggcccttctcctaatagcggctcttcaaagacactggacaccgaggaggaagaggacgatacaattcatatgggaaacgccatcatgacattttattcggcgcttattgatttgcttggcagatgtgcaccagagatgcatctcatacacgccggaaagggcgaggccatccgaattaggagcattctgcggtctctgatacccctgggggatctggtgggagttattagcatcgctttccaaatgcctactatcgcaaaggacggaaacgtggtggaacccgacatgtctgcaggtttctgccctgatcacaaggccgcaatggtcctgttcttggaccgggtgtacggcatagaggtgcaggactttcttctgcatctgctagaagttgggttcttgcccgatctgagggcagctgccagcttggacaccgcggctcttagcgccacagatatggcattggcactgaatcgctacttgtgtacggccgtgcttccactgctaactcgttgcgctcctctgtttgctggcacagagcaccatgcaagtcttattgatagcctcctccatacagtctataggctctccaagggatgttctttgactaaggcacaacgggactccatcgaagtgtgcctcctgtccatttgcggtcagttgagaccttcaatgatgcaacaccttctgcgcaggcttgtgttcgatgtgccgttgcttaacgaacatgccaagatgcccctgaagctccttactaaccactatgaaaggtgctggaagtactattgcctgccagggggatggggtaacttcggcgctgcttctgaggaggagctccatctctcacgaaaacttttctggggaattttcgatgctctgtcgcagaagaaatatgaacaggaactatttaaattggctctgccatgcctctcagcagtggctggagccctacctcctgattacatggagtcaaattacgtgagcatgatggagaaacaaagcagtatggacagtgagggtaactttaatcctcagccagtcgatacatcaaatataacaattccggaaaaactggaatactttattaataagtatgccgaacacagccatgacaaatggagtatggataagctggctaacgggtggatatacggcgaaatctactccgacagttctaaggtccaacctctcatgaagccgtacaaactgctgtcggagaaagagaaggagatttacaggtggcccatcaaggaatccctaaagactatgcttgcatgggggtggagaattgagagaacccgcgagggcgacagtatggccctgtataacaggacccgacgcattagccaaacctctcaggtgtcggtcgacgctgctcatggatactcaccgagggcaattgatatgtcaaacgtcacactgtcgcgagacttgcatgcaatggccgagatgatggctgagaattatcacaacatctgggcaaaaaaaaagaagatggagctggagtctaagggcggaggaaaccatcccctgctggttccctacgataccctgacggcaaaagagaaggccaaggacagggagaaagcacaagatattctgaaattcctccagatcaacggctatgcagtgtctcgagggttcaaagaccttgaactagacactccctctatcgagaagaggtttgcttactcatttcttcagcaattgatccgttacgtcgacgaagcccaccagtacattctggaatttgatggaggtagtagaggtaagggagagcacttcccctatgaacaggagatcaaattctttgccaaggtcgtgctgcccctgattgatcagtactttaaaaatcatcggctgtacttcctctccgccgcatcgcgcccactatgcagcgggggtcatgctagtaacaaggaaaaagagatggtgacaagcctgttttgtaaactcggagtccttgtgaggcaccgcatttctctgttcggcaacgacgccacaagcatcgtcaactgcttgcacattttgggacagacgcttgatgccaggaccgtcatgaagacgggcctggaatctgtgaagtctgctctgcgggctttccttgataatgcagcagaagaccttgagaaaactatggagaacttaaagcagggtcagttcacgcacaccaggaaccagcctaagggagtcactcagatcatcaattacactacagttgccctgctgccgatgctaagcagcctcttcgagcacatcgggcagcatcagttcggcgaggacctaattctggaggacgttcaggtgtcctgttatcgaatcctcacttcgttgtacgctttaggtacatcaaagagtatttacgtggaacggcaaagatcagctttaggtgaatgtctggccgcttttgccggagcattcccagttgcttttttggagactcatttggacaaacataatatttatagcatttacaacacaaaaagttccagagaacgtgccgcattgtcgttacctaccaacgttgaggacgtgtgtcccaacattccttcccttgaaaagttgatggaagagatcgtagagttagcagaaagtgggatcagatacacacagatgccacacgtcatggaggtaattttacctatgctgtgctcgtacatgtcccgatggtgggaacatgggccagaaaataaccctgagcgggcagaaatgtgttgcaccgcactaaactctgaacatatgaacactctgctgggcaatatactcaaaatcatatacaataacttgggcatagacgagggagcatggatgaagagactagccgtcttctcccagccaatcatcaacaaagtcaagccacaactcctcaaaacccactttctgccactcatggagaaactgaaaaaaaaggccgcaacagtagtctccgaggaggatcacctgaaagctgaagcccgaggcgacatgtctgaggcggagctgctcatcttggatgagttcaccacactggctcgtgatctttatgccttttacccgttgctgattcggtttgtggactataatcgcgctaaatggctcaaagaaccaaacccagaagctgaagagctcttccgtatggtcgctgaggttttcatctactggtcgaaaagtcacaattttaaaagggaggaacagaattttgttgtgcagaacgaaataaacaacatgtctttccttattacagacactaagtccaaaatgtccaaagccgcagtgtcagatcaggagagaaaaaagatgaaaaggaagggagatagatactctatgcagacttccctcatagttgcagcgctcaagaggctgttacccatcggattgaatatctgcgccccaggcgatcaggaattgatcgctctggcaaagaaccggttctcgcttaaggacactgaagatgaggtacgagacattattcggagcaatattcatcttcagggcaagttagaagaccccgctattagatggcaaatggcactttacaaagatctgcctaataggacagacgatacgtccgacccggagaaaacagtggaaagggtgttggatattgccaacgtcctctttcacctggagcaaaaatctaagcgcgtgggaagaaggcattattgtctagttgaacacccccaacgctccaagaaagctgtatggcataaactgttgtctaaacagaggaaacgcgctgtagtcgcctgcttccgcatggcccctctatataacctgccaaggcatagggccgtgaatctgtttttgcaaggatatgagaagtcctggatcgaaacagaggaacactattttgaggataaactgatcgaggacctggcgaagcccggtgcagagcctccagaggaggacgagggcaccaagcgggttgaccccctgcaccagctgatactgctgttctcgaggacagcactcactgaaaaatgcaaactggaggaagatttcctttatatggcttatgccgacatcatggcaaagtcatgtcatgatgaagaagacgacgatggcgaagaggaggtcaaatcttttgaagtgactggctcacagcggagcaaggagaaagaaatggagaagcagaaacttctgtaccagcaggcaaggttgcacgatcggggagcagcagagatggtattgcagacaatatcggcctcaaagggcgaaactggaccaatggtcgcagccacgctaaagctgggcatagcgatcctcaacgggggaaacagtaccgttcagcaaaagatgctcgactaccttaaggaaaagaaggatgtgggctttttccaatctttggccggtctcatgcagtcctgttcagtcctggacctcaacgcctttgagcgtcaaaacaaagcagaaggcctgggcatggttactgaggaggggtccggagagaaggtgctgcaagatgatgaattcacatgtgatctctttagatttctccaattgctgtgtgagggtcacaacagtgacttccagaattacttacggactcagacaggaaataataccaccgtaaatattatcatatccactgttgattacttacttagggtgcaagaatcaattagcgacttttactggtattacagcggaaaagacgtgattgatgagcagggccagcggaacttctctaaggcaatccaagtggccaaacaggtgttcaatacgctgacagaatatatccaggggccttgcaccggcaaccagcagtcgttggcccatagccggttgtgggacgctgtggttggcttcctccatgtcttcgctcatatgcagatgaaattaagccaggacagctcccagatcgaactgctgaaagaattaatggaccttcagaaggatatggttgtgatgttattgagcatgctcgaggggaacgtggtaaatggcaccatcggcaaacagatggtggacatgctagtggaatcatcgaataatgtggagatgatcctgaagttttttgatatgttcctcaagcttaaagacctgacaagctcagatacattcaaggagtacgaccccgacggaaaaggtgtgatcagtaagcgggatttccacaaagccatggagtcacacaagcactatacacaatctgagacagagttcttgttgtcctgcgctgaaacagacgagaatgaaactctggattatgaagagttcgtcaaacgcttccatgaaccagccaaggatattggatttaatgtcgctgtcctgctcacaaacctgtctgaacacatgcccaatgatacacgcctccagacgttcctggagttggccgagtctgttcttaattacttccagcccttcctgggacgcatagaaatcatggggtctgctaagaggatcgagagggtttacttcgagatatccgagtcgtcccgcacccaatgggagaagccccaagtgaaagaatccaaacggcaattcatctttgacgtggtcaacgagggcggtgaaaaagaaaagatggagctgttcgttaatttttgcgaagacactatcttcgaaatgcagttggccgctcaaatcagcgagtctgacttaaacgagcgtagtgccaataaagaggagagtgagaaggagcgtccagaggaacaggggcctcggatggctttcttctccatcctgactgtgagaagcgcattatttgcccttcgatataatattctgacacttatgcgtatgctgagtcttaaaagcctgaagaagcagatgaaaaaggtcaagaagatgactgtgaaggatatggtgacagctttcttctccagctactggagcatctttatgactctgttgcacttcgttgcttcagtgtttcggggatttttcagaatcatctgttcgctgcttctgggaggctcactcgtggagggggctaagaaaatcaaagtggctgaattactggctaacatgcctgaccccacccaggatgaagtgcgcggagacggcgaggagggagagcggaagcctttggaggcggcactgccttctgaagatctcactgatctcaaagaacttacggaggaatccgaccttctttccgatatcttcgggctggacctgaaacgagaggggggacagtacaaactcattccccataaccctaacgccggactgtccgaccttatgtccaacccggtcccaatgccggaggtgcaggagaagtttcaggagcaaaaagccaaagaagaagaaaaagaggagaaggaagaaaccaagtccgaacctgaaaaggcagaaggtgaggacggagagaaggaagagaaggctaaagaggataaaggaaaacagaagctcaggcagttgcatacacataggtacggagaacccgaggtgcccgagagcgccttttggaagaagatcattgcataccaacagaagctgctaaattacttcgctaggaacttttacaatatgaggatgcttgcactgtttgttgctttcgcaatcaattttatattgctattctacaaggtctcgacatctagtgtcgttgagggtaaagagctcccaacaagaagctcatctgaaaacgccaaagtgacctcacttgattcatccagtcatagaataatagctgttcactatgtactggaggagagcagcggctacatggagccgacactcagaattctcgcaatcctgcacaccgtgattagctttttctgcataatcggatattactgcctgaaggtgcccctggtaatcttcaaaagagaaaaggaagtggcccgaaagctcgagttcgacgggctctatatcacagaacagccatcggaagacgacattaagggacaatgggaccgactggtgattaacacgcagagtttccctaataattactgggacaagtttgtcaagcgcaaggtcatggataagtacggtgaattttatggacgtgacaggatatcagagctgctgggcatggataaggctgctttagacttctctgatgcacgggaaaagaaaaaacctaagaaagactcctccttgtctgccgtactgaattctatagatgtcaaatatcaaatgtggaagctgggagtcgtgtttaccgataatagtttcctgtatctggcttggtacatgacaatgtcagttctgggccattacaacaacttcttctttgctgcgcacctcctcgacatcgccatggggttcaagaccctcagaacaatcctgagtagtgttacacacaacggcaagcagctcgtcctgaccgtcggtctgctcgccgtggtggtgtatctgtatactgtcgtagcttttaacttctttcgaaaattttacaacaagagtgaggacggggacacgcccgatatgaagtgcgacgacatgctaacctgttacatgttccacatgtacgttggcgttcgtgccggaggtggcataggcgatgagattgaggacccggcaggtgatgaatacgagatctaccgcatcatttttgatatcaccttttttttctttgtcatcgttattctgctagctattatccaggggctgataattgatgcatttggagagcttcgcgaccagcaggagcaggtgaaggaggacatggaaactaagtgctttatctgcggaattggcaatgactacttcgatactgtgccgcatgggtttgaaactcataccctccaggaacataatctggctaactatctgtttttcctgatgtatttaatcaacaaggatgagacggagcacaccggccaggagagttacgtgtggaaaatgtatcaggagcggtgctgggagttcttcccagccggagattgcttccggaagcagtacgaagaccagcttaactac

SEQ ID NO: 239504 - DNA, 14904 bp, synthetic construct
  misc_feature 1..14904: note = Description of Artificial Sequence: Synthetic coding sequence
  source 1..14904: mol_type = other DNA
atggctgatggaggcgagggtgaagatgaaatccagttcttgcgtaccgacgacgaggtggtgctccagtgcacagcaacgattcataaggaacagcaaaaactctgcctggctgcagaaggattcggaaatcgactctgtttcttggaatctaccagcaactccaaaaacgtgcctccagacctcagcatttgcactttcgtgcttgagcagagcctcagcgtgcgcgctctccaggagatgctggcgaacaccgtagaaaaaagcgaagggcaggtcgacgttgaaaagtggaagtttatgatgaaaactgcacagggcggaggccaccggacccttttgtacggccacgccattctactgcgccattcgtatagcggaatgtacctgtgttgcctgagcaccagccgttcttccactgataaactggcctttgacgtcggcttgcaggaggatactaccggcgaagcctgttggtggacaattcaccccgcatctaaacagcgatcagagggggagaaagtcagagtcggggatgatcttatcttggtgagcgtgagtagcgagaggtatttgcacctttcttatggaaatggctccctgcatgtggatgctgccttccagcagaccctctggtcggtcgctccaatatctagcggatccgaggctgcgcagggctacctgattggcggagacgtcctgcgattactgcatggtcacatggatgagtgtctcactgtgccaagcggggagcatggcgaggagcaaagacgaactgtccactatgaggggggagctgtttccgttcacgctaggagcctctggcggctggaaacactccgggtcgcctggtccggcagtcatatacggtggggtcagcctttccgcctgcgccacgttaccaccgggaagtacctgagcctgatggaagacaagaatctcctcctgatggacaaggaaaaggctgatgtcaagtctacggcattcacatttagatcttccaaagaaaagctcgatgttggggtccggaaggaggtggatgggatggggactagtgagatcaagtacggggatagcgtttgttacatccagcatgtggatactgggctgtggctcacttatcagtcagttgatgtcaaatcagtgaggatgggatctattcagcggaaagccattatgcatcacgagggccacatggacgacggaatctctctctcgcgttcccagcacgaggagagtagaaccgccagagttatccgctcgacagtgttcctgtttaatagattcattagaggtctggacgccctttctaaaaaagcaaaagccagcaccgtggacttacccatagagtctgtttccctctctctgcaggatctgatcggctactttcaccccccagacgagcatttggaacacgaagacaagcaaaaccggctgagagccctgaagaaccgacaaaacctgttccaggaggagggaatgataaatcttgtgctcgagtgcattgaccggctgcacgtctattccagcgccgcacacttcgctgacgtcgccggtcgagaagccggtgagtcttggaagtcgattttaaactccctctatgagctacttgctgcactgatccgcggaaacagaaaaaactgcgcccagttttcgggcagtttagactggctcatctcccggcttgagaggctggaggctagcagtggcatcttagaagtgctgcattgcgttcttgtggagagtcccgaggcattgaatattataaaagaagggcacatcaaatccattatcagtcttctggataagcacggcaggaaccacaaggtgttggacgtgttatgttccctttgcgtctgccatggggtggcagttcgatcaaaccagcacttaatttgcgacaacctgttgcctggtagggatctcctcctgcagactagactagttaaccacgtgagctccatgcggccaaacatcttcctcggcgtgtccgaggggtcggcacagtacaagaagtggtactacgaattaatggtagatcacactgagccgttcgtgacggccgaggctacgcatctgagagtaggctgggccagtacagagggctattcgccctatcccggaggtggagaagaatggggcggtaatggagtcggcgacgatttattcagctacgggttcgatggtcttcatctttggagtgggtgcattgctcgcacggtgagctcacccaaccagcatctccttcggacggacgatgtcattagctgttgcttagacctgtcagcccctagcatctcattcaggatcaacggccagccagtgcagggtatgttcgaaaactttaacattgacggcctgtttttccctgtggtctctttttccgctggaattaaagtaagatttctgctaggaggcaggcacggggaattcaagtttcttccacccccaggctatgcaccctgttacgaggccgtgctgcctaaggaaaagctcaaggtggagcattcacgcgagtataagcaggagcggacttacaccagagatctgttggggccaacggtctctctgacccaggccgcattcacacccatccccgttgacactagtcagattgttctgccccctcacttagagcggatccgggaaaagctggcagagaatatccacgagctgtgggtgatgaacaaaatcgaactgggatggcagtacgggccagtcagagacgacaataaacggcagcacccatgcctagtcgaattttctaagcttcctgagcaagagcgcaactacaacctacagatgtcgttggagacattgaagaccctgctcgccctgggatgtcatgtgggaatttcggatgagcacgcggaggacaaagtgaagaagatgaagctccctaaaaattatcagctgactagtgggtacaaaccggcaccaatggacttaagttttataaagttgaccccctcacaagaggcaatggtcgataaacttgctgaaaacgcacacaatgtctgggcacgagatcgcatccgccaggggtggacctacgggatccagcaggatgtcaagaatagacggaacccaagattagtaccatacacgctcctggatgatcgtaccaagaaatcaaataaggattcgctgcgtgaagctgtgcgcaccctgctcggctatggctataacctggaggccccagatcaggaccatgccgctcgagcagaagtgtgcagtggtactggggaaaggttccgaatctttcgggcagaaaaaacttacgcagtgaaggctgggcgatggtacttcgagttcgaaacggttaccgctggggatatgcgggtggggtggagcaggccagggtgccaacccgatcaggagttgggttcagacgagcgcgctttcgcctttgacgggttcaaggcgcagaggtggcaccagggcaatgagcactatggccgatcttggcaggcaggagacgtggtggggtgtatggtggatatgaacgaacacactatgatgtttacattgaatggagaaattttattggatgatagcgggtctgagttggcatttaaggacttcgacgtcggggacgggttcatccctgtttgcagtctcggtgttgcccaggtcggacgaatgaatttcggtaaagatgtatcgactttgaagtactttacaatttgcgggctacaggagggctatgaacccttcgcagtgaacaccaatcgagatatcacgatgtggttgtcaaagcgtctgccccaatttctgcaagtgccatctaaccacgaacacattgaggtaaccagaattgatggtacgatcgattcttctccatgtctcaaggttactcagaagagtttcggctcccaaaatagcaatacagatatcatgttctacaggctcagcatgcccatcgaatgcgctgaagtgttctctaagacggtcgctggcggacttcccggtgcgggtctcttcggcccaaaaaacgacctcgaggactacgatgccgattctgacttcgaggtattgatgaaaactgcacacggccacctggtcccagatcgcgtcgataaggacaaagaagccacaaagcctgaatttaataatcacaaggattacgctcaagaaaagccaagcagactgaaacagaggtttttgttacgtcgcactaagcccgattacagcacaagtcattcggcgagactcacagaagacgtgttggctgacgaccgtgatgactatgatttcctgatgcagacttcgacatattattatagcgtgcgcatattccctggccaggaacctgccaacgtctgggtcggttggattacaagcgactttcatcagtacgatacgggatttgatcttgatagggtgcgaacagttaccgtaaccctaggcgacgaaaaggggaaagttcacgaaagtatcaaacgttctaactgttacatggtttgtgctggggagagcatgtcacccggacaagggagaaataataacggcctcgagatcggttgcgtggtggatgcagcaagtggcctgcttacgttcattgcaaacggtaaagagctcagtacttactatcaggtggaaccctccacaaagctgttccctgccgtgttcgcgcaggcaacaagcccaaatgtgttccagtttgaactggggaggatcaagaacgtgatgcccctgtctgctggcttattcaaatctgaacacaagaaccccgttccccagtgtcctccacgactacatgttcagtttctttctcatgtgctgtggtcccgcatgcccaaccagtttctaaaggtcgacgtgagtcggatttctgagaggcagggttggttagtccaatgcctggacccgctgcagtttatgtcactccatattcccgaagagaatcgatccgttgacatcctcgagctgacagaacaggaggaattgctaaagttccattatcacactcttcgcctttacagcgccgtgtgcgctctgggtaatcacagggttgcccacgccctgtgctcccacgtggacgaaccccagctgttgtacgcaatagaaaataagtatatgcctggcctccttagagcaggctactacgaccttctgattgacatccatctgagcagttatgccacagcacgattaatgatgaataatgaatacatagttcccatgaccgaggaaacaaagtctatcactctgtttcctgatgagaacaaaaagcatggcttgccaggtatcggtttgtctacatccctccggccacgcatgcagtttagttcccccagctttgtgtctattagcaatgaatgctaccagtactcccctgaatttccactcgacatacttaagtctaagaccattcagatgctgacggaggccgtcaaggaaggatcacttcacgccagggatcctgtgggcggaaccactgagtttctgtttgtccctttgatcaaattattctataccttactaattatgggtatcttccacaatgaagatcttaaacacatattgcagttaatagagccctccgttttcaaggaggcagctacccctgaggaagaatctgatacacttgaaaaagagctctccgttgacgacgccaagctccaaggcgctggcgaggaggaggctaaagggggaaaacggccaaaggagggcttgctgcagatgaaactgccagaacccgttaaattgcaaatgtgccttctgctccagtatctatgcgattgtcaagtcagacatagaatcgaagcaattgtagcattttccgacgatttcgttgcgaagctccaggacaatcagaggtttcgttataacgaggtaatgcaggcactgaatatgagcgcggctttaacggcaaggaaaacaaaagaattcagatctcctccacaggaacaaatcaacatgctgctaaattttaaggatgataaatcagagtgcccatgcccagaagagatccgggatcaattattggatttccacgaggacctgatgacccactgtggcattgaactcgacgaggacggctccttggatggtaactcagaccttactatccggggtcgcctattgtcgctggtggaaaaggtgacataccttaagaagaaacaagcggaaaagccagtggagtctgactcgaagaagtctagcactctgcagcagctaatcagcgaaacaatggtacgctgggcccaagaatctgtaatcgaagatccagagttggtgcgagcgatgttcgtgttgttgcatcgtcagtatgatggaatcgggggactcgttcgtgcccttcctaaaacctacactattaacggtgtgtccgtggaggacacgatcaatctgcttgctagcctcggacaaatacgttccctactaagcgtcaggatgggaaaggaagaagaaaaactgatgatcaggggtctgggtgacatcatgaataacaaggtgttctatcaacaccccaatctcatgcgggcattgggcatgcatgaaacagtcatggaggtgatggtcaatgtgcttggcggaggagaatctaaagagatcactttcccaaagatggtcgctaattgttgccgcttcctttgctatttctgtcggatctcgaggcagaatcagaaggctatgtttgatcatctctcgtatctgctcgaaaattcttcagtcggcctcgcttcacccgctatgcgtgggtccacgcctttagacgtcgcagcggctagcgtgatggataataacgagttagcactcgctttaagagagccagatcttgagaaggtggttcggtacctagccggatgcggactacaatcttgtcagatgctcgttagtaaaggctaccctgacattggttggaatcccgtggagggagaacggtacctggacttcctccgctttgccgtattctgcaatggagagagtgttgaagaaaacgcaaatgtagtggtgcggctactgattagaaggccagaatgtttcgggcctgccctgcgcggagaagggggtaacggactgttggcggcaatggaagaggccattaagattgctgaagatccctctcgcgacggcccttcccccaattccggttcatccaagaccttagacacagaggaggaggaggatgacacaatccatatgggcaacgccataatgacattctactccgcacttatagatcttctgggcagatgtgcgccagaaatgcacttaattcacgcaggaaaaggtgaggctatccgcatacgaagtatcctacgatcattgatcccgctgggagacttggtcggggtgatcagcattgcgtttcagatgccaacaattgcaaaagacgggaatgtggtagagcctgacatgtccgcaggcttctgcccagaccacaaagcggcaatggtgctcttcctggaccgggtttacggcattgaagtgcaagactttctgttgcatctcctggaggtggggtttctccctgacttaagagccgctgcgtccctggacaccgctgcgctgtcagccacagacatggctttagcccttaaccggtatctttgcaccgcagtgctgcccctcctgacccgatgtgcccctttattcgccggtactgaacaccacgcgagcctcatcgattctctgctccacaccgtctacagactgtccaaggggtgcagtctaactaaggcacaacgtgattccatcgaggtgtgcctgctgagcatatgcggtcaattgcgcccttcaatgatgcagcacttactgagacgacttgtattcgatgtcccactgctaaatgagcacgctaagatgcctctgaagctcttgactaaccattacgagagatgctggaagtactattgtcttcctggcggatgggggaactttggagctgcttccgaggaagaattgcacttgtcacggaagttgttctggggaatttttgatgcactgagccaaaaaaagtatgaacaagagttgtttaagcttgctctgccctgcttgagcgcggtagccggtgctctccctcctgactacatggaatcgaactatgtttcaatgatggagaaacaaagcagcatggactctgaagggaatttcaacccccagcctgtcgacacctcaaacattaccattcctgagaagcttgagtattttatcaataaatatgctgagcactcccacgacaagtggagcatggataagttggccaacgggtggatatatggcgagatctattcagactcatcaaaagtccagccccttatgaagccatacaagctgctgagcgagaaagagaaagaaatctaccgctggccaataaaggaatcactgaaaactatgctggcctggggatggcgcattgagagaacacgggagggcgacagtatggccctgtataatcgcacccgcaggattagtcagacaagtcaggtgagcgtggacgccgctcacggctattcccccagagctattgacatgtcgaatgtgacgctgagtcgcgatctccacgctatggctgagatgatggctgaaaattaccacaacatctgggccaagaagaagaagatggagctcgagtcaaaagggggagggaaccaccccttgttggtgccttacgatacgctcacagccaaagagaaggctaaggacagagaaaaagctcaggatatcttaaagttcctccagataaatggctatgccgtgagcagaggcttcaaagatctagagttggatactccaagcatcgagaagcgatttgcctattcatttttacagcagttaattaggtacgtggacgaagcacatcagtacatcctcgagtttgatggtggcagtcgtgggaaaggcgagcacttcccttatgaacaggagattaaattttttgctaaggtggtgctgcctctaatcgatcaatatttcaaaaatcataggctctattttttgtcagctgcctccaggcccctctgtagtggtggccacgcctcaaataaggagaaggagatggtcacatctcttttctgtaagctcggtgtgcttgttcggcaccgcatctctctgtttggaaatgacgccacgtccatcgtaaactgcctgcacattttgggacaaaccttagacgcgagaacggtaatgaaaactggcctggaaagcgtcaagagcgccctaagggcatttctggacaacgcagcagaagatctggagaaaacgatggagaatctcaagcaggggcaatttacccatacccgcaaccagcccaagggggtaacccagattattaattacaccaccgtggctttacttccaatgctgagcagcttatttgagcatattggacagcaccagttcggtgaggacctcattctggaggacgtgcaagtcagctgctatcgaatattaacatccctgtatgcattgggcacaagcaagtctatatacgttgaaaggcaacgctcagccttgggggagtgcctcgccgctttcgctggggcattccccgtcgcttttctcgaaacccacctggataagcacaatatatattccatctacaatacaaagtctagccgggagagagcagccctaagtttaccaacaaatgttgaggacgtgtgcccgaatattccctccctggagaagctgatggaagaaattgttgaactggccgagagtggtatccggtacacccaaatgccacacgtaatggaagtcatcttgccaatgttgtgctcctatatgtctagatggtgggagcacggccctgagaacaacccagaaagggcagagatgtgttgcactgccttgaacagcgagcatatgaatactctgctcggaaatatcctcaaaatcatttacaacaacctgggtatcgacgagggcgcttggatgaaacgcctcgctgtgttctctcagccgatcattaataaagtgaaaccccagttgctgaagacgcactttctgccgctaatggagaaattgaagaagaaggctgctacggtagtgtctgaagaggatcacttaaaagctgaggctaggggagatatgagcgaggccgaactgctgatattggatgagttcactactctggctcgagacctgtacgcattctatccactcctgatccggttcgtggattataaccgcgcaaaatggctgaaagagccaaatccggaggctgaggagctttttcgtatggtcgccgaggtgttcatttattggtccaagtcacacaactttaaacgtgaagagcaaaacttcgtggtacagaacgagataaacaacatgagtttcctgattacggatactaagagcaaaatgagcaaagcagccgtgtctgatcaggagaggaagaaaatgaagcgtaaaggcgaccgctacagtatgcagacatctctgatcgttgctgccctgaagagactcctgcccatcggattgaacatttgcgcacccggagatcaggagctgattgcacttgcgaaaaatagattcagtctcaaggacacagaggacgaggtaagagatattattcgcagtaacatacacctgcagggaaagctagaagaccccgcaattcgatggcagatggcactgtacaaggatctgccaaacagaacggatgacacgagtgaccccgaaaagaccgtagaacgtgttctcgacattgctaacgtcctgtttcacctcgaacaaaaaagcaagagggtagggcgaaggcactattgccttgtggaacacccacagaggtctaaaaaggctgtctggcacaagttgctgtctaagcagcgcaagagagctgtggtggcatgctttagaatggccccactctacaatctcccacgacatcgcgcagttaaccttttcctgcagggctatgaaaaaagttggattgagacagaggagcattactttgaggacaagctgatcgaagatctggctaagccaggcgctgaaccacccgaagaggatgagggcactaaaagggtcgacccgctgcaccagttgatcttactgttttcccgtacagcactgacggagaagtgtaagctcgaggaggacttcctgtatatggcctatgccgacataatggccaaaagctgccatgatgaagaggatgatgatggggaggaagaagtaaagtctttcgaagaaaaggagatggaaaagcagaagctgttgtaccagcaggccaggctccacgatcgtggtgcagccgaaatggtcctccaaaccatttccgctagtaagggcgaaacaggaccaatggtggcagccacgctaaagcttggcatagccatcttgaatggcggaaattccaccgtgcagcagaaaatgctcgactacctgaaagaaaaaaaggacgtcggattcttccagtccctcgctggcctgatgcagtcatgcagcgttctggacctgaacgccttcgaaagacagaacaaagcagaaggcctcggtatggtcacggaggagggatccggcgaaaaagttctccaggatgatgagtttacatgcgacttgttcaggtttctgcagctgctgtgtgaaggtcacaatagcgatttccaaaactacctgcgaacccagacagggaacaacacaaccgtgaacatcatcatctcaaccgtcgactacctgttaagagtgcaggagtccatttctgatttctactggtattactccgggaaagatgtgatcgatgagcaaggccagcgtaattttagcaaagctatccaggtggcaaagcaagtttttaataccttgacggagtatattcagggaccgtgcacaggtaaccagcaaagtttggctcatagccgattatgggacgcagtggtcggcttccttcatgttttcgcccacatgcagatgaagctgtcccaagatagtagccagatcgagttactcaaagagctcatggatctgcaaaaggacatggtggttatgctactgagcatgctggaaggaaacgtagtcaatgggaccattggcaagcagatggtggacatgctggtcgagtccagtaataatgtggagatgattcttaaattcttcgacatgttccttaagctaaaagacttgacctccagtgatacctttaaagagtatgatcccgacggcaagggagtcatatcaaagcgagactttcataaagccatggaatcgcacaaacattacacacaatcggaaaccgagtttctcctgagttgtgctgagacggacgagaacgagacactagactatgaggagtttgtaaaacggtttcacgagccagcaaaagatatcggatttaacgtcgctgtgctactcactaacctgtccgagcatatgcccaacgacactcgactgcagacatttctcgagctggccgagagtgtgctcaattacttccagccatttctggggaggattgagatcatgggaagtgccaaacggattgaacgcgtttactttgagatttccgaaagttcaaggacacagtgggagaaaccacaggtgaaagagtcaaaaaggcaattcatctttgacgttgtgaatgagggcggagagaaagaaaagatggaactcttcgtgaacttctgtgaggacaccatcttcgagatgcagctggctgcccagatctcagagagtgacctgaatgaacgcagtgctaacaaagaagaaagcgagaaggaacgcccagaagagcagggacctcgcatggcctttttcagtatcttgacggttaggagcgctctgtttgcccttcgttacaacatcctgaccctgatgcgaatgctgagtcttaagagccttaagaagcaaatgaaaaaggtcaagaagatgaccgtcaaggatatggtgactgcctttttttcatcctattggtccattttcatgacgttactgcactttgtcgcctctgtcttcagaggtttctttcgaattatttgcagtctcctcttgggaggaagcctcgtggagggggctaaaaagattaaggtggccgagctcctggccaatatgcccgaccctacccaggatgaggtacggggagacggggaggaaggcgaaaggaagcctctcgaggccgctcttccctcggaggacttgactgacctgaaggagttgaccgaagagagcgacctactctcggacatcttcggactggacctgaagcgcgaaggcggtcagtataaacttattccacacaatccaaacgcaggactatcagacttgatgtccaatcccgtgcctatgcccgaagtgcaagaaaaattccaggagcaaaaggcgaaagaagaggagaaggaggagaaagaggagacaaagtctgagcccgagaaagccgaaggggaagacggtgagaaagaggaaaaagccaaggaggataagggcaagcagaagctccgacagctccatacacaccgctacggggaacctgaagtccctgagtcagctttttggaaaaaaattattgcgtatcaacaaaaattgcttaattacttcgctcggaatttttacaacatgaggatgctcgcactgttcgtagcctttgccataaattttattctgctgttttataaagttagcactagtagcgtggtggagggcaaagagctgccaacccgatcatccagtgaaaacgccaaagtcacatccctggactccagcagccaccgcattattgctgttcactatgttctggaggagtcatctgggtacatggaacctacactcagaattctggctatcctgcacactgtgatcagctttttttgcatcatcggctactattgcctgaaggtgcctctggtgatattcaagagagagaaagaagtagcaaggaagttggaatttgacggactgtacattaccgaacagccctccgaagatgatatcaaaggccagtgggacaggctcgttatcaatacccagtccttccctaataattattgggataaatttgttaaaagaaaagtgatggacaaatacggtgaattctacggtcgtgatcgaatctccgaattgttaggcatggacaaagctgcactggatttctctgatgccagagagaagaagaagcctaaaaaagattcctctctttccgctgtgcttaatagtatcgacgtcaagtaccagatgtggaagctgggggtggtttttactgataatagcttcttatatttggcttggtacatgactatgtccgtccttggacattataataattttttttttgcagctcacctcctggatattgctatgggctttaaaaccctgcggactatactgtcgtccgtgacacacaacggtaagcagcttgttctgacagtcggcctacttgccgtcgtggtttatctctatacagtcgtggcctttaatttcttccgaaagttttacaataagtcggaagacggtgatactcccgacatgaagtgtgacgacatgctgacctgctacatgttccacatgtacgtcggtgtgcgggctggcggaggaattggagacgagattgaggatcctgccggagatgagtatgaaatttacaggatcatctttgacataacgtttttctttttcgtcatagtgatattgttggcaattatccagggcctgatcatcgatgcatttggtgagctgcgagaccagcaagaacaggtcaaggaagatatggaaacaaaatgcttcatttgcggtatcggtaatgattacttcgataccgttccacatgggtttgaaactcataccttacaggagcacaatttagccaattacctctttttcctcatgtaccttatcaacaaagacgaaacagaacacaccggccaagagagttacgtttggaaaatgtaccaggagaggtgttgggagttcttccccgcaggagactgttttcgcaagcaatatgaggaccagctgaattaa

SEQ ID NO: 239505 - DNA, 987 bp, synthetic construct
  misc_feature 1..987: note = Description of Artificial Sequence: Synthetic coding sequence
  source 1..987: mol_type = other DNA
atggagcctaccctaaggatactggccattttgcatactgtaatttcgttcttttgcatcattgggtactactgtttaaaagtgccccttgtgatctttaagcgcgagaaggaagtcgcacggaaactggagtttgatggcctctacattactgagcagccttcagaggatgatattaagggacagtgggatcggctggtgattaacacccagtcctttcctaataattattgggataagttcgtgaagagaaaagttatggataagtacggtgagttttacggacgcgatcgcatctctgaactcctgggtatggataaggccgctctggactttagtgacgccagggagaaaaaaaaaccaaaaaaagactcctctctgtccgccgtgctaaattctattgacgtgaaatatcagatgtggaagctgggggtggtgtttactgacaattcattcctgtacttggcctggtacatgactatgtctgtccttgggcactataacaacttctttttcgcagcccatttgttagacatcgccatgggcttcaagaccttgagaaccattttgagcagcgtgacacataacggcaagcagttggtgctcactgtgggattgttggcagtggtggtgtacctctatacggtagtcgcttttaacttcttcagaaaattttataacaagtctgaggatggggataccccagacatgaagtgcgatgatatgcttacttgttacatgttccacatgtacgtaggggttagggcaggtggtggaattggagatgagatagaggaccccgcaggtgacgaatacgagatttaccggattatctttgacattaccttcttctttttcgtcatcgtgatcctactggcaataattcaaggcctgatcattgacgccttcggagaactgagggaccagcaagagcaagtaaaggaagacatggaggtcttctcggatgtgtcttacaagcagcgctag

SEQ ID NO: 239506 - DNA, 645 bp, synthetic construct
  misc_feature 1..645: note = Description of Artificial Sequence: Synthetic coding sequence
  source 1..645: mol_type = other DNA
tcattattttgcaagcttggtgtgctggtgcggcataggatatcacttttcggaaacgatgccacctccattgtcaattgcctgcatatccttggccaaactcttgatgctcgcactgttatgaagaccggtcttgaatctgtgaagagcgcacttcgggcattcttggataatgcagcggaagatctggagaagactatggaaaacctgaagcagggtcaatttacacatactagaaatcagccaaaaggcgtgacccaaattattaactataccaccgtggccctcttacccatgctttcaagtcttttcgaacacatcggacagcatcagtttggcgaagatctgatcctagaggatgtccaagtctcttgctatagaattctgacaagcctctatgccttgggcactagcaaaagcatctatgtcgagcgccaaaggagcgccttgggcgaatgcttagcagcctttgctggggcatttcccgtagcctttcttgaaacccacctggataagcacaacatttacagcatctataataccaagtcttccagggagcgtgcggctctgtccctccccactaatgttgaagacgtgtgtcctaacatccctagcctggagaagctaatggaggagattgtgtag

SEQ ID NO: 239507 - DNA, 4266 bp, synthetic construct
  misc_feature 1..4266: note = Description of Artificial Sequence: Synthetic coding sequence
  source 1..4266: mol_type = other DNA
atgaagactggtttggagagcgtgaagtccgcgctcagagccttcctagacaacgctgccgaagacttggagaaaacaatggagaatctcaaacaaggtcaattcacccacaccaggaatcagccaaagggcgtgacccagatcattaattacactactgttgctctgctgcctatgcttagttcactcttcgagcacatcgggcagcaccagtttggcgaggaccttatactggaggacgtccaggttagctgttacaggatcctgacctccctatacgccttaggcacatcaaagagtatttacgtagagagacagcggtccgccctgggcgaatgcttggccgcattcgcgggtgcctttcccgtcgcttttttggaaacccatctggacaaacacaacatatacagtatttacaacacaaaaagcagcagagaaagagccgctctgtctctgcctactaatgtagaggacgtctgtcccaacattccgtcactggagaagctgatggaggaaatagtggaactggctgaatccggcatcaggtatacacaaatgccccacgtaatggaagtcattctacctatgctgtgctcttatatgagtaggtggtgggagcacgggcctgaaaataaccccgaacgagccgagatgtgctgtacagccttaaattctgagcatatgaacaccctcctgggcaacattcttaagataatctacaataatctcggcatcgatgagggtgcatggatgaaaaggcttgccgtcttctcccaaccgatcattaataaggttaagcctcaacttctcaagacacactttttgccgctcatggagaaactgaaaaaaaaagccgctactgtagtgtcagaggaggaccaccttaaggcagaagcaagaggagacatgtccgaggcagagcttctcatcctggacgagttcacaacactagccagggatctgtatgctttctatccccttttgatcaggtttgtcgattacaatcgcgcaaagtggctcaaagagcccaacccagaggctgaggagctttttaggatggtggccgaggtgttcatctactggagtaaatcccataactttaagagagaggaacaaaatttcgtcgtgcaaaatgaaattaacaatatgtcgtttctgatcaccgacactaaatctaagatgtccaaggctgcagtgtcagatcaggaacggaagaaaatgaagcgtaagggcgaccgctactctatgcagaccagcctcattgtggctgctctgaagaggctactgccgattggcttaaatatatgcgctcccggagatcaggaacttatagcactagctaaaaataggttttcgcttaaagacacagaggatgaagtgcgtgatattattcgcagcaacatccatcttcaagggaaacttgaggaccccgcaattagatggcaaatggccctgtataaagatctccctaatcgcactgatgatacatctgacccggaaaagactgttgagcgggtcctggacattgccaatgtgctgttccatcttgagcagaaatcgaaacgagttgggcgtagacattattgtctggtggaacatccacaacgaagcaagaaggctgtgtggcataagcttttatctaagcagcgcaaaagggcagttgtggcttgctttagaatggcgccactgtataatctgcctagacatcgagccgttaacttattcttacagggttacgagaagtcctggattgaaactgaggagcactacttcgaggataagctcatcgaggacctagctaagcctggcgcagagccaccagaagaggatgaggggacaaagcgggtggatcctttgcatcaactaattctgctgtttagcagaaccgcgctgacggaaaaatgcaaattggaggaggattttctgtacatggcttatgcagacatcatggccaagagctgtcacgatgaggaagacgacgacggtgaggaagaggtgaagtcctttgagcatgacatcataaaggatttgcgcaataagtttgcttctctgggcgagaactcgctggaaaaagagatggagaagcagaagctgctctatcaacaggcacgcctgcacgaccggggtgccgcagaaatggtgttgcagacgataagtgcttctaagggggaaaccggacctatggtggcagccacgttgaaattggggattgccattctgaatggcggaaatagcaccgtgcagcagaagatgctggattatctaaaggaaaagaaggatgtggggttcttccagtccctggcaggccttatgcagtcttgcagcgtgttggatctgaacgcattcgagcgacagaataaagcagaaggcctcgggatggtgactgaggagggctctggagagaaggtgttgcaggacgatgaattcacatgcgatcttttccgattcctccaattactatgcgagggtcataacagtgactttcagaactacctgaggactcaaacggggaataataccacggttaatattatcataagtaccgtggattatttgctgcgcgtgcaggagtcaatctcagatttctactggtactattccggcaaggatgttatagatgagcagggccaacggaacttcagcaaggccatccaagtggctaagcaagtatttaacacccttaccgagtacatccaggggccatgcaccggcaaccaacagtccctggcacattcacgactatgggacgccgtggtcgggtttctgcatgtcttcgctcatatgcagatgaagctgtcacaggactcaagccagatcgagctgcttaaggaacttatggacttacagaaagatatggtggtcatgctgctgtctatgctcgaagggaacgtggtaaatggtaccatcggtaaacagatggttgatatgctcgtggagtcaagcaacaatgttgaaatgattctgaagtttttcgacatgtttcttaagctgaaggatctcacatcaagcgatacattcaaggagtacgaccctgatggcaaaggagtgatctctaagcgggactttcacaaagccatggaatctcataaacattatacccagtcagagacagagttccttctgtcttgtgccgaaactgacgagaatgagacacttgactacgaagagtttgtaaagagattccacgagcctgccaaggatatcggttttaatgtggcagtgctgctgactaatctgagtgagcatatgcccaacgataccagactccagacattcctcgagctggccgaatctgtattaaattactttcagcccttcctggggaggatagaaataatgggttccgcaaagcgcatcgaaagggtgtacttcgagatcagcgaatcctctcggacgcaatgggagaagccacaggttaaagaaagcaagcggcagttcatattcgacgttgtgaacgagggaggagaaaaggagaaaatggagctcttcgtaaatttctgcgaggatacaatctttgagatgcaactggctgcgcagatcagcgagagcgacctgaatgaacgatccgccaacaaggaagaaagcgagaaggaaagacccgaagagcaggggcctcgaatggcattcttcagcatactaacagtgcggagcgccctttttgctttacgctacaacattctgaccctaatgcgtatgctgagcctgaaaagcctcaagaagcaaatgaagaaggtgaaaaaaatgacagtaaaggatatggtcaccgcattcttctcgtcctactggtctattttcatgaccttattacattttgtggcttctgtgtttagggggttctttaggattatttgctctctcctgcttggaggctcacttgtcgaaggagccaagaagattaaagtagctgagctgctggcaaatatgcctgaccctacccaggacgaagtcaggggcgacggggaagaaggcgaacgcaaacctctggaagcagcacttccctctgaagaccttacagacctgaaagagcttaccgaggaatccgacctcctttccgatatcttcgggctcgatttgaaacgcgaagggggacagtacaaactgatccctcacaatccaaacgctggcctgagtgacttgatgtcgaaccctgtgcctatgcccgaggtgcaagaaaaatttcaagaacagaaagccaaagaggaggaaaaagaagagaaggaggaaactaaatccgagcccgagaaagcagaaggagaggacgggtag

SEQ ID NO: 239508 - DNA, 14856 bp, synthetic construct
  misc_feature 1..14856: note = Description of Artificial Sequence: Synthetic coding sequence
  source 1..14856: mol_type = other DNA
gatgacgaagtggtcctgcaatgcaccgcgaccattcacaaggaacagcagaagctgtgcctcgccgcagaaggcttcggtaatcgtctgtgctttctagagtccaccagcaattcaaagaacgttccacctgacctcagcatttgcacatttgtactggaacagtccctgagcgtgcgagctctacaggaaatgctggccaataccgttgagaagtccgagggacaggttgatgtggaaaagtggaaatttatgatgaaaactgcccagggtggcggacacaggacactgctctatggtcacgcaatcctgttaaggcactcctattctgggatgtatttgtgctgtctcagcacctcaagatcttcaaccgacaagctggcttttgacgtagggttgcaggaggataccacaggcgaggcatgttggtggaccatccacccagcatccaaacagcggagcgagggcgagaaggttcgggtcggcgacgacttgattctggttagtgtcagtagtgaaaggtatctgcacctgtcctatgggaatggcagtcttcacgtggacgctgcttttcaacaaaccttatggagcgtcgcacctatctcttccggatctgaggctgcccaagggtacctaatagggggagacgttcttagactcctgcatggccacatggacgagtgtctgactgtcccttctggcgagcacggcgaggaacaacggagaacagtgcattacgaaggcggtgcggtaagcgtgcacgcaagatccctttggaggttggagaccctccgcgtggcatggtccggtagccacatacgctggggtcagccatttagactgaggcatgtcactacgggaaaatatctctcattaatggaagacaagaatctgcttctgatggacaaggaaaaagctgacgtaaaatctactgcatttacatttaggagcagcaaggaaaaactggacgtgggagtgcggaaggaagttgatggcatggggacatccgagatcaaatatggggatagtgtgtgctatatccagcatgttgataccggactttggctgacttaccaaagcgtcgacgttaagtccgttcgaatgggcagtatacagcggaaagcaatcatgcaccatgaaggccatatggatgacggaatctccttgagccgtagccagcacgaagaatcccgcacagctagggttattagaagtacagttttcctgtttaataggtttattcggggattggacgcactgtcgaaaaaagcaaaggcttcaaccgtggatctccccatcgaaagcgtaagtctgagcctgcaggatctgatcggttattttcacccacccgacgagcatcttgagcacgaggacaagcagaacaggcttagggctttaaagaacagacagaaccttttccaggaagagggtatgatcaacctggtgcttgaatgcatcgatcggctgcacgtctatagttctgctgcccacttcgcagacgtcgccggacgagaggccggagagagttggaaatctattttgaacagtctatacgagttgctcgcggcacttatcagaggtaatagaaaaaattgtgcccagttttccggaagtttggattggttaatttcaaggttagaacgcttggaagccagctccggaatactggaagtgcttcactgtgtgctggtggagtcacctgaagcgctcaacatcattaaagaggggcacatcaaatcgataatttctctgcttgacaaacatggacgtaaccacaaagttcttgatgtgctgtgctccctttgtgtgtgccacggcgtcgcagtccgaagcaaccagcatcttatctgcgataatctccttccgggtagggatcttttgctacagactcggcttgtgaaccacgtgtcctcgatgcgccctaatatttttcttggggtgagcgaaggatctgcacaatacaagaagtggtattatgagctgatggtggaccacaccgagcctttcgtcaccgcggaggcaacccatttgagggtggggtgggcaagcaccgagggctacagcccttatcccggtggcggagaggaatgggggggaaacggcgtcggtgatgatctcttctcctatggcttcgatgggttgcacctgtggtctggctgcatcgcccgtactgtatccagtcccaaccagcatctgctgcgtactgacgatgtgatcagctgctgcctggatttaagtgccccatcaatcagtttccgtatcaatgggcagcccgtccagggaatgttcgagaattttaacattgatgggctgttcttcccagtggtgagtttttccgcgggtataaaagtgcgcttcctcctcgggggaaggcatggggagttcaaatttctcccaccaccgggatacgccccttgttacgaggccgtcctgcctaaggagaagcttaaagtggaacattcacgggagtataaacaggagcgcacatataccagagacctactgggaccgactgtgtccttaacacaggccgcattcactcccattcctgtggacacgtctcaaattgtcctgcccccacacctggaaagaattcgcgagaaattggcagagaacatccatgagttatgggtgatgaacaagatagaacttgggtggcagtacggacccgtaagggacgacaacaaaagacagcatccctgcctggtggagtttagcaaactgcccgagcaggagcggaattacaacctgcagatgtctctcgaaacgttgaaaactttattagccctggggtgccacgtcggaatttctgatgaacacgcggaggataaagtgaagaagatgaagttacctaagaactaccagctcactagtggatacaaacccgcacccatggatttgtcgtttattaagctcactccctcgcaggaggccatggtggacaagttagcagagaacgctcacaatgtgtgggccagagacagaatccgccagggctggacatacgggatccagcaggatgttaaaaatcgtcgcaacccacgactggtgccctacaccctactggacgaccggacgaagaaaagcaataaggacagccttagagaagctgtccggactctcctgggatacggatataatctggaggcccctgaccaagatcatgctgcccgtgccgaggtatgctccggaaccggagagcgctttcgaatcttccgggcagaaaagacctacgctgtgaaggccggaagatggtacttcgagttcgagaccgtgacagcgggagacatgcgggtgggctggtctcgacctgggtgccagcccgaccaagaactggggagcgacgagcgcgctttcgcctttgacggcttcaaggcacagcgctggcaccaaggtaacgaacactatggccgaagctggcaggccggtgatgtagtaggctgcatggtcgacatgaatgagcacacaatgatgttcaccctcaacggtgaaatcttacttgacgattcaggatctgagctggcctttaaggattttgacgtgggagatggattcatcccggtgtgcagccttggtgttgcccaggtaggcaggatgaactttgggaaagatgtgtcaacactgaagtactttacaatttgcgggctgcaggagggatacgagccattcgccgtgaatacaaatcgggacattacaatgtggctgagcaaacggttgccacagtttctgcaggttccctccaatcatgaacatattgaggtgacgagaatcgacgggacaatcgattcctcaccctgcctgaaggtgacccagaaatccttcggctctcagaattccaatacggacatcatgttctaccggttgagtatgcctatagagtgtgccgaagtgttctctaagaccgtcgccggtggcttgcctggtgccggactttttgggcctaaaaacgatctggaagactatgatgccgacagcgactttgaggtgctgatgaaaacagcacatggacatcttgttccagatcgtgtagacaaagataaagaagctacaaagccagagttcaacaatcacaaggactacgctcaggagaaaccctcccgccttaaacagaggtttcttctgcgcagaaccaaacctgattattcaacctcccacagtgccaggctgaccgaagatgtgcttgccgatgacagagacgactacgactttctgatgcagacgagtacctactactacagcgtacgcatttttccaggccaggaaccagccaatgtttgggtgggatggattaccagcgattttcatcaatacgatactggcttcgatctggatagagttagaactgtgaccgttaccctaggcgatgagaaagggaaagtgcatgagtccattaagaggtccaattgctacatggtgtgtgctggcgaatccatgtcccctggacaaggacgtaataacaacgggttagagattgggtgtgtggtggacgctgctagcggcctgctgacgtttattgccaacgggaaagagctctccacatattatcaagtggaacctagcaccaaattattccccgcagtgttcgcccaggccacgtctcccaacgtgttccagttcgagctcgggaggattaaaaatgtgatgccactgtctgctggtctttttaagtctgagcacaagaaccccgtgcctcagtgtccccctcggctccacgttcaattccttagtcatgtgctctggagtcggatgccaaatcagtttctcaaggtggatgtttccagaatatccgagagacagggctggctggtgcagtgcctggacccactccagttcatgtccctgcacatcccggaggaaaacaggtcagtggatatcttggagctgactgagcaggaggagttacttaagtttcattatcacacactccggctgtactccgccgtctgtgctttaggaaatcacagagtggctcatgctctctgctcccacgtcgatgagccccaactgctgtacgctattgaaaacaagtacatgcccggactgcttagagccggttattacgatctactcatcgacatccacttatcttcatacgcaaccgcgaggctaatgatgaacaatgaatatatagttccaatgacagaagagactaagagtattaccctcttcccagatgagaacaagaaacatggactccccggaatcggactttctacaagtttgcggcctagaatgcagttttcatcgccctcatttgtgtcaatcagcaatgagtgttaccaatatagtcctgaatttcccctggacatattaaagagtaaaaccatacaaatgctcacagaggcagtaaaagagggcagtctccacgccagagaccccgtggggggaaccaccgaattcctgttcgttcccctcattaaactgttctacacactcttaatcatggggatcttccacaatgaggatttgaaacatatcctgcagctaatcgagccatctgtatttaaggaggccgcaaccccagaagaggagtctgacactctcgaaaaggaattgtccgtggacgacgcaaagctccagggagcaggagaagaggaggcaaaggggggtaagcgccctaaagagggcttactccagatgaagttgcccgagccagtaaagctccagatgtgtctgttactgcagtacctctgtgattgtcaagtgagacaccggatcgaagctattgttgctttctctgatgattttgtggctaaactccaggacaaccagagattccgctataacgaggtgatgcaagcgctgaatatgtctgctgctctcaccgcccgaaaaaccaaggagtttagaagccccccacaagagcaaatcaacatgctgctcaacttcaaagacgataagtcagagtgtccttgccccgaggaaattcgcgatcagcttctggatttccacgaggatttgatgacccattgcggaatcgaacttgacgaggacggctccctcgatggcaattccgacctgacaatccgtggcagactgttatccctggtcgagaaggtgacgtacttgaagaagaagcaagccgagaagcctgtcgagagcgatagcaagaagtcctctaccctgcagcagttgatatcagaaaccatggttcgctgggctcaagagtccgtcatcgaggaccctgagcttgtcagagctatgtttgtgctgctgcatagacagtacgatggcatcgggggacttgtgcgggcactccctaagacgtatacaatcaacggcgtgagcgtggaagacactatcaacctattagcctcactcgggcaaatccggtcgctgctgtctgtccgaatgggtaaggaggaagagaagttgatgattaggggccttggggatatcatgaacaataaagttttttatcaacacccaaacctgatgagagcattgggcatgcacgaaacagttatggaggttatggtcaacgtcctgggtgggggagagtccaaggaaatcacgtttcctaaaatggtggctaactgctgtaggttcctgtgttacttctgtaggatttcccggcagaatcagaaagcaatgtttgatcacttgagctacctgctggagaactcctccgtaggactggcaagtccagccatgagaggaagcacccccctggatgtggctgcagcttctgtgatggacaataacgagctcgcccttgccttgcgggaacccgacctggagaaagtggtgcgctaccttgcagggtgtggactgcaatcttgtcaaatgttggtgtcaaaaggatatccagatatcggctggaacccagtggaaggggaacggtacctggacttcctgagattcgccgtgttctgtaacggcgagagcgttgaggagaatgctaatgtcgtggttagattgctgattaggcgtcccgagtgcttcgggcctgctttgagaggtgaaggcggtaacggcctgctcgccgcaatggaggaggcgataaaaatcgccgaggacccctcacgtgacgggccaagccccaattctggtagcagtaaaactctggatactgaggaagaagaggacgacacaattcatatgggcaatgctatcatgaccttttacagtgcgctgatcgatctgctcggtagatgtgcccctgaaatgcatcttatccacgctggcaagggcgaagccatacggatacgctccattttacgatctctgattccacttggggacctggtgggcgtcatttcaattgccttccagatgcccaccattgccaaggatggcaatgtggttgagcctgacatgtctgctgggttctgtccagaccacaaagcggctatggtgctttttctggacagggtgtacggtatcgaagtgcaggacttcttgctacacttgctagaggttggatttcttccagacctccgtgccgctgcctctctcgatacggctgctctgagtgccactgatatggcgttagccctcaaccgatacctgtgtacagctgtcttacctctcctgactaggtgtgctccattgtttgcagggacagagcaccacgcatccttgatcgactctcttctgcatacagtgtacagattatccaagggttgtagtctgaccaaagcccagcgagattccattgaggtgtgtctgttgtcgatttgcggtcagcttaggccctctatgatgcagcacctcctccgcaggctcgtgtttgatgtccctctgctgaacgagcacgccaagatgccgcttaagctcctcaccaatcactatgaacggtgctggaagtactactgtttaccaggagggtggggcaattttggagccgcatctgaagaggaattacacctctctcgcaagcttttttggggcatatttgacgctctatctcagaagaaatacgaacaggagctgttcaaactggccctgccttgcctgagtgctgttgctggcgcacttcccccagattacatggagtctaactatgtgagtatgatggagaagcagtcttccatggattctgaaggtaattttaacccacaaccagttgacacatccaatataaccatcccagaaaaattagagtacttcattaataaatacgccgagcactcacacgacaaatggagcatggacaagcttgccaacggctggatatacggggaaatctattcagactccagtaaagtccagccactgatgaagccatacaaactcctcagcgagaaagagaaggagatctacaggtggcctataaaagagtccctaaagacaatgcttgcatggggatggagaattgaacgaacccgggaaggggattctatggctctctacaatagaacgagacgaatcagccagaccagtcaggtttcggttgatgcagcacatggatattctccacgggctattgacatgtcaaacgtcaccttgagcagggatctgcatgcaatggccgaaatgatggccgaaaactatcataacatctgggccaaaaaaaagaagatggagctcgaatccaaaggtggaggcaaccacccattgcttgtcccgtacgatacactcacagctaaggagaaggcaaaggaccgcgagaaggcacaagacatcctgaagttcctgcagatcaacgggtacgcagtgagcagagggttcaaggatttagagttagatacaccgtctatcgagaagcggtttgcatactccttcttgcagcagttgatccgatacgtggatgaggcccatcagtacatcctggagtttgacgggggtagccgcggaaagggcgagcacttcccctatgagcaggagatcaagtttttcgctaaagttgtactgcctctcattgatcagtactttaagaaccatcggctctattttctatctgcggcatcccgtcctctgtgttcagggggtcacgcctctaacaaagaaaaagagatggttacctcactgttctgcaaacttggggtgctcgtgcgccaccgcattagtctgttcggaaacgatgcaaccagcattgtgaactgccttcacattctcggacagacccttgacgcaaggactgttatgaaaactggccttgagtctgtgaaatcagcccttcgcgcttttctggataacgcagcagaggatctggagaagacaatggaaaacttaaagcagggccagttcacccacactagaaatcagccaaagggggtcacccagatcatcaactatacaacagtggcgctgctgccaatgctgagtagcttatttgagcatatagggcaacaccaattcggagaggacctgatcctcgaggacgtccaggtcagttgctatcgcatactgactagcttatatgcactgggaacaagcaaatctatttatgtagagcgccagaggtcagccttaggcgaatgcctggccgcttttgcaggggctttccccgtggcatttcttgaaacacatctcgacaagcataatatatattctatttataacacgaaatcttctcgcgagagggccgcactgtctctgcccactaacgtggaggatgtttgtcccaacatcccatcattggagaagcttatggaggagattgtggagctcgcagagagtggtattcggtatacccaaatgccgcatgtgatggaggtgattctgcctatgctttgctcctacatgagccgctggtgggagcatggtccagaaaacaaccctgagcgggctgagatgtgttgcacggctctgaactccgagcacatgaacaccctcctggggaacatcctgaagatcatttataataatctaggcatcgatgagggggcatggatgaagcgcctggcggtattctctcaacccatcatcaataaagtgaaaccacagctgctcaaaactcactttctccccctaatggaaaagcttaaaaagaaagcagcaaccgtggtgtctgaagaagatcatcttaaagcagaggctagaggagacatgtctgaagccgaactcctgatactcgacgagttcactacactggctcgcgatctctatgccttttacccactgctcatcagattcgtggactacaaccgtgctaagtggttgaaggaaccaaatcctgaagcagaagaactctttcggatggtagccgaggtctttatctactggtcgaagagtcacaacttcaagagagaggagcagaactttgtagtgcagaacgaaatcaataacatgtcattcctgataaccgacaccaaaagtaaaatgagcaaagctgccgtgtctgaccaggagcgcaagaagatgaagcgcaagggcgaccgttacagtatgcagacttcccttatcgtcgccgcattaaagagactgttacctatcggtcttaacatttgcgcaccgggagaccaagagctgattgcccttgcaaagaaccgcttctctcttaaagatacagaagacgaggtgagggatattattcgttccaatattcacctccaaggaaagttggaagatcccgcaattagatggcagatggcattgtacaaggatctcccaaaccgcacagatgatacgagcgatcctgaaaagacagtggaaagagtgctggatattgccaatgtgttgttccacttagaacagaaatctaagcgcgtggggagaaggcattattgccttgtcgagcacccacagcgaagtaagaaagccgtgtggcataagctgctaagcaagcaacgcaaacgcgctgtagttgcctgctttaggatggcccctctttataacctcccccgacatcgcgcagtaaacttgttccttcaaggatacgagaagtcctggatcgagactgaagaacactacttcgaggataagttgattgaggaccttgctaaacccggtgccgagcctcctgaggaggatgagggcacaaagcgagtggacccactgcaccagcttatcctgcttttcagcagaaccgctctcaccgaaaagtgcaagttagaagaggatttcctgtatatggcttatgcagacatcatggcaaaatcttgccacgatgaggaggatgatgatggtgaggaagaagtgaagtcctttgaagaaaaagagatggagaaacagaagctgctataccaacaggcaagactccacgatagaggcgctgctgaaatggtgttacagactattagtgcgagcaaaggagaaacaggacccatggttgccgctacattgaaattaggcatagcgatattgaatggcggtaatagcacggtgcagcagaagatgctagactacttgaaggagaagaaagatgtgggattttttcaaagcttagccggtctgatgcagtcatgctccgtgctagacctaaatgcctttgagcgacagaacaaagctgaaggcctgggcatggtgactgaagaaggtagtggagagaaggtcttgcaggacgacgagtttacctgcgaccttttccgctttttgcagctcctttgtgagggacataactccgattttcaaaattacctgagaacccagactggcaataataccaccgtgaacattattatatcaactgttgactatttgctccgggttcaggagtccatcagcgatttctattggtattacagcggaaaagacgtgatcgacgaacaaggtcagaggaatttttccaaagcaatccaagtggcgaaacaggtgttcaacacgctgactgagtacattcagggaccttgtaccggaaaccagcagtcactggcccactctcgattatgggacgccgtagtgggctttttgcatgtatttgcccatatgcagatgaaactgtcgcaggatagttcacaaattgaactcctgaaggagctgatggacttacagaaggacatggttgtgatgttactgagcatgttagaaggcaatgtggtgaacggcacaatcgggaaacaaatggttgacatgctggttgaatctagtaataacgtcgaaatgatcctgaagttttttgacatgttcctgaaattgaaggacttgacgagttccgacacattcaaggaatatgatcccgacggcaagggggtaatatctaaaagggatttccataaagctatggagagtcataagcactacacccagtccgagacagaatttcttctgagctgtgctgagacagacgaaaacgagacactggactacgaggaatttgtgaaacggtttcatgaaccggcaaaagacatcgggttcaatgtggccgtcttgttgaccaatttgtcagagcacatgccgaacgatactaggctccagacattcctggagctggcagaaagtgtgctgaattattttcagcctttcctgggccgaattgaaattatggggtcagccaaaagaatcgagcgcgtttactttgagattagtgaaagctccagaacacagtgggagaaacctcaggtaaaggagagcaaacgacagtttatcttcgacgttgtcaatgaaggtggagaaaaggaaaagatggagctcttcgttaatttctgcgaggataccattttcgaaatgcagctagctgcacagataagtgaatctgatctcaacgagcggagtgccaacaaagaagagagcgagaaagagcgccctgaagaacagggcccaaggatggcttttttttctattctgacagtccggtcggcactgttcgccctcaggtataatattctgacgcttatgcgcatgctatcgctcaagagtctgaagaagcaaatgaaaaaggtaaaaaaaatgaccgtgaaggatatggtgacagcgtttttcagttcctattggagcatcttcatgacgttgctgcattttgtagcttcagtttttaggggctttttcaggattatctgctccctcctgttaggaggtagtctggtagagggcgcaaaaaaaataaaggtagcagaactattggcaaatatgcctgatcccacacaggatgaggttcggggtgacggagaagaaggtgagcgaaagccactcgaggccgcactgccgtccgaggatctgacggatctgaaagagttgacagaggaatccgaccttctgtcagatatcttcggcctcgaccttaagcgggaaggaggtcagtataaacttataccacataatcccaatgccggactatcggatctgatgtccaacccagtgcctatgcccgaggtgcaggaaaaattccaggaacagaaggcaaaggaggaggagaaggaagaaaaagaggagaccaagtcagaaccggaaaaagccgaaggggaagatggcgaaaaagaagaaaaggcaaaggaagataagggtaaacagaagcttcgccagttacacacacaccgctatggagagcccgaggtccctgagtcagcattttggaagaaaatcattgcgtaccagcagaaactgctgaattactttgcgcgtaacttttacaacatgcggatgttggcactttttgttgcctttgcaatcaacttcattcttctgttctacaaggtgtctacgtcgtccgtggtggaagggaaagagctgcctactagaagttctagtgagaacgccaaagtaacctccctggattcctctagccaccgaataattgccgtccattacgtgcttgaggagagcagtggttatatggagcccactctcaggatactggccatcttgcataccgtgatctcttttttttgcatcattgggtactattgtctgaaggtgcccttggtgattttcaagcgggaaaaggaggtggcaagaaaactcgaattcgatggtctgtatatcaccgaacagccctcagaggatgacattaagggccagtgggacagactggtgatcaacacccagagcttcccgaacaattactgggataagtttgtgaagcgtaaggtgatggacaagtacggagaattctacggtcgggatcgcatcagtgagttactgggcatggataaagccgcactggatttctccgacgcgcgtgagaaaaagaaacccaaaaaggactcctctctgtcagctgtgcttaactccatagacgtcaagtaccagatgtggaaactgggtgtggtgtttaccgacaacagctttctgtatttagcatggtatatgaccatgagtgtgctgggacactataataacttctttttcgccgctcacttactggatatagccatgggctttaagacacttcgcacaatcctctcttcggtaacccataacgggaaacagctcgtacttacagtgggtctgctggccgtggtggtttacctatatacagtagttgcgtttaatttttttcgaaaattctacaacaaatccgaagacggagacacaccagacatgaaatgcgacgatatgctcacctgttacatgttccacatgtacgtgggtgttcgcgcaggcggaggtatcggtgacgaaattgaagatcccgctggggacgagtacgagatctacaggattatatttgacataacctttttttttttcgtcatcgtaatactactcgccatcatccagggcttgatcatcgatgctttcggcgagttgcgggaccagcaggaacaggtgaaagaagacatggagacaaaatgcttcatctgtggtatcgggaatgattatttcgacaccgtgccccacgggtttgagacccataccctgcaggaacataacctcgcaaactacttattcttccttatgtaccttataaacaaagatgaaacggaacacaccggccaggaatcctacgtctggaaaatgtaccaagaaaggtgttgggagtttttccccgctggcgattgtttccggaagcagtatgaggaccagcttaattag

SEQ ID NO: 239509 - DNA, 14601 bp, synthetic construct
  misc_feature 1..14601: note = Description of Artificial Sequence: Synthetic coding sequence
  source 1..14601: mol_type = other DNA
atggcagaactcggagggggtggagaagaagatgccaggtggtaccggaaggaagacgaggttgtgttacagtgcatcgctaccatccacaaggagcagcgcaaattctgtctagcggctgagggacttggcaatcgactctgctttcttgagcccacgagcgaggcgaagtacattcctcctgatttgtgtgtgtgcaatttcgtcctcgagcagtctctctcggtgcgcgctctgcaagagatgctcgccaatacaggcgagaacgggggagaaggcgcagcacagggagggggacaccgcactttactgtacgggcacgccgtgctgttgagacacagcttctccggaatgtatttgacttgtctgactactagtcggagccagaccgataaactggccttcgacgtcggactccgggaacacgctactggggaggcttgctggtggaccatccatcctgcttctaaacagagatccgagggcgagaaggtaaggatcggggatgacctgatcttagttagcgtttcttccgagcggtaccttcacctgtcagtgagcaatggaaacatccaggtcgatgctagctttatgcagacactgtggaacgtgcatcccacttgtagcggctcttcgattgaagaggggtatctgttaggtggacatgtcgtgcggcttttccatggtcacgacgaatgtctgactatcccatccaccgaccagaatgactcccagcatcggagaattttctatgaggcaggaggtgctggaactagagcacggagcctatggcgagtagagccactgcggatttcctggagcgggagcaacattcgctgggggcaggcattcaggctgcgacacctgactaccggccattacctggctctcacagaagatcaaggcctcatcctgcaggacagggccaaatctgacacgaaatccacagcgttttcatttcgcgcaagcaaggaattaaaggagaaattggacagttctcataagagagacatcgaaggcatgggtgtccctgagatcaaatatggcgacagcgtgtgctttgttcagcacattgcctctgggctttgggttacatataaagcccaggatgctaagacatcacgcctcggcccactgaaacggaaggtgatcctgcatcaggaaggacatatggacgacggtctgacccttcaaaggtgtcagcgggaggagtcccaagccgctaggatcattcggaatacgactgccctcttctcacaattcgtgtctggaaacaataggaccgcagccccaatcaccctacctatcgaggaagttttgcagacgttacaggacctgatagcatacttccagcctcccgaagaagagatgcgccacgaggacaaacagaataaattgaggagtctcaaaaacaggcagaacctttttaaggaggagggtatgttggccctcgtcctgaattgcatcgaccgactcaatgtttataatagtgtcgcacatttcgccggaattgcgagggaggaaagcggcatggcttggaaagagatcctcaatctgctttacaagcttctcgcagcattaatccggggtaataggaacaactgcgcccagttttctaataacctcgactggctcatttcaaagttggataggcttgaaagctcttcagggatactcgaagtcctacactgcattctaactgagagtcctgaggctttgaatctgatagccgagggtcacattaaaagcattatatcactgctagacaaacatggtcgcaatcataaagtactggacattctgtgcagcctctgtctgtgcaatggggtggcagtgcgtgccaatcagaacctgatttgcgacaacctgttgcctcgacggaaccttttattgcagacgaggttgattaacgacgtgacgagcattcgccctaacatttttctgggggttgcagagggtagtgctcagtacaaaaagtggtactttgagctaatcattgaccaagtagatccctttctcactgccgaaccaacacacctgcgagtcggttgggccagctctagtggttacgctccataccctggtggcggagaggggtggggaggaaatggcgtaggggacgatctgtattcttacggtttcgatggcctgcatctgtggtctggaagaattccccgtgccgtcgcctctattaatcaacacctactccgcagtgatgatgtcgtgtcctgttgcctagacttgggggtccctagcatttctttccgtattaacggtcagccggtgcagggaatgtttgagaatttcaatacggatggtctctttttccctgtgatgtccttttcagcaggcgtgaaagtccgcttcctgatggggggtcggcacggagaattcaaattcctgcccccaagtggttacgcaccctgctatgaggctctactacccaaggagaagatgagacttgaacccgttaaagaatacaagagagacgccgacggtatcagggatctattggggaccacacagtttctttcacaggccagcttcattccgtgtccagtcgatacatcccaggtgatcctgccaccccacttggagaagatcagagacaggttggccgaaaatatacacgaattgtggggaatgaataagattgaactgggatggacattcggcaagattagggacgacaataaacgacaacatccgtgccttgtggagttctccaagctgcctgaaaccgaaaagaattacaacctacagatgagtactgaaactttgaagactctcttagccttagggtgccacatcgctcacgtcaatcccgcagcggaagaggatctcaagaaggtgaaactgcccaagaattatatgatgtccaacggatataagccagcccctctggacctgagcgatgtaaaactcctccccccacaggagattctggtcgataaactggcggaaaacgctcacaacgtgtgggccaaagaccgtatcaaacagggttggacctatggaattcaacaggacttgaaaaataaacgtaatcccagactcgtcccctatgccctcctcgatgagaggacaaaaaagagcaaccgggacagcctgagggaagccgtccggaccttcgtgggatatggctacaatatagagccatcagatcaggagcttgccgattctgcagtggagaaggttagcatcgacaagatacgcttttttcgggttgagagatcttacgccgtccggtccgggaagtggtactttgagtttgaggttgtgacaggaggggatatgcgcgtggggtgggcccgaccgggatgtcgaccagatgtcgaactaggcgctgacgaccaagcattcgtgtttgaagggaaccgcggtcagagatggcatcagggttctggttacttcgggcgaacttggcagcctggagacgtggtggggtgtatgattaacttagatgacgcaagtatgatttttaccctgaacggagagctgctaataactaataaaggcagcgaactcgcgttcgcagactacgaaatcgagaacggattcgtgcctatctgttgcctcgggctgtcccagatcggtcgcatgaacctcggtacggacgcgtctacatttaaattttatactatgtgtggactacaggaggggttcgagccgttcgcggtgaacatgaaccgcgatgtagcaatgtggtttagtaagcggctacccaccttcgtgaacgtccctaaagaccaccctcatatcgaagtcatgcggattgacggcactatggatagccccccatgtctgaaagtgacgcataaaacattcggaacacagaattccaatgcagatatgatatattgtagattgtctatgcccgtggagtgccactcttcctttagccacagcccctgtcttgacagtgaagctttccaaaagagaaagcagatgcaggaaatcctgtcccatacgactacccagtgctactatgcaatccggattttcgccggacaggaccccagctgtgtgtgggttggatgggtaactcccgactatcatttatactccgaaaaatttgatctaaacaagaactgtactgttacagtgaccctcggggatgaacgcggacgggtgcatgagagcgtgaagcgcagcaattgttacatggtatgggggggtgacatcgtcgcgtcttcacaacggtcaaacaggagtaacgtggacctggagatcggatgcctggtggatctcgccatgggaatgctgagcttcagtgccaatggtaaagagctgggcacatgctaccaggttgagcccaacactaaagtgttcccagcagtgttcctacaacccacctccacctcactctttcaattcgaattagggaagctaaaaaacgcgatgccactatctgccgctatctttagatctgaggagaagaatccagtcccacagtgtccgcctaggcttgacgtgcagactatccagcccgtcttatggagcaggatgccaaatagcttcctgaaggtggagacagaacgtgtaagtgagagacatggttgggttgtccagtgtctggagcccttgcagatgatggcgctccacatcccagaggagaacaggtgtgtcgatatattagagctgtgtgaacaagaggacttgatgagattccactaccacactttacgactatatagtgctgtatgtgccctgggtaattcgagagtcgcttatgctttgtgctctcatgtagacctctcccagctattctacgccattgacaacaagtatctgccaggtctcctgcgctccggattttacgatctgctgatcagcatacacttggcgagcgctaaggagcggaagctgatgatgaagaatgagtatattataccaatcacttctactacaagaaatatcaggttgttccctgatgaaagtaaaagacacggcctgccaggcgtcgggctgcgcacctgcttaaagccaggtttccgcttttctactccttgtttcgtcgtaacaggtgaagatcatcagaaacaatctcctgagattcccctggaaagcctgaggaccaaggctctgtctatgcttacagaggccgtgcagtgcagtggggcacatatccgcgaccccgtgggcggttccgtggaattccagtttgttcctgtcctgaaacttattgggacattgttggtgatgggggtgttcgatgatgatgatgtaaggcagattctgctgctgatcgatcctagcgtgttcggggaacatagtgccggtactgaagagggggctgaaaaggaagaggtgacccaggttgaagaaaaggcagtggaggctggcgaaaaggccggaaaggaggcgcctgtcaaaggtttgctccagaccagattgcctgaaagcgtgaaactgcagatgtgtgagctgctttcttacctttgcgactgcgagctgcaacacagggttgaggccatcgtggcctttggggacatctacgtatctaaactgcaagccaaccagaagttcaggtacaacgagctcatgcaggctctgaatatgagtgcggctctgactgctcgaaagacgaaggagtttcggtctccaccccaggaacagatcaatatgctgcttaacttccagttaggcgagaattgtccatgccccgaagaaattcgggaggagctgtatgattttcacgaagacctccttttgcattgtggagtcccactagaagaagaggaggaagaagaggaggatacttcgtggactgggaagctctgcgcactggtatataagatcaaaggcccaccgaagccggaaaaagaacagcctaccgaggaggaggagcgttgccccacaactctgaaagaactcattagtcagaccatgatttgctgggctcaggaagatcagattcaggactccgaattggtacgaatgatgtttaatcttctgcgtcggcagtacgattccattggtgagctcctgcaggcactgcggaaaacttacaccatctcccacacatccgtttcggacaccataaatttgctggctgcattggggcagatccggtcactgctctcagttcgcatgggtaaggaggaagaactccttatgataaacggcctgggagacatcatgaacaataaggtcttttaccagcatcccaatctaatgcgggtacttggcatgcatgagacagtgatggaggtgatggtgaacgtcctgggcaccgagaaatcccaaattgccttcccaaagatggttgcttcctgctgccggtttctgtgctatttttgcagaatttcgagacaaaatcagaaggcaatgtttgagcatctctcataccttctagaaaatagttccgtgggcctagctagcccctcaatgagggggagtacccccttggatgtggccgcttcctcggtgatggacaataacgagctcgccttgagcctggaagagcccgatctggaaaaagtcgtgacttatctggcaggatgtgggttacaaagttgccctatgctgctggctaaaggctaccccgacgtcggttggaacccaatagagggagagcgatacctgagcttcctgaggtttgccgttttcgtcaactcagaatccgtggaagagaacgccagcgtagtcgttaagcttctgatcaggcggccagaatgtttcggacctgcactcagaggagaaggagggaacgggctgctggcagctatgcagggcgctatcaaaatctcggagaatcctgccctggatcttccctcacagggttataaaagggaggtcagtactggagacgatgaggaggaggaggaaatcgtgcatatggggaacgccataatgagcttttactcagcccttatcgacttgctgggccgatgtgccccagagatgcaccttattcagacaggaaaaggtgaagcaatccgtatcaggtcaattttacggagcctcgtgcctactgaagaccttgtgggcattatctctatccctctaaagctgccatccttgaataaagatggctccgtgtctgagcccgacatggctgctaacttttgcccagatcacaaggctcctatggtactgtttctggaccgcgtgtatggaattaaagaccagactttcctgttgcatcttttggaagtgggatttcttccagacctgcgcgcaagcgctagtctggatactgtgtccttaagtacaacagaggcagcactggcactgaaccggtacatctgctctgccgtgctcccactgcttaccaggtgtgcgcctctgttcgctggcacagaacactgcaccagtctgatcgacagtaccttgcagactatttacagactcagtaaggggaggtcgttgacaaaggcccagagggacaccatcgaagaatgcttattagctatttgcaatcatctgcggccatccatgctgcagcagttacttcggagattagtctttgacgtccctcagctcaatgagtactgcaagatgcctttgaagctgttgactaatcattatgaacagtgttggaagtactattgtctgccttctgggtggggttcatacggactagcagtagaggaagagctgcacctgaccgaaaagctgttctggggcatctttgactcactgtcacataaaaaatatgatcccgacctgttccgcatggcactcccttgtctgtccgcaatcgctggggcactgccgccagattatttggatacgaggattaccgcaactttagaaaagcagatatcggtcgatgcagacggcaactttgaccctaagccaattaataccatgaacttctcccttcccgagaaactggagtacatcgtgaccaaatacgctgaacacagccacgataagtgggcttgcgataaatcacagagcggttggaagtacgggatctcacttgatgaaaatgtgaaaacccatcccctcattaggccctttaaaactctgaccgaaaaagaaaaggaaatttataggtggcccgcacgtgaaagcctcaagaccatgctcgctgtcgggtggaccgttgagcgcacgaaggagggagaagcacttgtgcaacaacgagaaaatgaaaaactgagatcagtctcccaggcaaatcaaggtaattcctacagtcccgcacctctcgatctgagcaatgttgtactgagccgcgaactgcagggcatggttgaagtggtggcagaaaactatcataatatctgggctaagaagaagaagctcgaactggagagtaagggcggagggagtcaccccttactggtgccttacgatacacttacagctaaggagaaattcaaggacagggagaaggctcaggacctcttcaagtttctgcaggtgaacggcatcatcgtgtctcgcggaatgaaagacatggagctggatgcatccagcatggagaagcggtttgcctataaattcctgaagaaaatactgaagtacgtggactctgctcaggagtttattgctcacttggaagccatcgtgagttctggaaaaaccgagaagagcccaagggaccaggaaatcaaattctttgccaaggtgttgctgccactggtggaccaatactttacttctcactgtctgtactttctgagctcacccctgaaacctctgagttcctccggctacgcaagtcataaagaaaaagagatggtggccggactgttttgcaagctagccgcactcgtgagacatcgcattagcctctttggttctgactcaacgactatggtctcgtgcctgcacattctggctcagactctggatacccggactgtgatgaaatcggggtcagaattagtaaaggccggtctcagagcattttttgaaaacgccgcagaggatctggagaaaaccagcgaaaaccttaagcttggaaagttcacgcattcacggacccagatcaagggggtgtcccaaaacattaactacactacagttgcactgttacccatcttaacttccatattcgagcatgttacccaacaccaattcggaatggacttactgctcggcgacgtacagatttcctgttaccatattctctgctccctgtacagcctcggtaccggtaaaaatatctatgtggagcgtcagaggcccgctctgggggaatgccttgcatctctggccgctgcgattcctgtcgctttcttggagcctaccctcaacagatacaaccctcttagcgtttttaacacaaaaacgccacgcgagaggtcaatactcggcatgcccgatacagtcgaggatatgtgtcctgacattccacagctagaagggctgatgaaagagataaatgatctggctgagtctggcgcacgctatacagaaatgcctcacgtgatcgaggtgattcttccaatgctctgtaactatctgagctactggtgggaacggggacctgagaatttgcctcccagtaccggcccttgttgtacaaaggtaacctctgagcacctttccctgatcctgggaaacattctcaagatcatcaacaacaacctcgggattgatgaagctagttggatgaagcggatcgctgtgtatgcccaacctatcattagcaaagcacgccctgacctgctgagatcgcactttatcccgaccctcgagaagctgaagaagaaggccgtcaaaacagtgcaggaggaggaacagcttaaagccgatggaaaaggcgatactcaagaggctgagctcctgatactcgatgaattcgcagttctctgtcgagacctgtacgctttctatcctatgctgatcaggtatgtggacaataacagatctaattggctcaagagccctgacgcagactccgatcagctgttccgcatggtggcagaagttttcatcctatggtgcaagtcccataactttaaacgggaggagcagaacttcgtgatccagaacgagattaacaatctcgcatttctgacaggcgacagcaaatctaaaatgtctaaatcggggggacaagatcaagagcgcaaaaagaccaaacgacgtggagacctctacagcatacaaacctcccttatagtggccgcactgaaaaaaatgctaccaatcggcttgaacatgtgtacgcctggagatcaggaattaatctccctagcaaagtctaggtatagccatagagatacggacgaggaagtgcgcgaacatcttcgcaacaacttgcacctccaggagaagtcggacgatccagcggtgaaatggcagctgaatctatataaggacgtgcttaagagcgaagaacccttcaacccagaaaaaactgttgagcgggtgcagcgcattagcgctgccgtctttcacctggagcaggtggagcagccccttaggagcaagaaggctgtatggcacaaacttcttagtaagcagcgcaagcgcgctgtggtggcctgttttcgtatggccccactatacaacctgcctaggcacaggtctataaatctcttcttgcatggttatcagagattttggatagagaccgaggagtacagctttgaagaaaaactggtacaggatctggccaaatcccccaaagtcgaagaggaggaagaggaggagacagaaaaacagcccgacccccttcatcagatcatcctctacttctctcgaaatgccttgacagagcgaagcaaactcgaggacgatccgctgtacacgtcctattcctcgatgatggctaagagttgccagtcaggggaagacgaggaagaagatgaagataaagaaaaaacattcgaggaaaaggagatggaaaagcagaagacactgtaccaacaggccaggctccacgagaggggcgctgctgaaatggtactccagatgattagtgcgagcaagggagagatgtcaccgatggtggtggaaaccttaaagttagggatagccatcctgaacgggggtaacgcgggagtccagcagaagatgctggactatttgaaagaaaaaaaagatgcaggattttttcagagtctgtcaggactgatgcaaagctgcagaagcgtgttggatcttaatgcctttgagaggcagaataaggccgagggattaggaatggtcaccgaagagggaaccctgatcgtgcgcgaaagaggagaaaaggtcctgcagaacgatgaatttactcgagacctgttcagattcctacaacttctgtgcgagggccataatagcgattttcagaacttcctccggacacagatgggtaacaccacgacggttaacgttatcattagtaccgtcgactacctgctcagactccaggagtcaatctcggatttttactggtactacagtggtaaagacattattgatgagtccggacagcacaatttcagcaaagctctggccgtaaccaagcagattttcaatagcttgactgaatacatccaaggcccttgcattgggaaccaacagagcctggctcatagtcggttatgggacgcagtggtgggcttcctccacgttttcgctaatatgcaaatgaagctaagtcaggactcttcacagatagagctcctcaaagaactgcttgatctgctccaggatatggttgtaatgttgttgagcctgcttgagggaaatgtcgtaaatgggactataggcaaacagatggtggacacacttgtcgaatcgtccaccaatgtggagatgattctgaaatttttcgacatgttcctgaagctgaaagatctgaccagctcagatacattcaaggagtatgaccccgacggcaaaggcattatttccaagaaagagttccaaaaggctatggaaggacagaaacaatatacacagtccgagatagatttccttctctcctgtgcggaggccgatgagaacgatatgttcaactatgtggattttgtcgatcgcttccatgagccggctaaggatataggtttcaatgtcgccgtgttgctgacgaatctgtccgagcacatgccgaatgatagtcgcctgaagtgtttactggacccagccgaaagtgttctgaactacttcgaaccatacctggggagaatagagatcatgggaggcgcaaaaaagatcgaaagagtttacttcgagataagcgaaagttcaagaacacagtgggaaaaaccacaggttaaggagtccaagagacaattcatcttcgatgtggtaaatgagggaggggaacaggagaagatggaactgttcgtgaatttctgtgaggatactatcttcgagatgcagttggctagtcagatttctgagtcggattcagccgacaggccagaagaggaggaggaagatgaggattcaagttacgtgctcgaaattgccggtgaagaagaggaggatggttctcttgagcccgcatccgcgtttgcaatggcttgcgctagtgtaaagaggaacgtgacagactttcttaagcgggcaacactgaagaacctgaggaaacaataccgaaatgtaaaaaaaatgaccgccaaggagctcgtgaaagtactgtttagtttcttctggatgctgtttgtgggcttgttccagttgctgtttacaatcctggggggaatctttcaaattttgtggtcaaccgtttttggtggtgggctggtggaaggggcaaagaacattcgcgtgaccaaaattctgggtgacatgcctgaccccacccagtttggcatacatgacgataccatggaggcagagcgtgccgaggtcatggagccaggaatcactaccgaactcgttcacttcatcaaaggggaaaaaggtgacacagacattatgtcagacctcttcggactacatcctaagaaagagggtagcctaaagcatggcccagaggtggggttaggcgatctttctgaaataatcgggaaagatgaaccacctacgctagagagcaccgtacagaagaaacggaaggcccaggcagcggaaatgaaagccgctaacgaggctgaaggcaaagtcgagagtgaaaaagccgatatggaggatggtgaaaaggaggataaggataaagaggaggagcaggcagagtatttgtggaccgaagtgactaaaaagaagaaaagaagatgcgggcaaaaagtggagaagcccgaggcatttaccgcaaatttctttaagggcctggagatttaccaaacaaagctcctgcactacctggcgcgtaatttttataacctcagatttctcgccctgtttgtggccttcgccataaattttattctcctgttctacaaagtcactgaggaacccctggaagaggagactgaggacgtggctaatctttggaactcttttaacgacgaagaggaggaggaagccatggtgttttttgtccttcaagagtctacaggctacatggctcccacacttcgggctctggccatcatccacacaatcatatccctggtctgtgtagtggggtactattgcctgaaggtgcctttggttgtgtttaaaagggaaaaagaaatcgccagaaagttggagtttgacgggctatatatcactgaacagccttcagaagacgacataaagggacaatgggaccgacttgtgataaacactcccagctttcctaacaactattgggataaatttgtgaaaaggaaggtaatcaacaagtatggtgatctctacggggcagagaggatcgcagaactgttggggctcgataagaatgcccttgacttcagtcccgtcgaggagacaaaggccgaggctgccagcctcgtttcctggctatcctccattgatatgaagtatcacatttggaagctaggggtggtcttcactgataacagtttcctctatctggcctggtacaccaccatgtcggtgctaggacactacaataatttctttttcgcagcccacctgttagatatcgccatgggtttcaagaccctccgtacaatccttagctctgttacccataatggaaagcagctggttctcacggtggggcttctggctgtggtcgtgtacttatacactgtggttgcctttaacttttttcggaagttttacaacaagtccgaagatgatgacgagcccgatatgaagtgcgacgacatgatgacctgctacttgttccacatgtatgttggcgtccgggctggaggtggcattggggatgaaatcgaggaccctgccggagacccttatgaaatgtataggatcgtgttcgacatcacctttttcttctttgtcatagtgattcttttggcgatcattcaaggactgatcattgatgcatttggtgagctacgggaccaacaggaacaggttcgggaggatatggagacaaaatgcttcatttgtggtatcgggaatgactattttgacaccaccccgcacgggtttgagacacatactcttcaggaacataacctggcaaactatctgttttttctgatgtacctgatcaataaagacgagactgagcacaccggacaagagagttacgtgtggaagatgtatcaggagcgatgctgggacttctttccagctggcgactgctttcgcaagcaatacgaggaccagctcgggtaa

SEQ ID NO: 239510 - DNA, 14613 bp, synthetic construct
  misc_feature 1..14613: note = Description of Artificial Sequence: Synthetic coding sequence
  source 1..14613: mol_type = other DNA
atggccgaggggggagagggtggtgaagatgagatacagtttctgaggactgaggatgaggtcgtgctgcagtgtatcgccacaatccataaggaacagcggaagttttgtctggccgcagagggcttgggcaaccgtctgtgcttcttagagccaacatccgaagctaagtacataccacctgatctttgcgtatgcaacttcgtgctggagcaaagcctgagtgtgagggctttacaagaaatgctagccaacacaggtgaaaatggtggggagggggcagcacaaggcggaggccacaggaccctgttgtatggtcatgctgttttgcttcggcactccttctcaggaatgtacctgacctgcttaacaacttcacgttcacaaaccgacaaactggcattcgatgtcggactgagagaacatgccaccggtgaggcatgttggtggactatccaccctgcttcaaagcagcggtccgagggcgagaaggtacgaatcggtgacgacctcatcctggtatcagtcagttccgagcgctacctgcacttatccgtgtcaaatggaaacatccaagttgatgcaagcttcatgcagaccctgtggaatgtgcaccctacctgttcggggagtagcatcgaggaaggttacctgctgggaggacatgtcgtacggctatttcatggccatgacgagtgcctcactattccttcaacagaccaaaacgattcccaacatcgacgcatcttctacgaagctggcggtgcgggaaccagggcgagatctctctggagggttgaacccctgagaatttcctggtccgggtccaacattcgctggggacaagcttttagactcaggcatctcaccacgggccattatctggctttgaccgaggaccagggcttaatcctgcaagaccgggcaaaatcagacaccaagtcaaccgcattcagctttcgggcaagtaaagagctgaaggagaaactagatagcagccataaacgggacattgaggggatgggagtacccgagatcaagtatggggattctgtctgcttcgtgcagcacatcgcttcagggctgtgggtgacgtataaggcccaggacgctaaaacatcaagactgggacctctgaaaaggaaggtaatacttcaccaggaggggcacatggatgatggacttacactccaaaggtgtcaaagagaagaatcccaggcggcaagaattatccgtaacacgaccgcactcttttctcagtttgtgtctggaaataaccggacagccgcacccatcacactgcctatcgaggaagtcttgcagacgcttcaggatcttatcgcctactttcagcctcctgaagaagagatgcgacacgaagataagcagaacaaactgagatctttgaaaaataggcaaaacttgttcaaggaggaaggcatgctcgcactggtactcaattgcattgaccgactaaatgtctacaactccgtggcacacttcgctggcatcgctagggaggagtccgggatggcatggaaggagattctgaacctgctatataaactgcttgcagctctcattcggggaaatcgtaacaactgcgcacagttcagtaacaacttagattggctgatcagcaagctcgataggttggaatcttcgtctgggatcctggaagtacttcactgtattctgaccgagtcgccagaagccctcaacctgatagccgaggggcacattaagtccatcatttcactcctcgataaacacgggagaaatcacaaagtgctggacattctctgcagtctctgtctctgtaatggagtggcggtccgggctaaccaaaacctgatctgtgacaatttgttgccccgtaggaacctgctgctacaaaccaggctcattaacgatgtgacatcgatccggcctaatattttccttggagtggccgaaggttctgcccagtacaagaagtggtacttcgagctgatcatagaccaggtggatcccttcctgaccgcagaacccacccacctccgcgtgggatgggcgtccagtagtggatacgccccttacccaggaggaggagagggatggggcggaaatggcgtcggagacgatctgtattcctatggatttgatggcctacacctttggtcaggtaggatccctagggctgtggcctctatcaatcaacacttgctgaggagcgacgatgtagtttcctgctgcctcgacctgggagtcccgagcatatcttttagaatcaacggccaaccggtgcagggaatgtttgaaaactttaacaccgatggtctgttctttcctgtgatgtcatttagcgcaggggtcaaggtccgctttctgatgggagggcgtcacggggagttcaaattcctgcctccctccggatatgccccatgctatgaagccctcctccctaaagagaaaatgcgcctcgagcccgtgaaagaatataagcgcgacgcagatgggataagagacctcctgggcacaacgcagtttctgagccaggcctcctttattccttgtccagttgatacttcacaggtaatccttccccctcaccttgagaagattcgagacaggctggcggaaaacatacacgagctctggggcatgaacaagattgaactgggttggaccttcggcaagattcgcgacgacaacaagcggcagcacccttgtctggtcgagttcagtaaactgccagagacggagaaaaattataatctccaaatgtcaacagaaacactgaaaactctcttggctctgggctgccacattgctcacgtcaaccccgctgcggaggaggatctgaagaaagtcaagcttccaaagaattacatgatgtccaatgggtacaagcccgcaccactggacctgtcagacgtcaaactgttgcctcctcaggaaatccttgttgataagctggccgagaacgcacacaacgtttgggctaaagaccgtattaaacaaggctggacctatgggattcagcaggatctaaagaataagagaaatcccagactagttccgtacgccttgctcgatgaacgcacgaaaaaaagcaaccgggacagtctcagggaagccgtcaggacttttgtgggatatggctataacattgagcccagcgatcaggagttggccgattctgcagtcgaaaaagtttccatcgataaaattcggttctttcgcgtggaaagaagctatgccgtgagatctggaaaatggtacttcgagtttgaggttgttacagggggtgatatgagggtcgggtgggcacggccaggttgtagacccgacgtggaattgggcgctgacgatcaagccttcgtctttgagggaaatcggggtcagcgatggcaccaggggagtggttatttcggtagaacatggcagcctggagatgtcgtggggtgcatgatcaacctggatgacgcctcaatgatcttcacactgaatggagaacttcttatcacaaataagggctctgagctggctttcgcagattacgagatcgagaacggttttgtgcccatttgttgtttaggacttagtcagatagggagaatgaacttgggcacagacgcttccacatttaagttctacacaatgtgcggtctccaggagggttttgaacctttcgccgttaacatgaacagagacgtagctatgtggtttagtaaacggttgccgactttcgtaaacgtgcctaaggatcacccacatatcgaggtgatgcgcatagatggtactatggactctcctccatgtttgaaagtaacccacaagaccttcgggacccagaatagcaacgcggacatgatctactgcaggctttcaatgcctgttgagtgtcactcctcattttctcacagtccctgcctggattcggaggcctttcaaaaacgaaaacaaatgcaggagattctctcgcatactactactcagtgctactacgcaatccgtatattcgcgggtcaggatccttcctgcgtgtgggttggatgggtgactcccgattaccacctctacagtgagaaatttgatctgaataagaattgcactgtgaccgtgacattaggcgacgaaagggggagagttcatgagtctgtcaaaagaagcaactgctatatggtatggggaggagacatcgtcgctagcagccaaaggtccaatagatcaaacgtggacttagagatcggctgccttgtggacctcgcaatgggcatgctgtccttctctgccaacggaaaggaactgggcacttgctaccaggtagagccgaataccaaggtgttccctgccgtctttctccagccaacttccacctctctctttcagttcgagctgggcaagcttaaaaatgccatgcccctgtccgccgcaatttttaggtccgaagagaaaaacccagtcccccagtgcccacccaggttggatgtacagactatccagcctgtgctgtggagtcggatgcctaattctttcttgaaggtggaaaccgaaagagtgagtgaaagacacggctgggtggtgcagtgtctggagccattgcaaatgatggctctgcacatccctgaggagaatcgatgtgttgacatccttgaactatgcgaacaggaggacttgatgcggttccattaccacacactccgcctgtatagcgcagtttgcgctctgggcaattctagggtggcctatgccctgtgcagccacgtagatttaagccagttgttctatgctatcgataacaaatatctgcctggcctcttgaggagcgggttttatgacctgcttatctccatacatctggcaagcgcaaaagagcggaagcttatgatgaagaacgagtatattattccaatcacatcgaccacgagaaatatcagactgttcccagatgagagtaagcgacacgggttaccaggtgtaggcctgcggacatgtctgaagcctggattccggtttagcacaccgtgtttcgtcgtgacaggtgaggaccaccagaagcagtccccggagatccccctcgagtcattgaggactaaggccctgagcatgctgacagaagctgtgcagtgctccggtgctcacataagagaccccgttggtgggtctgtcgaattccagttcgtgcccgtgctgaaattgattggcaccctcctggtgatgggcgtgtttgatgacgacgacgtacgacagatcttgctgcttattgatcctagcgttttcggtgagcactccgccggtacagaagagggcgcagagaaggaagaagtaacccaggtggaagagaaagccgtggaggccggtgagaaagccggtaaggaagctcccgtgaaaggactcctgcagacacggttgcctgagagtgtgaagttgcaaatgtgcgagctgcttagctatctatgtgattgcgaactccagcacagagtggaggctatagtcgccttcggcgatatctacgtatccaagctgcaagctaatcaaaagtttcggtataacgaactgatgcaggccctgaacatgagcgcagccctcactgcgagaaagacaaaagaattccggtcccccccacaggaacagataaatatgctactcaattttcagcttggtgaaaactgcccttgccccgaagaaattagagaggaactctacgacttccatgaagatctcttactacattgcggagtgcccctggaggaagaggaggaagaagaggaagacacctcttggacagggaaactttgtgcgttagtctataagatcaaagggcctccgaagcccgaaaaggaacaaccaactgaagaggaggaaaggtgtccaaccacactgaaagaactgatctctcaaaccatgatttgctgggctcaggaggaccagattcaagacagcgagctggtccggatgatgttcaaccttttgcgtagacaatacgattcaattggagaattgctacaggcgctcagaaaaacgtacactatctcccacacctctgtgagcgacacaatcaacctgctcgctgccttggggcagatcagatcactcttgtccgtcaggatgggcaaggaagaggagttattaatgatcaatggccttggcgatattatgaacaacaaagtattctatcagcacccgaatctcatgagggtgctcggaatgcatgaaacagttatggaggtgatggttaatgtgcttggaactgagaaatctcaaatcgccttccctaaaatggtggcaagctgttgtaggttcctttgttacttctgtaggatctctagacagaaccagaaagctatgtttgagcacctcagttatttgctggaaaattccagcgtgggcctggcttcccctagcatgaggggctctacccccctagacgtcgctgcatcttccgttatggacaacaacgaactggccttatcactggaggagccagatttggagaaagtggtgacctacctggccggttgcggcctgcaatcctgtccgatgctccttgccaagggctaccccgacgtgggatggaacccgatcgagggcgaacgctacctttcctttctgcgattcgctgtcttcgtaaacagcgaaagcgtggaagagaatgcatccgtcgtcgttaaactgcttataaggcgccctgaatgctttggcccagcactacgcggagaggggggaaacggattgctggctgctatgcagggcgctatcaaaatctctgaaaatcccgctttggatctgccaagtcagggatataagcgtgaagtatcaaccggggatgatgaagaggaagaagagattgtacatatgggtaatgccatcatgagcttctattcagctttgatcgacttgttgggaagatgtgcaccggagatgcacctgatccagacgggcaagggggaggcaatccgaattcggtctattctcagaagcctcgtgccaacagaggacctggtgggcattatttctatccctctgaaactacccagcctgaataaggatggcagcgtaagcgagccagatatggccgcaaatttttgtcctgaccataaggccccaatggtactctttctcgatcgcgtttacggaatcaaggaccagacttttctgcttcaccttctggaagtgggctttcttcctgacctcagagcttctgcctccctagacacagtctcgctgagtacgaccgaagcagcactggccctgaaccgttacatttgttctgctgtgctgccactcttgactaggtgtgcgccactgtttgccggtactgaacactgtactagtcttattgatagtactctccaaaccatatataggctgtccaagggcaggtcattgaccaaagcccagagagacacaatcgaagagtgtctgttggcaatctgcaatcatctacgcccttccatgctccagcagctgctgaggagactcgtgtttgatgttccacagctgaatgagtactgcaagatgccattgaagctcctaacgaaccactatgagcagtgctggaaatattactgcctgccgtcagggtgggggtcatacggattggccgtggaagaggagcttcatctcactgaaaaattgttttggggtatttttgactcactctcccataaaaaatacgatcctgacctgttccgcatggccctgccctgtctgagcgcaattgccggagcccttcccccagattaccttgatacgcgtatcaccgccaccctcgaaaaacagataagcgtagacgccgatggaaattttgatcccaaacccataaacacgatgaatttctcgttgcctgagaagcttgagtatatcgttacaaaatacgcagagcattcacatgacaaatgggcttgcgataagtctcagtctggctggaagtacggcattagcctggacgagaatgttaagactcaccctcttattagaccattcaagactctgactgagaaggagaaggagatataccggtggccagctcgagagtctctgaagactatgttggcagtgggatggaccgttgagcggaccaaggaaggggaggccttggttcagcagagggaaaacgaaaagctccgcagtgtctcccaagccaatcaaggaaactcttacagcccggcaccattggatctttccaatgtcgtactatctcgggaactccagggtatggtcgaggtagtcgcagagaactatcataatatatgggcaaagaaaaaaaagctggaacttgagtccaagggtggtggttctcatcctctcctggttccatatgatacattaaccgccaaggaaaaattcaaagaccgggaaaaggcacaggatctttttaaatttctgcaggtgaacggcatcattgtttcccgagggatgaaggacatggagctggacgcctccagcatggagaagcggtttgcctacaagtttctcaagaaaatcctgaaatacgtggattccgcccaggaatttattgcacacctcgaggccatcgtctcctccggtaagaccgagaagtcccccagagaccaagagatcaagttctttgcaaaagtgctgttgccattggtggatcagtacttcacatcccattgtctgtacttcttgagttcacccctcaaaccactgtcctcctccggctatgcgagccataaggaaaaggagatggtggccggactattctgcaagctcgccgcattggtgcggcatcgcatttctctgttcggctccgactctaccacaatggtgagctgtttgcacatccttgcacagacactggataccaggacagtgatgaaatcaggcagcgaactggtgaaggcaggattgcgcgctttcttcgagaatgccgctgaagatctggagaagacttctgaaaacctgaaattgggaaagttcacccattcccgtactcagattaaaggagtcagtcagaacatcaattacacaacagtagcactactccctattctgacttccatctttgagcacgtgactcagcatcagtttggcatggacctactgctgggagacgtgcagatctcgtgttatcatatcctctgtagtctgtactccctgggaaccggtaagaatatatacgttgaaaggcagcgccctgccctaggcgagtgcctggccagtcttgctgccgcaatcccagtagccttcctagagcccacattaaacagatacaaccctctaagcgtgtttaataccaaaaccccgcgtgagagatccatactgggcatgcccgacactgtggaggacatgtgccccgatatcccacaactggagggtctgatgaaggaaatcaacgacttggccgagtccggcgctagatatactgagatgccacacgtcatcgaggtaatcttgcccatgttatgtaactatcttagctactggtgggagagaggtccagagaacctgccaccttctacaggaccctgttgcaccaaggtgacatctgagcatctctccctcattctgggcaacatcctgaaaattatcaataacaacctggggatcgatgaagcatcctggatgaaacgaatcgccgtgtacgcccagcccatcatctctaaagcaaggcctgatctgctacgaagtcacttcatccctaccctggaaaagctaaaaaagaaagccgtgaagaccgtgcaagaggaagaacagttgaaagccgacgggaaaggcgacacgcaggaggctgaattactgatcctcgatgagttcgccgtgttatgtagggacctttatgcgttctacccaatgttaatccggtatgtggacaacaacagatccaattggctgaaatcacctgatgccgattccgatcagctgtttcggatggtggccgaggtcttcatcctctggtgtaagtcacataactttaaaagagaggagcagaattttgtcatccagaatgagatcaacaatcttgcctttcttacaggagattccaagagcaaaatgtcaaaggccatgcaagttaagtctggtggtcaagaccaagaaaggaaaaaaacgaagagaagaggcgacttgtattccatccagaccagtctaattgtggctgctctcaagaaaatgttgccaatcggcctcaacatgtgtacaccaggtgatcaagagctcatctctctggcgaagagtcgatattctcatcgggacaccgatgaggaagtgagggagcacttgagaaacaatttacatctccaagagaaatctgatgaccctgctgtgaaatggcagcttaatctgtacaaggacgttctaaagtccgaggagccctttaaccccgaaaagacagtcgagcgtgtgcagaggatatctgcagccgtatttcacttggaacaggtggagcagcctctccgctcaaagaaagcagtgtggcacaaactgttgtccaagcagcgcaagcgggcagtggttgcatgttttaggatggctccactgtataatttgccaaggcacaggtccataaacctctttcttcacggctaccagaggttctggattgagacggaggagtactcttttgaggagaagctggtgcaagatctggctaagtcacctaaggttgaagaggaagaagaggaagagactgaaaaacagccagatcctcttcaccagattattctgtatttctcaagaaacgctttgactgagcgaagcaagctggaggatgacccattatacacctcctatagttccatgatggctaaatcctgccagtcaggagaggacgaggaggaggatgaggacaaagagaaaaccttcgaagagaaggagatggagaagcaaaaaaccctctatcagcaggctcggctccacgagaggggcgctgccgagatggtcctgcagatgatcagcgctagcaaaggagagatgtcacccatggtcgttgaaaccctgaagctcggcatcgccatattgaatgggggaaacgctggcgttcagcaaaaaatgctagattacctgaaagaaaagaaagacgctggtttcttccaaagcttgtccggtttaatgcaaagttgttcagtgctcgacctcaatgcctttgaaaggcagaataaggcggaggggctggggatggtgaccgaagagggtaccctgattgtgagggagagaggcgagaaggtgctccagaatgatgagttcaccagagatctatttcgatttttgcaattgctctgcgaaggccacaactccgatttccaaaactttctaagaacacagatgggcaacacaaccactgtgaacgtcataatttcgactgtcgattatttgctgcgcctgcaggagtcaatttcagatttttattggtactactccggcaaggacataatcgatgagtcgggccagcataacttcagtaaggctctggctgtgactaaacagattttcaattcactcaccgagtacattcaaggaccctgtataggcaaccaacagagtctcgctcactctcgcctgtgggatgccgtggtgggctttctgcacgtgtttgcaaacatgcagatgaagctatcacaggacagctctcagattgagctcctgaaggagctcttggacttgctgcaagatatggtcgtgatgctgctcagcctcctcgagggcaacgtcgtaaatgggactatcggcaagcagatggtcgacaccctggtggaaagcagtactaacgtagagatgatcctcaagttcttcgatatgttcctgaagctgaaagatctaacaagctcagatacctttaaagaatacgaccccgacgggaaaggcatcattagtaaaaaagagttccagaaggctatggagggccagaaacaatatacgcagagtgagatcgactttttgctgtcttgtgccgaagccgacgaaaacgatatgtttaattatgtggattttgtcgaccgcttccacgaacctgctaaggatatcggttttaatgtcgctgtgcttctgacaaacctgagtgagcacatgcccaatgacagcaggctcaaatgcttactagatcctgctgagtcggtgctgaattatttcgagccttacttaggcagaatcgaaatcatgggcggtgctaaaaagatcgaacgggtttatttcgaaatctctgagagtagtcgtacccaatgggaaaagcctcaggtgaaggagagtaagaggcagtttatcttcgatgtcgttaacgaaggcggagagcaggagaaaatggagcttttcgtgaacttttgtgaagacactatattcgagatgcagctggccagccagatcagtgagtccgatagtgccgaccggccagaggaggaagaggaagatgaagacagttcctatgtacttgaaatcgccggtgaagaagaagaagatggtagcttggagccggcaagtgccttcgccatggcctgtgccagcgtcaaacggaacgtgaccgatttcctcaagcgcgcaacactgaagaatctgaggaagcagtatcgtaatgtgaaaaaaatgactgcaaaggagttggtgaaggttctgttttccttcttttggatgctcttcgtaggtttgtttcagttgctctttaccatcctgggtggaatttttcagatcttgtggagtaccgtgttcgggggtggactcgttgaaggcgctaagaatatccgagttaccaagatcctgggagacatgccagacccaacccagttcggcattcatgatgacaccatggaggctgagcgagctgaggtcatggaacctgggataacaaccgagctggtgcattttatcaagggcgagaagggggacaccgacatcatgagcgatctgttcggcctgcacccaaaaaaggaggggagtctgaaacacggccctgaggtcggactaggagatttgagcgagatcatcgggaaggacgagccccctacactagaatcgaccgtgcagaagaagagaaaggcacaggctgcagagatgaaggccgcaaatgaggcggagggtaaggtggagagcgagaaagctgacatggaagacggggagaaagaggacaaagacaaagaggaagagcaggctgagtacctttggaccgaagtcactaagaaaaagaaaaggaggtgcggccaaaaagtggagaagccagaggcttttacagccaatttcttcaagggtttggagatttaccagaccaagctgctgcattatttggcacgcaacttctacaatctgcggtttctggccctgtttgtcgccttcgcaatcaatttcattttgctattttacaaagtcaccgaagagcccctggaggaggagaccgaagacgtggctaacctatggaactcctttaatgacgaggaagaagaggaagctatggtgttcttcgtgttacaggagtctaccgggtacatggcacccactcttagggccctggccataatccacactatcatcagcctggtttgcgtagtcgggtactattgcctgaaggtgccgctcgtggtgtttaaacgcgagaaggagattgcgcgtaagctggaattcgatggactctacatcaccgagcagccgagtgaggatgacataaaaggacagtgggacaggctggttattaatacaccctccttcccaaataattactgggataagttcgtgaaacggaaagtgatcaacaagtatggtgacctgtatggcgctgaacggatcgcagagctgcttggcctggacaagaatgcgcttgatttttcccccgtagaggagacaaaagccgaggctgcctctctggtgagctggctgagctctatagatatgaagtaccacatctggaagctcggcgtcgtgttcacggacaattcctttctgtatctggcttggtacactactatgagtgtgctgggacactataataacttcttctttgccgctcacctgctggatattgcaatgggtttcaagactttgcggacaatactgagctccgtaactcataatggaaagcagctcgtgctgacggtggggctgttggccgtagtggtgtatctctacactgttgtggcattcaacttcttccggaagttctacaataagagtgaggatgacgacgaaccagacatgaagtgcgacgatatgatgacgtgttatcttttccatatgtatgtaggtgtgcgcgcaggtgggggtatcggagacgaaatcgaggaccctgcaggcgatccatatgaaatgtacaggattgtttttgatattactttcttcttcttcgttatcgtgattctgttggcaataatccaagggctgatcattgacgctttcggggaactgagagaccagcaggagcaggtgagagaagatatggaaactaagtgtttcatctgtggtattggtaacgactatttcgataccaccccgcacggctttgagactcataccctgcaggagcacaacctggccaattacctgttttttctgatgtacctcataaataaagatgagacagagcacactggccaagagtcgtacgtgtggaagatgtaccaagagagatgttgggacttttttcctgccggtgactgcttcagaaaacaatatgaagatcagctgggctaa

SEQ ID NO: 239511 - DNA, 14598 bp, synthetic construct
  misc_feature 1..14598: note = Description of Artificial Sequence: Synthetic coding sequence
  source 1..14598: mol_type = other DNA
atggctgagggcggagagggaggagaagatgagatccaattccttcggacggaggatgaagtcgtgctgcagtgtatcgctacaatccataaggagcagaggaaattctgcttagctgcagaaggcttgggaaatcgactgtgctttctggagccaactagtgaggcaaagtatataccgccagatttgtgcgtctgcaattttgtcctggagcagtctctcagcgtcagggccttacaggaaatgctggcgaacactggtgagaacggaggggaaggagctgcacagggtggtggtcatagaacactgttgtacggccacgctgtgctcctgcgacatagctttagtggtatgtatttaacctgcctgactacttcccgcagccagaccgacaaattggcctttgacgtgggactacgggagcacgctacaggcgaggcctgctggtggaccatccaccctgcctccaaacaaaggtccgagggggagaaagtgcggatcggggatgaccttattctcgtctccgtttcctctgaacggtatctgcacctatctgtctctaatggaaatatccaggtggacgcatcattcatgcaaacactgtggaatgtgcaccctacgtgcagcggttcctccatcgaggagggctacctattgggcggacatgtagtacggctcttccacggtcatgatgagtgcctgactattccaagcaccgatcagaatgactctcaacacagaaggattttttacgaggccggtggcgcaggcacgcgcgctagatcactgtggagggtagaacccttgcgaattagctggagcggatccaatatcaggtggggccaggccttcagattgcgacacctcacgactgggcactaccttgcactcacagaagatcagggcctgatactgcaagatcgggctaagagcgatacgaaaagcactgccttttcctttcgcgctagcaaggagctcaaagaaaagctggattcaagccacaagcgagatattgaagggatgggcgtccccgagattaaatacggtgattccgtatgctttgtccagcatatcgcatctggcctctgggttacatacaaagcgcaagacgctaaaaccagccggctcggtccactcaaacgtaaagttatactgcaccaggagggccacatggacgatggactgaccctgcagcggtgccagcgtgaggaaagccaggctgccagaataattcgcaatacaactgcattgttcagtcagtttgtgagcggtaacaaccgcaccgcggcaccaattaccctcccgatcgaggaagttctgcagacactccaggacctcatagcatatttccagcctccagaggaagagatgaggcatgaggataaacagaacaagttgcggagtctcaaaaatcgacagaacctttttaaagaggaggggatgttggctctggttcttaactgcatcgataggctgaacgtatacaactcggtcgcccattttgcaggaattgcacgggaagagtctggaatggcctggaaggagatcctgaatctcttatacaagctgctggccgctctcattaggggtaatcggaacaattgcgcacagttcagcaacaacttagactggttaatttcaaagttggaccgcttggaaagcagttcaggaattctcgaggtcttgcattgcatactgacggagagtccagaggccttgaatctaattgctgaaggccatattaagtcgattataagtttactggacaagcatggccgaaatcataaggtcctggacatattgtgctcactgtgcctgtgtaatggcgtggccgttcgggcaaatcaaaacctaatttgtgacaacttgctgcctagaagaaatctgttgctgcagactcgtctcatcaacgatgtaaccagtatcagacccaatatctttctcggggtggcagaaggtagcgctcagtataagaagtggtattttgagcttatcatagatcaggttgacccttttcttactgcagagcctactcacctgcgggttggatgggccagctctagtgggtacgccccataccctggaggaggcgagggttggggcggaaatggtgtgggggacgacttatacagctacggttttgatggtttgcacttgtggtccggcagaatcccgagggccgtcgcctcgattaaccagcatctccttcgaagtgacgacgtggtcagttgttgtctggatctaggagtgcccagcatcagcttcaggatcaacggccagccggtacagggcatgtttgagaattttaacaccgatggcctgttttttccggtgatgagtttctccgcaggagtgaaggttaggttcctgatgggaggtagacacggtgagtttaagtttctgcccccttccggttacgcgccatgttatgaagcccttctgcccaaggagaagatgagactcgaacccgtcaaagagtacaagcgggatgcggacgggatccgcgacttgttgggaaccactcagttcctctcccaggcctcctttatcccttgtccagtggacacaagtcaggtgattctaccgccacatctggagaagattagggatagattggctgaaaatatccacgagctgtggggtatgaacaaaattgaactcggttggacctttggaaagatccgggacgataacaagaggcagcacccgtgcctagtggaattttccaagttgcctgagacagagaagaactacaatctccaaatgagcacggaaacactgaagactcttctcgccctagggtgtcacattgcccacgttaacccggcagccgaggaggacctcaagaaagtcaaattgcctaagaactatatgatgtcgaacggctacaaacctgctcctcttgatctgagcgatgttaagctcctgcctcctcaggaaattcttgttgacaaattagcagagaacgcccacaatgtctgggctaaagatagaataaagcaaggctggacctacggtatccagcaggacctgaagaataaacggaatccacgactggtgccctatgccctcctcgatgagaggacaaaaaaatctaatcgggattcactccgtgaagcagtgagaacgtttgtgggctatggctacaacatcgagccctccgatcaggaactggccgacagcgcagtcgagaaagtatcaattgataagatacggttcttcagggtcgagcgttcttacgccgtaagatctggaaaatggtacttcgagtttgaggtcgtcaccgggggagacatgagagtgggttgggccaggcctgggtgccgtcccgatgtcgaacttggagccgatgatcaggcatttgtgtttgagggcaaccgcggtcagaggtggcatcagggtagtggctattttggtaggacctggcaacccggagatgtggtcggctgtatgataaacttagatgatgcatctatgatatttaccctgaatggcgagctgctgatcaccaataagggatctgagctggctttcgctgactacgaaatagaaaatgggttcgttcccatctgctgccttggtctgagccagattggtcgaatgaatctgggcactgacgcatctaccttcaaattctatactatgtgtggacttcaggaagggtttgagccctttgccgttaatatgaatagagacgttgccatgtggttctccaagaggttgcccaccttcgttaacgtgccgaaagaccatccacacatcgaggtgatgaggattgatggcaccatggactctcctccttgcctgaaagtgacccacaaaacattcggaactcaaaattctaatgccgatatgatttactgcagactgagtatgccagtcgagtgccactctagcttttcccattcaccctgtttggatagcgaggcattccaaaaacggaaacaaatgcaggagattctcagccacaccaccacccagtgctactatgccatcaggatttttgccggacaggacccttcatgtgtgtgggtgggctgggtgactcccgattaccacttgtactcggagaaatttgatctcaacaagaattgcacagtgactgtgactttaggagacgaacgcggaagggtacatgagtccgtcaagcgatccaactgctatatggtctggggcggtgacatcgtcgcatcttctcagcgttctaatcgttctaacgtcgatctggaaatcggatgcctggtggatcttgccatgggaatgctgagctttagcgctaacggaaaagagctgggcacctgttaccaggtggaacctaacacaaaggtttttccggctgtgtttctgcagcccacatcaacgtcactgtttcagttcgagttgggcaagctgaagaacgcgatgcccctgtctgctgcaattttcaggtccgaggagaagaacccagtcccccagtgtccaccaagactagatgtccaaacgattcagccagtcctgtggtcccgaatgcccaacagtttcctcaaggtcgaaacagagagagtcagcgagaggcacggttgggtggttcagtgtctagaacctctgcaaatgatggccctgcatattccagaagagaatcgctgtgtggatatactggagctgtgtgaacaagaggatcttatgaggttccattaccatacgctgagactatactcagccgtgtgcgcccttgggaacagtagggtggcatacgctctgtgtagccatgtcgatctctctcagctattctacgccattgacaataaatatctccctggactgctcaggagtggattctacgatctgctgattagcatccatctcgccagcgcgaaggaacggaaactgatgatgaagaatgaatacataatccccatcacctcaacaacaagaaacattcgtctcttcccagatgaatctaagagacacggtctgcctggggtgggacttcgaacctgcctgaaacctgggttccgcttctcaactccttgcttcgtggttaccggtgaggatcaccagaaacaaagccctgaaattcccctggagtctttacgcacaaaagcgctcagcatgctcactgaagccgtccagtgctctggggctcacatcagggaccccgtcggcggatctgtggagttccagtttgtgccagtgctgaagcttatcggcaccttacttgtgatgggcgtatttgacgatgacgacgttagacagatactgttgctgatcgaccctagcgtcttcggagagcactcagctggtactgaggagggagccgaaaaggaggaggttacgcaagtggaagagaaagccgtggaggccggagagaaggccggaaaagaagccccagtaaaaggtctgctccagacacgactgccagaatctgtaaagctccagatgtgtgaacttcttagctacctgtgtgattgtgaactccagcatagggtcgaggctattgtggcatttggtgacatctacgtgagtaagcttcaagcaaatcaaaagttcaggtataatgagctgatgcaggctctgaacatgtccgctgccttgactgcacgtaaaaccaaggagttcagatcccctcctcaggaacagatcaacatgttacttaatttccagctgggcgaaaattgtccttgtcccgaggagattcgggaagaattatacgacttccacgaggatttgctgctacactgcggtgtgcccctggaggaggaagaggaagaagaggaagatacctcttggacaggtaagctctgtgcccttgtgtataaaatcaaggggcctccaaagcccgagaaagaacaaccaacggaagaggaggagagatgccccactaccctgaaagagttaatatcgcagacaatgatctgttgggctcaggaggatcaaattcaggacagtgagctggtgcgaatgatgttcaatctcctaagacgccagtatgattccattggtgagctcctgcaagcgctaagaaagacctacacaataagccacaccagcgtcagtgatacaatcaatctgctggccgcattgggacagatccgctctctgttatctgtgcgaatgggcaaggaagaggaacttcttatgattaacggcctgggggacattatgaacaataaagtattttatcagcacccgaacttaatgcgggtcctgggaatgcatgagaccgttatggaggtcatggtcaacgtactgggcacagaaaaatctcagatcgcttttcccaaaatggtcgcttcatgctgcagattcctgtgttacttctgccgaatttcacgccaaaaccagaaggctatgttcgaacacctgagttatctgttagagaacagttctgtggggttggcaagccctagcatgagaggcagtacacctctggatgtggcagcatcaagtgtaatggataacaacgaactggccctgtctctcgaggaacccgatttagaaaaagtggtcacttacctggccggatgtggcctgcaatcatgcccgatgctcttagcgaaaggatatcctgacgtcggctggaaccccattgaaggggagaggtacctgagctttcttcgtttcgctgtatttgtgaactctgaatcagttgaggagaacgccagcgtggtagttaaactgcttattaggcggcctgaatgctttggaccagctttaagaggcgaagggggaaacgggcttttggcggcaatgcagggagccataaaaatcagcgagaaccctgcgctcgacctgccctcgcaaggatataagcgggaggtctctaccggggacgatgaggaggaagaggaaatagtgcacatgggtaacgctataatgtccttctactccgcgctgatcgacctgctgggcaggtgcgctcccgaaatgcacttaattcaaacaggtaaaggggaagctattcgtataagaagcattttgcggagcctggtgccgacagaggatttggtgggaattatcagcattccactcaagttaccctctctcaataaggacggaagcgtcagcgaacctgatatggccgctaacttttgcccagaccataaggcaccgatggtgctctttttggatagggtttatggaatcaaagaccaaacttttctgctgcatttgctggaggttgggtttttgccagacctcagagcttccgcgtccctggacaccgtcagtctaagtaccaccgaggctgccctcgcactgaaccgctatatttgttccgccgtcctgccgctactgaccaggtgcgcccctctatttgctggcacagaacactgcacatccctcatcgatagtactttacagaccatttataggctgtccaagggacggagtctgacaaaagcccagcgagacaccattgaagaatgtctgcttgctatctgcaaccatctcagaccatcgatgttgcagcagttgctgcgaagactggtgtttgatgtaccccaactgaacgagtattgtaaaatgccgctgaaacttcttacaaatcattacgaacagtgttggaagtattattgcctgccttccggttggggatcatacggactggctgtggaagaagagctgcacctgacagagaaactgttttgggggatcttcgactccctgtcccacaagaagtacgatccagacctgttccgcatggctttgccttgcctgtcggcaattgctggagctttgcctcctgactacctggacacccgtatcaccgcgaccctagaaaaacaaatctcagtggacgctgacggaaactttgacccaaagcccattaataccatgaacttctcccttccagagaagttggaatatattgtgacgaagtatgctgagcatagtcacgacaaatgggcgtgtgataagagtcagagcgggtggaagtacggcatctctttggatgagaatgtgaaaacgcaccctctcattcgcccattcaagacactcaccgaaaaggaaaaagagatataccggtggcctgccagggagagcttgaagacaatgctagccgtgggctggactgtcgaaagaactaaggagggggaggctctggtgcagcaacgcgaaaacgaaaaactaagatctgtgagtcaggctaatcaaggaaattcgtactcgcctgcaccgcttgatttgtctaacgtggtacttagtcgagaactgcagggtatggtggaagtggtggcagaaaattaccataacatatgggcgaagaagaagaagttagagttagaaagcaaaggagggggatcccatcctttgctggtcccgtacgacacactgactgccaaagaaaaattcaaagatagagaaaaggcccaggacctcttcaaattcctccaagtgaatggcattatcgtaagtcgcggaatgaaggacatggagctggacgcaagcagtatggagaaacggtttgcctacaagttcctgaaaaaaattttgaagtatgtggactcagctcaggagtttatcgcacacctggaggccatcgtgagcagtggtaaaaccgagaaaagtcccagagatcaagaaatcaagttctttgccaaagtcttactgcccctcgttgatcagtattttacaagtcactgcctgtactttctgagcagccccctcaagccgctgtcatcctctgggtatgcgtcacacaaagaaaaagagatggtcgctgggttgttttgcaaactcgcagctcttgtgcggcaccgcatatctcttttcggctcagattccacaacaatggtgagctgtctgcatatcctggcgcagactttggatactaggactgtgatgaagtctggaagtgagctggttaaggccggtctgcgagcatttttcgagaacgctgctgaggacctggagaagacctcagagaacttgaagctgggaaaatttacacacagccgaacgcagatcaaaggtgtatcccagaacatcaattacacgaccgtggcccttctgcccatcctgaccagtatcttcgagcatgtgacccagcaccaatttgggatggacctgctactgggcgatgtccagatctcctgttaccatatcctttgtagtctctactctcttgggaccggtaaaaacatttacgtggaaagacagagaccagctctgggggaatgtttggcatccctcgccgcagcaatcccagttgcgttccttgaacctacactcaacagatataatccactgagcgtgttcaacaccaaaacccctcgtgagaggtccatcctggggatgcctgacacggtcgaggatatgtgtccagatatcccccaactggaggggctgatgaaagagattaacgacctggccgaatcaggggctcgctataccgagatgccccacgtaattgaagtgatcctgccgatgctttgtaactatctgtcctactggtgggagaggggtcccgagaatctgcctccctctacagggccatgttgcactaaagtcacctccgaacacctaagcctgattctaggaaatattctcaaaatcatcaataataacctgggcattgatgaggcaagctggatgaagaggattgctgtgtacgctcaacccattatcagtaaagctcgccctgatctgctccgatcccatttcatccccacactcgaaaagctcaaaaagaaagcagtgaagacagtgcaagaggaagaacagctcaaggcggacggcaaaggtgacacacaggaggcagagcttctgattttggacgagttcgcggtactttgcagagatctgtacgccttctatcctatgctcattaggtacgttgataataaccgcagtaattggctgaagtcccccgacgcggatagcgatcagctgttcaggatggtcgccgaggtgtttatactctggtgcaaaagtcataacttcaagcgggaggaacagaatttcgttattcagaacgaaattaacaacttagcattcttgacaggggattcaaagtccaagatgtctaagagcggcggacaggatcaggaaaggaagaaaactaaacgaaggggcgatctctactcaatacagacctccctgattgtggccgcactgaagaagatgctgccaattgggctcaatatgtgcacacctggcgaccaggagctgattagcctggcaaaatcaaggtatagtcaccgagacactgatgaggaggtgcgagagcacttgcgtaacaatcttcatcttcaagagaagtcggacgacccagcggtgaagtggcagctgaacctctataaagatgtattgaaatctgaggaaccgttcaaccctgagaagactgtcgagagagtgcagcgtataagtgccgctgtttttcacctggagcaggtggagcagccactaaggtcaaagaaggccgtgtggcataagttactgtccaagcagcgcaaaagggcagtggttgcctgctttcgaatggcgccactgtacaacttgcccaggcatagatctataaatctgtttttgcacgggtatcagcgattttggatagagactgaggagtacagtttcgaggaaaagctcgtgcaggatctagcaaaatcccctaaggtcgaagaggaggaggaggaggagacagagaagcaacctgacccactccaccagattattctatatttttcgcgtaacgccttaacagagcggagcaagcttgaagacgatcctctgtatacaagctattcaagcatgatggccaaatcctgccagagcggcgaagacgaggaagaggacgaagacaaggagaagactttcgaggagaaggaaatggagaaacagaagacactctaccagcaagccaggctgcacgaaagaggcgctgccgagatggtcctccagatgatttcggccagcaagggggaaatgtctccgatggttgtagagaccctaaagttggggattgctatactaaatggaggtaacgccggagtccagcagaaaatgctcgactatctgaaggagaagaaagatgccggtttcttccagtcgttgagcggccttatgcaatcttgttccgtgttagacctcaacgcgttcgaaaggcagaacaaggccgagggcctaggaatggtgaccgaagagggaaccttaattgtgcgggaacgtggtgagaaggttctgcagaacgatgagttcacccgagatctgtttaggtttttacagctcctgtgtgaaggacataactccgactttcagaatttcctgcggacccagatgggaaatacgaccacagtgaacgtaatcatctcaactgttgactaccttctaaggttacaggagagtatctcagacttctactggtattactcagggaaagatataatagacgagtctgggcagcacaatttctccaaggctctggctgtcactaagcagatcttcaatagcctgaccgagtacatacaggggccatgtattggaaatcaacagagcctggcgcactccagactgtgggacgccgtagtgggcttcctgcacgtgtttgctaatatgcagatgaaacttagtcaggacagcagtcagatcgagctgctgaaggaactgctggatttgttgcaagatatggtcgttatgctgctgtccctgttggaaggcaacgtggtcaatggaacaatcgggaagcagatggtagatacactggtcgaatccagtaccaatgttgagatgatcctgaagttttttgatatgttcctgaaactgaaagacttgacctcctccgacacttttaaggagtatgaccccgacggcaaggggattattagcaagaaagaattccagaaagctatggagggacagaaacagtatacgcaatctgaaattgactttcttctgtcttgcgctgaagcagacgaaaatgacatgttcaattacgtcgatttcgtggaccgctttcacgagccggctaaggatatcggattcaatgtggccgtactgctgaccaatctcagcgaacacatgcccaacgacagtagactgaagtgtttactcgatcccgctgaatctgtccttaactacttcgaaccctacctgggtagaatcgaaattatgggcggagctaaaaagatcgaacgtgtgtatttcgagatcagtgaatcctcccgcacccaatgggaaaaaccacaggtgaaagagtcgaagagacagttcattttcgacgttgtgaatgaaggcggagagcaggagaagatggagctgttcgtgaacttttgcgaggatactatctttgaaatgcagttggcttcacagatctctgaaagcgacagtgcggacagaccggaggaagaggaggaggatgaagacagctcatatgtactcgagatcgccggtgaggaggaggaagacggtagtctggagccagcttcagcattcgctatggcctgtgcgtctgtgaagaggaacgtgactgattttctgaagcgggctacgctgaaaaacctccgcaaacagtacaggaatgttaaaaaaatgaccgccaaggaactggtgaaagtcctgttcagctttttctggatgctcttcgtcggcctgtttcaactgctctttactatccttggcggaatcttccagatcctctggtccactgtatttgggggtggattggttgagggtgccaagaacataagagtcactaagatcctgggagacatgcccgatccaacacagttcgggatccatgatgacaccatggaagcagaacgggcagaagtaatggagccaggaatcactaccgagctcgtacattttatcaagggcgagaagggagatacggacattatgtctgacctattcggcctgcaccccaagaaagaagggagtcttaaacacggacctgaagtcggcttgggggatctaagtgaaattattggtaaggatgaaccaccaaccttagagagcaccgttcagaaaaagcgaaaggctcaggccgctgaaatgaaggctgccaacgaagccgaggggaaagtggaaagcgaaaaggcggatatggaggacggggagaaggaagataaagataaggaagaggagcaagccgagtatctgtggactgaagtcactaagaaaaaaaaaagacgatgtggccagaaagtggagaaacctgaagcctttacagctaatttctttaaaggccttgaaatctatcagactaagttattacattatctggcgaggaacttctacaacctccgctttctagccctcttcgtagcgttcgctatcaactttatcctcctcttctataaggtaaccgaagaacccctagaggaggagactgaggacgtagccaacctatggaactctttcaacgacgaggaggaggaggaagctatggtgtttttcgtgctccaggaaagcacgggctacatggcacccacgctcagggcacttgccatcatacatactatcatcagcctcgtgtgcgtggtgggatactattgcttgaaagtaccgcttgtggtctttaaaagggagaaggaaattgcacggaagttggagttcgatggcctgtatataaccgaacaaccctctgaagatgacattaagggccagtgggaccgactggtaatcaataccccgtcttttccgaataactattgggataagtttgtgaagaggaaggtgattaacaaatatggcgatctgtacggcgctgaaaggattgccgaactcctggggctggacaagaacgccctggacttcagtccagtggaggagaccaaagctgaggctgcatctcttgtttcctggctgagctccatcgacatgaaataccacatatggaaacttggcgttgtctttacagataactcgttcctgtatctggcctggtataccaccatgtccgtgcttggccactacaataactttttctttgccgctcacctgctcgacattgcgatggggttcaaaaccctcaggacaatcctgtcatctgtgactcacaatggaaaacagctggtgcttactgtcggtctgcttgcagtggtggtgtatctctacacagtggtcgcattcaacttttttcgtaagttctacaataagtcagaggatgatgacgaaccggatatgaagtgtgacgacatgatgacctgttatttgttccatatgtacgtgggcgtgagggccggaggaggaattggggacgagattgaggacccagcaggcgacccttacgagatgtatagaatcgtttttgatatcaccttcttcttttttgttattgtgatactgctggcaataatccaaggcctgattatcgacgcgtttggagaactccgtgatcagcaggagcaggttcgtgaggacatggagactaaatgtttcatctgtggaatcggcaacgactactttgatacaacaccacacggatttgagacacataccttgcaagagcataacctggcaaattatctttttttcttgatgtatcttataaataaggacgaaacagaacataccggccaggagagctacgtttggaagatgtaccaggaacgatgttgggacttcttcccagccggagactgcttccgtaaacagtatgaagatcagctgggctat

SEQ ID NO: 239512 - DNA, 285 bp, synthetic construct
  misc_feature 1..285: note = Description of Artificial Sequence: Synthetic coding sequence
  source 1..285: mol_type = other DNA
atgggcagtgagctggaaacagcaatggagactctgattaatgtatttcacgcccatagtggtaaggaaggagacaagtacaagttgagtaaaaaggagcttaaggaattgcttcagacagaacttagcggcttcctcgacgcacagaaggacgttgatgccgtggataaggtaatgaaggagctggacgaaaatggtgatggtgaggttgacttccaggagtacgtcgtcctggtcgccgctctcaccgtcgcatgtaataatttcttctgggagaattcctag

SEQ ID NO: 239513 - DNA, 162 bp, synthetic construct
  misc_feature 1..162: note = Description of Artificial Sequence: Synthetic coding sequence
  source 1..162: mol_type = other DNA
atggggtccgagctggagactgccatggaaaccctgatcaacgtgttccatgcccatagtggcaaggaaggagataagtacaagctcagcaagaaagagttgaaggagctgctgcagaccgagctgtctggtttcctcgatgtgaaggagctcatgctgtag

SEQ ID NO: 239514 - DNA, 444 bp, synthetic construct
  misc_feature 1..444: note = Description of Artificial Sequence: Synthetic coding sequence
  source 1..444: mol_type = other DNA
atggaggaacctcagactaaaactccttcagccgagttccctccgtaccgagctcagccggctcaaccagcgacggcccctgcagcgacctttgccaccctggcaatctgtccagaacccgctcccaccagtggcccagggcagccctgtactgctgcaatggggagcgaactggagacagccatggaaacactcatcaacgttttccatgctcactccggaaaagagggcgacaaatacaagttaagcaaaaaggaactgaaggagctgctgcagactgagcttagcggtttcctggacgcccagaaggatgtggatgctgtagacaaggtgatgaaggaactggatgaaaacggggatggtgaggtcgactttcaggaatatgtggtcttagtggctgcgttgactgttgcttgcaacaacttcttttgggaaaattcctag

SEQ ID NO: 239515 - DNA, 105 bp, synthetic construct
  misc_feature 1..105: note = Description of Artificial Sequence: Synthetic coding sequence
  source 1..105: mol_type = other DNA
atggggagtgagctggaaacagccatggagaccctcattaatgtatttcatgcccactctgggaaagagggcgacaagtacaagctcagtaagaaggagctctag

SEQ ID NO: 239516 - DNA, 294 bp, synthetic construct
  misc_feature 1..294: note = Description of Artificial Sequence: Synthetic coding sequence
  source 1..294: mol_type = other DNA
atgccctcacagatggagcatgccatggaaacaatgatgtttaccttccacaaattcgccggtgacaagggctacctgaccaaagaagatctgcgagtcctcatggagaaagagtttcccggattcctagagaaccagaaggaccctcttgccgttgacaaaatcatgaaggatcttgaccagtgcagggacggtaaagttggttttcagtcctttttttctctgatcgctggcttaaccatcgcttgcaacgactattttgtggtccacatgaaacaaaaaggtaagaagtag

SEQ ID NO: 239517 - DNA, 294 bp, synthetic construct
  misc_feature 1..294: note = Description of Artificial Sequence: Synthetic coding sequence
  source 1..294: mol_type = other DNA
atgccatctcagatggaacacgcaatggaaactatgatgttcacttttcacaagttcgccggagataagggatacctcactaaggaggacctgcgcgtcttgatggagaaggagttccctggttttctcgaaaatcagaaggatcctttagccgtggacaagataatgaaggacctggatcagtgtagagacggcaaagtggggttccagtcatttttcagtctgatagccggattaactattgcctgtaatgattatttcgtggtgcacatgaagcagaaaggtaaaaagtag

SEQ ID NO: 239518 - DNA, 318 bp, synthetic construct
  misc_feature 1..318: note = Description of Artificial Sequence: Synthetic coding sequence
  source 1..318: mol_type = other DNA
atggcaaagatctccagccccacggagacggaaaggtgcatagagtctcttatcgcggtctttcagaaatacgctggtaaagatggatacaattatacgctatcgaaaaccgagttcttaagttttatgaatacagagctggctgctttcaccaagaatcagaaagatcccggtgtacttgacaggatgatgaaaaagttggatactaacagcgatgggcagctcgacttctccgagttcctgaatctaatagggggactcgctatggcttgccacgactcgtttttaaaagccgtcccatcccagaagcgaacatag

SEQ ID NO: 239519 - DNA, 252 bp, synthetic construct
  misc_feature 1..252: note = Description of Artificial Sequence: Synthetic coding sequence
  source 1..252: mol_type = other DNA
gcgggtaaaatgaccaagctggaggagcatctggaagggatcgtgaatatcttccaccaatattccgtcagaaaaggtcattttgacacactaagtaaaggggaattgaaacaactgttgacaaaagagctggctaacactattaagagacccaagaaaggatcatctgtgattgacgagatcttccagggtctggatgcgaaccaggacgagcaggtggattttcaggagtttatctctctcgtcgcatag

SEQ ID NO: 239520 - DNA, 279 bp, synthetic construct
  misc_feature 1..279: note = Description of Artificial Sequence: Synthetic coding sequence
  source 1..279: mol_type = other DNA
atgacaaagttggaagaacatttggagggcatcgtgaacatctttcatcaatactctgtgagaaaggggcactttgatacactgagtaagggcgagctgaaacagttgctgacaaaagagctggccaacaccattaaaaacataaaggacaaagccgtgatagacgagatattccagggactggacgccaatcaagacgaacaggtggattttcaggaattcatctctctggttgccatcgccctgaaagccgctcactaccacactcacaaggagtag

SEQ ID NO: 239521 - DNA, 297 bp, synthetic construct
  misc_feature 1..297: note = Description of Artificial Sequence: Synthetic coding sequence
  source 1..297: mol_type = other DNA
atggccgctgagcctctcaccgagctggaagagtcaatcgagaccgtagtcacaaccttctttaccttcgcgcgtcaagaagggcgaaaggactccctgtcagtgaatgagtttaaagagttagtgacccaacagcttccacacctgctgaaagatgtgggctccctggatgaaaagatgaagtccttggatgtgaatcaggacagtgaactcaagtttaatgaatactggaggctcatcggggaactcgcgaaagaaattcgcaagaaaaaggatcttaagatccgtaaaaaatag

SEQ ID NO: 239522 - DNA, 297 bp, synthetic construct
  misc_feature 1..297: note = Description of Artificial Sequence: Synthetic coding sequence
  source 1..297: mol_type = other DNA
atggccgcagagccgcttacagagctagaggagtcaatcgagaccgtggtcaccaccttcttcacctttgccaggcaggaaggccgtaaagatagcctgagcgtgaacgagtttaaggagctggtcacccagcagctcccgcacctgctcaaggacgtcgggagtctggatgagaagatgaagagccttgatgttaaccaggacagtgagctgaagtttaatgagtactggagactgattggcgagcttgcaaaggagatcaggaagaaaaaagacctcaaaatcagaaaaaagtag

SEQ ID NO: 239523 - DNA, 297 bp, synthetic construct
  misc_feature 1..297: note = Description of Artificial Sequence: Synthetic coding sequence
  source 1..297: mol_type = other DNA
atggccgcagaaccactaactgaactcgaggaatcgattgaaaccgtcgttaccaccttttttacgtttgcaagacaggaaggccgtaaggattccctttccgtgaatgagttcaaagaacttgtcacacagcagttacctcatctgctgaaagatgttggttcacttgatgagaaaatgaagagccttgatgtaaatcaggactccgaactgaaattcaacgaatactggagattgattggtgagctggccaaagagatccggaagaaaaaagacctaaagattagaaagaaatag

SEQ ID NO: 239524 - DNA, 297 bp, synthetic construct
  misc_feature 1..297: note = Description of Artificial Sequence: Synthetic coding sequence
  source 1..297: mol_type = other DNA
atggccgcagagccccttacggaactggaggaatccatcgaaaccgtcgtcaccaccttcttcacctttgcacgtcaggaagggaggaaggattcgcttagtgtgaacgaattcaaagagcttgtgacccagcagctgccgcacttactcaaggatgtcggttccctggatgaaaagatgaaatctctggatgtcaaccaggattctgaactgaagttcaatgaatactggaggcttattggagaactggccaaggagataaggaagaaaaaggatctgaaaattagaaaaaaatag

SEQ ID NO: 239525 - DNA, 297 bp, synthetic construct
  misc_feature 1..297: note = Description of Artificial Sequence: Synthetic coding sequence
  source 1..297: mol_type = other DNA
atggccgctgaacccctgactgagctcgaagaatccattgagactgtggttactaccttcttcaccttcgcgagacaggaaggcagaaaagatagcctctctgtgaatgaatttaaggaattagtgacccaacagctgcctcacctactcaaggacgtcggtagcctggacgaaaagatgaaatccctggatgtgaaccaggactccgaacttaagttcaatgagtattggcggcttataggcgaactcgccaaggagattagaaaaaaaaaggatctcaagatccgcaagaaatag

SEQ ID NO: 239526 - DNA, 315 bp, synthetic construct
  misc_feature 1..315: note = Description of Artificial Sequence: Synthetic coding sequence
  source 1..315: mol_type = other DNA
atgggacagtgccgttcagctaacgcagaagatgctcaggagttttcagacgtggaacgcgctatcgaaactctcatcaagaacttccatcagtatagcgttgagggaggtaaggaaaccctgacacctagtgagttgagagacctggtcactcaacagcttccacatctgatgcctagtaactgtgggctggaggagaagatcgccaacctaggatcttgtaacgactctaagttagagtttcgcagtttttgggagctgatcggcgaagctgccaaatccgtgaaactggagaggccagtccgcggtcactag

SEQ ID NO: 239527 - DNA, 315 bp, synthetic construct
  misc_feature 1..315: note = Description of Artificial Sequence: Synthetic coding sequence
  source 1..315: mol_type = other DNA
atggggcaatgccgctcagccaacgccgaagacgcccaggagtttagtgacgtggagcgcgcaatcgaaactctcatcaaaaatttccatcaatattcggtcgaaggcggaaaagagaccctcacaccctccgagcttagggacttggttacgcaacagctgcctcatctgatgccatcaaactgtgggctggaggaaaagattgcgaacctgggctcctgtaatgacagcaaacttgaatttaggagcttttgggagctcataggggaagccgctaagagcgtcaagctcgagcgcccagtccgaggacactag

SEQ ID NO: 239528 - DNA, 315 bp, synthetic construct
  misc_feature 1..315: note = Description of Artificial Sequence: Synthetic coding sequence
  source 1..315: mol_type = other DNA
atggggcagtgccgtagcgccaatgctgaggatgctcaggagttttctgacgtagaaagggccatcgagaccctcatcaagaatttccatcaatattcagtcgaaggaggtaaggagacactgactccctctgagcttcgtgacctggtaacacagcagctcccccacttgatgccgtctaactgtggtctggaggagaaaatagctaatctgggatcatgtaacgacagcaaactcgaattccgctccttttgggagcttataggcgaggcagccaagagcgtaaagcttgagaggccagttcggggtcactag

SEQ ID NO: 239529 - DNA, 315 bp, synthetic construct
  misc_feature 1..315: note = Description of Artificial Sequence: Synthetic coding sequence
  source 1..315: mol_type = other DNA
atgggccagtgccgcagcgcaaacgccgaagacgctcaggaattctcggatgttgagagagccatcgaaactctcattaagaatttccatcagtacagtgtggagggtgggaaggagaccctcacaccttcggagctgcgggacttggtgacccagcagctgcctcatctgatgccaagcaattgcggcctcgaggagaagatcgccaacctgggcagttgtaacgattcaaaacttgaattccgctccttctgggagctgattggggaggccgctaaaagcgttaaattggagcgaccggtgcggggacactag

SEQ ID NO: 239530 - DNA, 417 bp, synthetic construct
  misc_feature 1..417: note = Description of Artificial Sequence: Synthetic coding sequence
  source 1..417: mol_type = other DNA
atgtgtagctcactcgagcaggctctagctgttctggtgactacttttcacaagtatagttgtcaggaaggcgataagttcaaattgagcaaaggggagatgaaggagttgctgcacaaggagttaccgagctttgtgggtcactcaagagagccctgtgcagtccgggctttcagggtccatctgtttaacccagtcatcggcgacctgcgcaaccagagcccagagggcaagtccgactgcccaaagattacccagcactgggagaaggttgacgaggaaggtctgaagaagctcatggggtccttagacgagaattccgaccagcaggtggatttccaggagtatgcagtgtttctggcgctgatcacagtgatgtgcaacgattttttccagggctgccctgaccggccatag

SEQ ID NO: 239531 - DNA, 294 bp, synthetic construct
  misc_feature 1..294: note = Description of Artificial Sequence: Synthetic coding sequence
  source 1..294: mol_type = other DNA
atgtgtagcagtctggagcaggcgttggcagtgctggtgacaacttttcataagtattcctgtcaagagggagataagttcaagctttcaaagggcgagatgaaagagttactacataaggaattgccttcttttgtgggcgagaaagttgatgaggaaggccttaagaagctgatgggatctcttgacgagaacagtgatcaacaggttgacttccaggagtacgcagtgttcctggcactgatcacagtcatgtgtaacgacttcttccagggatgccccgacaggccttag

SEQ ID NO: 239532 - DNA, 294 bp, synthetic construct
  misc_feature 1..294: note = Description of Artificial Sequence: Synthetic coding sequence
  source 1..294: mol_type = other DNA
atgtgtagctctctggaacaggctctggccgtactggtcacaacatttcataaatatagctgccaggagggagataaattcaagctctccaagggggagatgaaagagttactgcacaaggaactgccttcttttgtcggagagaaggtagatgaagaagggctgaagaaactgatgggatctctggacgaaaattctgatcagcaagtggacttccaggaatacgctgtgtttctggcgcttatcacggtgatgtgcaacgatttcttccagggttgtcccgaccgcccatag

SEQ ID NO: 239533 - DNA, 294 bp, synthetic construct
  misc_feature 1..294: note = Description of Artificial Sequence: Synthetic coding sequence
  source 1..294: mol_type = other DNA
atgtgctcctcactggaacaggccctcgcagttcttgtcaccacatttcacaagtattcctgtcaggagggcgacaagttcaaactcagtaagggagaaatgaaagaactgctgcacaaggagttaccaagcttcgtgggggagaaagttgacgaggaggggcttaagaagttaatgggcagcctcgatgaaaattccgatcaacaggtggactttcaggaatatgcagtgtttcttgcactgatcaccgttatgtgcaatgatttttttcagggatgtccggaccggccttag

SEQ ID NO: 239534 - DNA, 306 bp, synthetic construct
  misc_feature 1..306: note = Description of Artificial Sequence: Synthetic coding sequence
  source 1..306: mol_type = other DNA
atggcgcgtcccttggaacaggctgtcgctgctatcgtgtgtaccttccaggaatatgcaggacggtgtggggacaaatataaattgtgtcaagccgaactgaaagagcttctgcaaaaagagcttgcaacctggacacccactgagtttcgtgagtgtgactataacaagttcatgtccgttctggatactaacaaagactgcgaggtcgacttcgtagaatatgtcagatcgctggcctgtctgtgcttgtattgtcatgaatactttaaagattgcccgtctgagccaccctgtagccagtag

SEQ ID NO: 239535 - DNA, 306 bp, synthetic construct
  misc_feature 1..306: note = Description of Artificial Sequence: Synthetic coding sequence
  source 1..306: mol_type = other DNA
atggctaggccccttgagcaggccgtggcagcgatcgtatgtacctttcaggaatatgctggtagatgcggagacaaatataagctgtgccaagccgagttaaaagaactactgcagaaggagttggctacctggactcccaccgagttccgtgaatgcgactataacaaatttatgagtgttctggacacaaacaaagattgtgaggtagatttcgttgagtacgtgagatctctcgcttgtctttgcctgtactgtcacgagtattttaaggattgtcctagcgagcctccatgctcacagtag

SEQ ID NO: 239536 - DNA, 306 bp, synthetic construct
  misc_feature 1..306: note = Description of Artificial Sequence: Synthetic coding sequence
  source 1..306: mol_type = other DNA
atggcctgcccacttgagaaggccctggatgtgatggtgtcaactttccataaatacagcgggaaggaaggcgataagtttaagctgaataagtcagaacttaaagagctcctcacccgggagctgcccagtttcctgggtaaaaggactgatgaggcggctttccaaaagctgatgtccaacctggattctaatcgtgacaacgaggtggacttccaggagtactgcgtgttcctaagctgcattgcaatgatgtgcaacgaattttttgaaggtttccctgacaagcagcccagaaagaagtag

SEQ ID NO: 239537 - DNA, 306 bp, synthetic construct
  misc_feature 1..306: note = Description of Artificial Sequence: Synthetic coding sequence
  source 1..306: mol_type = other DNA
atggcatgcccactggaaaaagcactggatgtgatggtgtccacctttcacaaatatagcggaaaggagggtgataagtttaagctaaacaaatcagagctgaaggagttgttaactagggaacttccctcctttctcggcaaacgaacagatgaggctgcattccagaagcttatgagtaatctggattccaaccgtgataacgaagtggattttcaagagtactgtgtattcctctcatgtattgctatgatgtgcaacgagttctttgagggatttccggataaacaaccaaggaaaaagtag

SEQ ID NO: 239538 - DNA, 306 bp, synthetic construct
  misc_feature 1..306: note = Description of Artificial Sequence: Synthetic coding sequence
  source 1..306: mol_type = other DNA
atggcatgccctttggagaaagcacttgatgtcatggtgtctaccttccataagtattccgggaaggagggggacaaatttaagctgaataagagcgaactcaaagagctgcttaccagagagctgcccagtttcctgggtaaaagaactgatgaggccgcattccaaaaacttatgtcaaaccttgactcaaaccgcgacaacgaagtggatttccaggagtactgcgttttcctgtcatgtattgctatgatgtgtaatgagttctttgagggcttccctgacaaacagcccaggaaaaaatag

SEQ ID NO: 239539 - DNA, 306 bp, synthetic construct
  misc_feature 1..306: note = Description of Artificial Sequence: Synthetic coding sequence
  source 1..306: mol_type = other DNA
atggcttgcccgctggagaaggccctggacgtgatggtttccacattccacaaatactcaggcaaggagggggataagttcaagctcaacaagtctgagctaaaggagcttctgacacgagaactcccctcttttctcggtaaaaggaccgacgaggctgcctttcagaagctgatgagtaacctggactctaatcgcgacaacgaggtcgatttccaggagtactgtgtgttcctttcctgcatagccatgatgtgcaacgaattctttgaaggatttccagacaagcagccaagaaagaagtag

SEQ ID NO: 239540 - DNA, 273 bp, synthetic construct
  misc_feature 1..273: note = Description of Artificial Sequence: Synthetic coding sequence
  source 1..273: mol_type = other DNA
atggttagtacttttcacaaatatagtgggaaggaaggcgacaagttcaagctaaacaagtctgagcttaaagagttgcttacacgcgagttaccatcgtttctgggaaagcgtacagacgaagcagcattccagaaactcatgagtaatttggattccaaccgggataacgaggtcgactttcaggaatactgcgtatttctctcatgtatcgcaatgatgtgtaacgagttctttgaggggtttcctgataagcagccacgaaaaaagtag

SEQ ID NO: 239541 - DNA, 333 bp, synthetic construct
  misc_feature 1..333: note = Description of Artificial Sequence: Synthetic coding sequence
  source 1..333: mol_type = other DNA
atgcctgccgcatggatactgtgggcccatagccatagcgagctgcataccgttatggaaacccctcttgagaaggcattgacaacaatggtgaccacctttcataaatacagcggtagagagggtagcaagttaaccctgtcacggaaagagctgaaggaactcattaagaaggagttgtgcctgggagagatgaaggagagtagcatcgacgatttgatgaaatcacttgataagaattcagaccaggagatcgactttaaggagtactcagtctttctcactatgctttgcatggcctacaatgatttctttctggaggacaacaagtag

SEQ ID NO: 239542 - DNA, 279 bp, synthetic construct
  misc_feature 1..279: note = Description of Artificial Sequence: Synthetic coding sequence
  source 1..279: mol_type = other DNA
atggagacgccactggaaaaagctttaacgaccatggttacaacattccataaatattcagggagagaaggaagcaaactgacgctaagccggaaggagctgaaagaactcattaagaaggagctctgcctcggcgaaatgaaagaatccagcatagatgaccttatgaaatcactggacaagaattcggaccaagaaattgatttcaaggagtacagcgtgttcctcacaatgttgtgtatggcctataatgattttttcttagaagacaataagtag

SEQ ID NO: 239543 - DNA, 279 bp, synthetic construct
  misc_feature 1..279: note = Description of Artificial Sequence: Synthetic coding sequence
  source 1..279: mol_type = other DNA
atggagacacccctcgaaaaagctctgaccacaatggtcaccacattccacaaatactccgggcgtgaaggatccaagctgacactttctcgaaaagagttgaaagagttgattaagaaagagttgtgccttggagaaatgaaggaaagtagcattgacgacctcatgaaaagtctcgacaagaattctgaccaagaaatcgattttaaagagtactccgtgttcttgacgatgctgtgcatggcttataacgatttcttcctggaggataacaaatag

SEQ ID NO: 239544 - DNA, 273 bp, synthetic construct
  misc_feature 1..273: note = Description of Artificial Sequence: Synthetic coding sequence
  source 1..273: mol_type = other DNA
atggcctgcccgttggaccaggctatcggcctgctggtggctatcttccacaaatactccggccgagagggggacaaacatacattatccaaaaaggagttaaaagagctcattcagaaagagctgacaatcgggtctaaactgcaggatgcagaaatcgcgagattaatggaagatctcgatagaaacaaggatcaggaagtgaactttcaggagtacgtgacattcctcggggctttggccctaatctacaacgaggcactgaaaggttag

SEQ ID NO: 239545 - DNA, 273 bp, synthetic construct
  misc_feature 1..273: note = Description of Artificial Sequence: Synthetic coding sequence
  source 1..273: mol_type = other DNA
atggcatgccccctggaccaagctattggtttgttggtggctatcttccacaagtattcaggacgcgaaggagacaaacataccctgtccaagaaggaactgaaggaactgatccagaaagagcttaccattggatccaagctgcaggacgctgaaattgccaggctgatggaggacctcgatcggaacaaagaccaggaggtgaactttcaggagtacgtgacctttctgggcgcactggcactcatctataatgaagctcttaaaggatag

SEQ ID NO: 239546 - DNA, 306 bp, synthetic construct
  misc_feature 1..306: note = Description of Artificial Sequence: Synthetic coding sequence
  source 1..306: mol_type = other DNA
atgtcaaacacccaggccgaaagatctatcatcggcatgatcgacatgtttcacaagtacacaaggagggacgataaaatcgaaaagcctagtttacttactatgatgaaagagaattttcctaattttctcagcgcctgtgacaagaagggcaccaactacttggcagatgtattcgaaaaaaaggacaaaaatgaagacaagaagattgatttttccgaatttctgagtcttctaggagatattgcgacggattatcataaacagtcccacggggctgcaccatgcagcgggggtagtcagtag

SEQ ID NO: 239547 - DNA, 306 bp, synthetic construct
  misc_feature 1..306: note = Description of Artificial Sequence: Synthetic coding sequence
  source 1..306: mol_type = other DNA
atgagcaacacacaggcggagcgatcaatcatagggatgatagatatgtttcacaagtatacgcgcagggatgataagattgagaaaccctcactgctcacaatgatgaaggaaaatttccccaacttcctgtcagcctgtgacaaaaagggtactaattatctcgctgacgtctttgagaaaaaagataagaatgaggacaaaaaaatcgacttctccgaattcttatccttattaggcgatatagctacagactaccacaaacaaagccatggagccgctccttgctccggcggatcacaatag

SEQ ID NO: 239548 - DNA, 282 bp, synthetic construct
  misc_feature 1..282: note = Description of Artificial Sequence: Synthetic coding sequence
  source 1..282: mol_type = other DNA
atgctcaccgaactggagaaagcattaaacagtatcatcgatgtgtaccacaaatactctctgattaagggcaattttcacgccgtgtaccgggacgacctgaagaaactgctggagactgagtgcccacagtatataaggaagaagggggctgatgtgtggtttaaggagctggacatcaacactgacggtgccgtcaatttccaggagtttttgatcctggtaattaaaatgggagtcgctgctcataaaaaaagtcatgaagaatcgcataaagaatag

SEQ ID NO: 239549 - DNA, 282 bp, synthetic construct
  misc_feature 1..282: note = Description of Artificial Sequence: Synthetic coding sequence
  source 1..282: mol_type = other DNA
atgctcacagagcttgagaaggccctgaattcgattatcgacgtgtaccacaagtattctttaattaaagggaatttccacgccgtgtacagagacgatcttaagaagttgcttgaaactgaatgcccacagtacattaggaagaagggagctgatgtgtggttcaaagagttggatattaatacagacggcgcagtaaacttccaggaattcctcattcttgtgatcaagatgggcgtggcagcccacaaaaagtcccacgaagagtctcacaaagagtag

SEQ ID NO: 239550 - DNA, 345 bp, synthetic construct
  misc_feature 1..345: note = Description of Artificial Sequence: Synthetic coding sequence
  source 1..345: mol_type = other DNA
atgacgtgtaagatgtcccagttggagaggaatatagagacaattattaatacattccaccaatacagcgttaagctggggcacccagatacactaaatcagggcgagtttaaggagctggtcaggaaagatttgcagaattttttgaaaaaggagaataagaacgagaaagtgatagaacacatcatggaggatctggacacaaatgctgataagcagctcagtttcgaagagttcattatgctgatggcacgcctgacatgggcctcgcatgagaaaatgcatgagggggacgaaggtccagggcaccatcacaagcccggtctcggcgaagggaccccgtag

SEQ ID NO: 239551 - DNA, 279 bp, synthetic construct
  misc_feature 1..279: note = Description of Artificial Sequence: Synthetic coding sequence
  source 1..279: mol_type = other DNA
atgagcgagctggagaaggcaatggttgccctaatcgacgtgttccaccagtactcggggagagagggagacaaacacaagttaaaaaagagcgaactgaaagagctcataaataacgaactctcgcactttctggaagagattaaagagcaagaagttgtcgacaaggttatggagactctggataatgatggcgatggcgagtgcgactttcaggagttcatggcttttgtcgctatggtgaccaccgcctgccatgagtttttcgagcacgagtag

SEQ ID NO: 239552 - DNA, 279 bp, synthetic construct
  misc_feature 1..279: note = Description of Artificial Sequence: Synthetic coding sequence
  source 1..279: mol_type = other DNA
atgagcgaattggagaaggccatggtcgctctcatcgatgttttccaccagtactccgggagagagggcgacaagcataagctaaaaaaatccgagcttaaagaattaatcaataatgagttgtcgcattttctggaagagatcaaggagcaggaggtggtggataaggtgatggagaccctcgataatgacggagatggcgaatgcgatttccaggaatttatggccttcgtggcaatggtgacaacagcatgtcacgagtttttcgaacacgagtag

SEQ ID NO: 239553 - DNA, 288 bp, synthetic construct
  misc_feature 1..288: note = Description of Artificial Sequence: Synthetic coding sequence
  source 1..288: mol_type = other DNA
atgacagagctggaaactgctatgggaatgatcatagatgtgttcagcagatattcgggatctgagggctccactcaaacactaacgaaaggtgaactgaaggtcctgatggagaaggaactccccggattcctgcagtccggcaaggacaaagacgctgtagacaagctgctgaaagacctagacgccaatggggacgctcaggtggatttctctgagttcatagtgtttgtggctgctattacctccgcctgccataagtacttcgagaaagctgggttaaaatag

SEQ ID NO: 239554 - DNA, 300 bp, synthetic construct
  misc_feature 1..300: note = Description of Artificial Sequence: Synthetic coding sequence
  source 1..300: mol_type = other DNA
atgccgacacagctggagatggctatggacactatgatccggatctttcatcggtattccggcaaggagcggaagaggttcaagctttccaagggggagctcaagctgttgctccagcgcgagctcaccgagttcctctcctgtcagaaagagactcagcttgtggacaagatcgtgcaggacctcgatgcgaacaaggataatgaggttgacttcaatgaattcgttgtgatggtagccgcactgaccgttgcgtgcaacgattacttcgttgagcagctaaaaaagaagggaaagtag

SEQ ID NO: 239555 - DNA, 300 bp, synthetic construct
  misc_feature 1..300: note = Description of Artificial Sequence: Synthetic coding sequence
  source 1..300: mol_type = other DNA
atgccgacacaactggaaatggctatggatactatgattcgaattttccataggtatagtggtaaggagcggaagagatttaagctgagcaaaggagaactgaaactcttgctgcagagagagctgaccgagttcttgtcatgccagaaggagactcaactggtcgataagattgtgcaggatcttgatgcaaacaaagacaatgaagtcgacttcaatgaattcgtggtgatggtggccgctctgacagtagcttgtaacgactattttgtagaacagctcaagaaaaaaggaaagtag

SEQ ID NO: 239556 - DNA, 1029 bp, synthetic construct
  misc_feature 1..1029: note = Description of Artificial Sequence: Synthetic coding sequence
  source 1..1029: mol_type = other DNA
atgatgtgtagtcgcgtcccaagtgaacagtcatccggtacctctctgctgccaaaagatggagctccattttcctgggactcccttgacgaggatggtttagatgactccctgctggagttatccgagggggaagaagacgatggggacgtgaattataccgaagaggagattgacgcactgctgaaagaggacgatccctcttatgagcagtcttccggggaagacgacggaggccatgtcgaaaagggagaacgtgggagccagatcctgctggacacaccaagggaaaagaactcctcctacagcttgggccctgttgccgagaccccggacttgttcaaattacctcagctgtccacctctagtgggcacgggcctgcgcatactaagcccctgaacagacggtccgtcctcgagaagaaccttattaaggtgactgttgcacccttcaatcccacggtgtgcgacgccctgctcgacaaggacgagactgacagctcaaaggatacagaaaagctttccagcttaggcgaggagatgcgtgaggacggcctgtccccaaatgagagcaagctgtgcacagaaagcgaaggcatttccccaaacaacagcgcatggaacggccctcagcttagctcatccaataacaatttccagcaaaccgttagtgataaaaacatgcctgactctgagaatcctaccagtgttttcagcaggatctcggaccactcggaaacgcctaacatggaactgtcgtgccgcaacggaggatcccacaaaagttcctgtgaaatgcggtccttggtcgtgtcaacgagctctaacaaacaagacgttctgaataaggatagtggaaagatgaagggccacgaaagaaggttgggcaaagtgatcccagtgctgcagaccaagacacggacaaatgttcctacgttttcgcaaagcaatctggagcaacagaaacagctgtatcttagatccgtcatagctcacattgaagaccccgaggacacaaaccaaggctag

SEQ ID NO: 239557 - DNA, 1227 bp, synthetic construct
  misc_feature 1..1227: note = Description of Artificial Sequence: Synthetic coding sequence
  source 1..1227: mol_type = other DNA
atgatgtgcagcagagtgcccagcgagcagagttctggcactagcttactaccgaaggatggcgcacccttttcctgggacagcctggatgaggacgggctcgatgacagcctgctggaactcagcgagggcgaggaggatgacggggacgtgaactataccgaggaagagatagacgccctgctcaaagaagacgacccctcatatgagcagagctcaggtgaagacgatggcggacacgtggagaagggggagagagggagccaaatcctgctggacacgcccagagaaaaaaacagttcgtactcgctgggccctgtagcagagacacctgatctttttaagctgccgcagctgtccacatctagcggtcatggaccagcccacaccaagccactaaacagacgcagcgtgttggaaaagaacctgataaaagtgaccgttgccccatttaaccctacagtttgcgacgcactcctcgataaggacgaaacagattctagtaaggataccgagaagctcagctcattgggagaagagatgcgtgaagatggactctctcctaatgaatccaagctttgcaccgaatcagagggaatctcacctaataactcggcctggaatgggccacagctcagcagcagcaataataatttccagcaaactgtttccgacaaaaatatgcccgattctgaaaacccaacgagcgtgttctctcgaattagtgaccatagcgagactcctaatatggagctttcatgtcggaatgggggatcccataaatctagctgtgagatgaggtccctagttgtttccacctcctcgaacaagcaagatgtgctgaacaaggattcagggaagatgaagggacacgagcgaagactgggtaaggtgatacccgttctgcagacaaagacacggactaacgttccgacctttagtcaatccaatcttgaacagcaaaaacaactatatctgaggtctgtaatcgcacacatcgaagatccagaggacactaatcagggtatttctggcgagctctgtgcattgatggaccaagtgcaccatatgcagcattcaaagtggcagcatccttctgatctcacaactcggaactacgctagaaggcaaaagcacctccagaggtactccttgacccagtgggttgatcggaatatgcgctcccatcataggttccagaggttgcctgatttcagctacagctag

SEQ ID NO: 239558 - DNA, 1227 bp, synthetic construct
  misc_feature 1..1227: note = Description of Artificial Sequence: Synthetic coding sequence
  source 1..1227: mol_type = other DNA
atgatgtgtagcagggtgccctcagagcagagctccggcactagtctgctacccaaggacggggcacccttctcatgggactcactggatgaggatgggctggacgatagccttctggaactgagcgagggggaggaggatgatggggacgtgaattacaccgaggaagaaatcgacgccctgctgaaggaggatgatccgtcatacgaacagtctagcggtgaggacgacggaggccacgtggaaaaaggcgagcggggaagccagatcctcctggacactccccgagaaaagaacagttcatatagtttagggcctgtcgctgagacccccgacctttttaaactgcctcagcttagcacctcttcaggacatgggccagcacacaccaagccattaaaccggcgtagcgtacttgagaagaacctgataaaggtcacagtggctccatttaatcctacagtgtgtgatgctctgcttgacaaggatgaaactgatagcagcaaggataccgagaagctgtccagtttgggcgaggagatgcgcgaggacggacttagccccaacgaatctaaactttgcacagagtcggaaggtatttccccaaacaactcagcatggaacggtccacagttgtcatcaagtaataataacttccagcagaccgtgagtgataagaacatgcccgattctgaaaatccaactagcgtgttttctagaatatcagaccacagtgagacaccgaacatggagctgtcatgtagaaacggtggctcccataagagctcgtgcgagatgcgctccctcgtggtctccactagctccaataagcaggatgtgttgaataaagattctggcaagatgaaaggccatgagagaaggctgggtaaagtcatccccgtcctccagacaaaaacccggacgaatgtgcctacctttagtcagtcgaacctcgagcagcagaaacagctgtacctgcggagcgtgattgctcacatcgaggatcccgaagacacaaaccagggcatctccggcgaactctgtgccctgatggatcaggtccatcatatgcagcacagtaaatggcaacatcctagcgatctgacaacccggaactacgcaaggaggcagaaacacctgcagagatactccctgacccagtgggtcgacagaaatatgagatctcaccatagattccagaggttgcctgacttcagctactcctag

SEQ ID NO: 239559 - DNA, 1026 bp, synthetic construct
  misc_feature 1..1026: note = Description of Artificial Sequence: Synthetic coding sequence
  source 1..1026: mol_type = other DNA
atgatgtgcagtcgggtgcctagcgaacagtctagcggaactagcctcttacccaaggatggagctccgttttcatgggactctctggatgaagacggcctcgacgactcgttgcttgagctgtcggagggggaggaggatgatggcgacgtgaattacaccgaagaggaaatcgatgccttgctgaaggaagatgatccaagttacgagcaaagctctggggaagacgacggcggacatgtggagaagggagagcggggatcccaaattctgcttgacacacctagggaaaaaaactcttcatatagccttgggcctgtggccgaaacccctgacttattcaaacttcctcagctctctactagttcaggccatggcccagcacatacaaagcccctcaaccggagatccgttctggagaagaatctgattaaagtaaccgtcgcaccctttaacccaacagtctgcgacgcgctgctggataaggatgaaacagactcctccaaggatactgagaagctcagttcattgggcgaggaaatgagagaagacggcctgtcccccaatgagagtaagctgtgcactgaatctgaggggatctcacccaacaatagcgcttggaacggaccacagttatctagttccaataacaactttcagcagaccgtttctgataaaaatatgcccgactccgaaaacccgacctccgtcttttctagaatcagcgaccatagcgagacaccaaacatggagctgtcttgcagaaacggtgggagtcacaagtctagctgcgagatgaggagcctggtggtgtcaacttcttctaacaaggacgtgctaaacaaggactctggcaaaatgaagggccacgaacgccgacttggcaaggtcatcccagtgttgcagaccaaaacccgcaccaacgtcccaacgttttcccaatcaaatttggagcagcagaaacagctttacttgagaagcgtcatcgcacatattgaggacccagaggacacaaaccaaggatag

SEQ ID NO: 239560 - DNA, 441 bp, synthetic construct
  misc_feature 1..441: note = Description of Artificial Sequence: Synthetic coding sequence
  source 1..441: mol_type = other DNA
atgatgtgttctcgggtgcccagcgagcagtcttctggcacttctttgctgccaaaagacggagctccgttcagctgggacagtctggacgaggacgggcttgacgacagcctgctcgagctgtctgagggggaagaagatgatggtgacgtaaactacaccgaggaagaaatagatgcccttctcaaggaggacgatccgagctacgagcaaagctccggagaagacgatggagggcatgtagaaaagggcgagcggggatctcagattttactggacacgccgagagagaagaattccagttacagtcttggaccggtagctgaaacacctgacttgtttaaactaccgcagctctctacatctagtggccacggtccagctcataccaaaccccttaatagacgctcagtgttggaaaaaaacctgattaaagtctag

SEQ ID NO: 239561 - DNA, 363 bp, synthetic construct
  misc_feature 1..363: note = Description of Artificial Sequence: Synthetic coding sequence
  source 1..363: mol_type = other DNA
atgatgtgttctagagtcccctctgagcagtccagcggtacatccttactgccaaaggacggcgctcccttctcttgggacagccttgatgaagacggactcgacgactcattactggagctaagcgagggggaagaggacgacggagacgtaaattacaccgaagaggaaatagacgctcttctcaaagaggatgacccaagttacgagcagtcctccggtgaggatgatggcggacacgtggaaaaaggcgaacgcggatcccagattttgttggacaccccacgcgagaaaaactcttcctatagtcttggtcccgttgctgagacacctgatcttttcaaactcccacagctgtcttag

SEQ ID NO: 239562 - DNA, 126 bp, synthetic construct
  misc_feature 1..126: note = Description of Artificial Sequence: Synthetic coding sequence
  source 1..126: mol_type = other DNA
atgatgtgttcccgcgtgcccagtgaacagagttctggcacaagtctgctccccaaggacggggctccattcagctgggattctctcgacgaggatggactcgacgactctctactggaattgtag

SEQ ID NO: 239563 - DNA, 18 bp, synthetic construct
  misc_feature 1..18: note = Description of Artificial Sequence: Synthetic coding sequence
  source 1..18: mol_type = other DNA
atgatgtgttcaaggtag

SEQ ID NO: 239564 - DNA, 393 bp, synthetic construct
  misc_feature 1..393: note = Description of Artificial Sequence: Synthetic coding sequence
  source 1..393: mol_type = other DNA
atgatgtgctcccgcgtgccgagcgagcagtccagtgggacgagcctcctcccgaaagacggcgctcctttttcctgggactccctcgacgaggacggtctcgatgatagccttctggaactcagtgagggggaggaggacgacggcgatgtcaattacaccgaggaagagattgatgcattgcttaaagaggacgacccatcatatgaacagtcctccggggaagacgatggtggacatgtggagaagggagaacgcggatctcaaatcctgttggataccccaagagaaaagaacagcagctattctctgggacctgtagccgaaacgcccgacctctttaagctgccacaactgtctacctccagcgggcatggccctgctcatacttag

SEQ ID NO: 239565 - DNA, 1026 bp, synthetic construct
  misc_feature 1..1026: note = Description of Artificial Sequence: Synthetic coding sequence
  source 1..1026: mol_type = other DNA
atgatgtgctcacgggtacctagcgaacagagtagcggtacaagcctgctcccaaaggacggggcaccattcagctgggatagtctcgatgaggacgggctcgatgattctttacttgagttgagcgagggtgaggaggatgatggcgacgtgaattataccgaagaagaaattgacgctctcctaaaggaagatgatccttcttatgaacagtcttcaggcgaggatgacggtggacacgtggagaaaggggaaagaggaagccagattctgctcgacacccccagagagaagaattcgtcttactccctgggccctgtggctgaaacaccagatttatttaagcttccacagttgtcaacgtcctctggacacgggccagcccacaccaagccacttaatagacgcagtgtcctcgagaagaacttaattaaggttactgtcgccccttttaatccgacggtgtgcgatgcattgctagacaaggatgaaactgacagctctaaagatactgaaaagctctcctcccttggggaggaaatgagggaggatggcctaagtcctaacgagtcaaagctttgtaccgagagcgaaggtattagccctaacaattccgcgtggaacggccctcagctgagctcctctaacaacaattttcagcagacagtgtctgacaaaaacatgcctgattctgagaacccaacaagcgtgttctcacgcatttccgatcattccgagactcccaacatggaacttagctgtaggaacgggggttcccataagtcgagctgcgaaatgaggagtctggttgtgagtacttcctctaacaaggatgttctaaacaaggactcaggaaagatgaagggacacgagcgacgcttagggaaggttatccccgtcctgcaaacaaaaacgaggactaatgtacctacgttcagccaatccaatctggagcagcagaagcaactttatctgcgttctgtgattgcccacatagaagaccccgaagacactaaccagggctag

SEQ ID NO: 239566 - DNA, 516 bp, synthetic construct
  misc_feature 1..516: note = Description of Artificial Sequence: Synthetic coding sequence
  source 1..516: mol_type = other DNA
atgatgtgttcacgggttccaagcgaacagtctagcggcacctcactgttgcctaaagatggggctcccttttcgtgggacagcctcgacgaggacggtttggacgattctttactggaattgagtgagggagaggaagacgacggtgacgtgaattacaccgaagaagagatcgacgcgttactcaaggaggacgatccctcgtatgaacagagttcgggggaagacgatggcggtcatgtggaaaagggagaaaggggaagtcagattttgctcgatacccctagggaaaagaacagttcctatagcctcgggccagtggctgagactcccgatctctttaagttacctcaactcagtacaagcagtggccatggacctgcacatacgaaacccctcaatcggaggagcgtgctggaaaagaacctcatcaaagtcaccgttgcacccttcaatccaaccgtctgtgatgccctgctcgataaggatgaaaccgattccagcaaggatacgtag

SEQ ID NO: 239567 - DNA, 1764 bp, synthetic construct
  misc_feature 1..1764: note = Description of Artificial Sequence: Synthetic coding sequence
  source 1..1764: mol_type = other DNA
atggccacagccgcttacgagcagctaaagctccatattactcctgagaaattctacgtcgaagcgtgtgatgacggcgctgatgatgtgctgacaatcgatcgcgtctccaccgaagtcaccctggctgtgaagaaggacgttcctccctccgccgttacccgccctattttcggtattctgggaactatccacctggtggcgggtaattacctaatcgttatcacaaaaaagatcaaagtgggggagtttttctctcacgtcgtctggaaagccaccgatttcgacgttcttagttataaaaagacaatgttgcatcttactgatatacagcttcaagacaataagacatttctggcaatgcttaatcatgtgctgaacgtggacggcttctatttctccaccacgtacgatcttacccatactctgcaaagactgagcaatacatccccggagttccaggaaatgagtctgttagaacgagcagaccagaggtttgtctggaacgggcacttactacgcgaactctctgcacagcccgaagtgcatcgattcgcactgccggtcctgcacgggtttatcactatgcacagttgtagcattaatggaaaatattttgactggattcttatttccagaaggagctgctttagggcaggagttaggtattatgttagagggattgattccgagggacacgccgctaatttcgtagaaacagagcagatagttcattataatggctccaaagcctcatttgtgcagacacgcggaagcatacccgtgttctggtctcagagacctaacctaaagtataagccccttccacagatcagcaaggtggccaatcatatggacggatttcagagacattttgatagtcaggtgattatctatggaaagcaggtcattatcaacttgatcaatcagaagggtagcgaaaagcccctggagcagacatttgccaccatggtaagcagtctgggctccggaatgatgcgctatatcgcattcgacttccacaaagaatgtaagaatatgaggtgggatcgtctatctatcctgttggatcaggtagctgaaatgcaggacgaattatcatacttcctagtggactcggccggacaggtagttgcaaatcaggaaggcgtgttcagatctaattgtatggattgtctggaccgtaccaacgtgatacaatctcttctggcccgtagaagcctgcaggcacaactgcagcgactcggcgttttgcatgtggggcaaaaacttgaagagcaggacgaatttgaaaaaatctataagaatgcatgggccgataacgcaaacgcctgcgcaaagcagtacgctggcacaggcgcactaaagacagatttcacacgcactggcaaaagaacacatctggggctgataatggatggatggaattccatgattcgatactacaagaataatttctctgatggttttcgccaggactcgatcgacttattcttgggaaattatagcgtggatgagctcgagtcccactctccgctgagcgttcccagggactggaagtttctcgctttgccgatcatcatggtggtcgctttctctatgtgtattatttgtctattaatggctggagacacatggaccgagacacttgcctacgtccttttttggggagtggcctccattgggactttctttatcatactatacaacggtaaggattttgtggatgctcctaggctggtgcagaaggagaaaatcgactag

SEQ ID NO: 239568 - DNA, 1581 bp, synthetic construct
  misc_feature 1..1581: note = Description of Artificial Sequence: Synthetic coding sequence
  source 1..1581: mol_type = other DNA
atgtggaaattggttatgatggagcagatgacgtacttacccctgactgtctgcccccagcgactcccactacagagccggaaaatgttcctgttacagttaagtcaagatcagtacctcgtatattgggcccaatccatctggtggcagctgcaagacaataaaacctttctcgccatgctaaaccatgtactgaatgtcgatggattctatttttctactacctacgatctgacccatacgctgcagaggctgtctaatacctcgcctgaattccaggagatgagtttgttggaaagagctgaccagcggtttgtatggaacggacacctcctgcgcgagttgagtgctcaacccgaggtgcacagatttgccttgcctgtgctccacggatttattaccatgcactcatgttctatcaacggcaagtacttcgactggatactaatttcccgacgtagctgtttccgtgctggcgtccgctactacgtgcgaggaatcgacagtgaaggccacgctgccaattttgtggaaaccgaacagatagtccactataacggcagtaaagcttcctttgtgcagacccggggatccatccctgtgttctggagtcagcgccctaacttgaagtacaagccacttccacagatcagcaaagtggccaaccacatggatggtttccagcgacatttcgactcccaggtgattatctatggaaagcaggttatcatcaatctgataaaccagaaaggctctgagaagccactggagcagacatttgcaacaatggtctcatctctgggtagcggaatgatgaggtatatagctttcgatttccacaaagagtgcaagaatatgagatgggataggctgtcaatactactcgaccaggttgccgagatgcaggacgaactgagttactttcttgttgacagcgctggacaagtggtggccaaccaagagggagtgttcaggtctaactgtatggattgtcttgaccggaccaatgtgattcagtcattactagcgaggcgctctctgcaggctcagctgcagaggcttggggtgctgcatgtaggccagaagttagaagaacaggacgaattcgagaagatctataagaacgcctgggccgataacgcaaatgcttgcgcaaagcagtacgctgggacaggcgctcttaagacagactttaccagaacagggaagcgaacccaccttgggctgattatggatggatggaactctatgatccgttattataagaacaatttctccgatggtttcaggcaggactcaattgacctgttcctgggcaactacagtgtggacgaactcgagtcccattcccctctatcggtaccacgagactggaaattcctggcactgcccatcattatggtcgtagccttcagtatgtgtattatttgcctcctcatggcaggagatacgtggaccgaaacactggcatacgttcttttttggggagtcgcctccatcggaactttctttataattctctacaatggcaaggactttgtcgatgcacctcgtctggtgcagaaggaaaagatcgactag

SEQ ID NO: 239569 - DNA, 2901 bp, synthetic construct
  misc_feature 1..2901: note = Description of Artificial Sequence: Synthetic coding sequence
  source 1..2901: mol_type = other DNA
atgttctggaagttcgacctgaataccactagtcacgttgataagctactagacaaagaacacgtgacccttcaggagctcatggacgaggacgacattctacaggagtgcaaagcccagaatcagaaattgctggacttcctctgtagacaacaatgtatggaagagcttgtatccctgattactcaggaccctccgctggatatggaagagaaagttcggtttaagtatccaaacaccgcctgcgagttgctcacatgcgacgtgcctcagatttccgacagactcggaggggacgagagtttactttctctgctttacgactttttggaccacgaaccacccctaaaccccctgctggcgagctttttctcgaagaccataggtaatcttattgccaggaagaccgagcaggttataaccttcttaaagaaaaaggataaatttatctctctggtgctcaagcacatagggacatccgcattgatggacctgttgttgcgtctggtgagctgcgtagaacctgccggattgcggcaggacgtgctgcactggcttaatgaggagaaggtgatccagaggctggtcgaactgattcacccttcgcaggatgaggataggcaaagtaatgcatctcaaacactgtgcgacatagtgcgcctaggccgagaccagggctcgcagcttcaggaggcactggagccggaccccctcctcacggctctggagtcacaggattgcgtggaacaactcctgaagaatatgttcgatggagacaggacggagtcctgcttagttagcggcactcaggttctactaacactgctcgaaacccgtcgtgttgggacggagggccttgtagattctttctcacaggggctggagcgctcatacgccgtcagcagttctgtgctgcatggaattgaacctagattgaaagattttcaccagctgctgctcaatcccccaaaaaagaaggcaattctgactacaattggcgtacttgaagaacccttgggaaatgctcggctgcatggggcacgccttatggccgcacttttgcataccaacactccaagcataaaccaggagctctgtcgcttgaacaccatggatctattgctggacctgtttttcaagtatacttggaataacttccttcactttcaggtggaactgtgtattgcagcgattctttcacacgccgcacgcgaagagagaactgaggctagtgggagtgagagccgggtggaacctccacatgaaaacggtaaccggagcctggagaccccacaacccgcagcaagcctacccgataacaccatggtgacccatctgtttcaaaagtgctgtctggtacaacgcattctggaggcttgggaggccaacgaccatacacaggctgccggtgggatgaggcggggaaacatggggcatctgacacgtatcgccaacgctgtggtgcaaaatctggaaaggggcccagtacagacgcacatttcagaggttatcaggggactcccggcagattgccgcggaaggtgggagtctttcgtcgaggagacactgacagaaactaatcgtcggaacactgtggacctcgtttctacacaccacctgcactcctcgagcgaagacgaggacatagaaggcgcattcccaaacgaactcagtctgcagcaggccttcagcgactaccagatccaacagatgactgcgaacttcgtagatcagtttggctttaacgatgaagagtttgctgatcaggacgacaatattaatgcgccattcgaccggatcgcagaaattaatttcaacatagatgcagacgaggactctccctccgcagccctgttcgaagcttgctgctctgatcgcatccagcctttcgacgatgatgaggatgaggatatttgggaggactccgataccagatgtgcagcaagggtcatggctcgccctcgttttggagctcctcacgccagtgaaagctgcagcaagaatggacccgagagagggggtcaggatggaaaggcgagcctcgaagcgcatagggacgcccctggtgccggagctccccctgccccagggaagaaagaagcgccacccgtggaaggtgattccgagggtgccatgtggaccgccgtcttcgatgagccagccaacagcacacccaccgcccctggtgtcgtgagagacgttggctcatctgtctgggcagcaggcaccagtgctccagaggaaaaggggtgggcaaagttcacagatttccagccattctgctgcagcgagtctggaccccgatgcagttcccccgtggataccgagtgtagccacgccgagggatctaggtctcagggacccgaaaaggcttcccaggcctcttatttcgctgtctcccccgctagcccctgtgcatggaacgtttgtgtcacccggaaggctcccctgttagcatcggattcatctagcagcggtgggagccattctgaagacggggaccagaaggcggctagcgccatggatgccgtgtccaggggtccaggaagagaagctccacctctgccaaccgttgcaagaaccgaggaagctgtgggtcgagtaggctgcgctgactcaagacttctgtcccctgcttgtccggctccaaaagaggtgacagcagcgccagccgtagcagtacctcccgaggccacagtcgccatcacgacagcactgagcaaagccggacctgccatacctacaccggcagtgtcttccgccctcgcagtagcagttccgctgggaccgatcatggctgtgacagctgccccagccatggtggccactctcggtactgtgacaaaggatggcaaaactgacgctcccccagaaggagcagctctgaatggccctgtgtag

SEQ ID NO: 239570 - DNA, 2217 bp, synthetic construct
  misc_feature 1..2217: note = Description of Artificial Sequence: Synthetic coding sequence
  source 1..2217: mol_type = other DNA
atgtccagaagatcgcagagactaacaaggtactctcagggagacgatgatggcagcagcagttctggcggttctagcgtggctggtagccagagtactctgtttaaggacagcccattgagaacattgaagcgaaagtcaagcaatatgaagcggctcagccctgccccacagttgggcccaagcagcgacgcgcacaccagctactatagcgagagcttggtccacgagagttggtttcctcccagatcctcactagaagagcttcacggcgatgcgaattggggggaggatttgagagtaaggcgcagacgaggcactggcggaagcgagtcgtcacgggcatctgggctagttggcagaaaggcgacagaagattttctcgggagctcttctggttattcgtctgaagatgattacgttgaagattccgagggacgcggaagcaaagtgaccgagacagagcccgtgagctcatttcccgctggttatagcgacgtggatcaacagagcagctcatcaaggttacgctcagccgtatctcgcgctggctcgcttctttggatggttgcaacatctcccggtagactcttcagactcctgtattggtgggccggtactacctggtatagactcactaccgctgcaagcctactggatgtgtttgttctcacaagacggttcagctcactgaagacttttttgtggtttctgcttcctctcttgctactgacatgcctcacatatggagcctggtacttttacccttacggcctccagacgttccacccggctctggtaagctggtgggccgctaaggatagccggcgacctgatgaaggctgggaagcacgcgactcatcgccacattttcaggctgaacaaagggtgatgtccagggtccatagccttgaaaggcgtctggaggctctggccgctgagttttcctccaactggcaaaaagaggccatgaggctggaaagactggaactcagacagggagctccaggccaaggtgggggaggagggttgagccatgaagacacactggctctcctcgaaggcttggtatccaggagagaagcggctttgaaggaggatttcaggcgggaaactgcagcgaggatacaggaagagctgtccgccctgagggcagagcatcagcaggactcagaagatctgtttaaaaagattgtacgcgcttcgcaggaatcagaggccagaattcagcagttgaaatccgagtggcaatcaatgacccaggagtcctttcaggaatcaagcgtgaaagagctaaggaggcttgaggatcaacttgccggtctgcagcaggagttggctgcactcgcactcaagcagagtagcgttgcagaagaagtggggctcctaccccagcagattcaggccgtgcgagatgacgttgagtcccagttcccagcgtggatttcacagttcttagctcgcggaggaggcggaagagtgggactattgcagcgggaggagatgcaagctcagctccgggaactggagtcaaaaatcctgacgcacgtggccgaaatgcagggtaaatcagctcgtgaggctgctgcgtcgttgagcctgactttacaaaaagaaggggttattggcgtaaccgaagagcaggtgcatcacatcgtgaaacaggctctgcagcggtacagcgaagatcgcatcggcctagccgactacgccctggagtcagggggagcttccgttatttctactcgatgtagtgagacatacgagacaaagacagccctcctatctctttttggcatccccctgtggtaccactcccaaagtcctagggtaattttgcaacctgacgtgcatcctggcaactgctgggcctttcaaggtccacagggtttcgcggttgtcagactatcggcgcgaatccgcccaaccgcagtgacacttgagcatgttcccaaggcactgtcgcctaactctacaatatcctccgcccctaaagactttgcgatcttcggcttcgacgaagatttacagcaggagggaacacttctggggaagttcacgtacgatcaggatggcgagcctatccagacctttcactttcaagcgccaaccatggccacctatcaagtggtggaattacggatcctcactaattggggccacccagagtatacatgtatctatcgctttcgggttcatggcgaaccagcacactag

SEQ ID NO: 239571 - DNA, 2154 bp, synthetic construct
  misc_feature 1..2154: note = Description of Artificial Sequence: Synthetic coding sequence
  source 1..2154: mol_type = other DNA
atgtcccgacgatctcagagactgacacggtattcccagggcgacgacgatggctccagtagtagtgggggtagctcagtggccggatctcagtccaccctctttaaagactccccgttgcgcactctgaaaagaaagtcctccaacatgaagcgtctcagccctgcaccacagctgggccctagctcggacgcccacacatcatactatagtgaaagcttggtgcacgagagctggttccctcctaggtctagtctcgaagaactccacggggacgctaactggggagaagatctcagagtgaggcggaggagagggactggaggatccgagagttctcgcgcatctggattagtgggcaggaaagcaactgaagacttcctagggagctcgtccggatactctagtgaagacgattatgtgggatactcagacgtggaccagcagagctcctcatctagattgcgctcagccgtcagtcgggcaggttcgctgctgtggatggtcgcgaccagccccggaagactgttccggctgctctattggtgggccggaactacttggtatcgcctcacgacggcagcgagtctgctggacgtttttgtcttgacacgcagattctcgtccctcaaaacattcctctggttcctgctgcccttattgctactcacatgcctgacgtacggggcttggtatttctatccgtacggactgcagaccttccaccccgcactcgttagttggtgggcagcaaaagattcaagacgtcccgatgaaggttgggaggccagggattccagtccacacttccaggcggaacagcgggtgatgtccagagttcactcgctggagaggcgactggaggctctcgctgctgagttcagcagcaattggcagaaggaagccatgcgcctggagcgcctcgaattgcgccagggcgctcccggtcagggaggcggagggggactgagccatgaggatacactggctcttctggaaggcctagtcagccggagagaggctgccttgaaagaagactttaggagagaaaccgctgcaaggattcaggaggagctgtcagcgcttcgcgcagagcaccagcaggacagcgaagatctattcaagaagatcgtgcgggctagccaggagtccgaggcacggatccagcagctgaaatcagagtggcagtccatgacacaggagagctttcaggaatcctccgtgaaggagctgcgcaggctcgaggaccaacttgctggactgcagcaggaactggccgcacttgcccttaaacaatctagtgttgcagaggaggtcggcttgctgccccaacagatccaggcagtgcgggatgatgtggaatcacagttcccagcttggatctcccagttcctagctcgcggaggcggagggagagtcggattactgcagcgggaggaaatgcaggcgcagctgcgggagctggagtcaaaaatcctgacccacgtggcggagatgcaaggtaagagcgcacgcgaagccgctgcctcccttagtctgacgttgcagaaggaaggagtgatcggcgttaccgaggagcaagtccatcatatcgtcaagcaggccctgcaacggtacagcgaggatagaataggtttagcagactatgccctagaatcaggtggcgcatcagtgattagcactaggtgctctgagacatatgagaccaagacagccttgttatcccttttcggcattcccctgtggtaccattcacagtcgccacgcgttattctccagcccgatgtgcatcccggaaactgctgggcattccaaggccctcaggggtttgcagtggtaagacttagtgcacgcattaggcccacagctgtgacgttagaacatgtaccaaaggccctctctccaaactcgacgatctccagcgcccctaaggactttgcaatcttcgggtttgacgaagaccttcagcaggaggggacgttactgggaaaatttacatacgaccaggatggcgaaccgatccagacgtttcatttccaggcacccacaatggccacataccaggtggtggaacttcggattctgacgaactggggccacccagaatacacgtgcatataccgatttcgggtgcatggagagccggctcactag

SEQ ID NO: 239572 - DNA, 2154 bp, synthetic construct
  misc_feature 1..2154: note = Description of Artificial Sequence: Synthetic coding sequence
  source 1..2154: mol_type = other DNA
atgagcaggaggtcacagcgcctgactcggtattcccagggagacgacgacgggtcttcatccagtgggggtagcagtgtcgcgggaagccagtcaactttgttcaaagactccccgctgaggacccttaagcgcaaatctagcaatatgaaaagactcagtccagcccctcagctgggaccgagctctgatgctcatacctcatattactctgagtctctggtccacgagagctggttccctcctcgctccagcctggaggagctgcacggggacgccaattggggcgaggatctcagggttcggaggcgcagagggacgggtggctccgagtcttcccgagcatctggtctcgtcggtcggaaagcaacagaggacttccttggaagcagcagcgggtatagctcagaggacgactacgtcggctactctgatgtggaccagcagtcttcctcgagccgtctgcgaagcgcagtctctcgcgcaggcagcctgctgtggatggtggccaccagccccggtaggttattccgcttgctgtactggtgggccggaactacatggtaccggctgacaacagcagcatcactcctggatgtgttcgttctaaccaggcggtttagttccttaaagacttttttgtggttcctgctgccattgttattgctgacatgcctcacttatggtgcctggtacttttatccatacggtttgcagaccttccaccctgctcttgttagctggtgggccgctaaggacagcaggaggcccgacgagggttgggaggcccgagacagttctccacattttcaggctgaacaacgggttatgtcccgcgtccattcccttgagaggcgcctggaggcgttagcagccgagtttagcagcaactggcagaaggaagctatgcgcctagagcggctcgagctgagacagggcgctccgggtcaggggggtgggggtggcttgtcccacgaagacacacttgcattgctagagggactggtctcccggcgagaagcagcactcaaagaggactttagacgtgagaccgcagcgagaatccaagaggaattaagtgcccttcgcgctgagcaccagcaggacagtgaagacttgttcaagaaaattgtacgggcatcccaggaatcagaggctaggatccaacagcttaaatccgagtggcagtccatgacccaggaatcattccaggagagctccgtcaaagagttacgtagactcgaagaccagctcgccggactccagcaagagctcgccgctctagcactgaagcaatcatccgtcgcagaagaggtgggcctgctgccccaacaaatacaagccgttcgggatgatgtcgagtcgcagttccccgcatggattagccaattccttgctaggggcggaggtgggcgtgtgggactgctgcagcgagaagaaatgcaggcacagcttcgcgaacttgaatccaaaatcctgacccatgttgccgagatgcaaggaaagtctgccagggaagctgccgctagcctgtcactgacactgcaaaaggagggcgtgatcggagtgaccgaagagcaggtacaccatatagtgaagcaagctctccagagatatagcgaggatcgtattggcctcgccgattatgccctcgaatccggtggagcctccgttatatctactcgctgtagcgaaacatacgagaccaagactgccttgctttcactattcggaattcccctgtggtaccacagccagtccccacgagtgatcctgcaaccagacgtgcatcccggaaactgctgggccttccaagggcctcagggtttcgccgtcgtgcgcctaagcgctcgtatacgtccgacggctgtgacattggagcatgtgcccaaggcgctcagtccaaacagcacaatttccagcgcccctaaggacttcgctatcttcggtttcgatgaggacctccagcaggagggaaccttgttggggaagttcacttatgaccaggacggagagccaattcaaacctttcactttcaagctcctacaatggccacctatcaggtcgtggaactccggatattgaccaactggggtcatccagagtatacttgtatatataggtttagggtgcatggggagccagctcactag

SEQ ID NO: 239573 - DNA, 2121 bp, synthetic construct
  misc_feature 1..2121: note = Description of Artificial Sequence: Synthetic coding sequence
  source 1..2121: mol_type = other DNA
atggtgagccccccttccgctggacaacgattgcgcggagtccctgtctgggcggctggggctttccggttctcttcaggagaagaatccacaagtcacctgattatgtcaaggcgctcccagcgcctgactcgatactcccagggagatgatgacggctcttcatcttcgggtggaagcagtgtggcgggttctcaaagtaccctatttaaggattcgcccctgagaacacttaagcgaaaatcgagcaatatgaagcgtctatcacctgcaccccagctgggcccttccagtgatgcacatacatcatactattctgagtcgcttgtccacgagagctggttccctccacgctctagcctggaagaactccatggcgatgctaactgggggtactccgatgtagatcagcagtccagttccagtagactccggtctgccgtcagtagggcaggaagcctcctgtggatggtcgctacctcgccgggaagactttttcggttgctgtactggtgggctggcactacctggtaccgcttgaccaccgctgcatccctgctggatgtgttcgttttgactaggcgcttctcttcgttgaaaacttttttatggttcctgctgcctcttttgttattgacatgccttacttatggggcttggtacttctatccgtacggactacagacgttccaccctgccctggtgtcctggtgggctgctaaagactctcgtaggcccgatgaaggatgggaggcgagggattcctccccccactttcaggccgagcagagagttatgtcccgggtgcacagcctggaacggagactcgaagctctggctgctgagttcagttccaattggcagaaggaagcgatgagactcgaaagacttgagctgcggcaaggggcacctggacagggagggggtggcggtctgtcacacgaggataccttagctttgttagaggggcttgtgagccgcagggaggccgctttgaaagaagatttcaggagggaaaccgcagcccgtatccaagaagagctgtccgccctgcgggctgaacaccagcaagactctgaggacctgttcaaaaagatcgtgcgtgcttcccaggagagtgaggcacgaattcagcagctgaagagtgagtggcagagtatgacccaggagtcatttcaagagagtagtgttaaggaacttcgcagactggaggaccagctggcaggactccagcaggagttagccgctctagctctgaaacagagctccgtggccgaagaggtaggtctgttgcctcagcagatacaggccgtaagggacgatgtagagagccagttcccagcctggatttctcaatttctggctcgaggtggtggaggcagagtcggattgctacaacgagaagagatgcaggctcagctacgggagctggagtccaaaatattgacccatgtcgccgagatgcaaggaaagtcagctcgtgaagccgcagcttccctgagcttgactttgcagaaggagggggttattggcgtgacagaagaacaagtgcatcatatcgttaaacaggccctgcagaggtacagcgaagaccgtattggtctggccgactacgcactcgagagcggcggtgctagtgtcatttctactagatgcagtgaaacatacgagaccaaaacagctcttctcagtctgttcgggatcccactctggtatcacagccagagcccaagagtgattctccagcccgacgtgcaccccggaaattgctgggctttccaggggccacagggtttcgcggtggtgcggctgtccgcacgtataaggcctacagcggtgaccctggaacatgtgccgaaggctctcagtcctaacagcactatttcctccgccccaaaagactttgcaatcttcggtttcgatgaagacctgcagcaggagggcacacttctggggaaatttacatacgatcaagacggcgagccaatccaaactttccattttcaggctcctactatggctacgtaccaggtggttgagttgcgcatacttacaaactggggtcatccggaatacacctgcatttacagatttcgagtgcacggagagccagcccattag

SEQ ID NO: 239574 - DNA, 375 bp, synthetic construct
  misc_feature 1..375: note = Description of Artificial Sequence: Synthetic coding sequence
  source 1..375: mol_type = other DNA
atgtctagaagatctcagagactcactaggtattcacagggtgatgatgacggctcctccagctctggagggagcagcgtggcagggtcacagagcactttgtttaaggattctcccctgagaacgctcaagcgaaagtcatctaatatgaaaagactctctcccgcaccacagctgggtcccagcagtgacgcccatactagctattatagtgaaagcttagtgcacgaatcttggtttccacccaggtcttccctggaggaacttcatggcgacgcaaattgggaccctacctttcagaagctcctggaggcccagaaaagcccatggttctttcccgcacaggtccgaacctgcgggtgcggcggtggctag

SEQ ID NO: 239575 - DNA, 384 bp, synthetic construct
  misc_feature 1..384: note = Description of Artificial Sequence: Synthetic coding sequence
  source 1..384: mol_type = other DNA
atgagcaggagatcccagagactaacgaggtactcccaaggcgatgacgacggctcatcttcaagcggcggttcttccgtggcaggaagtcagtctacactcttcaaagattctccccttaggacactcaagcgaaaatcaagcaatatgaagcgcttgtctcctgcccctcagctcggaccttcatccgacgcacacacatcctattactctgagagtctggttcacgagagctggtttcctccaagaagctccctagaagagctgcatggcgatgcgaattggggctactcagacgttgatcaacagtcctcttcttcacgattaaggtctgcagtgagcagggctggcagcctgctgtggatggttgctacttccccttag

SEQ ID NO: 239576 - DNA, 333 bp, synthetic construct
  misc_feature 1..333: note = Description of Artificial Sequence: Synthetic coding sequence
  source 1..333: mol_type = other DNA
atgagtcgcaggagccagcgcctcactaggtacagtcaaggggatgacgatggctctagttcgtctggaggctcctcggtggcgggttcccaaagcacactattcaaggatagtcccctgaggacactgaaaaggaagtcaagcaatatgaagagactcagcccagctcctcagttgggcccatctagtgatgcgcacactagttattattccgaatcactcgtccacgagtcctggtttcccccacgctccagcttagaggagcttcacggggacgccaattggggtgaagatttgcgagtcagaaggaggcgtggtaccggaggttcttag

SEQ ID NO: 239577 - DNA, 675 bp, synthetic construct
  misc_feature 1..675: note = Description of Artificial Sequence: Synthetic coding sequence
  source 1..675: mol_type = other DNA
atgtcccgacgtagccaacgtctgactcggtacagccagggggacgacgatggttcaagcagtagcggtggctcttctgttgccggatcccagagcactctcttcaaagacagccccctgagaaccttaaaacgcaagtcttcaaatatgaaacgcctctctccagctccccagctgggaccttcttctgacgcacatacatcttactactctgagagcctcgttcatgaatcttggttccctcctagatctagccttgaagagctacacggggacgccaattggggatattcagacgttgaccagcagagctcaagtagcagactgaggtctgctgtgtcacgggctggttccttgttatggatggtggccactagccccggacgtctgttccggttgctctactggtgggcaggaaccacatggtaccggctgactaccgccgcatcacttcttgatgttttcgtgttaaccaggcgcttctcatccctgaagacttttctctggtttctccttcctcttctcctccttacatgcctgacctacggggcttggtacttctacccctatggactgcagactttccatccagcactcgtgtcctggtgggcagcaaaagattcaaggcggcctgatgaaggttgggaggccagggactccagccctcacttctag

SEQ ID NO: 239578 - DNA, 306 bp, synthetic construct
  misc_feature 1..306: note = Description of Artificial Sequence: Synthetic coding sequence
  source 1..306: mol_type = other DNA
atgagcagacgttcacagcggctaacgagatattcacagggcgacgacgatggatctagctctagtggcggttcatctgtggcagggagtcagtccacactcttcaaagatagtccactccgcacccttaagagaaagagtagcaatatgaaacggcttagtccagctccacaattaggtccatcctcagatgcccatacatcctactactctgagagcctagtccacgagtcctggttccccccaaggtcatcacttgaggaactgcacggcgacgctaactggggcgaggatctgcgcgtatag

SEQ ID NO: 239579 - DNA, 435 bp, synthetic construct
  misc_feature 1..435: note = Description of Artificial Sequence: Synthetic coding sequence
  source 1..435: mol_type = other DNA
atgtcgcgacggtcccagagacttacacgctatagccagggtgatgacgacggctcttccagttcgggtgggagcagtgtggccggtagccaatcaacattgtttaaggactcacccctcagaacactgaagaggaagtcctccaacatgaagagactttcacccgcacctcagctagggcctagctcggatgcccacaccagctactactctgaatcactggtacacgaatcatggtttcctcctagaagctccttggaggagctgcatggcgatgccaactggggcgaggatttgcgtgtgaggcggagacggggaaccggcggatcagaatcatcccgggcttcaggcttggtgggacggaaggccaccgaagattttctcggctcaagcagtgggtacagtagtgaagacgattacgtgggtagacggtag

SEQ ID NO: 239580 - DNA, 618 bp, synthetic construct
  misc_feature 1..618: note = Description of Artificial Sequence: Synthetic coding sequence
  source 1..618: mol_type = other DNA
atgagccgtcgatctcagcggcttacacgctatagtcagggcgatgatgacggttcaagcagcagcggagggagttcagttgcaggtagccaatccacactctttaaggattctcccctgcggactctaaagcggaagtctagtaacatgaaaagactcagtcccgcaccgcagctgggccctagctccgatgcacacacctcctattactccgagtccctggtgcacgaatcttggttcccacccagaagcagcctggaggagctccatggcgatgccaactggggggaagatctgagggtccgcagaagaaggggaaccggcggaagcgagtcttctcgggcaagtggactggttggcagaaaggctaccgaagatttccttggcagcagctccggatactcctcagaagatgactacgtcgggtattctgacgtggatcagcagtctagcagttctcgccttaggagtgccgtgagccgagctggctccctcctatggatggtagctactagcccgggacgcctgttccgcctactctactggtgggctgggactacatggtaccgattaactaccgccgcttcactcctggatgttttcgttctcacccgttag

SEQ ID NO: 239581 - DNA, 1140 bp, synthetic construct
  misc_feature 1..1140: note = Description of Artificial Sequence: Synthetic coding sequence
  source 1..1140: mol_type = other DNA
atgccaaggtctagccgttcccccggagaccccggtgctctcctggaagatgtcgcccataatccgagaccccgaaggatcgcccaacgaggccgtaatacatcccgcatggcagaggacacatctcccaacatgaatgacaacatcctgctgcctgtgcggaataacgaccaggcacttggcctgactcaatgtatgctgggctgtgtgagctggttcacgtgtttcgcctgcagtctccgaacccaagcacagcaagtgctgttcaatacgtgtcggtgcaagttgctttgtcaaaaactgatggaaaagacaggcatcctgctcctttgcgcttttgggttttggatgtttagcattcacttaccatctaagatgaaagtgtggcaagacgattcaataaacggccctcttcaatccctcagactgtaccaagagaaagtccggcaccacagcggcgagatccaggacctgagaggaagcatgaaccagctgatcgcgaaacttcaggaaatggaggcaatgagcgacgagcagaagatggcccaaaagattatgaaaatgatccatggcgactatatcgaaaagcccgacttcgcactgaaaagtataggagcttcaatcgattttgagcacacatctgtgacctataatcatgagaaggcccacagctattggaactggatccagctgtggaattatgctcaacctccagatgttatcctggagccaaacgttacccctggcaattgctgggcatttgagggcgacagagggcaagttactattcagcttgcccagaaagtgtacttgtccaacctcactcttcaacacattcccaagaccatctctttgtccggatccctcgatactgcgcctaaggatttcgtgatttatgggatggaggggagcccaaaggaagaggtattcctgggtgcctttcagttccagcccgagaatattatccagatgttcccactacagaaccaacctgccagagcattttccgcagtgaaagttaaaataagcagtaactggggcaatcccggattcacctgcctatacagggtaagagtgcatgggagtgtagctccacctagagagcaacctcaccagaacccatatccaaagcgagattag

SEQ ID NO: 239582 - DNA, 369 bp, synthetic construct
  misc_feature 1..369: note = Description of Artificial Sequence: Synthetic coding sequence
  source 1..369: mol_type = other DNA
atgcccaggtcttcaagatcacccggagaccccggagccctgttagaagacgtggcccacaaccctcgccctcgtagaatagctcagcgaggtcggaacacaagccgcatggccgaagatactagtcccaatatgaacgacaatattcttttacctgtccgaaacaacgaccaggctctggggctaacgcagtgtatgcttggatgcgtctatgcctcatgttgtgccaggtcgtcatggagaaggcaggctttctgtagcagcgtactgtcggtgtgtcctagagccctccccagtccaaggtggcgatatccttgggcacttgccctgatcatcggccactgggcgcgtcattgcactgcgacctag
